United States Patent Application Publication US 2005/0228172 A9 - sequence listing, part 71

SEQ ID NO: 310271 - DNA, 519 bp, Homo sapiens
agccctatctctttcccccatacctttccatggccccagtggagtgagggggtgaggaaaaggccacctctgatgacwcccttgtcgctgtgaactcctggaggtcatctccctcacttcctacctgcaggtgcagcactttttaaggaccctctcctctgtccctaagaggttgcagcagccactcctctgtcacggcacctgccgctgccagtggtgtggagtagtgccatgtgcacctctgctccctggatttgagctcatgataccattttctacaaatgtgcccttcctccaaagcagaagtgcctgcaggaaaggtgcttctacccaggtgcccagaggctcctaccatggacggtgacccaggcgctgcaggacacctgccccaaggcattctcagctaggcaggtgtaggtgccatggtcctccggcagggcatcctggatgtggagctcagccacgccggcctcgcaggtggagcgagcgtactggatgggctgccctgtggaggaagca

SEQ ID NO: 310272 - DNA, 519 bp, Homo sapiens
agccctatctctttcccccatacctttccatggccccagtggagtgagggggtgaggaaaaggccacctctgatgacacccttgtsgctgtgaactcctggaggtcatctccctcacttcctacctgcaggtgcagcactttttaaggaccctctcctctgtccctaagaggttgcagcagccactcctctgtcacggcacctgccgctgccagtggtgtggagtagtgccatgtgcacctctgctccctggatttgagctcatgataccattttctacaaatgtgcccttcctccaaagcagaagtgcctgcaggaaaggtgcttctacccaggtgcccagaggctcctaccatggacggtgacccaggcgctgcaggacacctgccccaaggcattctcagctaggcaggtgtaggtgccatggtcctccggcagggcatcctggatgtggagctcagccacgccggcctcgcaggtggagcgagcgtactggatgggctgccctgtggaggaagca

SEQ ID NO: 310273 - DNA, 519 bp, Homo sapiens
agccctatctctttcccccatacctttccatggccccagtggagtgagggggtgaggaaaaggccacctctgatgacacccttgtcgctgtgaactcctggaggtcatctccctcacttcctacctgcaggtgcagcactttttaaggaccctctcctctgtccctaagaggttgcagcagccactcctctgtcacggcacctgccgctgccagtggtgtggagtagtgccatgtgcacctctgctccctggatttgagctcatgataccattttctacaaatgtgcccttcctccaaagcagaagtgcctgcaggaaaggtgcttctacccaggtgcccagagrctcctaccatggacggtgacccaggcgctgcaggacacctgccccaaggcattctcagctaggcaggtgtaggtgccatggtcctccggcagggcatcctggatgtggagctcagccacgccggcctcgcaggtggagcgagcgtactggatgggctgccctgtggaggaagca

SEQ ID NO: 310274 - DNA, 583 bp, Homo sapiens
ttgggcattctgtgttaaacagtctccaaatccacatcctcaacttcacagaattctgagcctggagagacttttacacggtcatctggcccatagcccagcctcaggcaaaacggagctttcccaggctgaacatggggtgcccagctccacttagatgtctccagaaacaacgattcaattttccactgtagatatttatcaaaaagcaattctgcatcccccacccactgttgcagttaggtgcrtttcttctatgcaattaggtgtattttagggttcacagaaaagataaatatagggaactaaaaatgactcggctccttttttccagagtcccttacatgtgacatgttccaggtaacataaagtcctgcatggagacaggagtgcatgcaatgagcttcagtggtttccttaatgctctatgttcctgggagtttatcattctgggatgtgacttttcatttccaggaaaaaaaaaatctcattactgaagagtctgtcctcggagcaggaatgtgtccagctgccatataggaagcaactgtcagtttcttcccttgccaggccccagggtcct

SEQ ID NO: 310275 - DNA, 624 bp, Homo sapiens
ggtaactctgaaaaccgacagtacctatggtacttgtgaaaatcagccacttagcaaggggcagtatgggttcagagctcctgaaaaaccccatgygtaagagaatggtcactatttgccctgtctggcagctccttcaacgactccattttccgggttgtctttgtttaatccgactcaaagtttactctgtgtggatggccctgtctccaggatgtttgttaaaatcaatcagtagcaattgtttaacattatagctacttgagacagcaatatcattcggagctaacaagagcctgaccaaaaaacttcaaaggaaaaactggggaatgagatgtccaggactttgaaaagctctgacagattcctgagaactgaggagcccaaatggttgtgcagggctgtgagcctgcccaggaaagatgtaagaaggccctcctgtctcacctctggctgacttggagctttggtgcaagcagaaagtaaaggctaaagcagagctgtaaactgctggccggagcactgaagatgggcgtaacacacacacagagccccttggcaaaggctgggaaaagtattagttcaaggcatttaaggaactctccatccaatcaattaggtgat

SEQ ID NO: 310276 - DNA, 624 bp, Homo sapiens
ggtaactctgaaaaccgacagtacctatggtacttgtgaaaatcagccacttagcaaggggcagtatgggttcagagctcctgaaaaaccccatgcgtaagagaatggtcactatttgccctgtctggcagctccttcaacgactccattttccgggttgtctttgtttaatccgactcaaagtttactctgtgtggatggccctgtctccaggatgtttgttaaaatcaatcagtagcaattgtttaacattatagctacttgagacagcaatatcattcggagctaacaagagcctgaccaaaaaacttcaaaggaaaaactggggaatgagatgtccaggactttgaaaagctctgacagattcctgagaactgaggagcccaaatggwtgtgcagggctgtgagcctgcccaggaaagatgtaagaaggccctcctgtctcacctctggctgacttggagctttggtgcaagcagaaagtaaaggctaaagcagagctgtaaactgctggccggagcactgaagatgggcgtaacacacacacagagccccttggcaaaggctgggaaaagtattagttcaaggcatttaaggaactctccatccaatcaattaggtgat

SEQ ID NO: 310277 - DNA, 539 bp, Homo sapiens
gttagtcagctgttctaggccagatttctcagatttctgttcttacctgttctgcccaactacaacagctggtgtcctgctggcctttgcctgagtcacaccctcaggtcatgcatccccaccttttacaggcagggttgttagcatgagagccctgctctgtgctctcagtgaaggatgaagggagaggagaagagcaccctaggatgctggtagaactttcagttctcttgccaacaaattgaatgaagttagargctctccgtaagttttattcagtacagacctggtgtctgatgctacagttaagagactagatttagaaggagggtggtgcacctgttttggtgggaggaatgaatgggatgtaaggagagatgatggtctgtgcatctcagacaaaggaacttaaaaagaggagtcttcaaaagaatgccccctgcaaaaaaaaaaaaaaaaaaaaaaggaggcttagaaatatctcaaatgaacagaaatttgaattacaatccagaagatgaaaatcaacaggaataata

SEQ ID NO: 310278 - DNA, 512 bp, Homo sapiens
aatatggcttctcttcagttcagcagatgtgtgccccacgtctgggccagtcatcagggattttgtggtaagaamtgatcgtcagcctggatctgtccccacctgcacttggaacctgggacagggacactttgggtgtattccaggtggtggcagttgttgtccaatggccttgactggagtccgaccacctagctcttctcaactgcaacgttttcccagcctggttcttcagatttttctatggattttggaaactccccctgaaactccaccatctttccaacaaatcctttctctgtttacaagagccagatttagcttctcttgctttcaatcaagaactcagatatgtacttataataattccacttttggagtcatttgtaaggaaatctttaggaattcgggcatagatttcagtacacatagactcatcaccgggcatcataaaagatttagaaactatccaaatggccagcagtagggagatagttatgtaagtcatacat

SEQ ID NO: 310279 - DNA, 512 bp, Homo sapiens
aatatggcttctcttcagttcagcagatgtgtgccccacgtctgggccagtcatcagggattttgtggtaagaaatgatcgtcagcctggatctgtccccacctgcacttggaacctgggacagggacactttgggtgtattccaggtggtggcagttgttgtccaatggccttgactggagtccgaccacctagctcttctcaactgcaacgttttcccagcctggttcttcagatttttctatggattttggaaactccccctgaaactccaccatctttccaacaaatcctttctctgtttacaagagccagatttagcttctcttgctttcaatcaagaactcagatatgtacttataataattccacttttggagtcatttgtaaggaaatctttaggaattcrggcatagatttcagtacacatagactcatcaccgggcatcataaaagatttagaaactatccaaatggccagcagtagggagatagttatgtaagtcatacat

SEQ ID NO: 310280 - DNA, 509 bp, Homo sapiens
acagttgtggtatgcggaactgcagagtgaatataaaaattgtctcggagaggatgttgcaaaccaagatggagaaatgtgtcagatcagcaaaggagcctggagaagttagggtctcctgacccctggaacctcagccacctggtccagttttgctaacaggaagcaggggccagctgggagtgtggtgatgagcaaaatagacattaagttcaagttggggcatcttgagtaygaagagacaaagggagtcctttctgagcagtagtaaatggaggctatagaggctgtgacagctagactgaaacagaagatgagagtagagactggctgagtaaggatgagagcagagaggaagaagagctgagaaccaagttgtcatcaagacggatcaaggcttgtgtgtaggaggcaggcaattggcttgccctgcagaatggttggctttttgcccattgccaaggtacataatgaacgcgaggaccccccattagatgacagcaccaaca

SEQ ID NO: 310281 - DNA, 586 bp, Homo sapiens
tcactataccactgtaggatgactgtagttaacaataacatattacatgggttaaataggtagatggagtgtattgaatgctcctgaaacaaataaattataatttttttttgagacagggtcttgctctgtttcccaggctggggtgcagtgacacagtcatggttcactgcagcctcgatctactgggctcaaacaatcctgccacctcagccttccagtgtgctaggattacaggtgtgggccactgcctctagacaataaatatttttttatgatggatatgttggatatgctaattactctgatctgataactatacattatgtgtattgaaatatcactgtgyatcccgtaaatatgtacaattattaaatgtcaattccaaatgtccataaataaagtttaaaaaaagagatatgagctggggttttcattggtaaacaccaaatatgggtaatgcagggtttttcacccttagcaccttgaatcctgagcctttcttaaacttctatgaggcaatctggcttcttatcagcaccaactttgaatttcctcctctctgctaaataatttacgattcttc

SEQ ID NO: 310282 - DNA, 578 bp, Homo sapiens
agaaaagaaaaactactgcatctctaatgtgggacttctgaagtagaaggacattatgtttcttctccattgacagtgccatttgactctgctgttttaattccaaggacaatttgaccagatcactgggaaacagtagatttttgagaaataatcgactgatcctggctaatgttgttcacacataaaatatatcgcaaaggcacaaacctggttggcgaatgacatctttttagtgatattgaaaactaaaaattgacatgaaaaattagattcatagaagttatcagcacaatataaatttccagaaatgagaccttttacttcgtattttatatctgtctctgtccaatgcgatccagataaaattggaattattaaaaatgagggcgacaaaacaaaattcaaagtggcaaaaatataatcagtagtttcatatggacaataacttgaatgatgaatcaaacctttyttggaaattgtacgcaaaggagaactgatcccagtgaaaataattttggtaaaataaaaatggaagtacaaagcaaacattgaaatggtttcactgcagtgtagag

SEQ ID NO: 310283 - DNA, 584 bp, Homo sapiens
agtctgaagtggtaaagtgtgctggtaatgacagcaactctatatggactgggctaggtgtttcatgtgtgttaacttgttaaaccctcatcattctaacgattaggtaatattaacgacatttgtgtcaactgaatctgtaagggaccaagggaattatttagaatcacktagttggcaaatggcctaacaaacacttgaaacctggtgtactttatttcacttcccaagcctcctcctatgccacgttccctccttggggattcaattggtggtgacaggaagcatggatgggacaacatttgaatcattacagctcttatgcttgaatatgaaaatgcagatttgtcattgtgtgactcaagcagagattcagtgataaacagagatacattcccctttcaccatgtgcttcaaacagtgtttctcccaagtctgcaacctctttaggatgaattgctcggaatattgagacaaagaaagtgttccatttttactgtacgatcaagtctgacttcatctctgtcctcatttaattattccccattagataactcaaagaggtgtgaggtgttcctcaatga

SEQ ID NO: 310284 - DNA, 584 bp, Homo sapiens
agtctgaagtggtaaagtgtgctggtaatgacagcaactctatatggactgggctaggtgtttcatgtgtgttaacttgttaaaccctcatcattctaacgattaggtaatattaacgacatttgtgtcaactgaatctgtaagggaccaagggaattatttagaatcacttagttrgcaaatggcctaacaaacacttgaaacctggtgtactttatttcacttcccaagcctcctcctatgccacgttccctccttggggattcaattggtggtgacaggaagcatggatgggacaacatttgaatcattacagctcttatgcttgaatatgaaaatgcagatttgtcattgtgtgactcaagcagagattcagtgataaacagagatacattcccctttcaccatgtgcttcaaacagtgtttctcccaagtctgcaacctctttaggatgaattgctcggaatattgagacaaagaaagtgttccatttttactgtacgatcaagtctgacttcatctctgtcctcatttaattattccccattagataactcaaagaggtgtgaggtgttcctcaatga

SEQ ID NO: 310285 - DNA, 584 bp, Homo sapiens
agtctgaagtggtaaagtgtgctggtaatgacagcaactctatatggactgggctaggtgtttcatgtgtgttaacttgttaaaccctcatcattctaacgattaggtaatattaacgacatttgtgtcaactgaatctgtaagggaccaagggaattatttagaatcacttagttggcaaatggcctaacaaacacttgaaamctggtgtactttatttcacttcccaagcctcctcctatgccacgttccctccttggggattcaattggtggtgacaggaagcatggatgggacaacatttgaatcattacagctcttatgcttgaatatgaaaatgcagatttgtcattgtgtgactcaagcagagattcagtgataaacagagatacattcccctttcaccatgtgcttcaaacagtgtttctcccaagtctgcaacctctttaggatgaattgctcggaatattgagacaaagaaagtgttccatttttactgtacgatcaagtctgacttcatctctgtcctcatttaattattccccattagataactcaaagaggtgtgaggtgttcctcaatga

SEQ ID NO: 310286 - DNA, 556 bp, Homo sapiens
aacaggtggatccgggtggtgtgctgttttactgatgaccattacacagaattttaacagaaggaatgtaaagcagtggttctcaaactggagttcccagatgagcagcgtctgcatcatctggaaacctgataaagcagcaaattctcaggccctaccccagacccactgaatcagaaacttgggggtctgggggargatggccatctgtattttaacaatctcccttcaggagattctgaggctggctcaagtttgaactacaggtagttggttcaacaggtgttggtggactgacaaacaaaaagagactccgaggtaactccaagatggtaatgtcagaaagcagctaccacccctagggcttgggggaaccaacaaaagagtttggcattgccagaacctagaatcttgaggagaggccccagagcattgtgtctcagaccttgaggacttggcactgggacaccatgaggggtttctgggtgtgggaaagggctggaaactccccagttgctgccaccagggagaactacaagtgaagtggaaggtgtgg

SEQ ID NO: 310287 - DNA, 496 bp, Homo sapiens
tgtaatattgttgcatgaaacccatgcaagtcagccaatttgctctttctcatcttgtcatttataaattgatgctgagaagtctttttcccaaggtttttagtaataccttcatcatcccccatagttcattttgggcagtgattcgcttctttgactgtacattagaatcatctgaagaactttctaaaactactgatctcaggtctcacacaacactaattaaattatagtctctggtggggtagggcttgggcactgctattttaccttaagctctctggagtcmttctaatttgtagccagtgctaagggttgcaatataagtgaatatatttcacgtatttgtcaaacattgactgagtgcccattatgtgccagccattataataggcactggtgatcccacagtgaatcaggcacacaatgctgtcttcacggagcttgttgtctagtgggagagtcaaacaaaagtgtatatcaataattaagtgat

SEQ ID NO: 310288 - DNA, 445 bp, Homo sapiens
tattctgctagtttctcagcatagaacttagaaaagaggccacagaaggaaaagagaagtaatgttagacagctgatgttggcaatgggcaaagaatttcattctcatatgcagggcagtggctaaaggggcagtgttgtgaggaatcacattccaggtcattcatgtccagggtgtggtaggaggactgtgtttcatttattttgtacatggcccagctatgaccttgtgcaaggaaatgcttaatcattttctatcacagttgcaaagagattcttatcctactcagaatgtaygtcttctcttctgtttcatttacagtcacaacccaagtccttgctttgacctccaaagcaccacttgatgtatccacttcagaaacacacacagacagctcacctctttctatcccttaccttcctcccctcttcactcaaaccaccta

SEQ ID NO: 310289 - DNA, 608 bp, Homo sapiens
acctctccagaagagagacagagcagaaccctctaaaygtggggcacaaagcaggagcccctcttgctggattcaaagggtcatactggaagagtgtaggttgagtcttattctcacatcactcatatcacttacacacttcttttatagccttagcagccatgccacaaagagaaactcttcatgcatatcttttggtccataagtcataaatagttatccttgatcccatgtcttttttagagccatggacagagagaagcaaaaatataccaagttcacactgagttgtctcccttcatatctcttagcagtcactgaaaggttatgagactcaggctgggtttctatcctctgtccctgaaacgacaacgttgacctcgtgatcaaccctagaatccagagcaagatctcagactgtcctctctactaccagacagcacactttgttttgggggctgtgtgcttgaaatattagctatggcaaaaggctttgagtcttatgacaccccaagtaacttttactttaggaatttgaaatacagccttgctgtaatgctgtctccttaacaaagcagtacctttgaaatatttaacaacttgaaaag

SEQ ID NO: 310290 - DNA, 608 bp, Homo sapiens
acctctccagaagagagacagagcagaaccctctaaatgtggggcacaaagcaggagcccctcttgctggattcaaagggtcatactggaagagtgtaggttgagtcttattctcacatcactcatatcacttacacacttcttttatagccttagcagccatgccacaaagagaaactcttcatgcrtatcttttggtccataagtcataaatagttatccttgatcccatgtcttttttagagccatggacagagagaagcaaaaatataccaagttcacactgagttgtctcccttcatatctcttagcagtcactgaaaggttatgagactcaggctgggtttctatcctctgtccctgaaacgacaacgttgacctcgtgatcaaccctagaatccagagcaagatctcagactgtcctctctactaccagacagcacactttgttttgggggctgtgtgcttgaaatattagctatggcaaaaggctttgagtcttatgacaccccaagtaacttttactttaggaatttgaaatacagccttgctgtaatgctgtctccttaacaaagcagtacctttgaaatatttaacaacttgaaaag

SEQ ID NO: 310291 - DNA, 608 bp, Homo sapiens
acctctccagaagagagacagagcagaaccctctaaatgtggggcacaaagcaggagcccctcttgctggattcaaagggtcatactggaagagtgtaggttgagtcttattctcacatcactcatatcacttacacacttcttttatagccttagcagccatgccacaaagagaaactcttcatgcatatcttttggtccataagtcataaatagttatccttgatcccatgtcttttttagagccatggacagagagaagcaaaaatatmccaagttcacactgagttgtctcccttcatatctcttagcagtcactgaaaggttatgagactcaggctgggtttctatcctctgtccctgaaacgacaacgttgacctcgtgatcaaccctagaatccagagcaagatctcagactgtcctctctactaccagacagcacactttgttttgggggctgtgtgcttgaaatattagctatggcaaaaggctttgagtcttatgacaccccaagtaacttttactttaggaatttgaaatacagccttgctgtaatgctgtctccttaacaaagcagtacctttgaaatatttaacaacttgaaaag

SEQ ID NO: 310292 - DNA, 608 bp, Homo sapiens
acctctccagaagagagacagagcagaaccctctaaatgtggggcacaaagcaggagcccctcttgctggattcaaagggtcatactggaagagtgtaggttgagtcttattctcacatcactcatatcacttacacacttcttttatagccttagcagccatgccacaaagagaaactcttcatgcatatcttttggtccataagtcataaatagttatccttgatcccatgtcttttttagagccatggacagagagaagcaaaaatataccaagttcacactgagttgtctcccttcatatctcttagcagtcactgaaaggttatgagactcaggctgggtttctatcctctgtccctgaaacgacaacrttgacctcgtgatcaaccctagaatccagagcaagatctcagactgtcctctctactaccagacagcacactttgttttgggggctgtgtgcttgaaatattagctatggcaaaaggctttgagtcttatgacaccccaagtaacttttactttaggaatttgaaatacagccttgctgtaatgctgtctccttaacaaagcagtacctttgaaatatttaacaacttgaaaag

SEQ ID NO: 310293 - DNA, 595 bp, Homo sapiens
tgaagtgaaaatccatcacctctcagaaaaaattgcaaattataaagaagggacttatgtctacaaaacgcaaagtgaaaaatataccacctcattctgggtcattttcttttgcttttttgttcattttctgaatgggctcctaatacgacttgctggatttcagttcccttttgcaaaatctaaagacgcagaaacaactaatgtagctgcagatctaatgtactgaaaggcaaacctttctataattttacaagggagtagacttgctttggtcacttttagatgtggttaattttgcatatccttttagtctgcatatattaaagcatcaggacccttcgtgacaatgtttacaaattacgtactaaggatacaggctggaaagtaagggaagcagaaggaaggctttgaaaagttgttttatctggtgggaaattgcttgacccaggtagtcaaaggcagttgactagaatcgacaaattgttactccatatatatatatgtgtgtgtgtgtgtgtgtgtgtgtgtgtaagatgtcttyctatcaaaaagatatcaaaggcacatggaatatattttaataaaaacaaat

SEQ ID NO: 310294 - DNA, 613 bp, Homo sapiens
gaatagtgtgccttaatatagggaaggacggtgtctgctgcacatcccaggccagaagctccaagagaatcagctgtatagactttcatttgctgccatatagctgccccctttgccctactcctctgcagtcaccctttcacccatggaaattcgatgtgctcttcaccagtttcctcttctctggagcacagttaaacagctaaagtacatttcccagtctcctttggagttggggccatgtgagtgtggctgtaccaatgacatgttggttgaagtgacctgtgccattttcaggcctggccctgaaaaacatcccatgcaatcctccagctctctcttcttctggtgctgcatgcagccttggaatctgtgagatccagacggaaggctgcaaaactggggcgggcctcctgccctgcactagagtacaagagtagtaaataaactttctctgtaaagccactgatttttggtgattgtgactgtagcttagtctaatttagcctagcctagcaaacaggaacccattctccaagaaagctcttctgctgyctgccagggagatgcttctctagggctcccaaggcacagtctatgccagtgcaccttg

SEQ ID NO: 310295 - DNA, 534 bp, Homo sapiens
catcagctctcattaatgtcttatcaatgcatccagaagggtccccagcccacattgtgtggagtcaggattcaatacacagttggattatccactacgtgaaagaggatccacctaaaggatctctacagggccaacgattccaaggaatcctgtacttccttgggagcactgaaccaccagatggtgcagcgcatcgtaggagcatttatttccgctgtgctgtggtgagcagaggggtccagggcccaccataaccagttgggcatttgcaactccattttgtacattgttccaccatgcagaccaaggagacaagaagatgagcagtcagtatyttaagcctcactacgccctactcattgtcaagctttctttctcccttttctcttcttttatattagcattacttccctttttttctttaagcagtaaaaggtttatatcatatttttaaagtggcttgcttgagaaattggaagtttctctgtagggcaccttgagggctttccaaatctgctccctgctcagaag

SEQ ID NO: 310296 - DNA, 584 bp, Homo sapiens
aatttgtcgatgcctgtatagctctatatgacacaatgatacagtactttattaatcattacagaatacaggaagcctcagagtttactttcctcctatgcagaaaagtgccctaaaaaacatcaaggaaacatcatcaccatcatcaatatttattaaacatttattatgtgtttagtatcgtaggcattgttctaagcactttacatacattatctgatcgaatcctcactgctactctatgaagtagccacatcatgaatctcatgttgcagctgaagaaattaaggtgtagagaagttaagcaacttgttcaaggtgacacagatgctaagttgaagaaaacgatrgagcaaaagaaactattagaggaaccaaggtggagctggcctctagggctcttcataggtcttctggagttacagccaggtatctaatgaaatcattggctgaaaatttattatatttaagttacataatttaagagccaaatggaatgtccagtgttcaattaagatgagagaaaaaagagaaccagtcagagtatcagaaataaaactagatcacatatctgctactttcca

SEQ ID NO: 310297 - DNA, 525 bp, Homo sapiens
agttttgaaggggagtaaaatgctgtcaaacaacattgcacsctacagagaaatctttcgtaaaaggaagagtcaatggatgtggcaaatttcattactgtcttattttaagaaattgccacagccaccccaccttcagcaacaccaccctgatcaatcagcagccatcaacattgaagcaagccgcactaccagcaaaaagattatgacttgctgaaggctgtaatgattgttaccattttttttttttagcaataaagtgtttttatttatggtttgaacttttttaagacataatgctattgcatactttatagactacaatatagtataaacataactgttatatgcactgggaagccaaaaaatttgtgtgacctgctgtattgtgatatttgctttattgtggtgttctggaatcaaacttgcaatatctccaaggtatgcctctataaatatataggcaaaataaataaagctctttgttctcaaaaaacaatagtgtaggaagaaaggagttaaatc

SEQ ID NO: 310298 - DNA, 525 bp, Homo sapiens
agttttgaaggggagtaaaatgctgtcaaacaacattgcaccctacagagaaatctttcgtaaaaggaagagtcaatggatgtggcaaatttcattactgtcttattttaagaaattgccacagccacccmaccttcagcaacaccaccctgatcaatcagcagccatcaacattgaagcaagccgcactaccagcaaaaagattatgacttgctgaaggctgtaatgattgttaccattttttttttttagcaataaagtgtttttatttatggtttgaacttttttaagacataatgctattgcatactttatagactacaatatagtataaacataactgttatatgcactgggaagccaaaaaatttgtgtgacctgctgtattgtgatatttgctttattgtggtgttctggaatcaaacttgcaatatctccaaggtatgcctctataaatatataggcaaaataaataaagctctttgttctcaaaaaacaatagtgtaggaagaaaggagttaaatc

SEQ ID NO: 310299 - DNA, 534 bp, Homo sapiens
ttatgtttcttgtgagctctgtgatttatttctattatcatctatgctgatagttaaggaaactgagatatcgagaccaacatgcatagtaaatggcaaaaccagatgaattttaaactttcctaactccaaaagccacatcctgcccaacccgccatgctgccgctcagttaatgcctggctgtttgtctccccattggcccctctacccattgtgctttgrtggcacactgtattccaactgcctgagactcctggttaatgccattacgtacagacttaggttgaatttactaggatttttaagatttgtaggataagagatatgactgttagactggaatcagcaatagataaaaggttaacaaagtttcagaataaaatataatagaaaaccccagcagatagaagtaaaatgaatggtaagacaactgaaatgaaagccatacatttagaaatatcaaataaaacacagattaatggcagacaataaaggaacatacttagcagttagtaaaaacactttttacctta

SEQ ID NO: 310300 - DNA, 479 bp, Homo sapiens
ctgcacctgatgtagtccaatgtttcttcattcaattgaatcagagtcttttttgaatttatcggttcatgccgtggaggataagaccaaaatagagtgcccttgtacaaagaaggaaaccacacacagctttttatgcttaagaggaaagactcttgggcagaggaaaataatgtgtgccagcttgtgtgcttctgctgtttaggtctggacctccaaggaatcagactgacaatttcatgaaaggttctgatttaactgctcctttcaaaaacacttcaaagggtgatgatgagggataccaagggataaaaggtttctttcagggctgtgttaatttattttagaccaaagaacaaatatcccaatagagaaggcaggtgattctatctgtctgattgtagtaacaaaccttgtataaagaccaggtcaggagraggctggaagaaatttttaatcaattgttcaccaacttgcct

SEQ ID NO: 310301 - DNA, 677 bp, Homo sapiens
gtcaacttggtaaatatttcagaattaacacaacaaataagcaaaatttttgccagtcggatctatgtactgataaattcctccttcctttcagaaagcttcaatttattacctctgccaacagggaaaatgttattgatgttgaaataaaatagaatgacggagggggcctgataattttgaatgtgaaatagttctagtaatgggtgtaaggagaatgtgggccctggtagcttcttcccttttctattttatcctggaaaatgtcagacaatcccatagacatttgtgtgggtgtagccaccaccaccccaaattgacaaaagcaataaaactaacagccatcattttatcacttattagatgccaaggattgctctgagtgttttacatgtgttaactcatttaatcctcaraacaactctttgaggtaagcataacttgacttccttttaagttccttgccttttttttgtttcctccctctctcatcattggagccacaaggacgtattttgaaggttggcaaattctgatttactgactgttttagtaaataaagtgattagaaaataatcacacccatttatgtgtgtatcatctagagatgcttttgcataaaaaaaaagtcattgtggtggagaccatatggcccacaaagccaaaaatattttcta

SEQ ID NO: 310302 - DNA, 558 bp, Homo sapiens
tgctcttgtagaacattttgcaaaatggtatagagataacctgcatgggatcacctgggggctctggttaaaaattcagattcagctaagacctatgaaatcataatttctgagtaccagatccaggaatatgcaattatataaagttccccaggtgagaaataaccactaaaaaatttgagaacctttgctacaccacttagaaatgaggtaggtttaaataatatggaattgcagttaattttaataaacttcattttaataattttcaacagataacatacaaatatgtataaatactgaataatgcatttataaattttgatggagaagaaaaggataatctgatatgagytggactgatgacagaagtacaagataaattttcaacggattttagaattacagttaatgcagttcaattaaattcagcaaatatttatttagcacctgctatgggtaaagagttgtatctttgctataatgattcattaactgaatgtacatttattaattttctattacatgtcaggaactgcactgggaatacagcaatac

SEQ ID NO: 310303 - DNA, 558 bp, Homo sapiens
tgctcttgtagaacattttgcaaaatggtatagagataacctgcatgggatcacctgggggctctggttaaaaattcagattcagctaagacctatgaaatcataatttctgagtaccagatccaggaatatgcaattatataaagttccccaggtgagaaataaccactaaaaaatttgagaacctttgctacaccacttagaaatgaggtaggtttaaataatatggaattgcagttaattttaataaacttcattttaataattttcaacagataacatacaaatatgtataaatactgaataatgcatttataaattttgatggagaagaaaaggataatctgatatgagttggactgatgrcagaagtacaagataaattttcaacggattttagaattacagttaatgcagttcaattaaattcagcaaatatttatttagcacctgctatgggtaaagagttgtatctttgctataatgattcattaactgaatgtacatttattaattttctattacatgtcaggaactgcactgggaatacagcaatac

SEQ ID NO: 310304 - DNA, 492 bp, Homo sapiens
ttaaataataattaagccagcgagatttaaactccaggttctggtgcaatagtgagggcagtagtttagtgagaagtagggttgggaagaaaaaaagggcaaagcccctgacaaggagtataattgctgcagtatacatcttatttgtgcagcaaatgctgtgaggctcaattyagttccacccttcaaatgagcaaccaaagaaccatacctagtcacattcaaatcattatcaagaagagtcattagttcttttccatagtcaactgtgtctttcccaaaaggaaatgccttaaccttgaaggcatccagtttgttcagctaggcgggggagataactacaagttggcaggatggtatcatattcttctcctttgcccatcacacccaagcaaaagccctcttttcctcacttaagtgcctagtgttaagaatgcttgattctcctcgttcacgcaggttagggaggagtgggacaatccatttcccata

SEQ ID NO: 310305 - DNA, 492 bp, Homo sapiens
ttaaataataattaagccagcgagatttaaactccaggttctggtgcaatagtgagggcagtagtttagtgagaagtagggttgggaagaaaaaaagggcaaagcccctgacaaggagtataattgctgcagtatacatcttatttgtgcagcaaatgctgtgaggctcaattcagttccacccttcaaatgagcaaccaaagaaccatacctagtcacattcaaatcattatcaagaagagtcattagttcttttccatagtcaacygtgtctttcccaaaaggaaatgccttaaccttgaaggcatccagtttgttcagctaggcgggggagataactacaagttggcaggatggtatcatattcttctcctttgcccatcacacccaagcaaaagccctcttttcctcacttaagtgcctagtgttaagaatgcttgattctcctcgttcacgcaggttagggaggagtgggacaatccatttcccata

SEQ ID NO: 310306 - DNA, 618 bp, Homo sapiens
ctactttgcataccataagaagcagtataagaggtacctgaactgtaaattcaactctaaayttcttggtacagaatgaacagggaaacattttcatgcacgtagttttttggtcaaaatcaaaatcagatcactttctcaggggaataaaaacttctctgagcatttcattgtaaacaaaatgttgtaagggtcactttagggaaaagtgagtgatgtcatggataaagtcctcaaaataatcttcaggcaaacacagtaatcggtttgacttgcctatttctatgaaagctgcacaatatatttattatatattgtgaaagctgtactggattcattgtttcagttgcccaaaatgaattccattttagggagtggttcttggtttctaattcttttgaagaaatgattgtctccttttaagaacagtcagcaaatctggtgtccttatcctccttatgtggggtatagtagttaaggtaaccagatataacaaagaaacttcaaagtaaatgaggtaggagttcatttctctctctcataatacttgccatttcaagttggcagatcagctttgctacagaaagtcattctaggatcctgatccttccatattgt

SEQ ID NO: 310307 - DNA, 483 bp, Homo sapiens
tctgtgcacctacaagctcaacaccacatgtaagccaccaaggcttgtggcttgcaccctctgaagcaacaggctgagctgtacattgaccccttttagccacagcagggacacagggcaccatgtcccaaggctgcacagagcagggagacctgagcccagcccatgaaaccatttttctctcctaggcctccgggtctgtgatgggaggggctgccatgaaggtctctgacataccctgggracatttttcccattgtcttaatgattagcatttggctccttgttacttatgcaaatttttgtagccggcttgaatttcttcccagaaaaccaggttttctttatcacatcatcagtctgcaaattttccaaactttcatgttttctccctcttgaatgctttgccacttagaaatttcttccaccagatatgctaaatcatctctctcaagttcaaagttccacagatctctagggcag

SEQ ID NO: 310308 - DNA, 545 bp, Homo sapiens
gtggatgagtgtggaataagctgccttgctgagtcttccagccttcatctttctcccatgctagatgcttcttgccggttaacatcggactccaggttcttctgctttcggactcttggacttaacaccagtgatttaycaggggcattcgggcctttggccatagactgaagactgtgctattggcttccctacttttgagatttcaggactcagactaagccacattggcttccttgctcctcagcttgcagacagcctatcatgggacttcaccttgtgatcatgggagtcagttctccttaataaactctttcacatatacatctatcctattagttctgtccctctgcagaaccctgactaatacagtatagtaaacaaccattctttagaaatgcaaatgtgtatgggtatctatactagaaaaaatgcaagtacctatactagaaacaacacaaaattcagatagcacaggagtgaaagaaaatgttgaaacatcatctataagcactgacagtaatgaagagaaagaaaatgctggt

SEQ ID NO: 310309 - DNA, 545 bp, Homo sapiens
gtggatgagtgtggaataagctgccttgctgagtcttccagccttcatctttctcccatgctagatgcttcttgccggttaacatcggactccaggttcttctgctttcggactcttggacttaacaccagtgatttatcaggggcattcgggcctttggccatagactgaaractgtgctattggcttccctacttttgagatttcaggactcagactaagccacattggcttccttgctcctcagcttgcagacagcctatcatgggacttcaccttgtgatcatgggagtcagttctccttaataaactctttcacatatacatctatcctattagttctgtccctctgcagaaccctgactaatacagtatagtaaacaaccattctttagaaatgcaaatgtgtatgggtatctatactagaaaaaatgcaagtacctatactagaaacaacacaaaattcagatagcacaggagtgaaagaaaatgttgaaacatcatctataagcactgacagtaatgaagagaaagaaaatgctggt

SEQ ID NO: 310310 - DNA, 545 bp, Homo sapiens
gtggatgagtgtggaataagctgccttgctgagtcttccagccttcatctttctcccatgctagatgcttcttgccggttaacatcggactccaggttcttctgctttcggactcttggacttaacaccagtgatttatcaggggcattcgggcctttggccatagactgaagactgtgctattggcttccctacttttgagrtttcaggactcagactaagccacattggcttccttgctcctcagcttgcagacagcctatcatgggacttcaccttgtgatcatgggagtcagttctccttaataaactctttcacatatacatctatcctattagttctgtccctctgcagaaccctgactaatacagtatagtaaacaaccattctttagaaatgcaaatgtgtatgggtatctatactagaaaaaatgcaagtacctatactagaaacaacacaaaattcagatagcacaggagtgaaagaaaatgttgaaacatcatctataagcactgacagtaatgaagagaaagaaaatgctggt

SEQ ID NO: 310311 - DNA, 556 bp, Homo sapiens
ccagagctgactttgatgttctttatgtgtactcgtgtattatcctcataactctaccgtgataaacacgtttgtatgaaataattttgttttgcttgttggtaactcatgaagtcaaaactggattttcatgtgtctttccatatctctgcacttaatttcaagctaacatatttgtcyattatttcctgctaaaatgagtttctttcattgcacaaccatttcccaggctaccagtccaatttctagatctgaagcaatatttatgaggtatttactcctagcctgaagtcccccaaaccctggaggatttaaaattgtataagtataatttttcttgattaagggtcctatgtccacactgttgctaacttttgtttctagcaaactcttactcattcttcaaaacccatcttcagctttccatctttgtcaagtttcctataattctcctagtttgtcttcctctatgcgctcacagaatgttgtttttatctctagtgtcacacttggcacattgcgttgtgaatatgtgcattcctgccctctcaagttg

SEQ ID NO: 310312 - DNA, 608 bp, Homo sapiens
aattgcatcacctcagagatactcatcagagtggctctctgatccttgccatttctccctcagcttccctttacccacttactagaagagattgccgccagcagcttctgtggtccaatttctgagaccagtttattaagaaaaagctgaaaagcagaggtcaggggtgcctgcccttggaaaattgctcaccttgtttttggtgtgagcagaatgactttctgtggctgcctcagcctgtatctctagcctgctaggaatgaacaasaggtactttaaaagaagagagttgttaaagaggagttttatgtttgtgtctccagactgatttattggtaagtgtggttacttaattttaaaaccatgtctgtgtcaatccttgcatagaatcaaagcaggccattttattaatcctcgtgggcaaggagcaacatcctcaaaggacaactgtcctattcacatggttctgctatgagtactaaaaacagacaaccttagtcaagttgaatatttgcaactgaaacctactgcatctgaattgcttcggcgcacttggggcaatgtattgggagcatattttgtaccagagtcaaagtggaggcaggctt

SEQ ID NO: 310313 - DNA, 608 bp, Homo sapiens
aattgcatcacctcagagatactcatcagagtggctctctgatccttgccatttctccctcagcttccctttacccacttactagaagagattgccgccagcagcttctgtggtccaatttctgagaccagtttattaagaaaaagctgaaaagcagaggtcaggggtgcctgcccttggaaaattgctcaccttgtttttggtgtgagcagaatgactttctgtggctgcctcagcctgtatctctagcctgctaggaatgaacaacaggtactttaaaagaagagagttgttaaagaggagttttatgtttgtgtctccagactgatttattggtaagtgtggttacttmattttaaaaccatgtctgtgtcaatccttgcatagaatcaaagcaggccattttattaatcctcgtgggcaaggagcaacatcctcaaaggacaactgtcctattcacatggttctgctatgagtactaaaaacagacaaccttagtcaagttgaatatttgcaactgaaacctactgcatctgaattgcttcggcgcacttggggcaatgtattgggagcatattttgtaccagagtcaaagtggaggcaggctt

SEQ ID NO: 310314 - DNA, 520 bp, Homo sapiens
tgtgacagaggagtcacagaagcattgcaagtagactaatagaggcctcctcagggacggatagaggcatccacagagattcagaaattacagagttggtgctggacagagtcagggtgggaaggaacacagggccacagtgttcagaagaccaaaaatagaaccgagggaaacttctcctaagacataaatctgcccaagacaagygagacagaggaaaagaaagggcacatccattttcaggcctgcgcaggttcttctgactcaaagtcaataattattcaaggacaagggccatgataaatgatcagaagatgacctgtatctccagacaaggtggatggtgctggcacaatagtggatcatcccaacgccatataggaatgagacagatccccttgtccggggcagcaaactgactggtacctataccccactctccagccctcacttacagacctcagtgggcccgcagggaagggatcctgagctcagatatgaggcctcctgatgcaggtta

SEQ ID NO: 310315 - DNA, 593 bp, Homo sapiens
tcagtacatggttaaccctcattgaagcctcagaatagtcctaattttgtagtaaggtaactgaggcacagagaggcaaaatttgactctggccacaaagctgataagtggaggaaactgaacctagttcttagagctccaagtttacagtctttccaatgttccattccatttctacagttagactggtcatggctacctaaaaactttgaaggtggagcttctaggtcaaaaaggatgtagtctaatggcaataaactggggacacttagcacagagttttgttcagattcttctctgtgacccyttgtcttcagagataagaacattcctttcttcagggcacctctccaatgagggtcttctaacctgccgcaaggacaaacagggagcgaacagtcagaaagaccttcctacttctgttaccttctcacattcctttagctgaaaatattcactatgccaaggtgccatattttggggaagcatgtcctgaactccatcacttttatctttaaaatgcagattgcattaaattgcctttaatattcctagtgaaattagaaaacttggggataagaacaatcccaaca

SEQ ID NO: 310316 - DNA, 538 bp, Homo sapiens
ttatcaaacaccaaaaatccatactagaagattttaagccacatgaaattcacattgccatttaggaaaaaataatcttttttaagatcataaaaaccattcagatacctaattaatgaatatatatttatatatgttttttcggcatatatacatatatatatttgtggtaagatacacataacataaaatttactattttaaccattttcargagtacagttcagtggcattaaatacaggcatatgaaactataattacatctaccaggtgtccccacctaatagacctatgtatatttgagtgatgattctttttgatttctgtgtctctatactggaataaagaatctctgaaatttgtaatctataaaattcttgaactaaaatcttttttttttcttttttttttctttttttatcaaacagacgagttgtttctcatcctgagggcatatgtgcttgggaaaaactctgacatcttaagaaatgatgttactcatggctgacgcatggctggcatatgaatccatatgaa

SEQ ID NO: 310317 - DNA, 538 bp, Homo sapiens
ttatcaaacaccaaaaatccatactagaagattttaagccacatgaaattcacattgccatttaggaaaaaataatcttttttaagatcataaaaaccattcagatacctaattaatgaatatatatttatatatgttttttcggcatatatacatatatatatttgtggtaagatacacataacataaaatttactattttaaccattttcaagagtacagttcagtggcattaaatacaggcatatgaaactataattacatctaccaggtgtccccacctaatagacctatgtatatttgagtgatgattctttttgatttctgtgtctctatactggaataaagaatctctgaaatttgtaatctataaaattcttgaactaaaatctttttttttycttttttttttctttttttatcaaacagacgagttgtttctcatcctgagggcatatgtgcttgggaaaaactctgacatcttaagaaatgatgttactcatggctgacgcatggctggcatatgaatccatatgaa

SEQ ID NO: 310318 - DNA, 450 bp, Homo sapiens
tgtgagtccagcttccaaaggctttgtgtgcttctgttttccttcttgaacatctgcctcagcaagagaatatgccttggctggcctgcttaggatgagagcccacatggagaacagcccatctttcaaacagaattcatcctaaattagcccacagtgagccaggcaggtgggaaagccacagacaaaattagaaaaaaagaaaaaagcacaaaatgcattaaggtgagaaacacttagctaaccccagtaagaaaaacgtcccagttaactmatattcttgtgattacaagtaataacaaattaaataataatatttaattatgatgaataataatacataatcattgttcacagtttattgaatgctgaggttgtttgttatacagcattattatggcaatagctaactgatacaaaccacatcatggctttcattggccttactga

SEQ ID NO: 310319 - DNA, 601 bp, Homo sapiens
ttgtcaataattagttcattctatatgcttggtttatttctgggtactccattctgttccattgttctatgtatctgttttaatgccagtaccacactgttatratttgtatagccttgtaatatattatgttataaattacgaagtgtaatgcctttagattcattcttctttctaaagattgctgtggctatttgggatattttgtggctccatgaaaattttaagattttttttacttctgtaaaaaaaagcctgtaattttggtaggcatcacattgagtctgtagttttggtagtatgaacattttaacaatatttttcattcctatccatgaatgtagaatgtctttttatttatttgggtcttcttctatttctttcatcaatatcttacagttttaagtgtacatatgtttcagtttcttgattaaatttatccttaagcattttactatttttgatattatacatgaaattattttatttatttttggatagtttgttgttagcatctagaaatgcaaataattttaggtattaattttgtatcctggtactttactaaatttgttattacttgtaacagttttttagtgga

SEQ ID NO: 310320 - DNA, 601 bp, Homo sapiens
ttgtcaataattagttcattctatatgcttggtttatttctgggtactccattctgttccattgttctatgtatctgttttaatgccagtaccacactgttatgatttgtatagccttgtaatatattatgttataaattacgaagtgtaatgcctttagattcattcttctttctaaagattgctgtggctatttgggatattttgtggctccatgaaaattttaagattttttttacttctgtaaaaaaaagcctgtaattttggtaggcatcacattgagtctgyagttttggtagtatgaacattttaacaatatttttcattcctatccatgaatgtagaatgtctttttatttatttgggtcttcttctatttctttcatcaatatcttacagttttaagtgtacatatgtttcagtttcttgattaaatttatccttaagcattttactatttttgatattatacatgaaattattttatttatttttggatagtttgttgttagcatctagaaatgcaaataattttaggtattaattttgtatcctggtactttactaaatttgttattacttgtaacagttttttagtgga

SEQ ID NO: 310321 - DNA, 606 bp, Homo sapiens
ctccactcagtaaaaccttgcactcattctccaagcccacagtgatctgatttttctggtacactagggcaagaacctgggatacgaaaaggcttctgtcgtcaagataaggcagagggtctaactgagctgattaacagagccattttgcagacagcaaagctgaaagagcgcactgtaacacacacccaccggggcttctggagctgtaaacactcaaccctagacgttgccatggggtsagagcccagaaacgctgcccaggacctgcctatctgcatgctcccccaggggtttgagcagcgggtcactgaagaagtgagccacacccctgtcgcatgtcctgcaagcagaataagagaacttctctggtttcactttggcatgtggcagcatagcaaactgtgtaagggatgttaaattgaaatgtactcttatcccctggtgatttgggccagaaggatggcaaccctattttcaaagattgttggttcagaaatgcattcaagttgtgttccctctctctagcagtaactcttgaattattttctgtactctgtacaaagacaacctctgcccctcatttgttatcttctagaatgcaaa

SEQ ID NO: 310322 - DNA, 548 bp, Homo sapiens
ctgattaacagagccattttgcagacagcaaagctgaaagagcgcactgtaacacacacccaccggggcttctggagctgtaaacactcaaccctagacgttgccatggggtcrgagcccagaaacgctgcccaggacctgcctatctgcatgctcccccaggggtttgagcagcgggtcactgaagaagtgagccacacccctgtcgcatgtcctgcaagcagaataagagaacttctctggtttcactttggcatgtggcagcatagcaaactgtgtaagggatgttaaattgaaatgtactcttatcccctggtgatttgggccagaaggatggcaaccctattttcaaagattgttggttcagaaatgcattcaagttgtgttccctctctctagcagtaactcttgaattattttctgtactctgtacaaagacaacctctgcccctcatttgttatcttctagaatgcaaatgagtcttttttccttcatcccaattaatttagctcgaggcacttatattttaattgaagtggcagttttc

SEQ ID NO: 310323 - DNA, 548 bp, Homo sapiens
ctgattaacagagccattttgcagacagcaaagctgaaagagcgcactgtaacacacacccaccggggcttctggagctgtaaacactcaaccctagacgttgccatggggtcagagcccagaaacgctgcccaggacctgccyatctgcatgctcccccaggggtttgagcagcgggtcactgaagaagtgagccacacccctgtcgcatgtcctgcaagcagaataagagaacttctctggtttcactttggcatgtggcagcatagcaaactgtgtaagggatgttaaattgaaatgtactcttatcccctggtgatttgggccagaaggatggcaaccctattttcaaagattgttggttcagaaatgcattcaagttgtgttccctctctctagcagtaactcttgaattattttctgtactctgtacaaagacaacctctgcccctcatttgttatcttctagaatgcaaatgagtcttttttccttcatcccaattaatttagctcgaggcacttatattttaattgaagtggcagttttc

SEQ ID NO: 310324 - DNA, 548 bp, Homo sapiens
ctgattaacagagccattttgcagacagcaaagctgaaagagcgcactgtaacacacacccaccggggcttctggagctgtaaacactcaaccctagacgttgccatggggtcagagcccagaaacgctgcccaggacctgcctatctgcatgctcccccaggggtttgagcagcgggtcactgaagaagtgagccacacccctgtcgcatgtcctgcaagcagaataagagaacttctctggtttcactttggcatgtggcagcatagcaaactgtgtaagggatgttaaattgaaatgtactcttatcccctggtgatttgggccagaaggatggcaaccctattttcaaagattgttggttcagaaatgcattcaagttgtgttccctctctctagcagtaactcttgaattattttctgtactctgtacaaagacaacctctgcccctcatttgttatcttctagaatgcaaatgagycttttttccttcatcccaattaatttagctcgaggcacttatattttaattgaagtggcagttttc

SEQ ID NO: 310325 - DNA, 630 bp, Homo sapiens
ttttccttcccctggagcaagtccacagtcatgaatgcataagcagccctccctgcttatttaaattcataagaatttactgaaggccaagaggtgtgaggtgtgtgagtggggcctgggaatacagaaacgagcatagcatcgttctatgtgcacatctctttatatatctactcctctatgtgtgacccatcttcacctataatcatacttttattttgacataattttaagaaaaaaaccataaatgtatacagttattaataaagtgccagaggaaaagcagaaggttcagggatttaaaagggctttagaaatatacaagacacaatgcaaactgtgttctcttatggatggcagaattttggttatcttcyttttttaattcatctattgtgtcagtcaggatatgctaggttatgctgtagaaatcaataccttaagatatcaatggctgctttcagaatgttgaattctttctcattctggttttccattcattgtaagttggctgtggttcgctctacatcttctcattgggacacagctgatgaagtgtcacctgtctagaaccttgccggtcatcctagcagtgggaaagagaacttggcatacacatgctggccacta

SEQ ID NO: 310326 - DNA, 600 bp, Homo sapiens
ggagtatcactttaagcatgcctctttcagtcataatgattttgtttttatttttcttttcaattcaatgatctcttcaattactaaaccatagaaactcattgggggcttattccaaattcttctctatgtctccaaatttcagcctcacatttttgctactagtccstatttcaccaaactccaccatgttttgtgatcaatcctatactcattatggttttaggttactataaatggtttatttcagaatatttacagtcagtcatggctggcagtcaatataactcttgtactggtttaaaaactaaacacatatgaaagttatatctccattatatgttccataaaaaaaatgtgaattttcctttttgtaaagtttgaggaggggtaacatctaagattgcatatgttttctttgaatcagatctaactcatgccccagactctgtgacataatttcattcattctttgaatgaacccgggtgtgcatagcttctggccttacacgtcagaaaataaaggaaactcaagaaattaccaatgcattacatttcttaataaataaagcaaaaataaacttacatgacaagagatag

SEQ ID NO: 310327 - DNA, 447 bp, Homo sapiens
attatatgttccataaaaaaaatgtgaattttcctttttgtaaagtttgaggaggggtaacatctaagattgcatatgttttctttgaatcagatctaactcatgccccagactctgtgacataatttcattcattctttgaatgaacccgggtgtgcatagcttctggccttacaygtcagaaaataaaggaaactcaagaaattaccaatgcattacatttcttaataaataaagcaaaaataaacttacatgacaagagatagtagtttacagtctcaaaagaaataaattgcagagggataagggccaatcaattattgaaagaattgaattttccattcaataagttgccaaatattgactaaagagtcaaaaataagttaataggtacacctgaataattaaagcctgatgttatgtgattatacacattaaggttctcat

SEQ ID NO: 310328 - DNA, 633 bp, Homo sapiens
tttatttgattataatttactaataaaatggcctttctaacatacttaacccatttcttccatttttaagatgtacttcaattccacattaacggattcctctaagcttctgaaacctctcttggtcttcacatttatcatctgtggaataatctgcgggctaacacggataactcagtataagaaccacccagttgatgtctattgtggctttttaataggaggaggaattgcactgtacttggtaaataagttactattatcttataagccaaagtttaaaatggaaaacatgcatagaatattttgcactataatagcttccttgcgatatattttatataaatgagaaaatctctggccgcatctccattctatgccaaaacacatatctcactttcaacaaaatcatttattgaactcttactatgagccagaaattgtaattttagaaagatttctgaattttgtctttatgccaaccaaacaggaggtgggcagggactactattactrctataattataatgctacagatgaggaaagtgattattgccaaaagtaaggttagtgaaagcaaaaatttagttaaaggttatataacttgccccacaccacaaatttagcacctga

SEQ ID NO: 310329 - DNA, 601 bp, Homo sapiens
ttgcttctggaattcaaaagagcaatcagtattggagaaggatatttaatggaagtaccattgtagttactacgggtatataaaactgccaggtcataaaaataaaaggtagccagggaataccaataaacaagtgacatgcggaggaaaaggcaataatgaaagaaactgagaagagctgacagaagtaaaaataaattatctgtagctacagttctcaatcatgtggtcttagtgcccttggaaaggcattacaagaaaattattaccaaaatacaggtaaagtactgaagtgtgctataattttataagtttttttattttcataaacaggcacagtcaagattgtcactttaaaagttattctcactcgcatgcattcttcactgcaggagaaagggatcaaattaaaattggtgtgccaggaattgtgcataagcctgggttgcccatgggagtgttagytggcaatgtgcattgcagaagaaataaaggagactggaaatgccactctctagtttatgtattgcttttgcatgtgtgtcatttcatgatgtcctggaattagcatgggatttatagtgcaaaggatttggttatg

SEQ ID NO: 310330 - DNA, 630 bp, Homo sapiens
acatatttttgcatatcaatgttacagtgtatgaaaaagaaaatatgaaggacttgactaagagtagttgatgtacttattttcccaaacagtagagacctttatgtcatcatggccattggcgttgcagcttttcttaaaagaatgcttcaccattaactccacgatattctttcaagccattaaggctcattatattaattttactgctgatgatttgtacatctcactggaaggtattagcacaagtttttagaccacaaccagaacttaggatttactcaaatggtcctaaggagtttgttgaatgatatgtgaagttacaaacatccagtaatgccaccaakttcatgtagctgtccaattgcaacaaagttcatacataccaggcaacaacatcacaatcactacctggccaacagccaatgtaagatactattgattgtaggaaacaccctggttttagagaagttaacatgtgaaaaaacaatgtgtatcttatataatgggtgaaatacagtttctctaggtctttaaattaaacttctctaggtcttgattttttcatttctaaaatggagacattcagccatatttcccttctaaaggatgtcctaaagttctcaattt

SEQ ID NO: 310331 - DNA, 539 bp, Homo sapiens
gaagtaagcctttatgtatgaaaagactgttgttgaacggaataattacattttggagtatgtggatttttcaaatcagccagttttattgtgaatacatgattcatagaaacaaaagaaagacaggaaataaaacatgaaaagaaagtaagaagagagtcctgtatattttatttgggtcagaaacaaactaagaccycaatgaattaaaatcctataggataggagtagaggtggatttatccatttgtgatcttgacctatcagctgttacatgaggtttctcagctgctggcaaaaccactcatccctccctggaggcagcagctgggatctcatcatcctctctacaatttcctgcttgatctgggagcatttgattaaaatacaaatacaaaaacaaagaaacaaaaaaattctaacaaacattaacgtgtatatacaggccagatactttatttctcctaaaggcactctttctttttcataaagagagttctgctgtgtcatctgcattgctaccatgttatccctttttc

SEQ ID NO: 310332 - DNA, 539 bp, Homo sapiens
gaagtaagcctttatgtatgaaaagactgttgttgaacggaataattacattttggagtatgtggatttttcaaatcagccagttttattgtgaatacatgattcatagaaacaaaagaaagacaggaaataaaacatgaaaagaaagtaagaagagagtcctgtatattttatttgggtcagaaacaaactaagaccccaatgaattaaaatcctatrggataggagtagaggtggatttatccatttgtgatcttgacctatcagctgttacatgaggtttctcagctgctggcaaaaccactcatccctccctggaggcagcagctgggatctcatcatcctctctacaatttcctgcttgatctgggagcatttgattaaaatacaaatacaaaaacaaagaaacaaaaaaattctaacaaacattaacgtgtatatacaggccagatactttatttctcctaaaggcactctttctttttcataaagagagttctgctgtgtcatctgcattgctaccatgttatccctttttc

SEQ ID NO: 310333 - DNA, 586 bp, Homo sapiens
gtttccaaactaattttcctagaattcacacctcatcatgcatttaatggtgccccattaataacaaaataaagtgcaaattttttagaatgatatttatgactttttaaaatatggccttgatctgcctgtcttggttgattttgctttccacctactctccactctcctaaaccagaaagacagcmcatgttcccattatatttatatttcaaaaagacatgttctagtctctgcttcacattatggttccacatttatttctcataaaaattgtacttattctttcaggttgagatcatgtaatttttttctccctgaaaccttctccaggctctccactcagaattgaagactccgtctcacatacttcatatataactttatcgaaggatctgttagtctgcctttgattatagttatttacatattaccaacccttgccctaagatcaagtactcaagagtgaaacctttgcaattcacccagtgcttttaatgttttaggtgtccaataaatgttcactgaatttaattgaaagaaatcaagaaattatgattaaaggaacaaaaaacataggcaattt

SEQ ID NO: 310334 - DNA, 585 bp, Homo sapiens
acctaaaaagcaaaggacatttactgagtttttatttagacatttcatcctaattatctactttaattcttaacctccttgggatccctaagataaatttaagataaggaccatgccccagataagtaaaatagcatgcctggcttcaaaggccagtaattgaaacctggtctgctaaattcctggaagcatgcaccgccgtgtatcctgctgtcattctgccacatgtcaccatctggcactagtctggtgcttttcaggaaaggacagccccaggcttcaatgagattgccagtttaaaggacacaaggcgagagatggccatgtgtcaaggggtttcaacggcwacaacaggaaaggggtggcaggcactttcaaatcacactctcactgatgtggtgccctcaggtcctgaacgttattccttgtgcagtttctttgaagttatttgtattattttggttttgggaatatcttaagagcatttaattatattttggatatggtctgcttttattttcacttttgtcttccctagtgaatgatttctaatataaagtatcagaaattaggcaaacttaaggt

SEQ ID NO: 310335 - DNA, 550 bp, Homo sapiens
cttaatttctgaagcatgcctaggatttcattaaatggcagtttayctctaagcaaacccatagcgcagacttttggtaagagcattaaattgttaacgatatagtcacatctacttccattgctctcactcccaaacatcattcttctgttaaatgtatgattccatgtttaccttttcccacaaatacattgattttaattactcgtctttccccttttctttaatttattcttaagtgatctaaataccagttttacacaggcagaaaccatcttgttacagcaaataagaaagccattaacctcctctatgttgcttgacagccaaccagatagttatggacctaagtgcaattggttcagtctaattattggtaagaaaaacacctcaatgttagttctgccaaaattagtatttctatccttggcatccatattacaaaatccacttgaccatgaaaagattactccattcgatagttatctgtaaatacatttctcagctaattcataccataaaaggctaccatgatgctcataattagaca

SEQ ID NO: 310336 - DNA, 550 bp, Homo sapiens
cttaatttctgaagcatgcctaggatttcattaaatggcagtttatctctaagcaaacccatagcgcagacttttggtaagagcattaaattgttaacgatatagtcacatctacttccattgctctcactcccaaacatcattcttctgttaaatgtatgattccatgtttaccttttcccacaaatacattgattttaattactygtctttccccttttctttaatttattcttaagtgatctaaataccagttttacacaggcagaaaccatcttgttacagcaaataagaaagccattaacctcctctatgttgcttgacagccaaccagatagttatggacctaagtgcaattggttcagtctaattattggtaagaaaaacacctcaatgttagttctgccaaaattagtatttctatccttggcatccatattacaaaatccacttgaccatgaaaagattactccattcgatagttatctgtaaatacatttctcagctaattcataccataaaaggctaccatgatgctcataattagaca

SEQ ID NO: 310337 - DNA, 550 bp, Homo sapiens
cttaatttctgaagcatgcctaggatttcattaaatggcagtttatctctaagcaaacccatagcgcagacttttggtaagagcattaaattgttaacgatatagtcacatctacttccattgctctcactcccaaacatcattcttctgttaaatgtatgattccatgtttaccttttcccacaaatacattgattttaattactcgtctttccccttttctttaatttattcttaagtgatctaaataccagttttacacaggcagaaaccatcttgttacagcaaataagaaagccattawcctcctctatgttgcttgacagccaaccagatagttatggacctaagtgcaattggttcagtctaattattggtaagaaaaacacctcaatgttagttctgccaaaattagtatttctatccttggcatccatattacaaaatccacttgaccatgaaaagattactccattcgatagttatctgtaaatacatttctcagctaattcataccataaaaggctaccatgatgctcataattagaca

SEQ ID NO: 310338 - DNA, 562 bp, Homo sapiens
tttcccaggctgtacagtgtaaaactgagttaagaaacttgctcataaaatgaggtgcaaaactaaaaatcatcgtatttttcaagtcaccatctaatattactgtcaaccataagccatttcattagcaagcagcagcataaaccaaaaatgtaagaaaaaaataattctatccctaaattctatcccttcaactaatgtgtgctttaacatcaggtatcgtggtgaacaaggacaagattacttggttttagtggctgaacaccaacacctcagcctaatgcccattggggtataattagagatacmttgacactctgcaaatgggctgccaacatctttactccttccttgcatctatccagagttcttgttgaggggcactagccactaactgatgagccaatgtggggagtatgcactgtcctccaactctttgtgcttggacactcccagtggaggaggaactgagctgaggaagctgatctgttgccagagaaaactgtatcaccctgtttgtcagtgtgcccttgccttactacatcttccttttttaccagtg

SEQ ID NO: 310339 - DNA, 674 bp, Homo sapiens
tatatatgcttgttgccttcatagaattcacaggctaatgtaggtgaagagaagacagacacagacaataaattagtaatagtaatagaaaacacctcyatgaagctcactatggaataagcatcattaacaatactttgcatcttacctcacgtactcacaagatccttatgaaattagtatcattattatcacattttatagttaaaaaactgagactcagggggtaaactatgattttatggaaggaccacagatataattagtagggctgagactgttgaactcagtaggttgctgcaggctatgtgatcttaagggctacacctactgcctctctttacaaacatataattatatcttgtgatatagactactaaacaaacaattaaggtgcagttgtaatcacaatgagaaacttcttaagaatggtggttgtggcactattcacaatagcaaagacttggaaccaacccaaatgtccatcagtaaagaaaatgtggaacatttacaccatggagtactatgcagtcataaaaaaggataagttcatgtcctttgcagggacatggatgaagctgaaaaccatcattctcagcaaactatcacaagaacagaaaaccaaacactgtgcatgttctcactcataagtgggaattgaacaatgagaacac

SEQ ID NO: 310340 - DNA, 674 bp, Homo sapiens
tatatatgcttgttgccttcatagaattcacaggctaatgtaggtgaagagaagacagacacagacaataaattagtaatagtaatagaaaacacctctatgaagctcactatggaataagcatcattaacaatactttgcatcttacctcacgtactcacaagatccttatgaaattagtatcattattatcacattttatagttaaaaaactgagactcagggggtaaactatgattttatggaaggaccacagatataattagtagggctgagactgttgaactcagtaggttgctgcaggctatgtgatcttaagggctacacctactgcctctctttacaaacatataattwtatcttgtgatatagactactaaacaaacaattaaggtgcagttgtaatcacaatgagaaacttcttaagaatggtggttgtggcactattcacaatagcaaagacttggaaccaacccaaatgtccatcagtaaagaaaatgtggaacatttacaccatggagtactatgcagtcataaaaaaggataagttcatgtcctttgcagggacatggatgaagctgaaaaccatcattctcagcaaactatcacaagaacagaaaaccaaacactgtgcatgttctcactcataagtgggaattgaacaatgagaacac

SEQ ID NO: 310341 - DNA, 449 bp, Homo sapiens
tgggtcctgaactttaatccatttctacttcaaaaaaatctataatatatattgtaattctctttttttctgtttcacatatctattttatatccaatccttttaaaatttctgtattctagaaaaacatgttaattttttaatcaaacattgagttgtctttctgtagcttcaattctgctgtgtatgacctcaactgaatttaaattgctcatatttcattttawgttttctagcattttaaagttatttcagcctagttatattcacttagctatcattcatgaaattctagtttattttatggccctgaagattggctctaagccaattctaactgagatattatatagttacagtagacaattacttaaaatttggtgaggacaaattaatgttacttgggaaagttataatttctaattcttaatgtatatgttgctaagaag

SEQ ID NO: 310342 - DNA, 586 bp, Homo sapiens
ttgtcttttgtggatagtttgttgttagtgtgtggaaacactattgatgcttgtgtgttcattttgtatcctgcagtttactgtatttgtttattagtactaacagtggtgtttgtgcgtgtgtgtgtgttgtgtcatctttagagtttaccatatataaaatcatcatgttgtctgcaaacagggacaatttaacttcttcctttccaatttggatgcctttatatctttctcttgctgaattgctatggccaggatttccattactatgttaaatataatgcttctcttattgataaytgagatactattagaccttaaaaattattttaattacataaatgaggcctaaatatacttatgttaaaaacaaacaaaagaattctgctatggttacaactcatgatttacttgttcaccacttccagttgcatcattatccagaggtagtgatgattatcagtgtggtgggtatcctttggtattttggatttccttttatataaactttatgctgttacatatgtaatatgaaataggtatataaactttatgctattacatatgctattacatacatattaca

SEQ ID NO: 310343 - DNA, 596 bp, Homo sapiens
ctggaaattcatcactgcaatgcttttagttatccagcatttcacactggaaagccaccttcttttctacaattccatggcatatttagaagtgtttatagaaaatttatgcctccaaaacagcaaaaaaccctttgaatcctaactttagaactcatcattttttatgcattcatttacgccttcatttaatattaccaagctaaagctatgtacaaggcactctgctaggggctaagaatgggaagataaatacctaatccctgacacaaaggagcttgtagtttactacataaaacacttaaataacaaattcagtggagtgttataaatgctgtgatagaagtataaacagtgctatgggtgcaccgaggagagaagactatttcagaccatcaattaaccaatatttattggccaacaatatgagctaagcactgtgctaggtgctgtcattacacagacatttttttcttttgtaaaaataaagtatttaaatgtcttctaattttattgcttttctgaatatgttggcgaaatacagttcagtgattaagagcagagwtgctggtgctaagctgcttgggtttaaatcc

SEQ ID NO: 310344 - DNA, 596 bp, Homo sapiens
ctggaaattcatcactgcaatgcttttagttatccagcatttcacactggaaagccaccttcttttctacaattccatggcatatttagaagtgtttatagaaaatttatgcctccaaaacagcaaaaaaccctttgaatcctaactttagaactcatcattttttatgcattcatttacgccttcatttaatattaccaagctaaagctatgtacaaggcactctgctaggggctaagaatgggaagataaatacctaatccctgacacaaaggagcttgtagtttactacataaaacacttaaataacaaattcagtggagtgttataaatgctgtgatagaagtataaacagtgctatgggtgcaccgaggagagaagactatttcagaccatcaattaaccaatatttattggccaacaatatgagctaagcactgtgctaggtgctgtcattacacagacatttttttcttttgtaaaaataaagtatttaaatgtcttctaattttattgcttttctgaatatgttggcgaaatacagttcagtgattaagagcagagatgytggtgctaagctgcttgggtttaaatcc

SEQ ID NO: 310345 - DNA, 521 bp, Homo sapiens
ggtttaaatccttgctctgcccttttctaattgaggtatcttgaatgtaacatcacagtttcatcacttacaaaatatggatattaatcatttctgatccataaaattgtggtaagattaatacatgtgaagcacttagtacactgtctgatattgattaattactctaaatgtgttaatttctattttgtcatttttcgtggcattttaaaagaactcattagacattttctctttatcttcagtttcagatgctcaacattttgtcctaggttaaattttcatggactgccataaagattgtcatatgtactcactcattagtgacttagagaaagacagatttaatctagatatctccatgatgagggcaaatagtcactctgaaaatagtttcaaaccagttatacattaataagcaytgaatttgtttctgggatgtactatcaaatacaatatttcttttagaaagaaaataaatgaagatacttcaaaataaaatacgccatgaacacttgtgc

SEQ ID NO: 310346 - DNA, 489 bp, Homo sapiens
agagatggttaaaatgaatgaagcaacagtgccatagtatctacatttcatgcctataaaaatcacaagatgctagtaatgaaagggttcatgaagagtcacctgcctcagtcgtctgatttcaggaaaagttatacttgcacatttctaggaagaagaaaaaaaatacatgtttatgattttcatggcatagtattctatgataactcttggtaatgttttaccaccttgattccattcttaggaatctcagaaatgtcttaaactcaactagtctttcatgttattgcttatatgaaataacatgaaaactcacatcccatttttatatctttattaattttttaaaaaggaaaaatatrgctggtcactctatttttaaatatcttcatatatggtacttgaaaatgttattgtcataaattcctccaccaatcatttgttctccatacgctaaactcttgatccactaaattttctttacaagtt

SEQ ID NO: 310347 - DNA, 601 bp, Homo sapiens
gaggctattcttctaaacttgtctattttatatatatctacctaccttggggagacaaatttcttttcttttcattctttcagtcaaagtaaattgaacaataattatgggtgcacttttgcggcataagtactttctaatctttctctgtcacagcaggaaattgcttattggtattgtgtatttcatttaaaagcagatgatctacccaacaagataaatcttagccatatgctggyagcctgacaaaaatatcctaaacagaaaatatgttgagaaaataaggtacttagaaaattgtccaagctgccattgttttagggatttggatattgcaaatatatgctgctctcctggatctcaaggtacacaatgatttttattttttataacaatgctaaaactctcgttttcaaccactggagttttctcaatgtgttttcttagaccatgaaagaaggaggaatctcctttttgttccagagggaaacttcatattgagtaattcctgtagaggagacagaacttcatggaaggaggagaaaggggggcagtgttgctggtctctgagccacagtgtggtggtgcagggtgagtctgg

SEQ ID NO: 310348 - DNA, 636 bp, Homo sapiens
ggcttgctctttggtctttcctcagtatattttcagagaagccttttttgagcctccacccccacscccattcaccccattgatctgtcctcttcctggatctcaattttatttataaacacagactgggtatttacatccctaaactggatgatttatgaaaggcttctccatgtagctgacacttatgctgaggtgctgatatggtttaagcctctgtccccacccaaacctcatgtcaaattataattcctaatgttggaggtggagcctggtgggaagtgattggatcatgggggcagattccccctttggtgatgtttttttgatagtgagtgagggtattagtccattttcaagctgctgataaagacatacccgagactgggaagaaaaagaggtttaattggacttacacttccacatggctggggaggcctcagaattatggcaggaggtgagaggcacttcttacattggcagcaacaagagaaaatgagaaagatgcaaaagcggaaacccctgataaagccatcagatctcatgaaacttactcactactatgagaacagtatggggaaaactgcccccatgattcaaattatctcccattgagtccctcccacaacacatgag

SEQ ID NO: 310349 - DNA, 407 bp, Homo sapiens
cttggatgctgccacaaggcccacacagagcctgctccccactagacaggagtaactggccagttccagcttttgttcactctggttcccgcacccgtccactcatgggctccctctcataaagcactgagcacagcagctgagtaaatgagccaccccatttgtgtgtcctaagaaggggtcaagggaattctcccctctcactggtacatagttgacaagtagcaaatatttgttggctgaggatgagcagcgcaggcttaatgtttgttttgtgaattcaggacatatatctatgacttggccatcatctgacttagcacaaccttctacaaragcagacattatcaattcctactgttcacagatatcaggtcatatattttataataaatgtatgcaaactg

SEQ ID NO: 310350 - DNA, 607 bp, Homo sapiens
taaagaatacaagaatctacatgaatttggaattcagggacgagttgtaaatacaacacaaaagcacaatccatgatagaaaagattgataagttggaccttgttcatttcattttttatattttcrctccagtttttataattctattttcaacaggtataacataaactttatatagtatgtgttctgtgttttccaccattagtatatatttttctgtaccattataaaaagaaaacactgttaataatataaagaatttctttttaaagaatggtattttctgtgagatgcattgttcagtgggatactactatggtgggtatattcctttttgggtttgccctacccaaagccactccctataatttgagtaatgctgacccacctctcattagagggaagacaagaaacttgaggttagtaggtaactctgaccatggtggttggttcagggagggcacatgtactatgttaggtcccaggtcattttctggagctattgggactgttagcttccagcttccagtggccagtgggcaagctatgcctgagaaagaagccaaccaggagaaagccaaagtgaagaaggtgggagaaagagtt

SEQ ID NO: 310351 - DNA, 607 bp, Homo sapiens
taaagaatacaagaatctacatgaatttggaattcagggacgagttgtaaatacaacacaaaagcacaatccatgatagaaaagattgataagttggaccttgttcatttcattttttatattttcgctccagtttttataattctrttttcaacaggtataacataaactttatatagtatgtgttctgtgttttccaccattagtatatatttttctgtaccattataaaaagaaaacactgttaataatataaagaatttctttttaaagaatggtattttctgtgagatgcattgttcagtgggatactactatggtgggtatattcctttttgggtttgccctacccaaagccactccctataatttgagtaatgctgacccacctctcattagagggaagacaagaaacttgaggttagtaggtaactctgaccatggtggttggttcagggagggcacatgtactatgttaggtcccaggtcattttctggagctattgggactgttagcttccagcttccagtggccagtgggcaagctatgcctgagaaagaagccaaccaggagaaagccaaagtgaagaaggtgggagaaagagtt

SEQ ID NO: 310352 - DNA, 607 bp, Homo sapiens
taaagaatacaagaatctacatgaatttggaattcagggacgagttgtaaatacaacacaaaagcacaatccatgatagaaaagattgataagttggaccttgttcatttcattttttatattttcgctccagtttttataattctattttcaacaggtataacataaactttatatagtatgtgttctrtgttttccaccattagtatatatttttctgtaccattataaaaagaaaacactgttaataatataaagaatttctttttaaagaatggtattttctgtgagatgcattgttcagtgggatactactatggtgggtatattcctttttgggtttgccctacccaaagccactccctataatttgagtaatgctgacccacctctcattagagggaagacaagaaacttgaggttagtaggtaactctgaccatggtggttggttcagggagggcacatgtactatgttaggtcccaggtcattttctggagctattgggactgttagcttccagcttccagtggccagtgggcaagctatgcctgagaaagaagccaaccaggagaaagccaaagtgaagaaggtgggagaaagagtt

SEQ ID NO: 310353 - DNA, 600 bp, Homo sapiens
gactttcctggggctgttttacagttaactttttaatctataagtagaaagagcacactctaaaataaaaattaaaagtgtagtatagtaaatacataaatcagtagcttagtcatttattaccattatcaactattatgtactgtacataaatgtatccactatacttttatactactggcagtgcagtaggtttgttgacaccagcatcaccacaaacacatgagtaatatgtgtttgtgactttacaactgctgcagtgtcacttggtgataggaatttttcagctccattataatcttatgggactatggtcatatatggtccatcactgaccaaaagtccttatgtggtacacaactatactttaacatcttatagttgtatatcattttacataatagaaaakatatataatcttatttaatttgcatagtgatctggtgatatggaaatgattacacccattttatcgtaaaaaataggttcagagaggttagattcctggcttaaagccaaagacccaacagcgcagagccagaaccaatgtattgtgatgacagggaaaagaaatctttccctttataccagtttacaatc

SEQ ID NO: 310354 - DNA, 600 bp, Homo sapiens
gactttcctggggctgttttacagttaactttttaatctataagtagaaagagcacactctaaaataaaaattaaaagtgtagtatagtaaatacataaatcagtagcttagtcatttattaccattatcaactattatgtactgtacataaatgtatccactatacttttatactactggcagtgcagtaggtttgttgacaccagcatcaccacaaacacatgagtaatatgtgtttgtgactttacaactgctgcagtgtcacttggtgataggaatttttcagctccattataatcttatgggactatggtcatatatggtccatcactgaccaaaagtccttatgtggtacacaactatactttaacatcttatagttgtatatcattttacataatagaaaagatatataatcttatttaatttgcatagtgatctggtgatatggaaatgattacacccattttatcgtaaaaaataggttcagagaggttagattcctggcttaaagccaaagacccaacagcgcagagccagaaccaatgtattgtgatgacagggaaaaraaatctttccctttataccagtttacaatc

SEQ ID NO: 310355 - DNA, 519 bp, Homo sapiens
ttgttcaccttcacaaaataagtatttaagcaagaaatgggataaatcttttttaaaggttgtcatattttaaaatttgaataactacattaataagcctcagcacaatagcttatgactaccaccacaacaacccattaaaaccaagcagtgcaagttgtaatatgctgtcttttaaattgagtgggttatacygtattttttaaaactgattatgtttttatgtaatttataataaaatgttctttaatccagttttaatacaattttctaaagtacaacagccctccctaaccatggtgcttttcattacagatgcatgcctaaaaggaatctgccccaagagaaattatgtctcttatctacctccttctaataaagaaaaccctgcacttacgaagtaaaaagtaaatttcaaaataccactaggtgatttctgacatctcagccattttcacaccgtaaacgctgtgcatccttatcaataggacagatcagagcctggaaaataatgcaaac

SEQ ID NO: 310356 - DNA, 573 bp, Homo sapiens
tacctgcctaaatactttcccacttaaaattctatgaagtcttcccatcagatgtagaataacacctaaactctttactrtaaactgagttctcacatgatctggcccttgcttatctttccaactttatctaaaaactttgctgctctttgtcctccttgttctggccacattgatgttcttgtaaatcaaaggtgtcaagctcattcccattttagaccttttgcctcaatttccacttgcctagaaagcatttcttctgattttcactgactgaatccatctttgtcatttgcatatgtgttagtccattctcacactgttataaatatctgagactgggtaatttataaagaaaagatgtttaattggcttgtggttcctgcaggctgtacagaaagtatggctggggagacctcaggaaacttacaatcgtggtggaaagccagcgggaaccagatatgtcttcacatggttgaagcaggaggaagaggaggagggcagagttgctacacacttttaaacaaccagatctcaggataactcgctgatatggtttggttctgtgttccc

SEQ ID NO: 310357 - DNA, 556 bp, Homo sapiens
agatatagttcagcaggatgccttgtgaataaacaatatttggaagcagagagccccatatctaatgggttttctttcttcaactcagaagcaccaagacatcaatgcckggaatcttgactgagcagttgttcctctgatgaacagaagccgacctttcctcctgctgggagaatagcctctgcactttctgataagtatcagaaaaatttatagcttgcaccagaagtggagcttctccctgggtagtaaatctattgacacacataagggtttttctgtccttggcaagcttgaagcccagagactacagaagagcaactaatggaaggaaaacatgtacaagtcacttacctgctacagaacctgcagctccccttgcctctgcagagtgccagccacagttacattaggaagcggctagtgtgatactatcaatatttaaaggggaaagcgggcattggtaggagggggtgtcaagggaggggagggatgagaagtaatcttttcagaaacaggccagagagtttctcctttccttctctaataactaatt

SEQ ID NO: 310358 - DNA, 553 bp, Homo sapiens
tttaaacatttttgtcaaaaactaagacacaaacacacacattagcctagggctacagagagtcagggttatatatatcactgtcttttcatgtcttgtcccactggaaggtcttcaggggcaataacwtgcatggagctatctcctctgaatggcttcttctggaatacctcctgaagaattgcctgagactgttttacaatgaacttacgtttataataagtagaaagagtacactctaaaataatgataaacagtatagtatagtaaatacacagaccagtaatacatttattatcaagtattatgtatcatacctaattgtatgtgctataattttatatgactgacaatgcagtaggtttctttacaccagcatcaccacaagtatgtgagtgtcaaggaaaagagtcaaactctgtaaaatatttgaaaggatttattctgagccaaatatgaatgaccatggcccatgccacagccctcaggaagtcttgagaacatgtgcccagtgtgtttggggcgcagcttggttttacacattttagggagg

SEQ ID NO: 310359 - DNA, 558 bp, Homo sapiens
ctttgcaaaaattcagcttcacatgaaaattgggcaagttagtagaattctgctgcaggtgcccttgttgaaacttactagtgaatgctattggtataaatgctcacactgcaccatagatttcatccaaagttgtatttttctgcagctcccctgttaaaactcttctctccttgtatagcaccttctctcacatttcaaatacaaaattgtaaatgaaagggtaagaaattactttatatttaatgcatttgcaaaggatgcattgttctgtgaagctaggtttgaaaagaatccagtatttaccttcttttcccaggaaagtatataattttaacttcaatgttaaattcttatctatggttgacacaaaatattttagcacctttcccttcaatattaaaaataacaacaatgatgatagtaatctgaaaacgcaagtaacaatttaaagagtggaaccattattgtgttcctatggtaaatactgccggagtgattgctgatgattttcawggtgcatggtataaacacttttgtgtactggaattattgtct

SEQ ID NO: 310360 - DNA, 561 bp, Homo sapiens
attgtgttcctatggtaaatactgccggagtgattgctgatgattttcaaggtgcatggtataaacacttttgtgtactggaattattgtcttaaagttttcacaaaatgtaagccaatctctgcaaagccctaattgactcaacccttgaggtattcccttaaggaagaggggttctgtagcagcctctkgttggtgcattctcaggagccctaacccagtgatgaaatgttacaaaaatataaaaatctagtttttctgcaaaatacctctggcaacctgcaggacacaaaatattgctaagagtgctcccagaatttccagtttgctggcggaactggtattactgggcacctatttatggaaagacagttgtattacagcagctctagaaaccaatgcattacacatatagtcatggaaggccaatgatggagcttgtgaatagagatataaggattgatttaagctctatcacaagcaactttctggttgtagtctcagaaaaactgttatgccagtaaaatttagggtggaccatctttttgagactttaacctg

SEQ ID NO: 310361 - DNA, 602 bp, Homo sapiens
gttcattgtattcaaagcagcacaaaataccatatattctgaaaataagaatatcactttacaagtgaatgcttcacaaagaaaccctaagacataaacagatggttcatgtgtcttaraaatgcaaagaatggtagcttgttttcgttgtggaattattaaaaagcaacccagcactactaagctttcttttcttctctaagagatgatctcagttgtagacaaggagaatgctggagaaattaatatgtttctagatttcaaaaaagcactggatggtcttttgtgatataatgatggagaataagagcaagtattatgtgagtaagtagttcattaaataatgatatgcaagaaaattgatttatgtcacctaaagaagtcagtcatgtctattagtttttcttcttggccttggcttgaaaatatagaaatgattgttatcaaacactctgattatttattttcactcttgttccaaaaagaaatttagcatagcctataataatatttatactaaaacatgaaaacagcatttagaaaaagaaaacaattaacgaaaagtaagaaaagtttaagccagaaatgaggttggtactcca

SEQ ID NO: 310362 - DNA, 607 bp, Homo sapiens
taacaaaacaatggccagaaagtagcctgactgtacaattcttggtcaagacatagaatgctctgtgaatagtatcctttgcaattaagcagcatggcagccctaaaaaaggaaaatattatggtctttggaagtttacaaagacctccaaatgttggtttttgacttcagcactttctagctccattagttgctcatgcttttatttgcaaaagcttaagtctatgacttatgaagtaaagatatcattatctcaagttacaaaaaagtgaaactaaatgccttagttcacttgggctggtacaacaaaattccacaaactgggtggtttataaacaacagaaatttgtttcttcaagttctggagtctkggaagaccaagaccaaggtatccagtgacaccaaatctgcaggtgtcttgatcttggactttctttcatttttttgtcttttaattcaatagttttggaggtacaagtggttttcagtcagatggataagttcttcagtggtgatttctgagattttggtccacccatcacccaagcagtgtacattgtagcagtgtagaatgtatccaatatgtagtcttttatccctcacctgc

SEQ ID NO: 310363 - DNA, 672 bp, Homo sapiens
aaaatatattgaaaaataggtgtgtccatggattagaaggctaaatattgtaaagaggtcaattctccataaattgatccacagatttaatgctatttcagttaaaaacctcttcttgtttttgattgtttattatttctgtgaaacttgacaagttcattctaaaatttataagtaaagcccccaaagaagaacagcgtggaagggaattgttctaccttatatcaagatttattgtcatgtagtaacaatagagatcgcagggcagtggtgcttgggtagacaaaatagatagactgagtaaaatagaattctcacacagagactcatgtatacacagacatttgatttatgtaagtggtattatagccaagtgaaagggaaagttttacttttcaatacataatgttataacatttgagtatgttttgggaaataaatattgtaactcattccataaaaaaataattccagragtattatagacctacatattaaagattttagtagttcattaacagactatcttcttgatttcagatcttggaaaactcttacaccagacacaaaaagccataactataaagaaagaagttaatcaaatgcacatcattaggatttagagctttatgatgtcatttagagatatcataaagaaaataaaaagtgata

SEQ ID NO: 310364 - DNA, 245 bp, Homo sapiens
ctgaatttaaaatacaagttttaaaaaataaaaaaaaaaaacattaagactaggargttcaatttctatgtttattaaactgtaaatatcaattgtgtgagacaattgggctggtttcactttcttacatgaggatcctagctttttaaattaaatcaaacagattcatttttcaaaataccagagcaaacaacttttgtggcttccttggccttaaaagtcttcctcagggttgttgggtccta

SEQ ID NO: 310365 - DNA, 627 bp, Homo sapiens
tttgcagggacatggatggagctggaggccattatctttagcaaactaacacaggaacagaaaaccaaacaccacgtgttctcattcataactgggagttgaacattgagaccacataggcacatagaggggaaagacacatactggggcctacctgagggtggagactgggaggaggaagaggatcagaagaagtaactaatggatatggggtgtaatacctgggtacaacaaatccccatgacatgtgttcacctatataacaaacctgcacatcctgcacatgtacccctgaacttgaaataaaagtttagatagatagatagagtttataatatatataaattttatatatatagatgctttaaatgtatcatactgtcacaccagaaagygcttatcctaaaagtgctcaaaattattataattgatatatttgaatttgagataaattacttaacatactacacaaatgatcatgcctctgttataaaaactgtattgatatgtaatcattgaaacaatttcctttgtatatatctagaagtctttctcctccagggtattttatcaagttgctaggaaagcaaatttagttgtggcactccctgccagcactatttattt

SEQ ID NO: 310366 - DNA, 552 bp, Homo sapiens
ggatggtgagacagatttgactttgctgacatcaaactctttgtcacagctttctctccaaamatatactatacttctagatttcactctactttcatttttttttcttggttttgaaggccttctccccaaacatacattttctcagcagtgatcctccagtgtctgcagtcatcttgttctagaaccataattctatctcgaatcttcctacatatacagctatgctaactcctttccctctctcttcctgaaagtaaaaataacaggctctaatttctgacttcaaggatgccagtttcttttctatctttagggtggcataagcctgttccaaaaatggggtcatgagagggggtagggaggtaagcagaactctccgtttgggaatgagtgtccaaaaggacttgtgtgaggagagctgacacccgccacgtggagtgggggtaaggcaaagcaaaacaaaaggcctcgcttcagccagattctccaaaaggaccttcatatgaataaaaagatcggctgatttgtatgcaggaatttaaatatgaa

SEQ ID NO: 310367 - DNA, 554 bp, Homo sapiens
gggcttccaaaaaacattcattgaaaattgaaacattgaagatactatgatgaatactataataatttttsttgttttgttttacaagaaagactttttggactgtgagttctccctatgatgactgttccatggctagggtccttatagtactaagaaatatagttcctctcaaaatctcccctgaagtagtcattataatatctcctcccaaaacctgtccacaacaacaacaaattgcgtccttttcagggttgggtacagcacaaaacagagattgtgaaaagatacttgttgtaaactgttttctgtttacaaatgcaacagcaacaaataattttcttatcagaacctaaattctgacaccatacctcagtacaacactgtgccattcaaaaaaaaaaaaaggagaaataagctgggcatttggaaacgcactgggaaacatctccctataccctgaggagacctatctttatgccaaattgaattattttgaaaactcgtgaatgacattagctgaggttaagtgacagaagtgagtgtgaggagaa

SEQ ID NO: 310368 - DNA, 355 bp, Homo sapiens
actataataatttttcttgttttgttttacaagaaagactttttggactgtgagttctccctatgatgactgttccatggctagggtccttatagtactaagaaatatakttcctctcaaaatctcccctgaagtagtcattataatatctcctcccaaaacctgtccacaacaacaacaaattgcgtccttttcagggttgggtacagcacaaaacagagattgtgaaaagatacttgttgtaaactgttttctgtttacaaatgcaacagcaacaaataattttcttatcagaacctaaattctgacaccatacctcagtacaacactgtgccattcaaaaaaaaaaaaagga

SEQ ID NO: 310369 - DNA, 355 bp, Homo sapiens
actataataatttttcttgttttgttttacaagaaagactttttggactgtgagttctccctatgatgactgttccatggctagggtccttatagtactaagaaatatagttcctctcaaaatctcccctgaagtagtcattataatatctcctcccaaaacctgtccacaacaacaacaaattgcgtccttttcagggttgggtacrgcacaaaacagagattgtgaaaagatacttgttgtaaactgttttctgtttacaaatgcaacagcaacaaataattttcttatcagaacctaaattctgacaccatacctcagtacaacactgtgccattcaaaaaaaaaaaaagga

SEQ ID NO: 310370 - DNA, 541 bp, Homo sapiens
tctaatcctctttgttctccccttcccatgcattcttcctatcttttttacctctgacactttttaatgatttcctccagattaatgttttctaagacatgtttcataagttacaacacaaagatcctaaaaggctagagagcattagttaatctcagttaattttggagatctagccatttaccttcttatgtatgtgattggtttgtttgtttgttttattacmctataaaattcagacacttaaagacatctcaatttaggcactttggatgatccactcttcataatagtatgaatactatcaatcttccaatagttatcgttattagtgttttcataatattagtgataagtttttcaattctgtacatatgccgactatcccctcacttggattgtacattacattttcaagttatttttaacaataggcctaggagcacacagaaaaagaaaaaagaaagaaattgattgctgaggaagtcagcatgtgaatagaaataagattctatggattgcacttatgctagcaaaaaaa

SEQ ID NO: 310371 - DNA, 558 bp, Homo sapiens
tacatttaatgacattctcataagcagctttgtttttcacttaatgtgaccgaacataaagcaaataccaggtgttacttagagctcagaagagaccgaaacagaaatttcacatgaaatgacaacagttaacaaacaaacaaattagcaggtgcaaagacatactgtgtaagggaatatctatttactatttcagattagctcattatgataaaattttaatataaagtatgtatatagtcatattactaattcagataaacattttgaaaacataaaaatgcaaaattctctagaaaaatattttctctcgacagaaaactgtcgcacaccagagaattaaggagatttgttttatttaatagataagaatgataattggtatatatatggcttatacgcaaataggtgaatttcagtgtttgaaagcatggtgcttgcctatattctaaacactgcctgtgaacaatgacattaatttatactaatacaatttgttaagaaaaagtaagcagctacatccattyatttaagaaatacctatttagtttctcctct

SEQ ID NO: 310372 - DNA, 605 bp, Homo sapiens
aaacagatttgtctgcctttgagatgcaaagtttggcactagaatagtctaaagaattacatagttttgttcaaattttcctatctgggttctaaggaatgttctattttcaggtagaaatagatttggcaaacaagtaaaactagtcactggtcactgggtccacrtttggcatcactttatatactttgatgtttgaaaggctttatcacagcacattgaggtgtcccatcctcatatatcatagccttcattgcagttataaccataattgaataactgtgtgactaaagctctgttcactacctcttccaagatgcttagaaaaatgcctggcaaataatattcattataaaagtaattcctggataggtggatacaagaatggaggatgaagacagtttctcctcatttatgcaattattcccagtgacaactgagttatcactttagggcactctaataaaataagagctcagttttaaagtaggaacactgtcacctaagtctttaagtgtggaggtaaaagtcctttcctctgtctgtgctacttcctccatggttacccaggtcatacataaacttatggccatagttataatggt

SEQ ID NO: 310373 - DNA, 572 bp, Homo sapiens
taatagtttgaacctatagaggaacagtctaccatatctaattcattcattctttgacaaatgagagaatttgggattaataaaaattacagataaaaatcagagttttatagaagtgtgctctcatggtgtgttactggaatctctgtcattcccttcaacaatgcacagaacacaacctggaagcctgccaaagcctctcaggagtgtcgtttgtcacacctgaagaagaaagaactgccaagataaccagaagatgcaacggtggtcagactgctgtcagattgcccattcttgggtctttggcctcaatgcaaattagtgcrtgttgacgggaaatgcacacaggaatttaaataggacccatacactgagctgcttcttgctatagtttactccaggcccctcccctgtctcaacaggggactggtcagtgtttcagcattagcctcccacagtattttaaataagacttttttttgtcttttctgcgtcagagtctctggttgccagattgctgagctaattaaaaggagcacagacaggtcttgtattttttcctccttagtaag

SEQ ID NO: 310374 - DNA, 556 bp, Homo sapiens
aaatgttcaaggaagtaaaaatcaagtctagaggatcatgatgttggaatccaagatcagagactatgaaagatggactcagattaaggactgattgtactgtacctatacatgtgtccagatactttgctagcaagctcatctgcctttataatccaagataccacgtcccaakgctaggcctcgttatcaggtaaactattacttcaccgtcaataaggaaaggtgtgtcttagcaaaataaagttcagagtcccacaaaccacacatgcacaacattcaatcaaatgatgcaatgttatttacaatccttcagagaggagtctttcatgcagggaccatgggctcaaaactgatggtgctgtacaacaaatatggagtagccaaatattccgtccatccaaaaaagcacagatagtgaagctctgtcatttattagtggagtaatgttaggcaagtcatataattaatctgagtatagtgtcttcatctgaaaggacacagggagaaatcatgcccattttgcagtgtctcatgaagaataaatagtaggcaa

SEQ ID NO: 310375 - DNA, 581 bp, Homo sapiens
gttataatgtcccattaagtatcacagtgtgcatgagtagaactataagattgtactgtctttttaaaactgattctcatttttgtactgttttctaccttttcccacctttatttcccaatgatattaacatgaagataattaactagaaagcctaaaacttttagtttttactctcctttccttcccaaggaaaatktgggattttgaaaactgttgacatatgccatgtataggtgtgcttggtgaatctaattcaatttcatcattaaggagaaaactaattttaaaactacatttgaacataaggttttcgaggggaggtgtgtgaggccaggacttgttggcctattaaaactccacagatcagtttgtagattcttaactaaggacaactttattcttcagatctgtctgtactgagtggcatgacattttgctagacagcaggtactaaaagatatacttactcatccttcacatttgctcatccccaggctactcaagatatgccactggggtgtctttgagcaggttcgctgatgctgcttgggatagtacacaatattaaatgcaaaaag

SEQ ID NO: 310376 - DNA, 581 bp, Homo sapiens
gttataatgtcccattaagtatcacagtgtgcatgagtagaactataagattgtactgtctttttaaaactgattctcatttttgtactgttttctaccttttcccacctttatttcccaatgatattaacatgaagataattaactagaaagcctaaaacttttagtttttactctcctttccttcccaaggaaaatgtgggattttgaaaactgttgacatatgccatgtataggtgtgcttggtgaatctaattcaatttcatcattaaggagaaaactaattttaaaactacatttgaacataaggttttcgaggggaggtgtgtgaggccaggacttgttggcctattaaaactccacagatcagtttgtagattcttaactaaggacaactttattcttcagatctgtctgtactgagtggcatgacattttgctagacagcaggtactaaaagatatacttactcatccttcasatttgctcatccccaggctactcaagatatgccactggggtgtctttgagcaggttcgctgatgctgcttgggatagtacacaatattaaatgcaaaaag

SEQ ID NO: 310377 - DNA, 609 bp, Homo sapiens
aaatgcaaaaaggagataaataaaaccattaaaaataccacgaactgcgagaaaaatatgaactctattttaaataatcatggttgtaaatgcattggcacctaagagggagaaaaagaaatatcaagtttattcttcgaccctttatatatatataaaatgtgccagataactgtgtgcatgtgtgttctctagtatgtataacatatgaccccaggaatatggacttgtttctttggtattatattcataggtcacttaacaatgaagacacattctgagaaatgcactgttaggtgatttcatcattgtgccaacatgatacataaagtatatgtacacaaacctagatgatataacctagattttagcctagyagcaataatctatacaatacagcctagcctacacacctaggctgtatggtatagcttattgctcctaggctaaaaacctggaaaacctgttgttgtactgaatactccaggcaattgtaacacaatgatgtggcaagaatttctgtgcctaaatatatctaaatatagaaaaggcacagtgaaaacatactataaaagataaaaaatgaagcacctatatagggcacttacc

SEQ ID NO: 310378 - DNA, 609 bp, Homo sapiens
aaatgcaaaaaggagataaataaaaccattaaaaataccacgaactgcgagaaaaatatgaactctattttaaataatcatggttgtaaatgcattggcacctaagagggagaaaaagaaatatcaagtttattcttcgaccctttatatatatataaaatgtgccagataactgtgtgcatgtgtgttctctagtatgtataacatatgaccccaggaatatggacttgtttctttggtattatattcataggtcacttaacaatgaagacacattctgagaaatgcactgttaggtgatttcatcattgtgccaacatgatacataaagtatatgtacacaaacctagatgatataacctagattttagcctagtagcaataatctatacaatacagcctagcctacacacctaggctrtatggtatagcttattgctcctaggctaaaaacctggaaaacctgttgttgtactgaatactccaggcaattgtaacacaatgatgtggcaagaatttctgtgcctaaatatatctaaatatagaaaaggcacagtgaaaacatactataaaagataaaaaatgaagcacctatatagggcacttacc

SEQ ID NO: 310379 - DNA, 557 bp, Homo sapiens
acctgttgttgtactgaatactccaggcaattgtaacacaatgatgtggcaagaatttctgtgcctaaatatatctaaatatagaaaaggcacagtgaaaacatactataaaagataaaaaatgaagcacctatatagggcacttaccatgaaaggagcttkcagggctggaagttattctgggtgagtcagtgggtgaatggcgagtgaatgttaaagacattactgcatactaccataaactttatagacactacactaaatttatttaaaattttttctttcttcaataagaaattaaccttagcttcctataaccttttttactttataaatttttaaattttttaaaaaattgtcttgtgtaataacacttggcttaaagcacaaacattatacagctgtgcaaatatatttgctttctttatatcattctgtaagcatttttccattttttattttttattttttttaactttataaatgtttttgtaaccaagacaaaaacatatacgttagcctagacctacacagggtcaggatcatccatataactg

SEQ ID NO: 310380 - DNA, 557 bp, Homo sapiens
acctgttgttgtactgaatactccaggcaattgtaacacaatgatgtggcaagaatttctgtgcctaaatatatctaaatatagaaaaggcacagtgaaaacatactataaaagataaaaaatgaagcacctatatagggcacttaccatgaaaggagcttgcagggctggaagttattctgggtgagtcagtgggtgaatggcgagtgaatgttaaagacattactgcatactaccataaactttatagacactacactaaatttatttaaaattttttctttcttcaataagaaattaaccttagcttcctataaccttttttactttataaatttttaaattttttaaaaaattgtcttgtgtaataacacttggcttaaagcacaaacattatacagctgtgcaaatatatttgctttctttatatcattctrtaagcatttttccattttttattttttattttttttaactttataaatgtttttgtaaccaagacaaaaacatatacgttagcctagacctacacagggtcaggatcatccatataactg

SEQ ID NO: 310381 - DNA, 645 bp, Homo sapiens
ctctttgctctaggatggtaactcctatctggacacttttcatttgttactgtttgacctctttgcttgtattacaggctatatttaaagaaatagataacattctctctgaggttgatttaaaccaacatcctgtacgttgctgctatagcttcccaacattttgtgtagaggggatgctattgaagttgtgttttaatatggagccacactgttttctttctctgacccagtctacagtcagcctgtcccaaggctgccatctattctctgtgtttgtgcagctcatctggacagctcatctggacagacacaaagaatagctgtgttggagctgtgttgtggtaggaatcacttctgtgctggtagattttccaggacttcattgatgatgatcctgtgtttcctttctatgtgatagctgagatgatctaagtcagcctctcagataagggaaaaaggtgataacctatatgatatgatttgaaagataacaggaaagctattwtattcctaattaattactatgtaagtatcaatgtacctcaaatttcatttccagaagcatttcttttcatgaaaatgttgccccctctcttctctgaaagggcctaaccctcttggaaagggttgaacactgatgtg

SEQ ID NO: 310382 - DNA, 533 bp, Homo sapiens
ctcctaccacacatatacaccacatggtgtcttgtttgcacctttcttttgagatatttccccccaaatggaatgaacctatgttcattgcaaatttaaactacagaactgtataataatggaaatgaaagcattgtacaaaattaatcactgctaatacatttgtgtatgactttccagtattcaaatgcatattttacctatttgaaattatattgaaatataatttctgactttcttccatgttaacatgacaacaaaagaatttcccatcttttaaaattcctcaacaaatagcattttgatggctrcatggtggtgtgtctagaagaactatcgttttcttaatattttctctattattgaacattaatggtgagacatcagatataaatattctgtggtcagctaacaattactgttggcactgtgtgtgtgtgtgtgtgtgtgtgtgtgtgtgtgtgtgtgttgtggcagttgttggtagaaggtttgagctgagggaaaatatgctatatctccccccatctcaa

SEQ ID NO: 310383 - DNA, 514 bp, Homo sapiens
  misc_feature (1)...(514): n = A,T,C or G
ggaaaaatgagatacaagaaaagtatatgagaggagagagatgcaccaggngaaagaatraagttgaatagagggaaagaaagaaagatggtagagaatacaaagaaatatttagccaattatttctctatgacttgccaaggtggccaggatggaattatgctttcagaatatggcattcagtttgctatccatatcatttccttatcccaaactcaactcaactgttttgcagaagcatgtgaaagtatgtgtgacatactccctcttctgatatgggtaattgtagcatttaagaagctggccttattgcaaaaaaataaaataaaataaaataaaataaaaaatctgtgttctgttgcaaaactctggaattagatttcctgctgccctttcaccttctcaattgcctggtataccacagccatctttgtgatggcaatcctgaatccttggccttaaaccagccatgctcccctggggctgcacacagcagtactctgaaattcctact

SEQ ID NO: 310384 - DNA, 640 bp, Homo sapiens
tgaatggttttgtaaaaggagagaaacatgaattgacagtaacataatgtggttttctggttagggtgagatagaataaaaacttcataaacttccaggtgtgataggtaaatcatgcctcagatagtgggataacctggctctcctattatcaaatgtctgtgaaagctaagaaaagagtttggtaggacaggtagaacaggtgaattagtgaagagcagatcaatttatatttaatttgaatgtcatagggkttctaagatgttcttaagtcccttggggggtctttagtaggaaacgcttgagaaaaatttcatgtagcagtgtatagaataactttcttggctggggaatagattatactaaagacaaagagaagaaactgaagtaaattagatgtgcttgtgtcatttgtgagtaaggtgaatctagccattctaataatgacaagataggaattaaatgaatgcttactataaatggtcttcacgtatgataataatgtccactaccatttgttaagagttcacaatgtactaggcaatgtattaaatatattttaagtattatctcacttataatcttcatgataaacctaggaggttttgttatattcaccattttatagctaagaaactaa

SEQ ID NO: 310385 - DNA, 640 bp, Homo sapiens
tgaatggttttgtaaaaggagagaaacatgaattgacagtaacataatgtggttttctggttagggtgagatagaataaaaacttcataaacttccaggtgtgataggtaaatcatgcctcagatagtgggataacctggctctcctattatcaaatgtctgtgaaagctaagaaaagagtttggtaggacaggtagaacaggtgaattagtgaagagcagatcaatttatatttaatttgaatgtcatagggtttctaagatgttcttaagtcccttggggggtcttwagtaggaaacgcttgagaaaaatttcatgtagcagtgtatagaataactttcttggctggggaatagattatactaaagacaaagagaagaaactgaagtaaattagatgtgcttgtgtcatttgtgagtaaggtgaatctagccattctaataatgacaagataggaattaaatgaatgcttactataaatggtcttcacgtatgataataatgtccactaccatttgttaagagttcacaatgtactaggcaatgtattaaatatattttaagtattatctcacttataatcttcatgataaacctaggaggttttgttatattcaccattttatagctaagaaactaa

SEQ ID NO: 310386 - DNA, 640 bp, Homo sapiens
tgaatggttttgtaaaaggagagaaacatgaattgacagtaacataatgtggttttctggttagggtgagatagaataaaaacttcataaacttccaggtgtgataggtaaatcatgcctcagatagtgggataacctggctctcctattatcaaatgtctgtgaaagctaagaaaagagtttggtaggacaggtagaacaggtgaattagtgaagagcagatcaatttatatttaatttgaatgtcatagggtttctaagatgttcttaagtcccttggggggtctttagtaggaaacgcttgagaaaaatttcatgtagcagtgtatagaataactttcttggctggggaatagattatactaaagacaaagagaagaaactgaagtaaattagatgtgcttgtgtcatttgtgagtaaggtgaatctagccattctaataatgacaagataggaattaaatgaatrcttactataaatggtcttcacgtatgataataatgtccactaccatttgttaagagttcacaatgtactaggcaatgtattaaatatattttaagtattatctcacttataatcttcatgataaacctaggaggttttgttatattcaccattttatagctaagaaactaa

SEQ ID NO: 310387 - DNA, 516 bp, Homo sapiens
ttagctgaatattctgcttaactctcagttacttcctctgtgcttcaactttcccacttcagtgatgtctctgtaggtacagtgttgacccaagttatacttacagaacatactaactcagttaagtaataccrgacctgtcctgtgtcatctactttatctctagttatgggaaaggtgtatatcctacattaatatgttttccagcaaattgaagtttaatttgtaaatgagaactattcattataacaattttaatgtcaattttaggaactatacagtgcaccccctgcattcttagagtacaataattgctattcagtgtttaatgatcaatgacctagaccatcagtataagtaagaattgtactctgagatactgtacaaataatttcaggtcttacattatttgaatgtgtttccaggtggccatttagtaactgtgcaattacctgtgtatattaacataatgctgaccgtttaaagatgttcacactgatccattcaaagatttat

SEQ ID NO: 310388 - DNA, 520 bp, Homo sapiens
attatctatgttttatcaggaattattagtgaatttaagaccagtatctaagttgtctaatgtgtacctcagtgttccttccacmtgaggatcttacctactaagtgtccagacgagcactgcttatgttggcagcatagacgcttttaagtaaagaagatagagaatacaagaaaatcatgagtggtggagaggtaatggtacacaatgaagattcacttaagaaaaatgtttctgtattcctcatttcaaatatgccaagcagggtagagaggtatacagtgacaaaaatgtactatgtaagcaactatgatttaaaaagatcttcatgttagaaatattgttatgtgctagaagatgctgtggcttcagtatctgacccgaattgtgtaaaaggagtcatagacttctgatgttgagggttatcaaatgaaataagaaaagaaatccaaacacttctcatcaatttatttacttccaggctgtactgtgcttttctagattaataaaccatactaaa

SEQ ID NO: 310389 - DNA, 566 bp, Homo sapiens
tattgaaatcttgcatcactaattttgtaaatatttgtattttgtcttcctgtattttgtcttaaaatattttatttgatgtaaaatctgycctatatttatgtatagtctgaactgcacctggcacaagatatcaatcacacaccttttcctcctgagtctttcaattatgggtgtgagggcaaaaaaaaaggtggatgccacccacccattctatgtttgaatcttgagagaaggcttttatttagtcttaaggctggtgatgggtaagtagatcaaaagaagaagtaatagtttgaacctatagaggaacagtctaccatatctaattcattcattctttgacaaatgagagaatttgggattaataaaaattacagataaaaatcagagttttatagaagtgtgctctcatggtgtgttactggaatctctgtcattcccttcaacaatgcacagaacacaacctggaagcctgccaaagcctctcaggagtgtcgtttgtcacacctgaagaagaaagaactgccaagataaccagaagatgcaacggtggtcagactgct

SEQ ID NO: 310390 - DNA, 573 bp, Homo sapiens
taggtgttagaaggccagttttattttttaaaggtaaagcaagggaagatgacatttgggcaacatcttgaggaagctatgggtaccagctrtgtttgtatctgagggaaaagtgatccaggaagaagggacagtgattatacaaacattgaggccagagcatgtttagagtatttgcagaacagcaagaagactatttggctggctcctagtgaactagtgggtgaatagatgatgaagttagagcaataggattgtatagggccttatagacaattgtcaggtatgaattttttgagtgagatggagagcaattggaaggttttaagtagaaaagtatcatattcagatttaggctttaaaatgataattttggctattggatgagaataacttgggtgtaagaaagagtgtggcaaaagtcaaagcagtgacgtcttctagtaggtatagttataaagctattgcaattaactcaggtgaatatgatggtaacttgaaccaatgtgataacagtgaaagtgacgagaaatggtcagaggttgacagtagagctgttagtacttaatgatg

SEQ ID NO: 310391 - DNA, 567 bp, Homo sapiens
gagggataagaaggatttgaaaatgaaaagataacatggttgtagcctcgatgctkgatgaattgctcctgtgtagtactttataatgctttatttagttcacccactgctagctccccatctttcttccttcactttctctcttgggtgctgttcttttccttttgtacttaccagaaaacttatagctcctagataaaacactagcttcctttatgatgaatgtgtgtttttgattctacaaccatatatcaagctcaagaacacagaacaaatgtctgctacagacaagagggcttatgaagaagtcttgaccactatccagctatttcaattgacatatctctggactacagggatatggggaagatatgggcaatgaaaggccaccaacacttatggatgttacagttaacattcatcaactgacttctgttaacagatggttagggaaaattattaatttacatttaaggtctcaataaatggtttttttaactgatagctgccaattaaattaggaagaaaatatatcaaagcttctttcaaagagttagaaaagtaata

SEQ ID NO: 310392 - DNA, 591 bp, Homo sapiens
agacaatgcctggggtggtggatgtgttatrtgcagagctatggtggcccgaccagaacacctggctaaggaatactggaatgggctggcattttctttgtgtatgtattgtttagtctaaacaagtataatgatagttctctcttcttcttatattattcttttttatttactgtattttgttccttccactaaatcataaacccctatgtcacctatctttatttctcttgcttgtatcataattttttctctctctctgtctatgatgcatgatcaatgactacttttatcttgaattatccatagatctctttcattcctaaaataataaaactataataaacatgtatgtgatagaaataacaagaattatgtatatgataatagtaagcttaggtatgttttttaaatgggtaaatacaggtacctcattattaacaaaatacatgtttgagaatacatgtacaaataaaatatatttttgggaatacatctgaggcttgtacatggattccttttatgttgttataaacattatttgttctgagatatcaatgttctttaagcattttgagattaaagatatac

SEQ ID NO: 310393 - DNA, 591 bp, Homo sapiens
agacaatgcctggggtggtggatgtgttatatgcagagctatggtggcccgaccagaacacctggctaaggaatactggaatgggctggcattttctttgtgtatgtattgtttagtctaaacaagtataatgatagttctctcttcttcttatattattcttttttatttactgtattttgttccttccactaaatcataaacccctatgtcacctatctttatttctcttgcktgtatcataattttttctctctctctgtctatgatgcatgatcaatgactacttttatcttgaattatccatagatctctttcattcctaaaataataaaactataataaacatgtatgtgatagaaataacaagaattatgtatatgataatagtaagcttaggtatgttttttaaatgggtaaatacaggtacctcattattaacaaaatacatgtttgagaatacatgtacaaataaaatatatttttgggaatacatctgaggcttgtacatggattccttttatgttgttataaacattatttgttctgagatatcaatgttctttaagcattttgagattaaagatatac

SEQ ID NO: 310394 - DNA, 519 bp, Homo sapiens
tgaaacttaacattaaccacatcgtcccatttacctgggcttctggggaattcaaagccaaatgtgctgcccacttcaaatgtatagaaatatattgcatactgccatttgttttcttttccaactattttttttgccatatttgatctacttcttttacatatttgtatatatttttgaaacctgacacaaatttttggaatgaggcttatataagtaaatcaagtgatatcactgaatattaaaggtataaggagggagtgaggatactcatgagaaggtatacctgagcattgatctggttatgtgatatagactctcatatattacatattttaactattacattaacagataacctttctttggctcttactatgtataatatgcagtattaagcactttatattactaagtacttyattttcgtagttttgtttgcacttcattgcaattctatgttgttatgcacttagtgacaaaacggattcaaaggagttctatgttttatccaagatc

SEQ ID NO: 310395 - DNA, 545 bp, Homo sapiens
tgaggtctattttggccaagtggtaccattcactgttccttcaacatgtccttacttttctattctattaactttcctcctgggtctaggattgacaacgatgcagtctcaatctttraaatctatttctaccatgatgctttccctgattctttaaacatatgggatttctctctgctttggcccccaaaagactttgcacctctcatgttcaccttagttctcattttagtggttatttatttacttgttcacacttacccattcctcccttcatgatacaataaggttttgagcctgtgtctaattaatatatctatatttttaagtagctagtcttgcaggccctgaaaaccttttggttcaattaaaatagtttaactttgatatacagacctatgcttgaaagtgaaagtcttatagacaacagaaccactgtttatgagaagagaaagagaaaagataagaggaataataagaaaaaagggcagcttccttgggttatgaggtaattattggaattcggtcagaaaagtaagaaatag

SEQ ID NO: 310396 - DNA, 545 bp, Homo sapiens
tgaggtctattttggccaagtggtaccattcactgttccttcaacatgtccttacttttctattctattaactttcctcctgggtctaggattgacaacgatgcagtctcaatctttgaaatctatttctaccatgatgctttccctgattctttaaacatatgggatttctctctgctttggcccccaaaagactttgcacctctcatgttcaccttagttctcattttagtggttatttatttacttgttcacacttacccattcctcccttcatgatacaataaggttttgagccygtgtctaattaatatatctatatttttaagtagctagtcttgcaggccctgaaaaccttttggttcaattaaaatagtttaactttgatatacagacctatgcttgaaagtgaaagtcttatagacaacagaaccactgtttatgagaagagaaagagaaaagataagaggaataataagaaaaaagggcagcttccttgggttatgaggtaattattggaattcggtcagaaaagtaagaaatag

SEQ ID NO: 310397 - DNA, 545 bp, Homo sapiens
tgaggtctattttggccaagtggtaccattcactgttccttcaacatgtccttacttttctattctattaactttcctcctgggtctaggattgacaacgatgcagtctcaatctttgaaatctatttctaccatgatgctttccctgattctttaaacatatgggatttctctctgctttggcccccaaaagactttgcacctctcatgttcaccttagttctcattttagtggttatttatttacttgttcacacttacccattcctcccttcatgatacaataaggttttgagcctgtgtctaattaatatatctatatttttaagtagctagtcttgcaggccctgaaaaccttttggttcaattaaaatagtttaactttgatatacagacctatgcttgaaagtgraagtcttatagacaacagaaccactgtttatgagaagagaaagagaaaagataagaggaataataagaaaaaagggcagcttccttgggttatgaggtaattattggaattcggtcagaaaagtaagaaatag

SEQ ID NO: 310398 - DNA, 335 bp, Homo sapiens
gattatgctgacagagtgagggggatttaaaagcagtctccattctaatgctttttaaattctcggcatagtgtaatgattactattccaaaacagaagatatgttggcaaactgccctgtatttgaaaatagaggaaatgccctggaaagaatgagatgtggtaaagagaggaaatgacaatgtactgaaaagactgggctgtaagtcatcacagcggcgccctgaaacccgatatgtcaggcargctggtgggatcctgggatccctcatgtaacggcactcattctgacagaagcagagataaaacagactaagtacacagaggagtttaag

SEQ ID NO: 310399 - DNA, 576 bp, Homo sapiens
tgtttcccactcttagccactcctgttttggttgtcatttattttaaaaagtgatatctcattttcattttaagtcatttaaaatcatgcgaaaagcgatttaaaccactgcgtagcagatccagaaagaatatgtgtttaggaccttttcttmcccacttggccttcatctggctgaaactgttctgctggtcccttggtttaccacacagccacaggggatttctgaaactgcatttttttctttctgtgacgttggattatgaactgctgtcattccagaaaaatgctgtgttagattctggcaattctggtatctcttgaaatccctaaacttaaaaataaagccaactaatgtttcacttaccctatcattgaactgtttatctcatgtatttatgatagatacagatgttcaaattatgcgttgtttcttgccccatcttatttttgtacacttgatggagcggctgaattattcatttcctgactttgtgaatttgtgttcaacacacatactaagaggttgtgacataatagtgatcagaagtggagtactgtacttgtataccaaat

SEQ ID NO: 310400 - DNA, 595 bp, Homo sapiens
ttaccctatcattgaactgtttatctcatgtatttatgatagatacagatgttcaaattatgcgttgtttcttgccccatcttatttttgtacacttgatggagcggctgaattattcatttcctgactttgtgaatttgtgttcaacacacatactaagaggttgtgacataatagtgatcagaagtggagtactgtacttgtataccaaatgctaaagtgtatttcaaagtttaaaagtgaaacaagcatatttcctttttacttagaagacctgtgtaagtaattccaaaaacagtcaatgaggggaaatcctgtgtgcatatgtagaaatgtgtttaagctcagtgaatttaagcagcttttttggcacagttgaattgaaggaaataataagacataaatctaagacgttgttaattgtcaggttttcgtacatwgagatctttgaaagaagttgttttgtgccttcttaggtaagcggaattgatagactttaaaatttctatgtgaacataaaaccattggtttaaaaagctaaaagtgcatcatttatcacttgctccccaaagtttttccaaagtcaagaataatt

SEQ ID NO: 310401 - DNA, 358 bp, Homo sapiens
ttcttatgaaccttggctgggttttctgttattttttgatttggtgacatagctctcaaagatttggtgacacagcttcttgagtcactttcatctctcttaaaaaaawtttttttttaacaacttttaagttcaggggtacatgtgccagtttgtttcataggtaaacttacgtcatgggggtttgttgtatagatgatttcatcacccaggtgttaagcctagtacccattagtaatttttcctgatcctctccctcctcctaccctccaccctccaatagaccccagtgtgtgttgttgccctttatgtgtccatgtgttctcatcatttagctctcacttatcagtgagaacaa

SEQ ID NO: 310402 - DNA, 603 bp, Homo sapiens
acttttctaagtactggggcacagcggtacctcagacaaacactaatctctgtctttgtggagcttatacctggctgtatgaacattctggtccatatggtatccatgtaatagaaacaattactayttctgagacatatgaactcagttctactggcacttatatacttcccaataggccacctgaccaaccaggctatggcacagacagctgtagttagtaagttctgtaagctttttccttacaagagtgtaacctattcttttgtatgttttaatctggaaagatcaaaaggttgtctttaaaagtaattctctaggtcctgtttgcagcaaattattagcacctgatatcaaagcacagtataccatattgaggaaatttctccaaccagtaacctaatcatcatacagatgaattagcaaaaggtttgcacatctcagaacatcctgctcagtgctaagagaataaacttgataccccgttaagtactgtatgtatagtatgtacaactttgcatattatggactgattgtgtgaagacaaaattaatagtgtccccggagtcatctctctgcaacttccttttatatgaaagcatc

SEQ ID NO: 310403 - DNA, 612 bp, Homo sapiens
ggcttcactcacccattattcactgttttattctgtatatttggctatctagtcatcttaagaaaaatacgtatgccaaaaaagcaatagcaagatagtaagaacttgccaacttaagaaacatctcaatctgaattaatgaaaattataaatgaaatagaataatttaagtgaatatactttattattttatcaatgtaaaagtaggccaaagtaaaaaaatatttgagtgatttattttagagtaaccatagatctcagttgrcccggaacaatgccaaattagaacacttgtcctgtgtacagttattaataagtgccccatttcattctgaaaagcacatgcacatggagaacaaactgtatggtggttgtaattttaggaaacataagagactattttgtagtgtctatctgatcattctattttctaaagtttttagaagagcctaattctgatgtttgttctctctgcagaaatgctatttacttgtgaaattttgaattatggaatgtgaagtcacgttcagtaggatttatttctgagaatcttgtgaggccttggttgaggacagttcccgtccagacaggttttgcttctgccaagcatcc

SEQ ID NO: 310404 - DNA, 546 bp, Homo sapiens
ggttctgtttttctggagaattctgacaaatacagggtgtacttaacaaagaatagaagttaaaagaacaggcccacatgccaaactgcctatatttgaatcccagctacattccaccttggaaatgtgtgactttagcaagttatgtaacttccctatgattcagttatcttttctgtaaagcatggtgattatacagttgttatgaagattcaattagtgtgtatatatatgatatatacatataataaatataaatttattttaaagatcctactggcactatgaactatctgataaattattgtttttactaataatgattactcttcacaatctattactataaactacattagtaataaaaatggtattgaattattttaaatgtcacgataaaattstaagaattagcaaaaacatttcttaactttagaatacttgcttagacatggtgccatttccccttgaactgttctctataaatccaaattttccttataaatagaataaattatttcattatagtctatcacagtttttact

SEQ ID NO: 310405 - DNA, 594 bp, Homo sapiens
tggtttctaataaaaattatgctgtcaacatcaactgtttttcttcatttatttaaaatctaaaaataatttaatattttaacatttaaatattttgctgtaaaatttaaaccatttaaactatttaaattaaattatttaattttattgttraaacatttaaatttttaatatatttttgacttactataaagcagtatttgttcacatagagaacacaatgaaaaaattgaaaaaccaaaacataactttttagtaagcctaaggctgttactcaaatacaggcatacctcattttattgtgtcttgctttattgtgctttacagatactgttgggattggttttttgttttttgtttttttttaaattgaaggtttgtggcaaccctgcattagcaagtctatcagctctcagtgccatttttctaacagtatgtgctcccttcatgtctcaacgtcacattttggtaattttctcaatatttcagacttttccattattattattatatctgttatgatgaactgtgatcagcaatctttgatgttactattgtaattctttgagggcaacacaaaccatgcacatataa

SEQ ID NO: 310406 - DNA, 649 bp, Homo sapiens
tgaattcaattgttttaatgtttagctcccacaaataagtgacaacatgcagtctgtctttctttgcctggcttatttcacttaacataatgttctctagctccattcatgttgttgcaaatgacaagatctcattctttttcatggctgagtagtactccatcaggtacatgtaccacattttctttatccattcatctgttgatggacacataggttccttccaaatcttggctattgtgaacagtgctgccataaacatcacagtacagatatctctttgatataatgatttcctttcttttgggtatatatccagcagtgggactgctagatcatatagtagttctattttcagttttttaaggaacctccaaactgttctccatagtagctatactaatttatattcccaccaacagtgtacaagggttcccttttctctatatccttgctagcattcttgcttttttaatgtgtgcagaacatataagatgcccactttttaattcctgatatyatatagtttttgttaattcaattttaaaatatttattgttatacagaaatacagacatgttttgttcgatatatcctttgtatctttttagtgtgtgtcttcttcttgtcttgaacgtaaataaagaat

SEQ ID NO: 310407 - DNA, 596 bp, Homo sapiens
taaaactgaaggttctaagaaacatgaagaatggaattgtcgctattgagacatggaaggcagagatcaggatgtaagaggcagggatgggatgagtcaggcagttgattttttagaagctcttttttctttttgtctgtattttgatttgtgtttttgagagacmtattaaccacccaaacaaaaatgtttaataggcacttagatatacaagtctgaagttcaggaaagaagtgcatgctgtatatatacatttggaatggaaagctaatagtagtagtgctctaaagttcagcttaagatttggttttgaggaaaattctattattcaactttggaaaagtgaatatactgaatgctgccattatttcttgtacttgtgaacaaggaatttgtcatcaaatcctattggcataacaaggtaataaaataaggcacactatgtcaatatcaggtcaatccagagggataggaagcacacgggggtttaaacagaaaaagtttaatatgaagaattattaaactatgataaaagagtaactctaggatataagaaaactctgtgccatgctctaggactaagatagagtacctaa

SEQ ID NO: 310408 - DNA, 596 bp, Homo sapiens
taaaactgaaggttctaagaaacatgaagaatggaattgtcgctattgagacatggaaggcagagatcaggatgtaagaggcagggatgggatgagtcaggcagttgattttttagaagctcttttttctttttgtctgtattttgatttgtgtttttgagagacatattaaccacccaaacaaaaatgtttaataggcacttagatatacaagtctgaagttcaggaaagaagtgcatgctgtatatatacatttggaatggaaagctaatagtagtagtgctctaaagttcagcttaagatttggttttgaggaaaattctattattcaactttggaaaagtgaatatactgaatgctgccattatttcttgtacttgtgaacaaggaatttgtcatcaaatcctattggcataacaaggtaataaaataaggcacactatgtcaatatcaggtcaatccagagggataggaagcacacgggggtwtaaacagaaaaagtttaatatgaagaattattaaactatgataaaagagtaactctaggatataagaaaactctgtgccatgctctaggactaagatagagtacctaa

SEQ ID NO: 310409 - DNA, 503 bp, Homo sapiens
taacctaccttttctcctcctcagaccctggcaacctgcattttgctttctgactctatgaatttgcctattctaggtacctcacgcaagtggaactgtacaatacttgtccttctgtgtctggcttatttcattaagcatcatattttcaagctctatccatgttgtagcatatatcaaaatttctctcccttttacagctgaattgcatttcactgaatgtgtataatttattttgcttatccactcatctattgatggacacttaaattgttttcatcttttggctatgaacattggtatacaaatatctatttgagytcctgctttcaattttattggatataagcctaggaatggaattgctgagacatgtggtagttctatgtttaaccatcttatattcccaccagtaatgcacgagggtttcaacttctttacctcctagccagcacttattttccattttttgtattatagccaacctggtaggtgtgaagtgg

SEQ ID NO: 310410 - DNA, 592 bp, Homo sapiens
tggttagccatgtctatcagaaattcaagcatgcccactaacaatatacttgtaactgcaagcagagtctaacatgtaaaactctgaaaaacattcaacytgaattactcattcatagaaagcaaccctggttcaaagagggaaaactgtgctcttttgcaagctctagtattattttctattgtaagaattcatccatgttctgcaactgagttacctttaattacactcacatatgcttattttccacagacatccttcattttcttctctctaggactataaattgccaatttctttaagaaaaaaagcaaagatgtacttcatactgccttcatttctcttcaactttatttgatatgtttataaactatctggctctcaagaatagactgtcaattgtgtgcatacccaaatttgaccaatactttcttaaagaaatgagctaaacctttatattaagttgtatttattgggctccctgaatacgctacagactgatcaaaagctctctctaagtttattttcttagaagatgaccctctatgaaagatgtgcaaaattcatgttattttatgggttcctgtatcta

SEQ ID NO: 310411 - DNA, 592 bp, Homo sapiens
tggttagccatgtctatcagaaattcaagcatgcccactaacaatatacttgtaactgcaagcagagtctaacatgtaaaactctgaaaaacattcaacctgaattactcattcatagaaagcaaccctggttcaaagagggaaaactgtgctcttttgcaagctctagtattattttctattgtaagaattcatccatgttctgcaactgagttacctttaattacactcacatatgcttattttccacagacatccttcattttcttctctctaggactataaattgccaatttctttaagaaaaaaagcaaagatgtacttcatactgccttcatttctcttcaactttatttgatatgtttataaactatctggctctcaagaatagactgtcaattgtgtgcatacccaaatttgaccaatactttcttaaagaaatgagctaaacctttatattaagttgtatttattgggctccctgaatacgctacagactgatcaaaagctctctctaagtttattttcttaraagatgaccctctatgaaagatgtgcaaaattcatgttattttatgggttcctgtatcta

SEQ ID NO: 310412 - DNA, 548 bp, Homo sapiens
cagcaagctacaactgtagattgtaccctacaccaatcatgtgtaagaggcactgtaagaaggcactctatcatttaaagccccctgaacttcccttcaagcagtaaaaacaccagatgaaagatatgagaaatatgaattcatagatattttctgtatttacactgatgacagccatattacacgtattgcccatgaagttgaaaacttggtatggtccctcttatttacaattcaagtccatctcctcattatctcatccttttcatctgttctttataaccaaaaccctttgcaaatgcctcccagaccttccccccatataaagttaattagatcacgagcagctcttctaattaagcttacttcaaccacaaatgcattttctcattttattatcactaacaccaagatgagatactgtgattaacaattaggtgaaygctctgttccatgagattgagtctcaagtgcaatatggtcttaactcaggtttctggtcacaagaaagtataaacactttgcaaagtccttgaaatcttctttag

SEQ ID NO: 310413 - DNA, 502 bp, Homo sapiens
tgccttccaggaactcacagtgcctggcacagcacaggttactcaataagcctatgttaaattaatgaattctaaataaagtgtaataggaaagcaaacatgcatctcataatgacaatatactgggataaaggccataatttgaatattatgctatttccacatttatataaaatgttacagaaagctattctttacaaaaattatcacaggataagcaagcaattttattgctttaagaaaccaggtacttaaaaccattataaagcattacaaatcaccaacaaattttacaaacattagtaaatggtggcataaaacacatttttcctaagaatttttcatcaggaattatgatggtaaggatcagattatatattcttttgttcacttcttaaaagtacaggcctttagttccttttttgttttggttcatctgttaagcagtgggggcccaatyagtgctcctttgtaaaaagacattttcccaaagaatacgaat

SEQ ID NO: 310414 - DNA, 579 bp, Homo sapiens
agggtgtgtgtgtgtgtgtgtgtgtgtgtgtgtgtgtgtcagaaagactgcaataaatgccacagtggaccttcagtaattatattcctcccattttaagcaaactggtcttttatttacaaaaatttctttaaagataagcttttgcttattaagcactttgtagcagtcctcaagatttgtattctattacgtatgatatagtaattgtaacttattcttggagtaacttcagttctctttatattactttgtggattacctacccttttgagttttaagtaaatttggcataaaaccatatttcacaatgtctggggtacaggaccttcttaccatctctggaaattttaggacttaattccttataattctgtttttatggcccagtgaaccattttattttcttcagcctcatcactcctcctcctcaagtcaaaaccaacaaataaayagtttgaccacaactcggttgtaccattttgtggcttgcctaagaaattcactcacaccaagcatatcatggttatattcttgctaaaatggttaggtgaggtttacagtaaggagtaggatgca

SEQ ID NO: 310415 - DNA, 571 bp, Homo sapiens
tgatgatggaggcagagatgagattgatgcayctagaaacaccaaggataaccaacaaacaacagaagctagaagaagaaaggaaggattctctcctataggtttcggagtgaccaaagctttgccaatatcttggttgaagacttcttgcctcctgaattgtgagacaataaatttctgttgatttaagccacccagcttatggtacttagttatggcagccctggcaaaccaatacaccatataacacatattcacaggttctgaggattagaacatggatatcttgggaagctattcttctgcctgccatagtcagtgggagaagtgataaaaatagaggacttttgccctctaattaagaaagaacaagataaatctctttctgaagaaatggaaatgatgatcttttttccttttaatttacatactgtcctgaggcttttatcttcctggaacttctattaagtattccagatcacttagcaacaattttcaaccacagctttttttgctgatttactattatgttaagtgcttacctcatatgtgtggctattttaagttcagt

SEQ ID NO: 310416 - DNA, 457 bp, Homo sapiens
cccagagctgaggaaaaaaaaaaattcataaggagaatgctcagctggagtcatacaacctacctaacctgatcaaaccactcagaagatcctatagaaatactacatccacatcaggctacagaaaatattatttaaagtacaaasaagcaaagaaaaactaacttatccctacaaatatctccagaaatctttttatcaaagaaatctgtgtgtttgtgtgtatgtgcatgcatgtgtgtgtgtgagagaaagagagagagagaaagaaagttccagagaggcaaagaaagagagacagagaaagaagcagagtgggagaaaaaaagagccagagccaaagccagaggaaaaaaatggcttttcattccactgatgacaaggccccaagaatttctctctctctctctctctctctctctctctctcagggctcactgaggaaacagaaaagagt

SEQ ID NO: 310417 - DNA, 577 bp, Homo sapiens
ggatcgagttcttttgctggttttggggttctagagttggctgcttaatatgattagatcccaaaatgctaagattctacttctaataatatggagaacactgatagtccttggcatgaactgtttagagagctgtgcaaaataaatgcatttgacactcctgattcactgctcgtgagaagcaaggagtctagtcagtctatacctaatacttttgaccatatgcggagaaycaaggaacataatgaagctggttggttgctccaaacttcagtgaacaaagtaatgaaagaaaatgatgaatctacggattctaactcccagcctcagaagcagatactgagcctcaaatctgctaagattgccctgagtcagagtcttacctcctgtagagaaagacctgaaattgtggaaaaatagacacaagctcttatcatgcaagtggctgacgtgcaacgaaaggtgcaggcacagcctcaccaggtgtctactattaatgtgagggcattgactggaaaagaatgggaccctacaactttgaatggggatgtgtgggaggaccctgatgaagctgggg

SEQ ID NO: 310418 - DNA, 540 bp, Homo sapiens
ggcctgttactgggctttggtagaaactgaacgtttgactatgggtcatcaagtcaccacatgacctcaactgcctatcattaactgggtgctttctgacccatgtagccataaagtgggtcatgcacagcagcattctctcattaaatgaaagtggcatataagtgatcaggctcaagcaggtcctgaaagcacaagtaagttacatgaggaagtgctcaaatgcccatggtctccactgatgccacactgcctcgtctcctccagcctgcacygatggcctcatggggagttccttatgattagttgacagagaaagagaagactagggcctggttcatagatggttgtgcatcataagcaggcaccacccaaaagtggacagctgcagcactacagcctctttctaggacatccttgaaggacagcagtgaagggaactctcctcagtgggcagaactttgagcagtgcacctggttatgcactttgcatggaaggagaaatggccagatgtacgattatatactcattcatggact

SEQ ID NO: 310419 - DNA, 480 bp, Homo sapiens
ggagtgggaaatcagggggctggcagccttcagagctgagagccatgaacagagttttacccacgtatttattgacagtaaggcagtgataagcattgtttctatagattatagattaactaaaagcattcctcacgagaagaaaagggatgggccgaaacaaagggatgggttctggctaattatctgcagcaggaacatgtccttaaggcacagatmactcatgcaattgcttgtggtttaggaacaccttaagcagttttccaccttgggtgggccaggtgttacttgccctcatttcggtaaactaacaaccttcagcatgggtgtcatagccatcacgagcatatcacagtgctgcagggattttgtttatggccagttttgtggccagtttatagccagatttgggggcctgttcccaacaagttccccctttttgtttttgcaagacaataaaagcaaaggtggctttatcac

SEQ ID NO: 310420 - DNA, 516 bp, Homo sapiens
tagctcccacagtgggccatattatttgaggttgaggtgccactataccaccatgtttccagataataaggtcttgctgtacttctcaccatttctactatctgaccattttgtttagaccagstgaacatagtgtggctgtggcatgcagacagagaggtgcaattcaagctaaacattcccttaggggaccaatcaataatgattccacaggaatccttgcacagcacctatgcctgttctgcaatgcaatcttcccaaacaagtatgttcattttttctggccaggtccaatcctgtttacaaatagttttttgagggtggtatgcctcaattataggagcagaaaattaatttttttgattatgggcattcttgcaggagaaggtggtattacattgtgggtttgatttggatttccctgataattagtgatgttgagcattatttaatgtctgttggctatttgtatttgtatatcttctcttgagaattgtctgctcttgtcctttgccc

SEQ ID NO: 310421 - DNA, 532 bp, Homo sapiens
gccaatttattacaggaccatttgttgaatagggtgacctctccacactttatgtttttgtttgctttgtcaaagatcaattgactgtaagtatttggctttatttctaggttctcaattatgttcaattatgtttcatttgtctatgtgcctatttttatgccagtaatatgctgttttggtgactatggccttatagtatagtttgaagttgsgtaatgtaatgcctccagatttgttctttttgcttagtcttgctttggctatgtgggctctttttttggtttcatatgaaatttaggtttttttttctagttctatgaagaatgatggagtctccacacacaatgcagtttgatgggaactgcattgaatttgtagattgctttggcagtgtggtcattttcacaatgttggttctatgtatctatgggcatggaatgtgtttccatttgtgatgtctttcattactttcagcagtgtttcgtagttttccttgcagaagtctttcacttccttggtttggttagat

SEQ ID NO: 310422 - DNA, 592 bp, Homo sapiens
tcttttttaactgtgtttctttaaggtttgttttgtctgatataagaatagctattcctgcttgttttggtgttgatttgcatgggatacctttttctacccttttaccttaagtttatgtgagtccttatactcacaagcagatacttggttgatgaattcttactcattctgccattctgtaacttttaagtggagcatttaggccatttacattcaatgttagtattgacatgtgaggtactattctattcatcatgctatttgttgcctgaatacctttcttttttttttttttatcattgttattgttttattggtcatgtgagatttrtgctttaaggaaattctattttggtgtattttaagttgtttcaaggtttagagctacttgtatcagttcttgtagtgctggcttagtagtggcaaattctctcagcatctgtttgtctgaaaaagattgtatctttccttcatttatgaagcttagtttcactggatacaaaattcttggctgataattgttttgtttaaggaggctacagataggacaccaatccctcctcgcttgtaggatttctgcttagaaatc

SEQ ID NO: 310423 - DNA, 601 bp, Homo sapiens
cccctttaagctataagatacattaggttggggctatatgaatttcgtgcactattgtatttgatacactcagcatagtgtctattactaaggaaatgcagcataaaaattgttttctgaaggttaaaggatacaaggctggaaagatgagaatatgttagatgagagaattagtaatcaaaataacmttcacagattagagaggtaacctacaacaaatgaaatgcagcagagataaattttagatcccccagtttaaaccaaagaaacaattatacaagaagagggtggagtaattaaaagtatatatatgtttaaaagttggtgacaggatttttttaccaaaatagtaagaaatatttctgtttttttctttctaccctttcccttattcctccccacaagagaaagagtatgttatttaattcatatgatggacagaatctaaattccatggagtctcagccagcaacaaaggacatggcattggaaaagcattactttctttttctttgcatcctagacatagctgaatccagaaaaaggggtgctagaacctcctccatacagaatgactatgcagggccccatcatagttttg

SEQ ID NO: 310424 - DNA, 550 bp, Homo sapiens
aggcatgaaaataacactaatttccttgtgcatctccatcagagctcttgggtgacaggtgccttatcaacaagtagtaacatttttattttgtaagtgaaagcaagtttattaagaaaataaaggaataaagaatggctactccatagacagagcagccctaggggctgttgggttgtccatttttacaggtatttcttgattatatactaaacaggggtggattattcatgcgttttctggcatttcttagaactgagaattccttccatttttagaccatataggataactttatgacattgcccatggcatttgtaagctgttgtggcactggtgggagtgtatcagtgaggatgaccaaaggtcactcttttcaccatcttggttttggtgggatttaggtggcttctttactgcatgctgttttatcagcaaggtctttatgacctgtatcttgtgtcgacctcctatctaatcctgtgarttagaatgagcaacttaactgggaatgcagcccagcatgtctcagccttattttacccaacca

SEQ ID NO: 310425 - DNA, 542 bp, Homo sapiens
atcaataatgcactaacacaaaagtgaaatttgtattatttggtataaaaatgatacaggaactattgtcaaatattaaatggtgtttggctttctttgggctgtatttgtataaatatgttattggtatgtattccaaaataatgggaaactcctataattctgataagacacagtgtatattatcagtaataattgtaattgtwacataaaatcattgtatgccacagatgtaaccaaatttctttgtcaatcatgtttttgactatggttgccctaagacattttgtcattcacagacaattgttgtcttgttttggtccccttcaaaaggaggttttaaaatcagctacaggaatttgacaggtgatcctgaatgcaggtttctgataacattggagattataacagtaaaatagaggaaaaaacttagaggaatctcaggcacagctgaaatgttcctgaacatcaaacaggggttaaactgcatggactaaattaagatagaagtctaaagtaatctttttgactctttgcttaaa

SEQ ID NO: 310426 - DNA, 519 bp, Homo sapiens
tggtgtttatcttgctatagtaatgctgtgatattgaatatgggaaaaaatcactaagggaattaagacaccaagatacagtgccaaaaaaactttccttcgtcatttctgaatattttttgtcccaaatgaaacaagtataaatggtagtagtaaaraagaaaaaaaagtagaaaagtatagttctatattgaatcagtaggaatacagcagaaacttgactctgggatattttgccctattattcaatgatacatgttgcttaatattactatagtattacaaagaaaaaaacactaaaaattaacatagaaaataatatttatataagtttggtcttataatcaattggaaatgattaaagagaactatataatgagttaatctatgcatgaattcttgttagatgttttagtctgttctcatactgctaataaagatgtacctgagactgagaagtcttatgagaattacatctataatttctggcaaaatttaatctttctgtatctcttcaaa

SEQ ID NO: 310427 - DNA, 572 bp, Homo sapiens
tcaaaatattcaacataagcaacacaagcaatttttgatgagtcataagaaaactttttggcatcaaatttagaagtcacagttattttatgacttaaaaggcaaatgaaactcagttgttgataatttgagaaagaagctttatagtgtctatcccattaccaattatgtttatttttctcttctaccaaaatgttgattaaataccaaatacaatgtgtttgtttaatcagctccttcattttatatttataacaaccccatgaagaagtgcagtcactgaaacagggaagatttgatttcattttgtcccatccttgctaattttttaaagatttttaccatttatcctcaacaaaatrgatttcacttgataggaaacaataatacagagagtctgaatctctctgacaattaaacatggtggcatgttttaataataaactggcttctattagagtttaaattttacaatataaatacaatttgctgtacttaattacaaagggaagggaggaaataaatattacataatttatgtttctgtgcagtttgttattcatatttggcat

SEQ ID NO: 310428 - DNA, 592 bp, Homo sapiens
gagaacttcatcattaaaatcagagccttatgtgtttgtcacataattgccacactttttgaggggttttattttgtgtctgttagaataattgtcattctttagggtttaaaatgttaacattcattttgatattctacatatattcatttttatattctgaatataaaaatgaatagatgagtcttaagagggaacatgagtctttytggaataagttgaatttctattgaaaataataaaataagcaataattaatagacctataaaacacttttgtatacttttttcattttcttttgggatatcttgttttgttctcctttacatcataaatttctttagtccatatttgagtctctgccaattttttttttttttttttgagacggagccttgctctgtcgccccggctggagtgcagtggtgcgatctcggctcactgaaagtttagtctcccgggttcacggccattctcctgcctcagccttctgagtagctgggactacaggtgcccccccccccacccggctaatttttttttttttttttttttgtatttttagtggagacggggttttcaccatgttag

SEQ ID NO: 310429 - DNA, 592 bp, Homo sapiens
gagaacttcatcattaaaatcagagccttatgtgtttgtcacataattgccacactttttgaggggttttattttgtgtctgttagaataattgtcattctttagggtttaaaatgttaacattcattttgatattctacatatattcatttttatattctgaatataaaaatgaatagatgagtcttaagagggaacatgagtctttctggaataagttgaatttctattgaaaataataaaataagcaataattaatagacctataaaacacttttgtatacttttttcattttcttttgggatatcttgttttgttctcctttacatcataaatttctttagtccatatttgagtctctgccaattttttttttttttttttgagacggagccttgctctgtcgccccggctggagtgcagtggtgcgatctcggctcactgaaagtttagtctcccgggttcacggccattctcctgcctcagccttctgagtagctgggactacaggtgcccmcccccccacccggctaatttttttttttttttttttttgtatttttagtggagacggggttttcaccatgttag

SEQ ID NO: 310430 - DNA, 631 bp, Homo sapiens
actggctgtgtaagtcattctctatccagcaagtgtggtgaattttcttatcagttctagtagtttctggatattttttaaatttgctatatgatgctataatctgcaatttaaagtaggtttatatcttttcttccaatacttccttctttttgtgttattaggtattctatccttaggtattgatgtgaaccacctactttgttaagaaggtgtggtaatagtaggtatccttgtctkcctttctttaagaataatatcttagtattatagcctttatcaagttaagaaagttacttgtattcataactttctgagatttttaaatcacaataggtatatttaatttaaaaattgcttatgcaggtctttattcaagtacttcttgaaagagtacagtacagaaatatgagaataccctagaaaacactgctcccagaactcttcttgactcaaatcctgttgatttatctttgcttttaggtgactaggcagtttagaatgcaatatatttttgcctatctccccctactatgcttaatacttgctattacgagaaaagagcatgtgcaaatgaggatgaggtatgatagtgggaaggcagtcgggtgttctacttattcatcctaaa

SEQ ID NO: 310431 - DNA, 576 bp, Homo sapiens
gtttggcagaaatatggaagtatttgggggagagttagccttaaggacattgacaactaagtgaatgatagaaggaagcattttcctctggggcaggcggcaggagtggataatgagaaaggaacaagttcattgcacactattgggctctgcaattaacacaatttgatagtcctagtaatgtaaacactgattattaaccccaaaattatgatctaaagatatattgggatgatgggtgggggaggaaagtgggaatacagtggaaagcaagtgtcgaatcaccactattgtggtagaaagtcagcaaataatgtcaagatataataaataaaaatagccatatttccttatgttttcagaagcagatttaaagaagraaagtggtggcctctggactctggaatgagagcgccagggagagaatgctgcataattgtttggactgtatactacatgtgtgcatcacttttctaaaaatacaaaattaatgaggaaaggaagaggcagccctgccagttgctggctgccattgtgagctctttggagaatgggatgcgggtgcaggactgaggg

SEQ ID NO: 310432 - DNA, 523 bp, Homo sapiens
gcggctaagcctagccaagagcaccactttggttatgctgggagcccgagtcattttggcgattttcattttaaccaagctgtcattttagtatgtgaggaaaaaaaataaaagtggtaggaactacactcacagagarcccagagagggggcagcaggggggtgggggcgagcctggtgctggaagtgtgaaaacagctgggggcccaagtgccctgactcccctggccacccactcactgcttccacccactctcacttcccttgggttcacactatctccccggacccctctctgacccctccagtctaaccagtgatcagagaatgtttctgccactacagcagtccccccttcatccacaggggatgcctgaaagggtagctggtactgaacctgatggctgtcaatcagaacacatcgctgtccatgtcttccacccacaaatgtaatgccttttccatcttaactaagctcttatcgcacatggtggccgaaactttggcagtttgaagtgcgaca

SEQ ID NO: 310433 - DNA, 515 bp, Homo sapiens
caacaaacacgtgtttccacactgctgaatcaaaagaatagttaaagtctgtgtgatgaatgtagaggtcacaaagaaatttctcagaatctttctttccagtttgtactggaagatactgcctttttcagcattggcctcaaagtgctcccaaatatccctttgcagattgtagaagaacaaagtttccaaactgttcaatgaaaagaaatgtttaactctgtgagatgaatggacacatcacaaagccatttctaaaaaagctcctttctagtttttatgtgaagatattttctttttcaccaaaggtcttgaagcgctcccacatatccctctgtagattctaggaaaacagtgtttccaaactgctcaatcaaaagaatagttcagctctgtgagagtaaagcaaacatcacaaagcagctcctcagaaaacttctgtctagtttgtatcatcagaagatgyttcatttttcactataggcctcaaggtgaatccaaatatccctttgcag

SEQ ID NO: 310434 - DNA, 489 bp, Homo sapiens
cttcacagattctacaaacaatgtgtttccaaactccttaatgaaaagaatggtccaactctctcagatgaatgcacacaccacaaaacaatttctcaaatactttctttctagttggtatyggaagatatttcctttttcaccataggcctcaaagcattccaaatatccctttgcaaattccagaaggacagagtttccaaactgcacaatgaaaagaaatgtttatctcagtgagatgaatggacacatcacaaagcagtttcaaaggaagcccctttcagtttttatgtgaggttatttcctttttaccacagacctcaaatcactcccaaatatcccttcgcagattctacaaaaagagtggttcctcagaaaacttctgtctaatttgtatcagaagatatttcatttttcactataggcctcaaggtgaatccaaatatcccttcacagattctacaaacactgtttttccaaacttctcaa

SEQ ID NO: 310435 - DNA, 489 bp, Homo sapiens
cttcacagattctacaaacaatgtgtttccaaactccttaatgaaaagaatggtccaactctctcagatgaatgcacacaccacaaaacaatttctcaaatactttctttctagttggtatcggaagatatttcctttttcaccataggcctcaaagcattccaaatatccctttgcaaattccagaaggacagagtttccaaactgcacaatgaaaagaaatgtttatctcagtgagatgaatggacacatcacaaagcagtttcaaaggaagcccctttcagtttttatgtgaggttatttcctttttaccacagacctcaaatcactcccaaatatcccttygcagattctacaaaaagagtggttcctcagaaaacttctgtctaatttgtatcagaagatatttcatttttcactataggcctcaaggtgaatccaaatatcccttcacagattctacaaacactgtttttccaaacttctcaa

SEQ ID NO: 310436 - DNA, 343 bp, Homo sapiens
ttaactatataaaggagatatgtaaaggtttcctttttcttagtactttatccagataaatatcctaattcagattttaccaattaacagccccaatttttttttacttcatctaacccataataacatattcaaatttaatttagctcaaaaatttttgttgaataccagcccatgaccagtgttaggtggcaaataagtaagatgacatcccccaaaataagtgtgatgagaatcctwtctactaagagagactcaaatgatgacttaataaatatggaatcccaaaagtccataaaaactaaattatcagggctatcattataaagaaatcatcttactt

SEQ ID NO: 310437 - DNA, 602 bp, Homo sapiens
ggtctccttcattcctatatgaatatttggataagtttgccaatttctgtaaaaaaaaaaaaaaccatctggggttttgatcaagattttgttgagtccaagatcaatttgggaagtattgccattttarcaatagtaagcctactgatctaggtacatgcattgctttgttgaatatattcattggaaattcttttacagcaattctgtcccacagcttattttctttcattcacttcaaattatttcatatccatctactgattattttaaaactaatattttgagaaaaatcatatgtattttcatgacacaaccacttatatatttttcatttttattgagtgtctactatgttctctgcatgttgttaagcattcctgattttagtaatgagtcttctcattcttctggtcagtatagctaaaggtttgttgattttgttgatcttttaaaagaaccaacttttagtttcatatattttttttgtatttcctattctctagttcattaatttctgctctaatctttattatttccttccttctgcctactctaggtttagttggctcttttttccccagtgtcttaaggtggaaagt

SEQ ID NO: 310438 - DNA, 623 bp, Homo sapiens
tctggggttttgatcaagattttgttgagtccaagatcaatttgggaagtattgccattttaacaatagtaagcctactgatctaggtacatgcattgctttgttgaatatattcattggaaattcttttacagcaattctgtcccacagcttattttctttcattcacttcaaattatttcatatccatctactgattattttaaaactaatattttgagaaaaatcatatgtattttcatgacacaaccacttatatatttttcatttttattgagtgtctactatgttctctgcatgttgttaagcattcctgattttagtaatgagtcttctcattcttctggtcagtatagctaaaggtttgttgattttgttgatcttttaaaagaaccaacttttagtttcatakattttttttgtatttcctattctctagttcattaatttctgctctaatctttattatttccttccttctgcctactctaggtttagttggctcttttttccccagtgtcttaaggtggaaagtaaggctattgacttgagatctttcttctcttttcatgtaggcatttatagctataaattttcctctaatagctgctttagctgcatcc

SEQ ID NO: 310439 - DNA, 617 bp, Homo sapiens
ataataaaatatacacaccataaaatacaagaaggaagtatattaaattgttcccggggtggggggtttaaattgtgggattgttgtctgtttttatcctcacctttaacacagtctagtgagtatgattttttttttaaaaaaagaggtttatagagatataattcacataccaaaaggttcactcttttcaaatgtacagcccagtggtttttagcatattcaaagagctgtgcaaacatcaccactctctaatcccaggatgttttcatcatccctcaaagaaacttggtaccctttagttgtcactccctgtttggtcctcsccctagcccatggcaaccactagtttattttcagtctgtacagacttgcctattctgaagattccaaataagtggaatcatacaatatggcctttggggttggcttctttcatttagcataaggttttcaaggttcattcataccgtagcatctatcaatgcttaattccttttatgtcaaataatatcccatttattggatataccacattttattgatccgtttaccaggtgacggacatttggggttatttccacttacaggctattataaataatgctgctataaac

SEQ ID NO: 310440 - DNA, 617 bp, Homo sapiens
ataataaaatatacacaccataaaatacaagaaggaagtatattaaattgttcccggggtggggggtttaaattgtgggattgttgtctgtttttatcctcacctttaacacagtctagtgagtatgattttttttttaaaaaaagaggtttatagagatataattcacataccaaaaggttcactcttttcaaatgtacagcccagtggtttttagcatattcaaagagctgtgcaaacatcaccactctctaatcccaggatgttttcatcatccctcaaagaaacttggtaccctttagttgtcactccctgtttggtcctcgccctagcccatggcaaccactagtttattttcagtctgtacagacttgcctattctgaagattccaaataagtggaatcatacaatatggcctttggggttggcttctttcatttagcataaggttttcaaggttcattcataccgtagcatctatcaatgcttaattccttttatgycaaataatatcccatttattggatataccacattttattgatccgtttaccaggtgacggacatttggggttatttccacttacaggctattataaataatgctgctataaac

SEQ ID NO: 310441 - DNA, 540 bp, Homo sapiens
gcagctggggaactttacattgaactcagtgctgctctgtcacagcggagaacaaagctgtgctgggcttaggtagcacctatgcatgaagggaacatttggaccagtcctagccagaggggarttgcccatcccagtggtcggaacttaagtttcttggcaagccttgtcaccgagggcaaaagtgctatggggtcctaggtaaatttgaaaggcagtctaggacacaaggattgcaattcctatgcaactcttaggcagcttctgggagctctctggctcccagacagcatttcttgatacacccagggcctgggggatctccttaccctgaagggaaggatcttgggcaaggcccagtcctgtgctggattcaggtctgacacagtgcacccagtggtgatggccacagaagtgcttgtatcaccattgctcagtttcaggtggctcagcacagagagagagagactctatttgtttgggaaaaagtaaagaaaaggaacaagagtctctgcctggtaatccaggagttgcctagga

SEQ ID NO: 310442 - DNA, 540 bp, Homo sapiens
gcagctggggaactttacattgaactcagtgctgctctgtcacagcggagaacaaagctgtgctgggcttaggtagcacctatgcatgaagggaacatttggaccagtcctagccagaggggaattgcccatcccagtggtcggaacttaagtttcttggcaagccttgtcaccgmgggcaaaagtgctatggggtcctaggtaaatttgaaaggcagtctaggacacaaggattgcaattcctatgcaactcttaggcagcttctgggagctctctggctcccagacagcatttcttgatacacccagggcctgggggatctccttaccctgaagggaaggatcttgggcaaggcccagtcctgtgctggattcaggtctgacacagtgcacccagtggtgatggccacagaagtgcttgtatcaccattgctcagtttcaggtggctcagcacagagagagagagactctatttgtttgggaaaaagtaaagaaaaggaacaagagtctctgcctggtaatccaggagttgcctagga

SEQ ID NO: 310443 - DNA, 578 bp, Homo sapiens
tgaatggacaaagaaaatgtggcatatatatacaatgaagtattcagcatgaaaaataatgagattctatcatttgcaagaacacgaatggaagtggagttcattatgttaagtgaaataagccaagtacagaaagacaaacatcacatgttcttatttatagaatctaaaaatcaaaacaattgaactcatggagatayggaatagaaggatggttaccagagcctgggaaagatagtggggggctggggagtgcagtggggatggttaatgggtacaaaaatattattggaaagaataagacctagcctttgattacccaacagggggactatagtcgataataatttagttgtacattttaaaacaactaaaagagtaaaactggactgtttgtaacacaaaggataaatatctgagggaagggatacccaagtttccatgatgtgattattatgcattgcatacctgtaccaaaatacgtacttcatgtctgtaccaaaatatatacacctactacatagccacaaaaattaaaaataaaattatttttaaaaagcccagactcatatagcttc

SEQ ID NO: 310444 - DNA, 593 bp, Homo sapiens
ttctatgtggtcagtattatccttataccaaaatcagataaagatatgacaagaaaactacagaacattatctcttatgattatacctkcaaaaataatcaacaaaatactagcaaactaaatccagaaacataaagggattataagccacaacaaagtatgatttgtctcaggtatagaaggttaatttaacatagaaaaatcaaaacacgctgcattaatagaagaaggacacaacctacataatcgtcttaagggatgaaaaaaaaaatcacttgacaaaacctgacaccctttcatgataaaacatttgataagctagaaacagagggactttccccaacctcctcaatgctatctataaaaaacccacacctgacattatacttaatggtaaaagacagaatgagttcctctaagattaggaacaagataagggtgtctgctcttgatggctttattcagcattgtattggaggttccagtaggggcaattaggcaacaagaagatataaaagacatctaaactggaaagaaaaaataaaagatatctacatttggagatcacatgatcttacatatagaaaaccaca

SEQ ID NO: 310445 - DNA, 566 bp, Homo sapiens
ctcctataagggtgaactctttggtatgtgaatttatctcaatgatttttttaaaaagtccccaaaacctgtggcagacatgtcagggcaaatgtattgatgggcatgcagtttattttagtttcttcctatttctttcacattggacgttggagtatttgtgctatgtttagaatcattgatccagagttattttctagaatagtccatgtctgagttcagaattattagttactgcagaaattggtgtttctaagaattttttagtttggccataaagagcaacacttaccagttgtgatcaattctwgttctgtaaatgttcttcaatgaaacaataattcttaggatcttttttaagacatataagagctctattttgcatagtcttcaacatataataaaagtgcctagatggaaagaattgttaaaaacagaccagatattacagtttttcactctcttggttaaaatcaaggaaacacaatcaagtagttttcctattcttctatgccagatgttggtctttgtaagatcagctcatctggactcctaaattatggatt

SEQ ID NO: 310446 - DNA, 639 bp, Homo sapiens
tagactacttcactgcttaataaaagggacactgaccactagaagaaagacactttgaaagcagacagactgggtttgaaccctagccctcccacttcctaggtatttgacctcgtataagttttctgagacccaacttatgtatctataaaatgaggataattaaaattccttacttaggcatactcaatagatgctactttttcttttttcttttatgtataataggtactcatatatagtaaatacatataataaataaattaaacgtagaaataatactacaagaaaggcaggtaatatctttttctttttcgcccacgaatagccccacagctaggaagtgagtgaaggatctgtrcgcagaccttctctctccccaagttctgagctctttcctctattttcttaatggaaaatctaacaaaaggacagaaaatgtaacagaattcatatgtaatgaagaatctgaaactcttctccaacaaaatatctccttccacttatcccacctccatcctaaaagttttaccaatttagttagcattttaggaagcaagctgttactagtctggtctgatctagaaagtcagattcttgcacaccagtgagaatatttgcttccctttaagtaaactg

SEQ ID NO: 310447 - DNA, 520 bp, Homo sapiens
aaggtcacaggtggggagaattaggcaattcacctgtggtctgatgtttagggagaaattaatcaagttcctgaagtaatagggtcagcagaaacatatagttaatggtcttgcccagctggtcatctttcttttcttgatgcccctcccctagtgaaccaaggttcattttgaatccaaatttttcaaacctcaaagccatcttccccaacatgtggtttcacaacagtcaacatctactgtcagggaaagaacagcattctggtggtgaaacaaaacagcacttcaactccttttytaaaaattaataataataataatttaggacaataagcttatgtcgggaggtagtgtggtcatcaaaatagcctaagacatctggatgtggtcccctaattaatgccatcaatgtcactggtaggcattcaaatgatctggtgctactttcagggtgttcatgatctttcttcccttttttaaaaaaaaatcagaagagtctggttgcacctgcagttgcttg

SEQ ID NO: 310448 - DNA, 580 bp, Homo sapiens
atctactgtcagggaaagaacagcattctggtggtgaaacaaaacagcacttcaactccttttttaaaaattaataataataataatttaggacaataagcttatgtcgggaggtagtgtggtcatcaaaatagcctaagacatctggatgtggtcccctaattaatgccrtcaatgtcactggtaggcattcaaatgatctggtgctactttcagggtgttcatgatctttcttcccttttttaaaaaaaaatcagaagagtctggttgcacctgcagttgcttgcatgctttctagctaatggctttcagtgaccctgtgcctgataggcaatggtctgaaagggaacacctcttggaaccccaaatcctgcatcccacaagtacatgcaagtgaaaatcaagcatcactttttgaacaatagctgactgtgaatttgataaatagcagggtgttatccactgcttcctgcactgcatatgtgttgtatttggttgtcagataagctaaatacctctaataggatctcctcccgcttttagtaacagctttattgaggtgtaattcacatactatgca

SEQ ID NO: 310449 - DNA, 452 bp, Homo sapiens
aatgatggagaatcaagagtttattgtaaggagttggacttgaagtgagaatccctgagaacccagtaaagactttctaggagggtgtcttagtccattcaggctgctttaagagaatgccatagactgggtggttcataaacaacatgaagttatttctcacagttctggagcctgcaaagcccatgatcaaagcactggcagatttggtgtctggtaaaatcctgcttcctagatggccatcttcttgcccatgtgatagaaggggcaagataaccctctgggatcttttttctataagttactaatcccattcacaaggcctctatccttatgacataacaacctctcaaagggcccatctccaaatatcatcacattggggcttaggtttcaacatactaattttaaggggaaaacaaayattcagtctatagcataagggcaacatc

SEQ ID NO: 310450 - DNA, 515 bp, Homo sapiens
tttgagcctttatgtataaaaggcaagtcacaatatccctagcctgaataattcatgttgtttttcatgggtcttttaagcctttttgttaaacttgaagattagctttttctttttcttttttacttccttaatcaaaggttatttggagtcaactttgaacaattcctcaagctgtactgttcaaccatttgattcagtattttcaggatttggaagcaggttgctgctggttcttargtctgctgtattattcaacgctttagtaaatgatgaataggctgaaagccatgaaggctattttataatttctcaagggtctctttaccacctaattttcttttcatcaaatgttatttactgagtacctccaatcaacttctttggtattgtagcttgctgtgattctggcagataataaatgtcagcatggggagggtaaaagaaccaagccttacatttaataatattgtttgttagaaattggcttcactttcatcatagagagtctcaca

SEQ ID NO: 310451 - DNA, 596 bp, Homo sapiens
ggtttttaagatctaagaaacaaagcaatctattatttatcttgaaaatcatattatgtcttgtgttgtataggcacagtaggcataktaatgtgcagtctatcaaagacacaagaacaaagatgttaaattgatatcatatagcacctagcaggaaagaatcatttctacttggaaggtagggagatgaaagtgggaagttagagaggacaaacatgtggaaggcaaatcatagccctctctacaccacaggaatgtttacacatcagaccaagcactctcgtgttgagctcagatgcagctcaggatccttctcaacacagtccactgggaagccattgtcaatctcaagttgccatgccagaggaaaattttattcatttctgatgtcttgggtgatttgtatccaatgcagggataattatgggctgatccaagaggccactctagagatattccctattaaaccctgtatttaaaaaatctaataagatgggaggtgttcttgtaattatttcatcatcgtagtatgccatgttttctgttgcagtggagttttcatgacagctcagtgttagtattttatcccgttaatt

SEQ ID NO: 310452 - DNA, 628 bp, Homo sapiens
ttctaaattttgaataagctctaatttgcctcaaatctttcatacctgaaatacaaagagtggtttctgtttctctgtctgaactccaggcaaaaaagagatgttatattttatagtcaaagcagtgcaaatgtttttctattttgagctctaaatatagtagctttttcatccacatgttcctttctctgtgtccytaagcaggaaatttcatgctgtttatatattatgctaaacactagttgtttcacctgtgtttagttatatccacaaaggaaggttttttatctctttgagagttgaagactaggcagtattcctattttccttctgacattgtggctttaaaaatttttgaacagccaattgagagaaaaccacaacttatttcaaattagtgctataaaatatttctgtcattcaagttaatgatagcaaaggtcaactttacggcctcactcaaaaaggagtgtaatggagatatagacatacacattaccttcagcactatgggtttcttctatttgccccctgaaaataagtaagtatgccagcttgtctattgccaacttggccttaccaccagccttctaaggtctcttccactttgcggaggagatgttaggga

SEQ ID NO: 310453 - DNA, 628 bp, Homo sapiens
ttctaaattttgaataagctctaatttgcctcaaatctttcatacctgaaatacaaagagtggtttctgtttctctgtctgaactccaggcaaaaaagagatgttatattttatagtcaaagcagtgcaaatgtttttctattttgagctctaaatatagtagctttttcatccacatgttcctttctctgtgtccctaagcaggaaatttcatgctgtttatatattatgctaaacactagttgtttcacctgtgtttagttatatccacaaaggaaggttttttatctctttgagagttgaagactaggcagtattcctattttccttctgacattgtggctttaaaaatttttgaacagccaattgagagaaaaccacaacttatttcaaattagtgctataaaatatttctgtcattcaagttaatgatagcaaaggtcaactttacggcctcamtcaaaaaggagtgtaatggagatatagacatacacattaccttcagcactatgggtttcttctatttgccccctgaaaataagtaagtatgccagcttgtctattgccaacttggccttaccaccagccttctaaggtctcttccactttgcggaggagatgttaggga

SEQ ID NO: 310454 - DNA, 528 bp, Homo sapiens
tttctttagaaagaccttagacttgaagctgagctatttccaaatgtgcagcggtagtgcatatggtaatggtttcataaagtatgttaatcaaggaaccacaaaaatcatttaatctaggaggtttcctcaccaccatcaaatactgattatatttacatagaaactgactccttatcatgcagcygataaacattgctgaagggagagcctgcagaagcctatttgccagacacaatctccaatcccaactgctcacagaaaataatcattttaaagattgccacacaaaaaggtgacattcctgtgtcattatatttcctttccctatagcagaagccaggattaataaagttaataaaaaaattaagtcaccatatgttttttaaaatgtttagaaatgtacgatgatcaacgttacaatagtaagataaggacttaaactgactatttgaggttctaaaaatccatttagggtgttaagctgttaaaaatggtttaaacttaaggtaaagaatcatgacagga

SEQ ID NO: 310455 - DNA, 573 bp, Homo sapiens
caagtagtgccctggaggtggagtcaggttaaacattttgcccctgttctatttgtcttcccatgctaaattaatcattctgttttcaacccttaattatcttcatcatccccatatacatcacacttaatgaaagacaagatcaataaggaagaagaarattgataaagataaaactgaaaacgagaccttaaagatgaagccacccagagaagaggataataaaataaaagaaaaagcaaaagcggttcaaagggggaaaattgccttctgagaattgagaaaaggctaccagggtacagaagatacaatagataaattgggggcttaaagaggcatacaatttccccaaataaaatatggaataagaaaaactaaggcatatcaggggaaaaagaaaaagcaaaatcactggcttattcttctcctctaacttaaatatttctttgaggtgtcaagttatttcccagtaaatctcttaaatcatagactgagtagtcatattcagattgcagtaatcattaagcggttgttcatcatatgattgtctcaactaaatatagaaggaaaaat

SEQ ID NO: 310456 - DNA, 595 bp, Homo sapiens
tgttttaaagacaacaaagcaataaaccacacaaacaactaaacgtgttatataccaaatgttaacacattggagacttccaattcatagttctttgctgctaaattaacttacttttctgcaggtctttaaataaagcaggagtcccaaagcaagcgacaacagggaccaaggargtaagacagctgaagacagtgaggacttctatgaactggagagcacagccccatctaatccagggagctgattgttgcctgaggaaattcagcaccagtgttgccaggtcttaattaattctttcaagaaaagcataaaactctgtatcttgataaactcatgaaaacagaaatttaaaaaactacttagggattcagtcagtgactggctcattatcacttgctctaattaactgcatttactaaccacagggtgaaaatagaaagtcgcatgaaggtggaatagcacagctttagaagccagaaagtgcgggtcagaatgttctctctagaccttcagagtttcaagaccatatgcaagtacttaactcagaaagactcagtcttcgtctgtgaaatagagaacaacagtaccacct

SEQ ID NO: 310457 - DNA, 595 bp, Homo sapiens
tgttttaaagacaacaaagcaataaaccacacaaacaactaaacgtgttatataccaaatgttaacacattggagacttccaattcatagttctttgctgctaaattaacttacttttctgcaggtctttaaataaagcaggagtcccaaagcaagcgacaacagggaccaaggaggtaagacagctgaagacagtgaggacttctatgaactggagagcacagccccatctaatccagggagctgattgttgcctgaggaaattcagcaccagtgttgccaggtcttaattaattctttcaagaaaagcataaaactctgtatcttgataaactcatgaaaacagaaatttaaaaaactacttagggattcagtcagtgactggctcattatcacttgctctaattaactgcatttactaaccacagggtgaaaatagaaagtcgcatgaaggtggaatagcacagctttagaagccagaaagtgygggtcagaatgttctctctagaccttcagagtttcaagaccatatgcaagtacttaactcagaaagactcagtcttcgtctgtgaaatagagaacaacagtaccacct

SEQ ID NO: 310458 - DNA, 561 bp, Homo sapiens
tctcttttataagggcactaatcccattcataaaggctttgccatcatgatctatctaatcacctcccaaaggtcccacctcctaataccatcaccttgggagtaaggatttcagcatatgaatttgcaggggacacagtcagaccataccgcctggcaactcctgtcatatctctgggatatatgtcatagataagtcatatcttaaacatatggaaaaaatggatttaccaaacaatccagcagtacattcttggttgtatatcccagagatatgtaatttccgcacaaraacttttacacacatgctcataacagctttatttctaatggccccaaactgtaaactatccaaatgtcctttaatgaataaatgattaaacaaactttggtatgtccatgcgatggaatactactcagcaagataaaatgaacgaaccattgatttcattgaattgtctacttgtatctttttgcatctcattgagttcccttataatcattactttgaattcctttcctggaaatttattgatttcctattcattggggtctgttagt

SEQ ID NO: 310459 - DNA, 575 bp, Homo sapiens
gtgtctggtgagagttcatagatggctgccttttcactgtgtcctcacatggcagaaggggcaaattagctctctggggtctcttttataagggcactaatcccattcataaaggctttgccatcatgatctatctaatcacctcccaaaggtcccacctcctaataccatcaccttgggagtaaggatttcagcatatgaatttgcaggggacacagtcagaccataccgcctggcaactcctgtcatatctctgggatatatgtcatagataagtcatatcttaaacatatggaaaaaatggatttaccaaacaatccagcagtacattcttggttgtatatcccagagatatgtaatttccgcacaagaacttttacacacatgctcataacagctttatttctaatggccccaaactgtaaactatccaaatgtcctttaatgaataaatgattaaacaaactttggtatgtccatgcgatggaatactactcagcaagataaaatgaacgaacyattgatttcattgaattgtctacttgtatctttttgcatctcattgagttccctta

SEQ ID NO: 310460 - DNA, 606 bp, Homo sapiens
tggaagatattgacattgggggatgctggaggaagactgaacagaatttctctgttatttcttggctgccactggtgatataattacctcaaagtaaaagcttttaaacaactgctatgaaattcgcaaataaaaaatattatttataataaatagattggctagatataatgaaaaaacttcttgaatttcaaaaaatttgaaaaaatttgttgaactttcttaaaagtaaaacctacttcyttttttccacctctcattgagaatctttcaacagaatcatcttgacaattagaggcttggtatggacaaaacaggccagtgagaaatatatttatctggtttcctaatattcatactgagctggatattctgtcattttaagaaaaagaaaaaataaaccaggcatgaaaatgtaccacttatctttaattattttttctgggtgtatcacaagttacctggacctcaatactgttttgttttatgattgtaaatggaatatagatgttgcaaaattgtaaacaacagacttttttttttttttttaaatgaaacagggtcacactctgttgcccagcagtggagtaatcatggctaattaca

SEQ ID NO: 310461 - DNA, 568 bp, Homo sapiens
taattacagccttaaactcctgggctggaggaatcttccaagtagctgagactacaggtatgtgccaccacgcctggctaatattttcattttttgtagagatcgtctcactgtgttgcctgggctagttttgaactcctggccatgggtgatcctcccacatcagtcttccaaagtgcagggattacaggcataagccaccaagcccaggtaaaaccatttttaaaaagaaagtgaattcyctcagaatcccaccccaaagaaaccacacatattttttggtaagtcagataattcaatatatactattgaataatttgctttttttcacagcacaatatttcatacacaaatttctttgccagtgctccccgttattgccattgtttggatgtactatagtttatttaaccaatttcccattgatggacatttggatccttccaatatttttattacatttatttagtattttgaatagtttgtctgtgtttgctgtgtattaccccaaaaagtagcagtggtttaaaataataatcatttatttcacttatgatttggtggactg

SEQ ID NO: 310462 - DNA, 568 bp, Homo sapiens
taattacagccttaaactcctgggctggaggaatcttccaagtagctgagactacaggtatgtgccaccacgcctggctaatattttcattttttgtagagatcgtctcactgtgttgcctgggctagttttgaactcctggccatgggtgatcctcccacatcagtcttccaaagtgcagggattacaggcataagccaccaagcccaggtaaaaccatttttaaaaagaaagtgaattccctcagaatcccaccccaaagaaaccacacatattttttggtaagtcagataattcaatatatactattgaataatttgctttttttcacagcacaatatttcatacacaaatttctttgccagtgctccccgttattgccattgtttggatgtactatagtttatttaaccaatttcccattgatggacatttggatccttccaatatttttattamatttatttagtattttgaatagtttgtctgtgtttgctgtgtattaccccaaaaagtagcagtggtttaaaataataatcatttatttcacttatgatttggtggactg

SEQ ID NO: 310463 - DNA, 576 bp, Homo sapiens
ggctcaaacattgtggacaaagataaatgacaaactgggaaaatctttgctgcttgtatcaaatataaggtaactgatcatctgaatttataaaggagmgaatataaattgataagaaaaagaccaacaaccctatgaaaaaaatgagtaacagacaactgacacagaaaaggaaatacacatggcttttaaataaataaaaagatacttaataaccctcgtaatataagaaatgtgaattaaaactacaaactgatgctacttttgatctaattagttggcaaaaatcaaaatgcttgacaaaatcctatgttggtaagggtaaggggaaacactctcatatcttgctagtgggaaaatgaactggtacaatctcttcaagatcattttggcaattttgttatctgtcaaaactacaaatttactcagccaatccatttctaggattatgtctcataaatatatatagtcacacgtgtaaaatgacatgtataaagttattctccttggcattatttatcatagcaaaacactgggaaaaacttaaatacattgaagaggaaacattaaataaat

SEQ ID NO: 310464 - DNA, 623 bp, Homo sapiens
ggtgagagtgcaaatccttgctttattcttaatcttagaggaaaagctttcagtctttctccattgaatgtgatgctagtatgggcttgtcttatatgacctttattatattgaggtaagttccttatatacctattttgttgcgtctatattcatcagcaatatcagtccattattggtccataggtttttctttttctttctttttttgtgtttgtgtgttttgttttgttttgtttttgagagagtatctcattcctgttgcccaggctgcagtgcagtggcacaatctcagctcagcacactgcagcctcgacttctmgggctcaggtgattctcccacctcaacctcctgagtagctccaaatgcacatcacacctggctgatttttttttgttttagtagagacggagtttcaccatgttgcccagtctggtcttaaactcctgggctgaagagacccacctgctttggtctcccaaagtgctagaattacagatgtgagccaccatgcccagtctcttgtgttttattctggttttgttatcagcttactgctgccctcaaagactcagtttgggattgttccctcctcttcaattctttggaagagtttgaaaag

SEQ ID NO: 310465 - DNA, 603 bp, Homo sapiens
aagggaacaaatctgaggagtggcaagcggcgaagaccaaaagcttatctgtgtggaattgctgctgtagacaagaacaatataatcctccctgttctgtacctactaaatcttacaaagggttagaaaaatagtatttcatctgtctttgggtttttgataataccaaataacatcaaatggaagcagtctcatggtttcttcattgctaaactaattgttattacatacttgttcctgtgtgatgttaatatatattcctggaaccagaaaggtctacatggtcaaataaatttgaaacttgcattaaataagaataaattgatttttttctccttcagggtttcacagaatctttaataccaatgtgcttttttgaacctcttaatgcagctctggtaggctgactttctgtgtgtgtgtgattattttatttactgccaatctccttaaagttagtttttatttaaaaattatttgtataaacacctgaactatttgactttttaaaaattccattctattgtgktaatagcacttaacatgcgatctacctctgtaaaccatttttaagtgtacattattgttgactgtaaggacaat

SEQ ID NO: 310466 - DNA, 593 bp, Homo sapiens
cttctgccatgattgaaagcttcctgaggccctcaccagaagcagatgctggcgccatgcttcctgtatagctttagaaccataagccaaaataaatctcttttcttaataagttactcagcctcaggcattcctttagagcaatgcaaatggaagaacacaggggcaattgctctgcctaccaaaataaatgtacacackattatatatgcatacaaactaggaaatatagtcatttatatttatcaggattcaaaatatcatgtccctatcccaactgtctactgtctgtcccctcactgcccctgaaaaaaagaaaaatatcctaagatgcaaacactcaaaccatggaatgaaatactcttggagataaaaaagtcaaatacttctcttgctatgcggatttaagagaaacatctccacagtatcagttgtgtgggagtttatgtgtaggaatctaactgctcatgagttatctccatgaagtcccgctcacagtatgaatagatgggatcctgttataatctgcttactgtttgccttgcagttgtgcatataaattatgtctaaacccttttcttcttaatcattct

SEQ ID NO: 310467 - DNA, 664 bp, Homo sapiens
ttggattgaatctgtagatcaatttgggggagtattaccatcttcacgtattcagtcttctgatacatgaacatgagttttctttccatttatttagtttttctttaacttcttgcaatgatattttagttttcagtgtgaaagtattgcatttcttttttaaatctattactaggcattttctttttgatactattctataaggaatttttgtcttaatttcacttccaaattgttcattgtcaatacacagaaatacaactaatgcttgtgtattgatcttgtatcaggaaacctcgctgaacttgtgtgtatgtgtgtgtgtgtgtgtgtgtgtattagggttttctatataacgatcacgtaatctgcaaatagagatagtttcacttcttccttttcaagctagatgcattgatttctttttcttgcctrattagcctggctagcacccccaatactatattgaatagaagtgaccagagtagctagctttgtcttgggaaagggaaaaacatctggtctttcgccattaagtattattttagccatatgggttctatatatggctgggctttatcagattgaggaagttctgtgtttttttcctggtttgttgaatgatttttatcataaaagagtattgggctgtgttaaaggagat

SEQ ID NO: 310468 - DNA, 664 bp, Homo sapiens
ttggattgaatctgtagatcaatttgggggagtattaccatcttcacgtattcagtcttctgatacatgaacatgagttttctttccatttatttagtttttctttaacttcttgcaatgatattttagttttcagtgtgaaagtattgcatttcttttttaaatctattactaggcattttctttttgatactattctataaggaatttttgtcttaatttcacttccaaattgttcattgtcaatacacagaaatacaactaatgcttgtgtattgatcttgtatcaggaaacctcgctgaacttgtgtgtatgtgtgtgtgtgtgtgtgtgtgtattagggttttctatataacgatcacgtaatctgcaaatagagatagtttcacttcttccttttcaagctagatgcattgatttctttttcttgcctaattagcctggctagcacccccaatactatattgaatagaagtgaccagagtagctagctttgtcttgggaaagggaaaaacatctggtctttcgccattaagtattattttagccrtatgggttctatatatggctgggctttatcagattgaggaagttctgtgtttttttcctggtttgttgaatgatttttatcataaaagagtattgggctgtgttaaaggagat

SEQ ID NO: 310469 - DNA, 501 bp, Homo sapiens
tgaagaacagacactctggagccaggctgccatggttcataacctcagctctaccatttaccrgtgaccctgagtaaatttcttaacaactctgcctttaagtttctttatatctaaagtagagactataacagtacctatttcaaagggttctggtgagaagtaagtacatttaataaagcatttagaagtgcgcctggtatgaagcaaatcctatgtgtttgctgttattatcaagaaaccatttcaggaggaggtaacacatgaaagaagaacagccttccaggcagagaactaattgaaagatgctaagggcagagagtcccacaggcaaaggcacccagtcaaggtgtccctgagggataggaaagggtttgattgaggagagactagatttgaggctagagaagtagataaggtcatgattatatgcttatttcttcctctgctagtaataaatgacttaggcagggtgagcttgggggtcagctctgaccaaac

SEQ ID NO: 310470 - DNA, 458 bp, Homo sapiens
aagggagagctttgattcttttgtttttcaatcagggagaaaaatgatagttccttcaaccaacagtggccatgcatcctgagtgacagagggaagccagtcgtcagggaacatccttgcccttcctacgattttctcttgtaatatacatgccaaggyagagacacggactcctcctcagatcagagttgtggatcctcccttttaggtggagaaactcctgccctgcagcttccagtggcatctgttccctccccaggaacatggggctctcggtcacacgccctccattaacctagaatttaaaatcagggatatcctggttcctcgagttacttctagatcctgtgggtaccagattgcagcccccacccctcatatcatatgcatagatttgattccacacatttcaatatagcagacctgcaggggcacttttatgcagtagttataagagc

SEQ ID NO: 310471 - DNA, 569 bp, Homo sapiens
atttttgagactggaatattcaacatggtcccctggataattttttaatacaaagggagaatataggaaagtggggaattttaatattagtcctttctgatagaaaatggctgctcttaaataagcagtttatgttgacggttgcattcttgatgacctgtaatgaaattaatgctttgcttttcactgggttacagtggtcagaaattggtaccataagagttttttctactgtctcactttgcaggaaacaatattacttaatacagctagaatattataagatttagatacactccacataaatgaacatgagctacatattacatcagactatatattatctgtttttcaaatgacataaattggaaattgtttttaagcaaaaaaatgaaattactgaagaaagaatgattctgacattcaatatcctggtgcatcacagaatcatgrtaagtgattctgtggcaagaattcatggttttacgcctgcttctaattatggtggttaacctctataggtagctattttctttgctgtaaggtgagagggtttcaggaaatgattt

SEQ ID NO: 310472 - DNA, 574 bp, Homo sapiens
tgtcaatatatttagtaatttgcttgagaaagaacatttacgtgaatgcatttatcttcccacataactgtcaataatgcattgttccagaaattatttttatgtagatgtaatttttatgcaaaaattaacctttcttataattccagtgtgaaatgaaaaccattcctgttcatctgattttttctctatcttcatggaatcatgagatgattttttagaagtcaaatatatgattaagctgagttcttttttttttctttaaaaaattgtgagaatatattggcttgtttagatgaatatcaaaaattaattctctaaaaatctttatgtttggccaatatttctcagtgttggtattcacacagcaaagatgtactggtggttttctcatatggaaayaggaaatgcagagaatatcaaaacaaaacttgaaccagcagaagcaaaagtgcatgttctaatcttctctgttactaaattctttatagtgtgtttgttttttgggtaaatctcaaaacaatttttctgtaaatgacttgaatggattcatctctttagtgtttggaattaa

SEQ ID NO: 310473 - DNA, 574 bp, Homo sapiens
tgtcaatatatttagtaatttgcttgagaaagaacatttacgtgaatgcatttatcttcccacataactgtcaataatgcattgttccagaaattatttttatgtagatgtaatttttatgcaaaaattaacctttcttataattccagtgtgaaatgaaaaccattcctgttcatctgattttttctctatcttcatggaatcatgagatgattttttagaagtcaaatatatgattaagctgagttcttttttttttctttaaaaaattgtgagaatatattggcttgtttagatgaatatcaaaaattaattctctaaaaatctttatgtttggccaatatttctcagtgttggtattcacacagcaaagatgtactggtggttttctcatatggaaacaggaaatgcagagaatatcaraacaaaacttgaaccagcagaagcaaaagtgcatgttctaatcttctctgttactaaattctttatagtgtgtttgttttttgggtaaatctcaaaacaatttttctgtaaatgacttgaatggattcatctctttagtgtttggaattaa

SEQ ID NO: 310474 - DNA, 574 bp, Homo sapiens
tgtcaatatatttagtaatttgcttgagaaagaacatttacgtgaatgcatttatcttcccacataactgtcaataatgcattgttccagaaattatttttatgtagatgtaatttttatgcaaaaattaacctttcttataattccagtgtgaaatgaaaaccattcctgttcatctgattttttctctatcttcatggaatcatgagatgattttttagaagtcaaatatatgattaagctgagttcttttttttttctttaaaaaattgtgagaatatattggcttgtttagatgaatatcaaaaattaattctctaaaaatctttatgtttggccaatatttctcagtgttggtattcacacagcaaagatgtactggtggttttctcatatggaaacaggaaatgcagagaatatcaaaacaaaacttgaaccagcagaagcaaaagtgcawgttctaatcttctctgttactaaattctttatagtgtgtttgttttttgggtaaatctcaaaacaatttttctgtaaatgacttgaatggattcatctctttagtgtttggaattaa

SEQ ID NO: 310475 - DNA, 630 bp, Homo sapiens
atgtgagccattagcattaactcagctgcttttgctgccctttggaagagagcacacacatcatttcatttttgcttatttcccatttgctcatgtttctgtttattggcaagtraagtgatttttacctctaggacgacgactgtcttttttcagtggggtatcctttgaatcattggttctggaacttcatgatgaaggcattgtttttaggttggatgctctagggccggtttcagagcagttgcccctttgattcctcctctcaggtgaggatttgtccaccacatctgcacaagggtataaccttttcaggttgtcaaggtctcttcttccaccttttccatcttcttatcctcgattactttctttcctgttaataaattcatcaatagacacttttctttttgcagattttattgcttttttaaaccttatatcacttaatacttctctttctcaacaaacaaatatgaccatgcttaaactgttatttacaggcttatttgaataggaatggagatcattttatttcattcattcattcaacaaacacttaacgagtaagtcttaggtgtcaaatacatgaccacaaagataagtccctcctttcaaaacaggaggttgacc

SEQ ID NO: 310476 - DNA, 543 bp, Homo sapiens
aacgctgcctgtctcccatgtttgtgaaaagctttgtaggtaggtgtggggttaactctgtctacaaacaaattcttgcttgtggtgtttctccaaatagtcgatgctgttttcttagtggcttcttcggttggaattctgatttggtttctttctggctgtgtgacctggaccgagttatgtggtgactctgaatttcaatttttttgtctttaaaatgtggataatgtctgcttctcaggcctgtatgtatcagataatttatatgaaagcatattctaaactgtaaagcactatatagacagatatgactatcggttcagacmcatcacctgtcagtccctaattcaaaggtccctgctcactgtaggccaattaatgacaaagagagttgaagggcaagtgctccggtggttgtagcattctataaagaccatcttttgttccagtgttacccatatttagcatgtagattgagaatggaatttgcatttttcttttattattttaattgtgtaaacacatcatctgccaaggagcata

SEQ ID NO: 310477 - DNA, 543 bp, Homo sapiens
aacgctgcctgtctcccatgtttgtgaaaagctttgtaggtaggtgtggggttaactctgtctacaaacaaattcttgcttgtggtgtttctccaaatagtcgatgctgttttcttagtggcttcttcggttggaattctgatttggtttctttctggctgtgtgacctggaccgagttatgtggtgactctgaatttcaatttttttgtctttaaaatgtggataatgtctgcttctcaggcctgtatgtatcagataatttatatgaaagcatattctaaactgtaaagcactatatagacagatatgactatcggttcagacacatcacctgtcagtccctaattcaaaggtccctgctcaytgtaggccaattaatgacaaagagagttgaagggcaagtgctccggtggttgtagcattctataaagaccatcttttgttccagtgttacccatatttagcatgtagattgagaatggaatttgcatttttcttttattattttaattgtgtaaacacatcatctgccaaggagcata

SEQ ID NO: 310478 - DNA, 556 bp, Homo sapiens
ggctcactgcaagctctgcctcccgggtttacgccattgtcctgcctcagcctccggagtagctgggactacaggcgcccgacactgtgcccggctaatttttttgtatttttttgtagagacagggtttcaccatgttagccaggatggtctcaatctcctgaccttgtgatccgcccgcctcggcctcccaaagtgctgggattacaggcgtgagccaatgcgcccggcctactaatgccctctcacatggacacaaatatctaggtgcagggaaaattaragctgagatattcagactcactgccagttggaggaaaaaaatcagttataacgcattttttggaatagagggaaataatttgataagtacaactttttgtttgaggtgtagctagatgttagacatgactgagctgttctacacataagtgttgaatagtgatggtggtgcattaagaggatggaaagactatgggatgagttggaaattttgagacaaatctaaactctactaatttctattgttgtaaactctgctggtagaaaagatatt

SEQ ID NO: 310479 - DNA, 556 bp, Homo sapiens
ggctcactgcaagctctgcctcccgggtttacgccattgtcctgcctcagcctccggagtagctgggactacaggcgcccgacactgtgcccggctaatttttttgtatttttttgtagagacagggtttcaccatgttagccaggatggtctcaatctcctgaccttgtgatccgcccgcctcggcctcccaaagtgctgggattacaggcgtgagccaatgcgcccggcctactaatgccctctcacatggacacaaatatctaggtgcagggaaaattaaagctgagatattcagactcactgccagttggaggaaaaaaatcagttataacgcattttttggaatagagggaaataatttgataagtacaactttttgtttgaggtgtagctagatgttagacatgactgagctgttctacacataagtgttgaatagtgatggtggtgcattaagaggatggraagactatgggatgagttggaaattttgagacaaatctaaactctactaatttctattgttgtaaactctgctggtagaaaagatatt

SEQ ID NO: 310480 - DNA, 587 bp, Homo sapiens
ggatctacctctgaagcagccgccgggcctgctcttccacatctygggcaaggcagtggccttccctcacaaaggcctgggcctggcccagcagtgcctcagcctgcctggccttcttgtccactgctgcctccagctccctctgtgtgcccaggagctcgcccaccccaggcagggcctggcccacagtgggggctctcagctcaacctcgatgggctccagccagttctccagttcctccatgctccgccgcagacgcagggcctagggtagaaagtgaggtaggcaggaggggagtgtcctggagcccggccagccacccctcggcctgcacaacctcacctcacaggccttctggagcttggccaccttcttctgggagttgtcttgcagctcaccccagagtgctcccagctcctccagtcgctcctggatggcctccgaggctgggtggcccccctgcagcagcctctgtccctcctgcagccacaacatgaaacacaccttgtggactcaggactgctggtaccagggcacttgtgttgactctgaccaccagcactagagctgcagagtccctgcggtc

SEQ ID NO: 310481 - DNA, 513 bp, Homo sapiens
ttcctctgagctagatcctattttaagcactttaagtgcattatctcatagattttaccttagggtaagagtatggatactggagccagattgcctagattgaaacatggcctctgccacttaatagctgtgtaatgttgaagaaagttactttttcttggtgccttagtttcctcaaatgtaaaaggagggtaatattargacctatttcattagatgtttgtgaggaataaatgaagtaggatttcttaagtccttagaacagttcctggcacatgttaactgctagttagcagctaactcatttaatcctcatcacaaacttatgaggtaggtaccaattatttccaccttagaaatgaggctcctcagtatcttgcacaggaaacttctccaagcttacgtgtgtggttgagcaccagagtctgtgctctcaactttcttgctataagccacctatcatggagcctccagccctccaccctccacgtgtcgtgggcagtctcccagtag

SEQ ID NO: 310482 - DNA, 486 bp, Homo sapiens
ttacaatctagtggcaaagacaaagaataatcaaatcatcacacaaatatgacactgagtgtgaatatgaaagaatgaaacataaaagtatgaagaaagtacaatgcatgaaattttaattaatacaaatactttcaaattgtaaaaagataataatcaagaataagctaatggcaaagctggccaacaaaatgaattataaactgtgattcaacccttgcccaatggcagctattctttagtcagtaactggaaataccagcaatcctctgggttcaatgttttattttgttaataaaagaagctggaactaggttagcagttgttggcaaggacccattagaagagagtagaggtaaaaggagtggtgtcaagttcctaagaaggtggataggatgaccctcaaagcacattgggagaattgcytaaagcaaaagtaaggccctcctctctgtaacaggaaggaaggaagatggaatgcagaca

SEQ ID NO: 310483 - DNA, 545 bp, Homo sapiens
gtataggagtgatttttgagagtggtgaagagtttaaatggcttacaatggsaatgaaagaattagctacttggagaaaaaaagccggattgctgggcagtgttgagtgctcatttgaggttggggaccatggcctgttgggtgattttctgcagcagtacttggctgttctctaggagacagcaatggaagagtcttttaatatcatcaggtcccttccacacaattatacaaggaaattaatgtctttaaaaaatgcctgacttatgtcatcaaatccattgccatttttacagatgaggaaattgaatgccagacttgatccaaagttacacaactcataactaccagattttggaagaggaaaatccagatcttttgactcctagtccaattagaacattcaggatgaaaaaataatcccttccactcaaagttaaatagacctctagtgtattggtaaagacaggatgggaggttctaagggcaagggtcttctctgctagtaaaggctatagaaaacactatattttaaaaaattgttt

SEQ ID NO: 310484 - DNA, 585 bp, Homo sapiens
tattttttttccttctaactattataaaactataatttcaagtacataaatttgaggcttttgcttgtggaatagatatactcttccctatcctccgattaaattggacatcatttataaaacaacataagactctgagaagtggagagaagagasagattggctaaggaccttgggactcaagaatgtcacaatagtgagttccctaggatttgtttttgcctcatatatctcagactgagtaacagaagctggcaaaccagttatgccaatgggtgcaaacaaacaaaaagagccccaaggaaagtctgctctctccagccaaaagaccagaagagagacagcctaccaagataatacacttttagataacaacctctctactccagcctaataaaacagaaaacaaacaaacaacaacaacaacaaaaactatagccccactgccacctacaaaggcttagtggaaaaacctagatttctgccttcactaagctgtaacaaggtaacccgggccctctttcctgggtaatgtctgagaagactgagtggagagccaggactttcatcctcactagacattaa

SEQ ID NO: 310485 - DNA, 410 bp, Homo sapiens
aaggcacccatgccccttcaatcaaagtgtattagtgaaagactagtggggagcctgaactcccacttccaatcagcartaataaggagcacctcccattggataccaactgaagccaagtgaagacttggacatccactatcccctggcagtaataaaggggcactccattttcccttctagaaattgtcagaggaggactgctaaaacacaatatttgaataaaatccagagtctcaaaacacaatacacaaaaatgtccaggtatcaataaaaatcattcattatagaaagaaccaagaagatctcaacttgaataagaaaagacactcaacagatgccaaggccaagatgccacacgttagaattatctgattttaaagcagctgttataaaaatacttccatgaa

SEQ ID NO: 310486 - DNA, 410 bp, Homo sapiens
aaggcacccatgccccttcaatcaaagtgtattagtgaaagactagtggggagcctgaactcccacttccaatcagcagtaataaggagcacctcccattggataccaactgaagccaagtgaagacttggacatccactatcccctggcagtaataaaggggcactccattttcccttctagaaattgtcagaggaggactgctaaaacacaatatttgaataaaatccagagtctcaaaacacaatacacaaaaatgtccaggtatcaataaaaatcattcattatagaaagaaccaagaagatctcaacttgaataagaaaagacactcaacagatgccaaggccaagatgccacaygttagaattatctgattttaaagcagctgttataaaaatacttccatgaa

SEQ ID NO: 310487 - DNA, 605 bp, Homo sapiens
aagcacataaaaaatgcttaacatcattagtcattagggatatggaaaccaaaaccacaatatccattcacatccactaggatggttataataaaaaagaaaataacaagtgttggagaggatatggagacattgtaacccaatgtattgtgaatgggaatggaaaatggtacagccattttggaagacaatttttctgttcatcaaaaagttattaaagttactataagatccaacaattccactcctaggtatayacccaagagaaagtaaaacatctatctacacaaaaacttctatgtaactgttcacagtagcattatttataatatctcaaagtggaaacaacccacatttctatcagttgatgaatggataaacaaaatgtagtgtatttatgcaatggaatattattcaggtgaattttatagtaggtgaattatatctcaatttaaaattatgaggaaaaaagcagaagtggctactttaattaatctgataaagtagacaccattgttcatagcgttatttacagtagacaaaaactggaaaaaatcaaaatgtctcaatatatgaatggttaaacaaactgatacatttatacc

SEQ ID NO: 310488 - DNA, 605 bp, Homo sapiens
aagcacataaaaaatgcttaacatcattagtcattagggatatggaaaccaaaaccacaatatccattcacatccactaggatggttataataaaaaagaaaataacaagtgttggagaggatatggagacattgtaacccaatgtattgtgaatgggaatggaaaatggtacagccattttggaagacaatttttctgttcatcaaaaagttattaaagttactataagatccaacaattccactcctaggtatacacccaagagaaagtaaaacatstatctacacaaaaacttctatgtaactgttcacagtagcattatttataatatctcaaagtggaaacaacccacatttctatcagttgatgaatggataaacaaaatgtagtgtatttatgcaatggaatattattcaggtgaattttatagtaggtgaattatatctcaatttaaaattatgaggaaaaaagcagaagtggctactttaattaatctgataaagtagacaccattgttcatagcgttatttacagtagacaaaaactggaaaaaatcaaaatgtctcaatatatgaatggttaaacaaactgatacatttatacc

SEQ ID NO: 310489 - DNA, 605 bp, Homo sapiens
aagcacataaaaaatgcttaacatcattagtcattagggatatggaaaccaaaaccacaatatccattcacatccactaggatggttataataaaaaagaaaataacaagtgttggagaggatatggagacattgtaacccaatgtattgtgaatgggaatggaaaatggtacagccattttggaagacaatttttctgttcatcaaaaagttattaaagttactataagatccaacaattccactcctaggtatacacccaagagaaagtaaaacatctatctacacaaaaacttctatgtaactgttcacagtagcattatttataatatctcaaagtggaaacaacccacatttctatcagttgatgaatggataaacaaaatgtagtgtatttatgcaatggaatattattcaggtgaattttatagtaggtgaattatatctcaatttaaaattatgaggaaaaaagcagaagtggctactttaattaatctgataaagtagacaccattgttcatagcrttatttacagtagacaaaaactggaaaaaatcaaaatgtctcaatatatgaatggttaaacaaactgatacatttatacc

SEQ ID NO: 310490 - DNA, 609 bp, Homo sapiens
aaacttaccggctctgtgggtttcacataaaatgaaaaattaggctgagtgcagtggctcatgcctgtaatcctagcacttggggacaccaaggcaggcggatcactaggtcaatagatcgagaccagcctggccaacagggtgaagccccgtctctgttaaaaatacaaaaattagctgggcatggtggtgcacacctgtagtcccagctacctgggaggctaaggcaggagaattgcttgaacctgggaggcagaggttgcagtgagctgagatcacgccactgcactccagcctggcaacacagcaagacttcgtctctaaataagtaaaatgaagaattaagcttttcacttatctkgtcaatgtgtcttttatcaggtgtggtgacctgctgcctcagtcttttaaggctgctataacaaaataccttagagtgagtaatttataaacagaaaattgttgctcacagttccagaggctgggaagtccaagatcaaggcaccagcagatttggtgtctcaggaaaggcccttccttatagatgacaccttctagctatgtcctcacagcagaagggacaaacaagccccttaaggcctcttttta

SEQ ID NO: 310491 - DNA, 608 bp, Homo sapiens
gctctgcatgttttttcaacagtctcttgttcttgtttcaagatgcaatggtttctctgatctctttgagcctattagtcctggctccagcagtgcttctatttctgtcatcagctcagtttcctcagtttctttcttgctgtttgtcttgcctccatctttcatgccagaggcttttctcagatgtmtggtggtccttggtagtcgttcatatttaagagtaagtcactgagaaactgattggaatatcccatgtatggatagcatgggagcttgccactggtaggtctcagtatagagtaatctggtggagaataagctgtttcgttgggggacagttatctgtaggacttttcttggggagggtcttcctcagaaggaatacctctaattccctgtctggattgtaaaagctaccagctttctggaagctgagtgcaggaagggggcagagaaggtctcagtctcagctactctgctactagttgattgcagtttattggccctgcttggtgtctcaggattcagagtccctctggggaaattctcaagcataaacatctagtttctcctggagtaatcgtggagtggttgggttcagacaagga

SEQ ID NO: 310492 - DNA, 608 bp, Homo sapiens
gctctgcatgttttttcaacagtctcttgttcttgtttcaagatgcaatggtttctctgatctctttgagcctattagtcctggctccagcagtgcttctatttctgtcatcagctcagtttcctcagtttctttcttgctgtttgtcttgcctccatctttcatgccagaggcttttctcagatgtatggtggtccttggtagtygttcatatttaagagtaagtcactgagaaactgattggaatatcccatgtatggatagcatgggagcttgccactggtaggtctcagtatagagtaatctggtggagaataagctgtttcgttgggggacagttatctgtaggacttttcttggggagggtcttcctcagaaggaatacctctaattccctgtctggattgtaaaagctaccagctttctggaagctgagtgcaggaagggggcagagaaggtctcagtctcagctactctgctactagttgattgcagtttattggccctgcttggtgtctcaggattcagagtccctctggggaaattctcaagcataaacatctagtttctcctggagtaatcgtggagtggttgggttcagacaagga

SEQ ID NO: 310493 - DNA, 608 bp, Homo sapiens
gctctgcatgttttttcaacagtctcttgttcttgtttcaagatgcaatggtttctctgatctctttgagcctattagtcctggctccagcagtgcttctatttctgtcatcagctcagtttcctcagtttctttcttgctgtttgtcttgcctccatctttcatgccagaggcttttctcagatgtatggtggtccttggtagtcgttcatatttaagagtaagtcactgagaaactgattggaatatcccatgtatggatagcatgggagcttgccactggtaggtctcagtatagagtaatctggtggagaatargctgtttcgttgggggacagttatctgtaggacttttcttggggagggtcttcctcagaaggaatacctctaattccctgtctggattgtaaaagctaccagctttctggaagctgagtgcaggaagggggcagagaaggtctcagtctcagctactctgctactagttgattgcagtttattggccctgcttggtgtctcaggattcagagtccctctggggaaattctcaagcataaacatctagtttctcctggagtaatcgtggagtggttgggttcagacaagga

SEQ ID NO: 310494 - DNA, 608 bp, Homo sapiens
gctctgcatgttttttcaacagtctcttgttcttgtttcaagatgcaatggtttctctgatctctttgagcctattagtcctggctccagcagtgcttctatttctgtcatcagctcagtttcctcagtttctttcttgctgtttgtcttgcctccatctttcatgccagaggcttttctcagatgtatggtggtccttggtagtcgttcatatttaagagtaagtcactgagaaactgattggaatatcccatgtatggatagcatgggagcttgccactggtaggtctcagtatagagtaatctggtggagaataagctgtttcgttgggggacagttatctgtaggacttttcttggggagggtcttcctcagaaggaatacctctaattccctgtctggattgtaaaagctaccagctttctggaagctgagtgcrggaagggggcagagaaggtctcagtctcagctactctgctactagttgattgcagtttattggccctgcttggtgtctcaggattcagagtccctctggggaaattctcaagcataaacatctagtttctcctggagtaatcgtggagtggttgggttcagacaagga

SEQ ID NO: 310495 - DNA, 587 bp, Homo sapiens
aagctaaaacaaaatagacacatatgagcttttaaacttttttatttgcttcccccccccccaccccccaccaagaaaaaaagctctggcaaaatatttacaaagctgattaatgaaaccaagaaattctgttctgtttccttgagtaaataatttccgtaaggcagctagaaaatagtaagtattttgttctataaagctgttcacatttctgcattaacatgctaaattgtcctgctgtagagttactayaaaataaacatgactattccaaaagagatttttttccagtctaaggaatattttggaatcaaatatgcagttttttttccccacttgaatcatgtatactgaaaacccatttcctcagcaactacacaaaataagagaaagggaagtgctatattccagatacaaatgactcaaaggcagctcagttgtactggttttgaaaactcaaggattttataaataaaaatatttaagtatttccagttatgtaaacactctaaaattctataattttttggaaaaaaaaagctatagctttattgtttttacattcacctttataatgtctgtctgtt

SEQ ID NO: 310496 - DNA, 611 bp, Homo sapiens
  misc_feature (1)...(611): n = A,T,C or G
cttcccctctgctgcgggactcttccagtttttcagcagtcaccaatatctcacataccacctggacagaacagagtcccaaaaaactcatgtccacctggancctcagaatatgagcttatttagaaatagggtctttgcagatataatattttaagatgagtgtgatggttaatttcatgtgtcaacttgactgggccatgggtgcccagacttttggccaaagattattccttgtatgtctgtgaggatgttttctggatacaattaacatttgaatgggtagactgaataaagcagaatgccttccctcatctgggtggacttcatctaatcaaatgaagatctgaacagaacaaacagcctgagtaagagggaaytcctcttgcagtgtatgtaagcttgagctgggacattggtcttttctgcctttggactgacctgaactgagaaactggctcttcctgggtctcaagcctgctggcttttggactagaacttacaccattggctcttctggaactcaaggtctcagtacctggattggaactgacaccattggctctcctgggtctcaaggcctcagtacttggattggaacttacaccatt

SEQ ID NO: 310497 - DNA, 539 bp, Homo sapiens
atgccgcatgttctcacttatgagtgggagcaaaacactgagtacatatggacacaaagaagggaacaacaggcactggggcctatttgagggtaaagggagggaagacggtgacaactgagaaactacctatctagtactgtgcttattacctgggtggcaaaataatgtgtacaccaaacccccatgatgtgtaatctacctaacaaatcagcayatgtaccccgaaactaaaataaaagttaaaaaataataacaataatcaccctttaaacctatctttcaacatttaaagtttgcaaaggcaaagttttattcacctatggaacatggtttactaactgagcaactctgggcaagtactctcttggcctcttaagtggggataataacagggcatgcctccaaatcttcctgtgaacattaagtgaatggatacgtactggacactcagaaaaatgcttgggttgtagtgatatttaagtgccattataatggcagcattgtatgaacagtacatgtgaagaaatatttttaaa

SEQ ID NO: 310498 - DNA, 502 bp, Homo sapiens
gagcctaatctgctggggttttatcagagcctactatacgtgacagaaggaaaatactcaactggctgtagccttccacatgcacaaaagggaataaataactccatctccttctggcctttcatgtgggggaagagaaacactcagctacaatcccttttagatttccacatggaaaaagggaaatatacaacttcatcctcccttcagccattatgtctcatctaaagtcrgggaggaactgagaagcactgatgaagttcacagtcaaggggcacagtctcaccaaaagactgagccctaatcataggactatagaatgctccccttccccttacactctatcactacattactaaaggcctatttactatagctgcttttacttagtacattgtgttcacttttcaacaaaaaaaattccaagatagactgaaatgcaaaaaaaaaaaaaacagtttgaaaagtatgaacaagcatcataagcagagtcaagtatggc

SEQ ID NO: 310499 - DNA, 502 bp, Homo sapiens
gagcctaatctgctggggttttatcagagcctactatacgtgacagaaggaaaatactcaactggctgtagccttccacatgcacaaaagggaataaataactccatctccttctggcctttcatgtgggggaagagaaacactcagctacaatcccttttagatttccacatggaaaaagggaaatatacaacttcatcctcccttcagccattatgtctcatctaaagtcagggaggaactgagaagcactgatgaagttcacagtcaaggggcacagtctcaccaaaagactgagccctaatcataggactatagaatgctccccttccccttacactctatcactacattactaaaggcctatttactatagctgcttttacttagtacattgtgttcacttttcaacaaaaaaaattccaagatagactgaaatgcaaaaaaaaaaaaaacagtttsaaaagtatgaacaagcatcataagcagagtcaagtatggc

SEQ ID NO: 310500 - DNA, 502 bp, Homo sapiens
gagcctaatctgctggggttttatcagagcctactatacgtgacagaaggaaaatactcaactggctgtagccttccacatgcacaaaagggaataaataactccatctccttctggcctttcatgtgggggaagagaaacactcagctacaatcccttttagatttccacatggaaaaagggaaatatacaacttcatcctcccttcagccattatgtctcatctaaagtcagggaggaactgagaagcactgatgaagttcacagtcaaggggcacagtctcaccaaaagactgagccctaatcataggactatagaatgctccccttccccttacactctatcactacattactaaaggcctatttactatagctgcttttacttagtacattgtgttcacttttcaacaaaaaaaattccaagatagactgaaatgcaaaaaaaaaaaaaacagtttgaaaagtatgaayaagcatcataagcagagtcaagtatggc

SEQ ID NO: 310501 - DNA, 550 bp, Homo sapiens
taacaaaactacaaaaggagttaatayatatattgggaattttaaaaggacaggaaagagagaaaaaaatggaagcaatatttgaaacaataatgactgaaaattccttccaaactagtgtcagacaccaaaccagagatcaagaaagctcagagtacaccaaacaggatacatgaaaagaaaaattacacctaggcatttcatattcaacttcagaaaatcaaaaataagaaaaaaaagtcttgaaagaagccagagaggaaaaataccttacatataaaggagcaaaaataagaattacttcttaaattttcttagaaaccatgcaagcaagaagagtgaagttgagagaaaaaccaccagcctagatttctgcaccctgtaaaattatccttcaaaagtaataagaactaaagttcttctcagacaaacgaaacctgaaggcattgttactggtagacctaccttgcaagaaatgttaacggaagttcagaaagaaaatgatgtaggtcagacactccaatctacataaataaaagaagagagtcaa

SEQ ID NO: 310502 - DNA, 568 bp, Homo sapiens
gtaacaaaactacaaaaggagttaatatatatattgggaattttaaaaggacaggaaagagagaaaaaaatggaagcaatatttgaaacaataatgactgaaaattccttccaaactagtgtcagacaccaaaccagagatcaagaaagctcagagtacaccaaacaggatacatgaaaagaaaaattacacctaggcatttcatattcaacttcagaaaatcaaaaataagaaaaaaaagtcttgaaagaagccagagaggaaaaataccttacatataaaggagcaaaaataagaattacttcttaaattttcttagaaaccatgcaagcaagaagagtgargttgagagaaaaaccaccagcctagatttctgcaccctgtaaaattatccttcaaaagtaataagaactaaagttcttctcagacaaacgaaacctgaaggcattgttactggtagacctaccttgcaagaaatgttaacggaagttcagaaagaaaatgatgtaggtcagacactccaatctacataaataaaagaagagagtcaatgaattaataagtaaaa

SEQ ID NO: 310503 - DNA, 568 bp, Homo sapiens
gtaacaaaactacaaaaggagttaatatatatattgggaattttaaaaggacaggaaagagagaaaaaaatggaagcaatatttgaaacaataatgactgaaaattccttccaaactagtgtcagacaccaaaccagagatcaagaaagctcagagtacaccaaacaggatacatgaaaagaaaaattacacctaggcatttcatattcaacttcagaaaatcaaaaataagaaaaaaaagtcttgaaagaagccagagaggaaaaataccttacatataaaggagcaaaaataagaattacttcttaaattttcttagaaaccatgcaagcaagaagagtgaagttgagagaaaaaccaccagcctagatttctgcacmctgtaaaattatccttcaaaagtaataagaactaaagttcttctcagacaaacgaaacctgaaggcattgttactggtagacctaccttgcaagaaatgttaacggaagttcagaaagaaaatgatgtaggtcagacactccaatctacataaataaaagaagagagtcaatgaattaataagtaaaa

SEQ ID NO: 310504 - DNA, 550 bp, Homo sapiens
taacaaaactacaaaaggagttaatatatatattgggaattttaaaaggacaggaaagagagaaaaaaatggaagcaatatttgaaacaataatgactgaaaattccttccaaactagtgtcagacaccaaaccagagatcaagaaagctcagagtacaccaaacaggatacatgaaaagaaaaattacacctaggcatttcatattcaacttcagaaaatcaaaaataagaaaaaaaagtcttgaaagaagccagagaggaaaaataccttacatataaaggagcaaaaataagaattacttcttaaattttcttagaaaccatgcaagcaagaagagtgaagttgagagaaaaaccaccagcctagatttctgcaccctgtamaattatccttcaaaagtaataagaactaaagttcttctcagacaaacgaaacctgaaggcattgttactggtagacctaccttgcaagaaatgttaacggaagttcagaaagaaaatgatgtaggtcagacactccaatctacataaataaaagaagagagtcaa

SEQ ID NO: 310505 - DNA, 568 bp, Homo sapiens
gtaacaaaactacaaaaggagttaatatatatattgggaattttaaaaggacaggaaagagagaaaaaaatggaagcaatatttgaaacaataatgactgaaaattccttccaaactagtgtcagacaccaaaccagagatcaagaaagctcagagtacaccaaacaggatacatgaaaagaaaaattacacctaggcatttcatattcaacttcagaaaatcaaaaataagaaaaaaaagtcttgaaagaagccagagaggaaaaataccttacatataaaggagcaaaaataagaattacttcttaaattttcttagaaaccatgcaagcaagaagagtgaagttgagagaaaaaccaccagcctagatttctgcaccctgtaaaattatccttcaaaagtaataagaactaaagttcttctcagacaaacgaaacctgaaggcattgttactggtagacctaccttgcaagaaatgttaacrgaagttcagaaagaaaatgatgtaggtcagacactccaatctacataaataaaagaagagagtcaatgaattaataagtaaaa

SEQ ID NO: 310506 - DNA, 641 bp, Homo sapiens
aaatcttaaaagatattgatgagcttccaatccagtaattataagctccacccacctactcactctagggacttgatatggtttggctgtgtccccaccgaaatctcatcttgaattcccatattttgtgggagagacctggtgggaggtaattgaatcatgggggcaaatctttcccaggctgttatcgtgatagtgaataagtcttacactatctgatggttttaaaaagaggagttcctcatggacacagggaggggaacatcacacaccagggcctgtcgyggttgggggaaaggggagggagagcattagaataaatacctaatgcatgcagggcttaaaaacctagatgacaggttgataggtgaagcaaaacatcatgagacatgtatacctatgtaacgaaactccatgttctgcacatgtatcccagaacttaaaataaaaaaaaataaatacatacatacacatatatgcacaacaaaaattaaaataaagcacaagctctctgtctttttgcctgctgccatccacgtaagacgtgacttgctcctccttgccttctgccagggttgcaaggctttcccagccacatgaaactgttaagtccaataaacctttcttttgtaaattgccca

SEQ ID NO: 310507 - DNA, 641 bp, Homo sapiens
aaatcttaaaagatattgatgagcttccaatccagtaattataagctccacccacctactcactctagggacttgatatggtttggctgtgtccccaccgaaatctcatcttgaattcccatattttgtgggagagacctggtgggaggtaattgaatcatgggggcaaatctttcccaggctgttatcgtgatagtgaataagtcttacactatctgatggttttaaaaagaggagttcctcatggacacagggaggggaacatcacacaccagggcctgtcgtggttgggggaaaggggagggagagcattagaataaatacctaatgcatgcagggcttaaaaacctagatgacaggttgataggtgaagcaaaacatcatgagacatgtatacctatgtaacgaaactscatgttctgcacatgtatcccagaacttaaaataaaaaaaaataaatacatacatacacatatatgcacaacaaaaattaaaataaagcacaagctctctgtctttttgcctgctgccatccacgtaagacgtgacttgctcctccttgccttctgccagggttgcaaggctttcccagccacatgaaactgttaagtccaataaacctttcttttgtaaattgccca

SEQ ID NO: 310508 - DNA, 641 bp, Homo sapiens
aaatcttaaaagatattgatgagcttccaatccagtaattataagctccacccacctactcactctagggacttgatatggtttggctgtgtccccaccgaaatctcatcttgaattcccatattttgtgggagagacctggtgggaggtaattgaatcatgggggcaaatctttcccaggctgttatcgtgatagtgaataagtcttacactatctgatggttttaaaaagaggagttcctcatggacacagggaggggaacatcacacaccagggcctgtcgtggttgggggaaaggggagggagagcattagaataaatacctaatgcatgcagggcttaaaaacctagatgacaggttgataggtgaagcaaaacatcatgagacatgtatacctatgtaacgaaactccatgttctgcacatgtatcccagaacttaaaataaaaaaaaataaatacatacatacacatatatgcacaacaaaaattaaaataaagcacaagctctctgtctttttgcctgctgccatccacgtaagacgtgacttgctcctccttgccttctgccagggttgcaaggcttycccagccacatgaaactgttaagtccaataaacctttcttttgtaaattgccca

SEQ ID NO: 310509 - DNA, 467 bp, Homo sapiens
ttctcccaaaaacagcatactcctttcaccttcctgcctctgcccacgacttcctcttggtctggaatgcccccaacagttcagctcttaaagctcatatacsctcaggccatagttgaaaatatgtatatccttgtttattctcaacagttccaataaaaatccacctcccctttgaagtcttcatgactgctatactttaacctccaaagcaaagttagataccccatgatctgtgctcccatgacacccatccacttcgattatggcatgttccacattctaattatttgcttactgtctcctctagttgactttgagcagacaccttgtcttattcatgtctgcatctgaagagttttcacacagggctcacaccacaatgggtgaatgagcactcagagaggaatctgtacccacgtgaaggcatggacccttcagcactaagcttctgtgatctcataaca

SEQ ID NO: 310510 - DNA, 525 bp, Homo sapiens
tacctttccttttccctttttatttctgaagtatgaaagacagtgtgagatttttctgggtaatatgagcttctytgtacatctttttcaggatgccactgatgttgacagctgttcttttaaaatactgatattcaacatgacaatgcatgtgacttgccaaggaattgagaagctgaaagtacagtgacatggttatgacagggctgcaaaagacatgacttgtaatgtcatttcaaagctttctctaaaaataagttgaaaaacacaaaatgaatttgccttttattcagccaaaatgagtatctctttacttcaggtacctagtttgtattggaagtggtttttgaagattctaaaatgtgtgtgtgtgtgtggtgtgtgtgtgtgtgtgagagagagagacagagagagacagagagagagagggagactgtgactctgctcaggggttacaaatcatttaccttgagtagcatattttctttagtctttgcaactagctgaaggatatcataactttcc

SEQ ID NO: 310511 - DNA, 525 bp, Homo sapiens
tacctttccttttccctttttatttctgaagtatgaaagacagtgtgagatttttctgggtaatatgagcttctctgtacatctttttcaggatgccactgatgttgacagctrttcttttaaaatactgatattcaacatgacaatgcatgtgacttgccaaggaattgagaagctgaaagtacagtgacatggttatgacagggctgcaaaagacatgacttgtaatgtcatttcaaagctttctctaaaaataagttgaaaaacacaaaatgaatttgccttttattcagccaaaatgagtatctctttacttcaggtacctagtttgtattggaagtggtttttgaagattctaaaatgtgtgtgtgtgtgtggtgtgtgtgtgtgtgtgagagagagagacagagagagacagagagagagagggagactgtgactctgctcaggggttacaaatcatttaccttgagtagcatattttctttagtctttgcaactagctgaaggatatcataactttcc

SEQ ID NO: 310512 - DNA, 525 bp, Homo sapiens
tacctttccttttccctttttatttctgaagtatgaaagacagtgtgagatttttctgggtaatatgagcttctctgtacatctttttcaggatgccactgatgttgacagctgttcttttaaaatactgatattcaacatgacaatgcatgtgacytgccaaggaattgagaagctgaaagtacagtgacatggttatgacagggctgcaaaagacatgacttgtaatgtcatttcaaagctttctctaaaaataagttgaaaaacacaaaatgaatttgccttttattcagccaaaatgagtatctctttacttcaggtacctagtttgtattggaagtggtttttgaagattctaaaatgtgtgtgtgtgtgtggtgtgtgtgtgtgtgtgagagagagagacagagagagacagagagagagagggagactgtgactctgctcaggggttacaaatcatttaccttgagtagcatattttctttagtctttgcaactagctgaaggatatcataactttcc

SEQ ID NO: 310513 - DNA, 467 bp, Homo sapiens
ttctcccaaaaacagcatactcctttcaccttcctgcctctgcccacgacttcctcttggtctggaatgcccccaacagttcagctcttaaagctcatatacgctcaggccatagttgaaaatatgtatatccttgtttattctcaacagttccaataaaaatccacctcccctttgaagtcttcaygactgctatactttaacctccaaagcaaagttagataccccatgatctgtgctcccatgacacccatccacttcgattatggcatgttccacattctaattatttgcttactgtctcctctagttgactttgagcagacaccttgtcttattcatgtctgcatctgaagagttttcacacagggctcacaccacaatgggtgaatgagcactcagagaggaatctgtacccacgtgaaggcatggacccttcagcactaagcttctgtgatctcataaca

SEQ ID NO: 310514 - DNA, 523 bp, Homo sapiens
tatctttttgttgttgttttgacaaccagtggggagtgatatctcattatggttttgattggcatttctccgattagtgacattgagcattttttcatatgtgtgttggctactcagatattcttttagagaaatgtcaatccaagtactgtacaccttttaaaaatctgggtatttgtttcwggcgattcagttgtagggtttccttatatatgttggatattaacaccttattagataaatagtttgcaagtattttctcctattttataggttgccttttcaatctgttaactgtttcctttgctgtcataaagcttgaaccctttctgggtttaccctacagatatcttgtcattatgaatcttcttaaatgatttcatttttatatgtacaataaaaatcaatgagaattgttaaaaacaaaaacctcagagagataggattttactccacagagaacaaagtggagctcatatcaacctgggattaataaaaggaaaactcttttcactcagataaa

SEQ ID NO: 310515 - DNA, 612 bp, Homo sapiens
aggatatttgctgtccagtgaacatcaacatatttcagcaagcctcatctttgttctcattgatggaaagtttaaattaaatctttctcagccagaacattcagcaagggatataataaatgaattatgtaaagaaatacacagatgttttaaacaaaacttctctatggtctcccacaaacctcacacataaatagaaagttaatcatttggcaataaatgaacactttaggtaatgagagatactcaggatccctgaagaaattaaattcttattttctctttttttttttttttttgagatggagtctcactctgttgcccaggctggagtgcagtggcacgatcttggctcactgcaagctctgcctcctgggttcatgccattctcctgcctcagcctcctgagtagctgggactacaggcaccygccaccacgcctggctaatttttttgtatttttagtagagacagggtttcaccacattagccaggatggtctcaatctcctgacttcgtgatctgcccacctcggcctcccaaagtgctgggattacaggcatgagccaccgtgcccggtcagattcttatattctcttaaaaagacagcat

SEQ ID NO: 310516 - DNA, 468 bp, Homo sapiens
gctaatgacaaggtcaaacacagacctttcccctttggcctaagtctgctgacaaggcaaaacacagatcctccaaccacccattctttgtctcattattaattagctaagattagaactgtttgtccctcygaactaacaaaatccaaagataaacatttcctgttgagttgactaagacccccctgattgcagaataattttgatagtaaattataccaccagttacacagtcacaacctgctgagatcaggccatgttctctctattaaaaatagtcctaatgaaatcatatgctccacagtctggtgcattttgtctttgacagttgccaggctcttttactggagttgtagctcatgatgtagaggaagctactctggggactttggtcattttgcactttgtaggaattgtgctcagtaagtgattgattcacttatcatgagagataataggcaaataaaa

SEQ ID NO: 310517 - DNA, 569 bp, Homo sapiens
ttctctgcttcttagggatatagcaattttttaaagaaaaaagataagtctcttgcaggttttacaatgtaggaatgtgtttctcaagggtctggaactatctctgagatagaatcaccaaggaggattgtacctcatcccctcatctttataaaccaaaaataaaactcatagccaccccctacacccctcacaaacatctgaatggacccctcctctgccagggcaccctaaatttaacctgaaagactggtttaggccatgatggtgagacagccaggtgggagagggtccccagtgaaactgcaaccagcccacactggaaggaatgcaccttggggtggagmcacagaagtttgcactgtttgcagagggaggagcctggccccacctcttcctgtgtggaaactgggattcaatctgcaaggcaggaagcacaccagcagagactctgactttgcagagggtccctgttcccccttttttttccttttcacccaataaaaccctgctttactcacccttcaactcgtctgcaagcctaaattttcgtggccatgggacaaaga

SEQ ID NO: 310518 - DNA, 569 bp, Homo sapiens
ttctctgcttcttagggatatagcaattttttaaagaaaaaagataagtctcttgcaggttttacaatgtaggaatgtgtttctcaagggtctggaactatctctgagatagaatcaccaaggaggattgtacctcatcccctcatctttataaaccaaaaataaaactcatagccaccccctacacccctcacaaacatctgaatggacccctcctctgccagggcaccctaaatttaacctgaaagactggtttaggccatgatggtgagacagccaggtgggagagggtccccagtgaaactgcaaccagcccacactggaaggaatgcaccttggggtggagccacagaagtttgcactgtttgcagagggaggagcctggycccacctcttcctgtgtggaaactgggattcaatctgcaaggcaggaagcacaccagcagagactctgactttgcagagggtccctgttcccccttttttttccttttcacccaataaaaccctgctttactcacccttcaactcgtctgcaagcctaaattttcgtggccatgggacaaaga

SEQ ID NO: 310519 - DNA, 533 bp, Homo sapiens
aaactgcaaccagcccacactggaaggaatgcaccttggggtggagccacagaagtttgcactgtttgcagagggaggagcctggccccacctcttcctgtgtggaaactgggattcaatctgcaaggcaggaagcacaccagcagagactctgactttgcagagggtccctgttcccccttttttttccttttcacccaataaaaccctgctttactcacccttcaactcgtctgcaagcytaaattttcgtggccatgggacaaagactgcatctttagctgaactaaggaaaagtcccacaacaatggggagggagggtcagatatgcctcattatgccctctttcctcttggaattcaggaaaagccaatcaccatttaacatcaacacaagccttaggtctgagaagaaacctgtacaatctattttctctgaagcctgcgacatggaggcttcatcttcatgataaaactttggtctctgcaacctcttatcataacccagacattgttttctatgataaaactctt

SEQ ID NO: 310520 - DNA, 566 bp, Homo sapiens
ctcgtctgcaagcctaaattttcgtggccatgggacaaagactgcatctttagctgaactaaggaaaagtcccacaacaatggggagggagggtcagatatgcctcattatgccctctttcctcttggaattcaggaaaarccaatcaccatttaacatcaacacaagccttaggtctgagaagaaacctgtacaatctattttctctgaagcctgcgacatggaggcttcatcttcatgataaaactttggtctctgcaacctcttatcataacccagacattgttttctatgataaaactctttcaagcaattgccaatccgaaatttttcattctacctataacctggacacccccttgctttgagttgtcccacttttctggactgaaccaacttatatcttaaatgtatttgattgatgtctcatgtctccctaaaatgtataaaactaggctgtgctgcaaccaccttggacacatgttctcgggatctcctgagggctgtgtcatgggccatggtcactcatatttggctcagaataaatttctacaaatgtgttacaa

SEQ ID NO: 310521 - DNA, 566 bp, Homo sapiens
ctcgtctgcaagcctaaattttcgtggccatgggacaaagactgcatctttagctgaactaaggaaaagtcccacaacaatggggagggagggtcagatatgcctcattatgccctctttcctcttggaattcaggaaaagccaatcaccatttaayatcaacacaagccttaggtctgagaagaaacctgtacaatctattttctctgaagcctgcgacatggaggcttcatcttcatgataaaactttggtctctgcaacctcttatcataacccagacattgttttctatgataaaactctttcaagcaattgccaatccgaaatttttcattctacctataacctggacacccccttgctttgagttgtcccacttttctggactgaaccaacttatatcttaaatgtatttgattgatgtctcatgtctccctaaaatgtataaaactaggctgtgctgcaaccaccttggacacatgttctcgggatctcctgagggctgtgtcatgggccatggtcactcatatttggctcagaataaatttctacaaatgtgttacaa

SEQ ID NO: 310522 - DNA, 566 bp, Homo sapiens
ctcgtctgcaagcctaaattttcgtggccatgggacaaagactgcatctttagctgaactaaggaaaagtcccacaacaatggggagggagggtcagatatgcctcattatgccctctttcctcttggaattcaggaaaagccaatcaccatttaacatcaacacaagccttaggtctgagaagaaacctgtacaatctattttctctgaagcctgcgamatggaggcttcatcttcatgataaaactttggtctctgcaacctcttatcataacccagacattgttttctatgataaaactctttcaagcaattgccaatccgaaatttttcattctacctataacctggacacccccttgctttgagttgtcccacttttctggactgaaccaacttatatcttaaatgtatttgattgatgtctcatgtctccctaaaatgtataaaactaggctgtgctgcaaccaccttggacacatgttctcgggatctcctgagggctgtgtcatgggccatggtcactcatatttggctcagaataaatttctacaaatgtgttacaa

SEQ ID NO: 310523 - DNA, 566 bp, Homo sapiens
gactcacactggtctcccaggggactgtgcaactagcacataatttcatacagaacagcttggatcacrtttgcagagttcattttatttttaggaagctaataatcatgcaaagatttttcacaaataggtcaaatctctagcaatattcttattgtatcacttggaaaaattatacttcttaataatattattttattcctgaaaatgcagtaatgctctcaaatagtagtatgacacatgtttgtcagacatgacttagtcctaatgttccacaaacatagcttaagcagatgggcaatttaaaaggatttattttttaaacagttctatgaaacacgcattctctaagatgggcagtagggatccattttatattcattacagggctaaaaaaggaatgttttgaaatcttacaaaacaaattaatctatgcttgagatatatacatagcctaataaaatatattgaggaagggacacgttaacatttgagtggaagaaggtatacatttaatcagcatttgtataataaaaatgaattatgaatggcctcactaattatat

SEQ ID NO: 310524 - DNA, 566 bp, Homo sapiens
gactcacactggtctcccaggggactgtgcaactagcacataatttcatacagaacagcttggatcacatttgcagagttcattttatttttagsaagctaataatcatgcaaagatttttcacaaataggtcaaatctctagcaatattcttattgtatcacttggaaaaattatacttcttaataatattattttattcctgaaaatgcagtaatgctctcaaatagtagtatgacacatgtttgtcagacatgacttagtcctaatgttccacaaacatagcttaagcagatgggcaatttaaaaggatttattttttaaacagttctatgaaacacgcattctctaagatgggcagtagggatccattttatattcattacagggctaaaaaaggaatgttttgaaatcttacaaaacaaattaatctatgcttgagatatatacatagcctaataaaatatattgaggaagggacacgttaacatttgagtggaagaaggtatacatttaatcagcatttgtataataaaaatgaattatgaatggcctcactaattatat

SEQ ID NO: 310525 - DNA, 566 bp, Homo sapiens
gactcacactggtctcccaggggactgtgcaactagcacataatttcatacagaacagcttggatcacatttgcagagttcattttatttttaggaagctaataatcatgcaaagatttttcacaaataggtcaaatctctagcaatattcttattgtatcacttggaaaaattatacttcttaataatattattttattcctkaaaatgcagtaatgctctcaaatagtagtatgacacatgtttgtcagacatgacttagtcctaatgttccacaaacatagcttaagcagatgggcaatttaaaaggatttattttttaaacagttctatgaaacacgcattctctaagatgggcagtagggatccattttatattcattacagggctaaaaaaggaatgttttgaaatcttacaaaacaaattaatctatgcttgagatatatacatagcctaataaaatatattgaggaagggacacgttaacatttgagtggaagaaggtatacatttaatcagcatttgtataataaaaatgaattatgaatggcctcactaattatat

SEQ ID NO: 310526 - DNA, 566 bp, Homo sapiens
gactcacactggtctcccaggggactgtgcaactagcacataatttcatacagaacagcttggatcacatttgcagagttcattttatttttaggaagctaataatcatgcaaagatttttcacaaataggtcaaatctctagcaatattcttattgtatcacttggaaaaattatacttcttaataatattattttattcctgaaaatgcagtaatgcyctcaaatagtagtatgacacatgtttgtcagacatgacttagtcctaatgttccacaaacatagcttaagcagatgggcaatttaaaaggatttattttttaaacagttctatgaaacacgcattctctaagatgggcagtagggatccattttatattcattacagggctaaaaaaggaatgttttgaaatcttacaaaacaaattaatctatgcttgagatatatacatagcctaataaaatatattgaggaagggacacgttaacatttgagtggaagaaggtatacatttaatcagcatttgtataataaaaatgaattatgaatggcctcactaattatat

SEQ ID NO: 310527 - DNA, 588 bp, Homo sapiens
ggcttggttgtttttttaaatatcagtacttatctaaacaagtatttgaaaatttttcttttttctttacrtatattagaaatctggccaggcacggtggctcatgcctgtaatcccagcactttgggaggccaaggtgggtggatcacctgaggtcagcagtttgagaccagcctggccaacatggcaaaaccccgtctctactaaaaatacaaaaaaattagccgggcgtgatggcaggcacctgtgatcccagcaacttgggaggctggggcaggagaatcacttgaactgaggaggcagaggttgcagtgagctgagattgtgccactgcactcccgcctgggcaacagagtgagaccccatctcaaaaataaaaaaaaagaaagaaatctgttaacagccttgctatgaagacatttttgtctgtttcttttactttgtgtacttatttaatattaaaacctgtattattgctcagcaaagaggagaattgtttccttggaggaaaaaaaacatccttaagaacttactagtttaaagctgagcatcttagatttgaaggttgccttacctttttaaaatttt

SEQ ID NO: 310528 - DNA, 588 bp, Homo sapiens
ggcttggttgtttttttaaatatcagtacttatctaaacaagtatttgaaaatttttcttttttctttacatatattagaaatctggccaggcacggtggctcatgcctgtaatcccagcactttgggaggccaaggtgggtggatcacctgaggtcagcagtttgagaccagcctggccaacatggcaaaaccccgtctctactaaaaatacaaaaaaattagccgggcgtgatggcaggcacctgtgatcccagcaacttgggaggctgrggcaggagaatcacttgaactgaggaggcagaggttgcagtgagctgagattgtgccactgcactcccgcctgggcaacagagtgagaccccatctcaaaaataaaaaaaaagaaagaaatctgttaacagccttgctatgaagacatttttgtctgtttcttttactttgtgtacttatttaatattaaaacctgtattattgctcagcaaagaggagaattgtttccttggaggaaaaaaaacatccttaagaacttactagtttaaagctgagcatcttagatttgaaggttgccttacctttttaaaatttt

SEQ ID NO: 310529 - DNA, 563 bp, Homo sapiens
gacaaataaggaatctggcatctggcatctcattgtctcgacacagtggtctgatgaatttcacttctttgatactttttgagagagctgagagtccatttcctgaggaagaaactcagagaaaacaaatgtaagtttcaagcttcaagaccagaaggatttgtttctatgtttatatttttaaaatctgtctgtggatctattgggtgcatttcaaaaacacatacagaggaaatcccaggcrctgtgctagaattgggaatacaatggtgagttcaaagaggaataattttcctattctcatgaagctaatagtgtaggatagagaaagtaaacactaatcaaagaaccacacaagcataagattgcaactacaactaaaaaccataaccattcagttaagctaaggaggccaccattgtcacccttctcttaacctttaataatgtattttacaggtaaaatccttaagtaagtcatatttggttgggaagatcaaagaaatcacccagtctcccacatccgaaattgtgcagtctggactgtcaggaacaaaagtgaaa

SEQ ID NO: 310530 - DNA, 563 bp, Homo sapiens
gacaaataaggaatctggcatctggcatctcattgtctcgacacagtggtctgatgaatttcacttctttgatactttttgagagagctgagagtccatttcctgaggaagaaactcagagaaaacaaatgtaagtttcaagcttcaagaccagaaggatttgtttctatgtttatatttttaaaatctgtctgtggatctattgggtgcatttcaaaaacacatacagaggaaatcccaggcactgtgctagaattgggaatacaatggtgagttcaaagaggaataattttcctattctcatgaagctaatagtgtaggatagagaaagtaaacactaatcaaagaaccacacaagcataagattgcaactacaactaaaaaccataaccattcagttaagctaaggaggccaccattgtcacccttctcttaacctttaataatgkattttacaggtaaaatccttaagtaagtcatatttggttgggaagatcaaagaaatcacccagtctcccacatccgaaattgtgcagtctggactgtcaggaacaaaagtgaaa

SEQ ID NO: 310531 - DNA, 423 bp, Homo sapiens
ttgcaatgagccaagattgtgccattgcactccagcctgggagacaaagcgagactttattttaaaaaaaaaaaaaaaaaaaaaaaaaaaaagaatgactaaaattaagaagattgatgattccaaatattggtaaagatgtagaacaactagaactcccacatattgctgatgaaaatgaaraataatacattactttggaaaatactttggtactgatttaccatatgaccccaaaatctcacttgtagaaatttatacaggaaaaatgaaaacatatgctcacagaaagcttgtatacacatgcttatggcaataaatttatttatagttgcctatcaacaagtgatgaacaaatatattttagtatcttgatactactttctagctagaaaaggaatactgttaagcaaaaatagagga

SEQ ID NO: 310532 - DNA, 406 bp, Homo sapiens
gtaaagatgtagaacaactagaactcccacatattgctgatgaaaatgaaaaataatacattactttggaaaatactttggtactgatttaccatatgaccccaaaatctcacttgtagaaatttatacaggaaaaatgaaaacatatgctcacagaaagcttgtatacacatgcttatggcaataaatttatttatagttgcctatcaacaagtgatgaacaaatatattttagtatcttgatactactttctagctagaaaaggaatactrttaagcaaaaatagaggatgaagtagtaatatacataacatagatgaatttaaaaacaccatgctgattgaaagaaaacaattatcaaatacacagtgtaatattctattcacagaaagtttgaaaacaaaaa

SEQ ID NO: 310533 - DNA, 547 bp, Homo sapiens
atttatccaaactttaatactagagaaagatgggcaggtataagcatgagcaatgggaaaatgagaaagagcaggagaaggaaatgttactgaagcaaagtcagagattgcctgcttaaaaaagttttaaaagctaatttacggagatggcttctttccttaaacctcacgaaccaacctctactaccttccaacttttcttcttcagcttcctcacctctctcagccttcatagaactgaagagagttagggccttcctctggattaggctttggtttaagggaatgttgtggctggtttgattttctgtccagagcactcaaactttctccatatcagcaataagkctgtttcactttctcatcacttgtgtgtttactggagtagcacttttaatttcctccaggaacattctctttgcatgcacagcttggccaactgtttggtgaaagaggcctagcttcgcgtctatcttggtttccaggatgccttcctcactcagctcaatcatttctagcttttgacttaaagtgagaaatacgtgat

SEQ ID NO: 310534 - DNA, 547 bp, Homo sapiens
atttatccaaactttaatactagagaaagatgggcaggtataagcatgagcaatgggaaaatgagaaagagcaggagaaggaaatgttactgaagcaaagtcagagattgcctgcttaaaaaagttttaaaagctaatttacggagatggcttctttccttaaacctcacgaaccaacctctactaccttccaacttttcttcttcagcttcctcacctctctcagccttcatagaactgaagagagttagggccttcctctggattaggctttggtttaagggaatgttgtggctggtttgattttctgtccagagcactcaaactttctccatatcagcaataagtctgtttcactttctcatcacttgtgtgtttactggagtagcacttttaatttcctccaggaacattctctttgcatgcacagcttggccaactgtttggtgaaagaggcctagcttcscgtctatcttggtttccaggatgccttcctcactcagctcaatcatttctagcttttgacttaaagtgagaaatacgtgat

SEQ ID NO: 310535 - DNA, 601 bp, Homo sapiens
agtacattctcctacacaggtcatatattgggggagaaaacaagtcttagcaaatttaagaagattgaaatcttatcaagtattctttttgaccacagtggcatgaaactgaaaattaaaaacaggagaaaacttagaaaagtgacaaatatgtggaaatcaaccaacacactcctgaacaaccaatagatcaaagaaaacatcaaaaaagaaataaaatatcttgagacaaactaaaatgaaagcacaacatactaaaacttatgagatgaagcaaaagcaattctaacagggaagtttatacaggttaagtgctaaatgaagaaaaaagayctcaaataaacaataaacctcaaagaaatagaaaagaaaaaaaatgaagcccaaaattagaagaaggaaggaaataacgaagatgatagcagaagtaaatgaaatacactagaaaaacaatagaaaagatcaatgaaacaaaaagctgattttttgaaaacataatggctgggcgcggtggctcatgcctgtaatcccagcactttgggaggcgggctgatcacgaagtcagagatcaagaccatcctggctaacatggtgaaacccc

SEQ ID NO: 310536 - DNA, 508 bp, Homo sapiens
cacctgcgactgtggtttgaaaaaaaaagaaaacataataatgatgctgtcaattcacttgagattccatgatcaaaattaacctacgaacaaagcacagactttattataattacaaaataggatgtaatttacataaaatgtgaaaatataagcatagaaygaaatttgatacaagtcgaaagctatgacagggactgttggaggggagggaagttgtacactaatctccacatcctactgagccaatcagtggtgttcaaattggatggaccatatattatctaaacagcatattatttaagcaaagaattaagcactgtaagtatattatttagagaaagcaaatttttaaaaaatcccataaaattatatattaaagactaaattggaaatatagttttagaagaagaaagtagggtaaatgagctatgttctctaccgttcataaaaagtcaagggatattacttaaaattgttaaaacaaaattaggtgattgtataatat

SEQ ID NO: 310537 - DNA, 508 bp, Homo sapiens
cacctgcgactgtggtttgaaaaaaaaagaaaacataataatgatgctgtcaattcacttgagattccatgatcaaaattaacctacgaacaaagcacagactttattataattacaaaataggatgtaatttacataaaatgtgaaaatataagcatagaacgaaatttgatacaagtcgaaagctatgacagggactgttggaggggagggaagttgtacactaatctccacatcctactgagccaatcagtggtgttcaaattggatggaccatatattatctaaacagyatattatttaagcaaagaattaagcactgtaagtatattatttagagaaagcaaatttttaaaaaatcccataaaattatatattaaagactaaattggaaatatagttttagaagaagaaagtagggtaaatgagctatgttctctaccgttcataaaaagtcaagggatattacttaaaattgttaaaacaaaattaggtgattgtataatat

SEQ ID NO: 310538 - DNA, 508 bp, Homo sapiens
cacctgcgactgtggtttgaaaaaaaaagaaaacataataatgatgctgtcaattcacttgagattccatgatcaaaattaacctacgaacaaagcacagactttattataattacaaaataggatgtaatttacataaaatgtgaaaatataagcatagaacgaaatttgatacaagtcgaaagctatgacagggactgttggaggggagggaagttgtacactaatctccacatcctactgagccaatcagtggtgttcaaattggatggaccatatattatctaaacagcatattatttaagcaaagaattaagcactgtaagtatattatttagagaaagcaaatttttaaaaaatcccataaaattatatattaaagactaaattggaaatatagttttagaagaagaaagtagggtaaatgagctatrttctctaccgttcataaaaagtcaagggatattacttaaaattgttaaaacaaaattaggtgattgtataatat

SEQ ID NO: 310539 - DNA, 465 bp, Homo sapiens
atctcacggaagtgtgtgaaatgcagtaaaacaatgcttagaccaaaattatagcattgaatgtacatgttgcatcccaaggagggtctaaaattaataatctaacttttcaccttaggaagctagtaaaggaagaacaaattagactcaaaataaggagaagaaaaatataaaaatcaataaaattgaagacagaaaaatcaatagaaaaaaatcaacaaaataaaaatctgattctttgaaaagataaataaaattggtaaatctctatccagagtaagagagaaaaagaatacaaattattaatatcaayatttaaagaagaaccacctctatagatactatggacattaaaacacttaaaaaaataaagaaatattattaacaacttcataagtttgataaccaacataaaatgcagcacttctttgaaatatacaatctactaaaattcacaccaggaga

SEQ ID NO: 310540 - DNA, 628 bp, Homo sapiens
ttcatatacctgtgggtatttctcttctttggaaaaatgtctattcaagtcctttgctcatttaaaaaatcagattgttagttttatctactgagttgtttgagttcctaacgtattttggaaattartctttttcccagtgttttgttatagaagctttacagtctcaccttgcatttaagtttttaatccattttgatttaatttttgtttatggtataagacaaggatccagttctactcttgcatggagatatccagttttcccagcagcatttgttgaagagactgtcctttcctgattgtgcattcttggcacccatgtcaaagatcaattgactgtatatacacagatctatttcttggctccctattctaacccattggtcttaaatgtctatctttatgctgttaacatattattttaattactatagctttgcaatatattttgaaattaggaagtgatgcctctagccttgctctttcttctcaagattgttttggctattcagggtactttccaattatatatgaatcttagaattgttttttctctgtctgtaaaaatgctattaggatttttatggatattgaattgaatttgtagattgctttgagtagtgta

SEQ ID NO: 310541 - DNA, 557 bp, Homo sapiens
agttttttactctgagtgtggtgttagctgtgggattttcatatctggcctcaatatgttgaggtaacttccatctcttcctagtttgttgagagtttctaacatgaaaaagtgtcgaattttatcaaattattatttttaaatctattgagatgattttgtgatttttatcttttattctattaactgtatcacattaattgattttcacatgttgaaccatccctgcaactcagggataaatcccacttggtgtatgatcctattaatttgctgttaaatttggtttgcaattattttgttgaggatccttgcatctatattaatcagggacatmgacctgtagttttctttttgtagtgtctttgtctgtctttaaattcacataatgctggcctcgtgaaatgagtttggaaatattccctcctttttgattttttgggaagagttttaaaatgattggtattaattcttctttaaatatttggtagacttcagcagcagagtcatcaggtcggaggctttgctttgttgggagttttttttattactgattc

SEQ ID NO: 310542 - DNA, 553 bp, Homo sapiens
tattttttctcacagcagtttcttatgatctttggatttctgtgacatcagttgcaatgtctttttcatttctgtttttgtcttccttcttcttagtacactgtttgatktttaaatgttcaaacaatttcacattcttaggataagcccccttggtccttgtgtgttattctgtttacataatgctgtaatttaattgctaaaattgcattttttcaactaatgtcatgagagatattgtctctagtttacttttcttgtaatgtctttgacatttatatcagggtaatgctaatttcatagaatgaggtaggaaataattaccttctcaaaaattttctatgaagagttcatgtaaaattagtattacttcttaaatatttgatataattcactagtgaaaccacttgggcctggcattttctttatgtgaaggttttgtaactacaaattgtatttctctaacagatgtagggctattcagattatgtatttcttcttgagtgagatatggtagtttgtgtatttcaaggagttcatctattttatgaca

SEQ ID NO: 310543 - DNA, 553 bp, Homo sapiens
tattttttctcacagcagtttcttatgatctttggatttctgtgacatcagttgcaatgtctttttcatttctgtttttgtcttccttcttcttagtacactgtttgatttttaaatgttcaaacaatttcacattcttaggataagcccccttggtccttgtgtgttattctgtttacataatgctgtaatttawttgctaaaattgcattttttcaactaatgtcatgagagatattgtctctagtttacttttcttgtaatgtctttgacatttatatcagggtaatgctaatttcatagaatgaggtaggaaataattaccttctcaaaaattttctatgaagagttcatgtaaaattagtattacttcttaaatatttgatataattcactagtgaaaccacttgggcctggcattttctttatgtgaaggttttgtaactacaaattgtatttctctaacagatgtagggctattcagattatgtatttcttcttgagtgagatatggtagtttgtgtatttcaaggagttcatctattttatgaca

SEQ ID NO: 310544 - DNA, 553 bp, Homo sapiens
tattttttctcacagcagtttcttatgatctttggatttctgtgacatcagttgcaatgtctttttcatttctgtttttgtcttccttcttcttagtacactgtttgatttttaaatgttcaaacaatttcacattcttaggataagcccccttggtccttgtgtgttattctgtttacataatgctgtaatttaattgctaaaattgcattttttcaactaatgtcatgagagatattgtctctagtttacttttcttgtaatgtctttgacatttatatcagggtaatgctaatttcatagaatgaggtaggaaataattaccttctcaaaaattttctatgaagagttcatgtaaaattagtattacttcttaaatatttgatataattcactagtgaarccacttgggcctggcattttctttatgtgaaggttttgtaactacaaattgtatttctctaacagatgtagggctattcagattatgtatttcttcttgagtgagatatggtagtttgtgtatttcaaggagttcatctattttatgaca

SEQ ID NO: 310545 - DNA, 553 bp, Homo sapiens
tattttttctcacagcagtttcttatgatctttggatttctgtgacatcagttgcaatgtctttttcatttctgtttttgtcttccttcttcttagtacactgtttgatttttaaatgttcaaacaatttcacattcttaggataagcccccttggtccttgtgtgttattctgtttacataatgctgtaatttaattgctaaaattgcattttttcaactaatgtcatgagagatattgtctctagtttacttttcttgtaatgtctttgacatttatatcagggtaatgctaatttcatagaatgaggtaggaaataattaccttctcaaaaattttctatgaagagttcatgtaaaattagtattacttcttaaatatttgatataattcactagtgaaaccacytgggcctggcattttctttatgtgaaggttttgtaactacaaattgtatttctctaacagatgtagggctattcagattatgtatttcttcttgagtgagatatggtagtttgtgtatttcaaggagttcatctattttatgaca

SEQ ID NO: 310546 - DNA, 621 bp, Homo sapiens
agccattaagataccaacatgacagacagcaagccctaaaagaaataaaaatattttacctcaaaagatatttcttttctctccctcttcttctttttttttttttttttttttttttttgagatggagtctccctctgttgcccaggctggagtgcagtggcatgatcttggctcagtcaccacaacctccgtctcccaggttcaagtgattctcctgcctcagcctcttgaatagctgggattacaggtgcccgccaccattcctggcttatttttttgtattttttgtagagacgtggttttgccatgttggccaggttggtctcaaactyctgacctcaagtgatctgcctgcttcagcctcccaaagtgctaggattataggcatgagccaacgtgcctggctatatttcttaaacatattttgaaatggccctgcaaagctgtctcttgtgggaaaatctaccttctatagaaaatctccttttatttccaggtcttcttcctgatccgggagagaattaactgagtttggtacctttttaagtctgataaaaaacatttacaatctattctttctgaagcctgctacctggaggctttatctgcataataaaaa

SEQ ID NO: 310547 - DNA, 621 bp, Homo sapiens
agccattaagataccaacatgacagacagcaagccctaaaagaaataaaaatattttacctcaaaagatatttcttttctctccctcttcttctttttttttttttttttttttttttttgagatggagtctccctctgttgcccaggctggagtgcagtggcatgatcttggctcagtcaccacaacctccgtctcccaggttcaagtgattctcctgcctcagcctcttgaatagctgggattacaggtgcccgccaccattcctggcttatttttttgtattttttgtagagacgtggttttgccatgttggccaggttggtctcaaactcctgacctcaagtgatctgcctgcttcagcctcccaaagtgctaggattataggcatgagccaacgtgyctggctatatttcttaaacatattttgaaatggccctgcaaagctgtctcttgtgggaaaatctaccttctatagaaaatctccttttatttccaggtcttcttcctgatccgggagagaattaactgagtttggtacctttttaagtctgataaaaaacatttacaatctattctttctgaagcctgctacctggaggctttatctgcataataaaaa

SEQ ID NO: 310548 - DNA, 587 bp, Homo sapiens
gcatttttaaaccattcataattgaagtsattattgatataggtggagtgatatctactatgtttgtcattgttttctgctcattgaatttgctgtttgttatttcctactctttttctgtcttctttttaattgatcattttatatgattccattttatttcctttcttagaatagtaattatacttctctttaaaaggtttttaattgttgctctacagtttacaatatatgattctgtactctcagtccactttcagatgtcattatattactttgtgtacagtataggtacctcatacagaatattctcaacttctctctcatgtcccttgtaatactgctatcattaatcgcacttattcatatttgataatcatgcaatacattgtaatactattatttttaaatgttatgctttacacatattaagaataagaaaaataaaagatttaattttgataccatttattccctctccaatgcattgctaggcattcttcatttctgttactatatttttatttctagagttttctttcttattgtggtaaaatatgcataacataaaatttatctttttgacg

SEQ ID NO: 310549 - DNA, 587 bp, Homo sapiens
gcatttttaaaccattcataattgaagtgattattgatataggtggagtgatatctactatgtttgtcattgttttctgctcattgaatttgctgtttgttatttcctactctttttctgtcttctttttaattgatcattttatatgattccattttatttcctttcttagaatagtaattatacttctctttaaaaggtttttaatkgttgctctacagtttacaatatatgattctgtactctcagtccactttcagatgtcattatattactttgtgtacagtataggtacctcatacagaatattctcaacttctctctcatgtcccttgtaatactgctatcattaatcgcacttattcatatttgataatcatgcaatacattgtaatactattatttttaaatgttatgctttacacatattaagaataagaaaaataaaagatttaattttgataccatttattccctctccaatgcattgctaggcattcttcatttctgttactatatttttatttctagagttttctttcttattgtggtaaaatatgcataacataaaatttatctttttgacg

SEQ ID NO: 310550 - DNA, 587 bp, Homo sapiens
gcatttttaaaccattcataattgaagtgattattgatataggtggagtgatatctactatgtttgtcattgttttctgctcattgaatttgctgtttgttatttcctactctttttctgtcttctttttaattgatcattttatatgattccattttatttcctttcttagaatagtaattatacttctctttaaaaggtttttaattgttgctctacagtttacaatataygattctgtactctcagtccactttcagatgtcattatattactttgtgtacagtataggtacctcatacagaatattctcaacttctctctcatgtcccttgtaatactgctatcattaatcgcacttattcatatttgataatcatgcaatacattgtaatactattatttttaaatgttatgctttacacatattaagaataagaaaaataaaagatttaattttgataccatttattccctctccaatgcattgctaggcattcttcatttctgttactatatttttatttctagagttttctttcttattgtggtaaaatatgcataacataaaatttatctttttgacg

SEQ ID NO: 310551 - DNA, 543 bp, Homo sapiens
agggaacatgatttactaagaagaagaatattaaacatatttactattttcaaatatgatcctgttacatctgagtttatactccatacagcattttatgtacaatatttcctacaatattgtcacaaacattacawacctaacaataagcttttattcactttgtttaacttattatttgctgatgatgctttactcactccctctgggaaggtctgccttctttcccaatcatatgtggacatctttacaaggcaattcgagttctaaaatgtttgtatatcaaattccactgtttcttttcaaaataattttatgtcttaggtgatatgtgaatagatttataaagttattaattcaatagcccataatgaacctttgggacatacaccatgacatatttgttcaacaattttaaattatttcttaatattatagattatcgtgatgaagcatattaatcctacagtcttttcatctccctgtagtcttcaattcagcattaatggagagattttcaagcaccacaggacttgatgcagc

SEQ ID NO: 310552 - DNA, 543 bp, Homo sapiens
agggaacatgatttactaagaagaagaatattaaacatatttactattttcaaatatgatcctgttacatctgagtttatactccatacagcattttatgtacaatatttcctacaatattgtcacaaacattacatacctaacaataagcttttattcactttgtttaacttattatttgctgatgatgctttactcactccctctgggaaggtctgccttctttcccaatcrtatgtggacatctttacaaggcaattcgagttctaaaatgtttgtatatcaaattccactgtttcttttcaaaataattttatgtcttaggtgatatgtgaatagatttataaagttattaattcaatagcccataatgaacctttgggacatacaccatgacatatttgttcaacaattttaaattatttcttaatattatagattatcgtgatgaagcatattaatcctacagtcttttcatctccctgtagtcttcaattcagcattaatggagagattttcaagcaccacaggacttgatgcagc

SEQ ID NO: 310553 - DNA, 543 bp, Homo sapiens
agggaacatgatttactaagaagaagaatattaaacatatttactattttcaaatatgatcctgttacatctgagtttatactccatacagcattttatgtacaatatttcctacaatattgtcacaaacattacatacctaacaataagcttttattcactttgtttaacttattatttgctgatgatgctttactcactccctctgggaaggtctgccttctttcccaatcatatgtggacatctttacaaggcaattcgagttctwaaatgtttgtatatcaaattccactgtttcttttcaaaataattttatgtcttaggtgatatgtgaatagatttataaagttattaattcaatagcccataatgaacctttgggacatacaccatgacatatttgttcaacaattttaaattatttcttaatattatagattatcgtgatgaagcatattaatcctacagtcttttcatctccctgtagtcttcaattcagcattaatggagagattttcaagcaccacaggacttgatgcagc

SEQ ID NO: 310554 - DNA, 543 bp, Homo sapiens
agggaacatgatttactaagaagaagaatattaaacatatttactattttcaaatatgatcctgttacatctgagtttatactccatacagcattttatgtacaatatttcctacaatattgtcacaaacattacatacctaacaataagcttttattcactttgtttaacttattatttgctgatgatgctttactcactccctctgggaaggtctgccttctttcccaatcatatgtggacatctttacaaggcaattcgagttctaaaatgtttgtatatcaaattccactgtttcttttsaaaataattttatgtcttaggtgatatgtgaatagatttataaagttattaattcaatagcccataatgaacctttgggacatacaccatgacatatttgttcaacaattttaaattatttcttaatattatagattatcgtgatgaagcatattaatcctacagtcttttcatctccctgtagtcttcaattcagcattaatggagagattttcaagcaccacaggacttgatgcagc

SEQ ID NO: 310555 - DNA, 595 bp, Homo sapiens
gaaattaaattaggaatctactatatctagtggtcttgaaatcaaagccccctccccattccttatcttcactgctgtgttcaaaaagactagactccagggacctgtccaaagctgggttaaatataggatgtctgagagacacccttctttcatagttcgagggtaagcatgtagctgtatgtgtgtggaggggcgggtggaggaggttagctgtatcagggtaggcataatactatattttaaatccctccttctgttataaatgtaagctgaaaataatctctgctcccagcggcagcaatcgtaaactcgcttagttctgcctgtaatttaatttaatttaacatgtgacattgagacaatgtttcttttaattcacatataacttcttcctcacccacattccagccaaataaacacatacttatagaaaaatgtgactgttttcctgggcamcccaacaattcaactgtccctaaaacaccaggttcaatttaaactctattagcttgtctgagggctaagatatctaaaaatccaagacaaattatcatttgcatatatggaggcagctctgattgaacagatatct

SEQ ID NO: 310556 - DNA, 566 bp, Homo sapiens
aagttgccttagagtattcagctgtccatgctcacaaacaaaccaacttcagtcaaaagaaataataccagaaaaagtttacagtgcctggcatacatatacagaactggtcatagttccygtgttctcactaaccaaattgaaaaatcctcaagactcaaagagtaacgtgcataggccttcttgcctcagtagtgaggaaataactagtccaaatctgatcactactttggaccgctcaacaaatctttgaagacagaaaaggatcaaacttaatttcaatgtgcccccagaaaatagctctaggatatttttgtaaatgcaaaatatccagcacgcaacaaggtaaaattcttaattcctaccattgaatgaaatactacaaacctctcaaaaacaagtagaaaaaacacgcccaaataagaagaaatagcaattgatagattccaagaacagatgaatatgctagaatttgcagacaaagacactaagggagttattagaactaaattatatatgttcaaagagttaaaggaagatgaaatatgtaataaagacctaaataa

SEQ ID NO: 310557 - DNA, 566 bp, Homo sapiens
aagttgccttagagtattcagctgtccatgctcacaaacaaaccaacttcagtcaaaagaaataataccagaaaaagtttacagtgcctggcatacatatacagaactggtcatagttcctgtgttctcactaaccaaattgaaaaatcctcaagactcaaagagtaacgtgcataggccttcttgcctcagtagtgaggaaataactagtccaaatctgatcactactttggaccgctcaacaaatcttwgaagacagaaaaggatcaaacttaatttcaatgtgcccccagaaaatagctctaggatatttttgtaaatgcaaaatatccagcacgcaacaaggtaaaattcttaattcctaccattgaatgaaatactacaaacctctcaaaaacaagtagaaaaaacacgcccaaataagaagaaatagcaattgatagattccaagaacagatgaatatgctagaatttgcagacaaagacactaagggagttattagaactaaattatatatgttcaaagagttaaaggaagatgaaatatgtaataaagacctaaataa

SEQ ID NO: 310558 - DNA, 512 bp, Homo sapiens
aacttaatttcaatgtgcccccagaaaatagctctaggatatttttgtaaaygcaaaatatccagcacgcaacaaggtaaaattcttaattcctaccattgaatgaaatactacaaacctctcaaaaacaagtagaaaaaacacgcccaaataagaagaaatagcaattgatagattccaagaacagatgaatatgctagaatttgcagacaaagacactaagggagttattagaactaaattatatatgttcaaagagttaaaggaagatgaaatatgtaataaagacctaaataaacttttagggagaaagttataatgtgtgtgttaataaatacactgaatgagattaacagattggacattacagaagaaatggttagtgaatttgaagagctagcaataaaacctatttaaaataaaacacagccagaaaggagaaataaataaatacataacagatcatcagtgaagtatagtagaacttcaaatagcttaatatagaagtaaat

SEQ ID NO: 310559 - DNA, 566 bp, Homo sapiens
aagttgccttagagtattcagctgtccatgctcacaaacaaaccaacttcagtcaaaagaaataataccagaaaaagtttacagtgcctggcatacatatacagaactggtcatagttcctgtgttctcactaaccaaattgaaaaatcctcaagactcaaagagtaacgtgcataggccttcttgcctcagtagtgaggaaataactagtccaaatctgatcactactttggaccgctcaacaaatctttgaagacagaaaaggatcaaacttaatttcaatgtgcccccagaaaatagctctaggatatttttgtaaatgcaaaatatccagcacgcaacaaggtaaaattcttaattcctaccattgaatgaaatactacaaasctctcaaaaacaagtagaaaaaacacgcccaaataagaagaaatagcaattgatagattccaagaacagatgaatatgctagaatttgcagacaaagacactaagggagttattagaactaaattatatatgttcaaagagttaaaggaagatgaaatatgtaataaagacctaaataa

SEQ ID NO: 310560 - DNA, 569 bp, Homo sapiens
gattggacattacagaagaaatggttagtgaatttgaagagctagcaataaaacctatttaaaataaaacacagccagaaaggagaaataaataaatacataacagatcatcagtgaagtatagtagaacttcaaatagcttaatatagaagtaamtggagtctctgaaagagaggaaagggaaataaaataaagaaatgttggccacaaattttcatattttattatatgtttaaaataaaaaatgctaaacaaaattcaagcacacaaaacatggaaacacacacaacactatgtcataatgaaattgtttaaatccagtgattaaaaaaatcttataagtgatcagaaaaggcatgttgtgtagtaaagaagaaaatagatttcccattggaaacaaaaaagtaagaagacaatggaataacatatttgaagtataagtattaaaacaaaacaatgtcaacgtataattctatacccagggtagacatagttacaaaggatgttgttagtattttaaccttcagttaatctgaagcttaacattttttggtttagtatcctggtgt

SEQ ID NO: 310561 - DNA, 585 bp, Homo sapiens
taaataaacttttagggagaaagttataatgtgtgtgttaataaatacactgaatgagattaacagattggacattacagaagaaatggttagtgaatttgaagagctagcaataaaacctatttaaaataaaacacagccagaaaggagaaataaataaatacataacagatcatcagtgaagtatagtagaacttcaaatagcttaatatagaagtaaatggagtctctgaaagagaggaaagggaaataaaataaagaaatgttggccacaaattttcatattttattatatgtttaaaataaaaaatgctaaacaaaattcaagcacacaaaacatggaarcacacacaacactatgtcataatgaaattgtttaaatccagtgattaaaaaaatcttataagtgatcagaaaaggcatgttgtgtagtaaagaagaaaatagatttcccattggaaacaaaaaagtaagaagacaatggaataacatatttgaagtataagtattaaaacaaaacaatgtcaacgtataattctatacccagggtagacatagttacaaaggatgttgttagtattttaa

SEQ ID NO: 310562 - DNA, 591 bp, Homo sapiens
tatacctatatttacagcttttaagattgttttatttttatgattgaaacaaatgtaattcatttcatacaacactagttaaaatatttaaatatttttattgtaatttactttataacttttacgatgcacttcatgaacactacttaatttcagagataaaaaatgcataatagataattatctttatgaaaatctatgatctcataccatatataccaattttttttctgctttaaacctaatactttatttttgaaagtaagttatctaattatcacttatgattttaaaaatgaaattacctactgttaaaacattttcactttttgcatagattgaattggcttttcatgaaatgatgatgttagtcaattcaatcagaaataaatttgaacattaattatggtgtatcatatagattgttaggatacattattaattgcttacttataaatagtagaatcgagagtcctgagtygaaagttagtaatttctctttaccagataagtttcactcatactaactgacatgaaactcatatttcactctctgttcgggaactaaaaatgagaatacagattaatact

SEQ ID NO: 310563 - DNA, 584 bp, Homo sapiens
tgatgctcttcatgcctgaccagaatatttgctgatttgtgttgcttgcaatgtgaagcaacttaaatctatattcctaaagaggttggaatctcctgctaccacgctattgctaggtctgattggcgcaattgtcgaatcacaattatggatatagaaacaatacatggcttcaaagtgactctctcaacttccaggtatactttactgccttcaacagattgtaacaactatttcttcatgattaatcargattaataagacctttcttggcctgctggtctgctgaaatgaagaacacaaatgatcaggtggcagccttagcttttgttttagtgggatgtttattccgtccattaatagacttgctcctccatgaaaacctgaacctctagtccagtaggcacataactatagaaattatccaaatgggtacttctttgattacctggttctgagacacctgcattctacctaacaaacataactcagtaccatatgatagccataggctcaaagagtcttgaaattgttcagggtttaatcaccaagccaatgtcttagttgtactttaggagtccatg

SEQ ID NO: 310564 - DNA, 584 bp, Homo sapiens
tgatgctcttcatgcctgaccagaatatttgctgatttgtgttgcttgcaatgtgaagcaacttaaatctatattcctaaagaggttggaatctcctgctaccacgctattgctaggtctgattggcgcaattgtcgaatcacaattatggatatagaaacaatacatggcttcaaagtgactctctcaacttccaggtatactttactgccttcaacagattgtaacaactatttcttcatgattaatcaagaytaataagacctttcttggcctgctggtctgctgaaatgaagaacacaaatgatcaggtggcagccttagcttttgttttagtgggatgtttattccgtccattaatagacttgctcctccatgaaaacctgaacctctagtccagtaggcacataactatagaaattatccaaatgggtacttctttgattacctggttctgagacacctgcattctacctaacaaacataactcagtaccatatgatagccataggctcaaagagtcttgaaattgttcagggtttaatcaccaagccaatgtcttagttgtactttaggagtccatg

SEQ ID NO: 310565 - DNA, 584 bp, Homo sapiens
tgatgctcttcatgcctgaccagaatatttgctgatttgtgttgcttgcaatgtgaagcaacttaaatctatattcctaaagaggttggaatctcctgctaccacgctattgctaggtctgattggcgcaattgtcgaatcacaattatggatatagaaacaatacatggcttcaaagtgactctctcaacttccaggtatactttactgccttcaacagattgtaacaactatttcttcatgattaatcaagattaataagacctttcttggcctgctggtctgctgaaatgaagaacacaaatgatcaggtggcagccttagcttttgttttagtgggatgtttattccgtccattaatagacttgctcctccatgaaaacctgaacctctagtccagtaggcacataactayagaaattatccaaatgggtacttctttgattacctggttctgagacacctgcattctacctaacaaacataactcagtaccatatgatagccataggctcaaagagtcttgaaattgttcagggtttaatcaccaagccaatgtcttagttgtactttaggagtccatg

SEQ ID NO: 310566 - DNA, 598 bp, Homo sapiens
tatcattcctactgaaactcttccaaaaaatggaagacgaactcctccccaactcattctataagaccagcattatcctgacaccaagacctggcagagtcacaaaaacaaaaaaaaaaactttagaccaatatctatcatgaacatcaatgcagtaatcttcaacaaaaaactagcaaattgaaaccagcagcacatcaaaaagcaaatccaccactatcaagtcagcttctatccctgaaatgcaaggttggttcaacatatgaaaatcaataaacgtggttcatcacataaacagaactaaaaacaaaatccacacaattatctcaatagacgcagaaaaggttttcaataaaattcagcagggttgcatgttaaaaactcttagcaaacaagaaaatgaaagaacatacttcaaaataataagagtaataataacaataataatctatgaccaacctacagccaacatcatactgattgaagcaaaatctrgaagcattccccttgaaaactggaacaagacaaggatggcttctctcaccactgctagctagagcactcaggcaagagaaagaaataaaaaacatcaaaataa

SEQ ID NO: 310567 - DNA, 537 bp, Homo sapiens
gcaatttagaacaagttagttgccacagcaattcttgccactagggactagactccaaaatgaccccatatgccatcaaataaattgcataaagatatgagcccaaaataagttgctcttraccttaaatgtgtgaacaattttgcatatccataattgtcaatatggcaccattcaggatacactagaatatctgggcagagagccaatcagccttatgttcagtgatatgtgagccagttggacatctgacaggtgcattgtggtggttaactgctgccatccacactctttaaccctccagtgactctgttgttctgagatgattcccaagggaataggccatgacacagatgagtaaagcataacatgcataccttatagtgatgagggcaccagtaaggcccaaagataatagctaaaaaagtactaataatccaactctgtaggctctcattcatgctcacttatggaagaaggctattccctaattatccctttaaatagaggtaactagaagttcatccaaaggtttcc

SEQ ID NO: 310568 - DNA, 537 bp, Homo sapiens
gcaatttagaacaagttagttgccacagcaattcttgccactagggactagactccaaaatgaccccatatgccatcaaataaattgcataaagatatgagcccaaaataagttgctcttgaccttaaatgtgtgaacaattttgcatatccataattgtcaatatggcaccattcaggatacactagaatatctgggcagagagccaatcagccttatgttcagtgatatgtgagccagytggacatctgacaggtgcattgtggtggttaactgctgccatccacactctttaaccctccagtgactctgttgttctgagatgattcccaagggaataggccatgacacagatgagtaaagcataacatgcataccttatagtgatgagggcaccagtaaggcccaaagataatagctaaaaaagtactaataatccaactctgtaggctctcattcatgctcacttatggaagaaggctattccctaattatccctttaaatagaggtaactagaagttcatccaaaggtttcc

SEQ ID NO: 310569 - DNA, 537 bp, Homo sapiens
gcaatttagaacaagttagttgccacagcaattcttgccactagggactagactccaaaatgaccccatatgccatcaaataaattgcataaagatatgagcccaaaataagttgctcttgaccttaaatgtgtgaacaattttgcatatccataattgtcaatatggcaccattcaggatacactagaatatctgggcagagagccaatcagccttatgttcagtgatatgtgagccagttggacatctgacaggtgcattgtggtggttaactgctgccatccacactctttaaccctccagtgactctgttgttctgagatgattcccaagggaataggccatgacacagatgagtaaagcataacatgcataccttatagtgatgagggcaccagtaaggcccaaagataatagctaaaaaastactaataatccaactctgtaggctctcattcatgctcacttatggaagaaggctattccctaattatccctttaaatagaggtaactagaagttcatccaaaggtttcc

SEQ ID NO: 310570 - DNA, 537 bp, Homo sapiens
gcaatttagaacaagttagttgccacagcaattcttgccactagggactagactccaaaatgaccccatatgccatcaaataaattgcataaagatatgagcccaaaataagttgctcttgaccttaaatgtgtgaacaattttgcatatccataattgtcaatatggcaccattcaggatacactagaatatctgggcagagagccaatcagccttatgttcagtgatatgtgagccagttggacatctgacaggtgcattgtggtggttaactgctgccatccacactctttaaccctccagtgactctgttgttctgagatgattcccaagggaataggccatgacacagatgagtaaagcataacatgcataccttatagtgatgagggcaccagtaaggcccaaagataatagctaaaaaagtactaataatccaactctgtaggctctcattcatgctcacttatggaagaaggcyattccctaattatccctttaaatagaggtaactagaagttcatccaaaggtttcc

SEQ ID NO: 310571 - DNA, 607 bp, Homo sapiens
gtagaagaaattgggagagttttattattttgtgctaaatattgcttttacaaaaatatataaaaaagaataaaccaagaaatgagttttaattcaataggattaactacctgaaacattcaatttggttattgatattaattttcttcctgataatttgttggcataaattgaaaaatacctaaagaatgacaaaccggaaatataactgaaagaaatcagcttaggaactattamaaatgcataaacactattctaagtatctgatgcttaaaatagtaattaataaattgcccaggcaaaactttgcaacaatcttcaaagtctgtcaaaactcttcaacaacaatatgtatcataacaaatttgaaaaaagagtatgtagagatgagtttttagtaggtatataaatacaagtatggaaactatgctatttagatgttgtgatttattatttttgtttttaattaatttgcagagctttcttttcattcacttgagtgtattctctgataagaagtgactgctatacagtccactatgattttcctcactaccaattttaaacagtatagttgctttattaatattaataaatattaatttat

SEQ ID NO: 310572 - DNA, 609 bp, Homo sapiens
atgatataaaaggcaagacttgtatttccaaaagagaattgaaagaaggtgaaatatctgaaataaaaataaaaatgtgcttattgcatttgtcaacattaaagatggtattttgataccaataaataagttgtagagaaggttgtaaaagtcagacactagttacaggaagattaattgggtattgagtcatttcacacaagtgtaaatatctcttggttttgaagggaaaaggagaaatgtcacagtatttagatatgaggttgaggatttgtttttgtatctttttaacaggagtgggtagtggacattttcatgctaagtgtggtcctgcattagaaaatgcaatattgctgaagaayagaagtgaaattattggagtaataaaattatcaagatggtagaacagtagaatctatagcatacataaagtcattgaacataatatgatttctccattgaaacaaaataagataaaataagataaaagaaaaataaaagaagtagatggttacaagcttagggaatttgattgattgtctgattggccaattacaggtaggcagaagagaagttcattttgatgattttctagtttttcaaggaagg

SEQ ID NO: 310573 - DNA, 648 bp, Homo sapiens
tgcacattactaagtgaaagaaggaaatttgtaaaagttacatactgtatgatttcaactatatgaccttctgaaaaaggcaaaactatggatacaataaaaggatcaggggttggttgacagaggttagtgggaaatgtgacataaacagacacagaacagaagatttttacagcagtgaaactactctgtatgacactacagtgttgaatacatgcctttatacttttgtccaaactcataatatgtacaccccaagagtgaaccttaatgtaaaatatggcctttggatgatggtgtgtctctgtaggtgtaytgatcgtaaaaaaaaaaaaaaagtaccactctgatggggggatactgatagtaggaaaagttgtacaggtgtttgggcagtgggtatatgggtattctgctcaattttgctgtgaatttcaaactgcactaaaaatgtagttgatttactcagattgtttcagaaatacaaaggtatttctcagcctatgctttaccacattaattgagaaaagcagaaaaattatatgattttttatagctgtagaataaactttcgataaaattcaacaactcctcatgattctaaaatatttattttgttaactacaaatacgagaaaaactttgaaac

SEQ ID NO: 310574 - DNA, 605 bp, Homo sapiens
aaatattaaaaaatggacagactactagctagatcaactaagaaaaagaatgaagattgaaataagaacaataagaaattagaaggtgacattacaactgatattacagagataaaaaagatcattagagactactataagtatctttacacttaaactagaaaacctagataaattggataaattcctgaaaaagtacaacctccaaagattgagccaagaggaaacagaaattctgaacagaccagtaatgagtagtaaaattaaattttaaaaaatcacctccttcaaaaaagtagcctaagcccaggcagagtcaccgytgaattttaccacacatacaaaaaagaactaatagcaatcctactgaaacttttccaaaaagttgagggggaaagaatcctcccagactgactcgatgaagccagtattaacctgatacgaaaatcagttgaggacacaacaaaaaagaaaacttctggccaatattcttgaagaaaataaatgtcataatcttcaatgaaactagcatactgaatctaaaagcacatcaaaaatataatacaccacaatcaagtgtgttttattccaagggtgcaaggatg

SEQ ID NO: 310575 - DNA, 571 bp, Homo sapiens
aaaacacacacacacacacacacacacacacacgatctcattaaaatatgggcaaaggacgtgaacagacacttctcaaaaaaagacagayatgtgggtgacaaaggtgaaaaaaatcgtcaacatcactaatcatcagagagatgcaaaccaaaagcagtgagatactatctcagtcagaatggctattattaagaagtcaaaaaataacagatgtaggatgcagagaagaggggacccttatacactgttggtgggaatgtaaattagtacaacttctatggaaaacagtatgaagatttctcaaagaactaaaagtagaactaccatttgatccaacaatcccactgctgtttatctgcccaaaggaaaggaaatcattgtataaaaaaagatacctgaactcatatgtgtatcatagcactatttacaatagcaagtcatggaatcaatttaagtgtccatcaatggatgagtggattaaaatgttgtgtatatatgccatggaatattaagcaaccatgaaaaaggatggaataatgccctttgcagcaacatgggtggaagtgga

SEQ ID NO: 310576 - DNA, 563 bp, Homo sapiens
ttgaagaaaacatgaaactatgcagataaaatatgtgcaaaataaaatgatttattgaataaaccatggtctgggtgtcagtcgtcctttacacgtgctttgatttcacccagtatggcttgttccctcagatgcagggagtgckgttggcaaaaaggctttagctacagccccttcagaattgcctcagatgtggatggctgctttgtccagtcatgatcttaggtagtagctcacatccagtaactggtccaagtggtgatataaaatctaactcgagatcaacaactctgagataccattccagctctacaaattcctgtaatgttgactgaagttttgaggcctgaatctaacttgacttttttgctcaatcctccctctcctccctcccctccgaggaccctcagtaagtattctgaacattaaattatttcagaatctgctccccactggggaaaaaaaaaaacttgcaacaaatcctattacttaattcaaacattgctccatatatttggaggttatatattatttgacctctataagtttatgaataacatgta

SEQ ID NO: 310577 - DNA, 418 bp, Homo sapiens
ggtttgcaaagatcccacaaaacacatccttctatctaactcttcaactcaaactttaactcttcatttgtctccattgaataagataagaccatagttttcaaaggtgcatcatgatcacctagaaggcctggttaaaaagcacattgctgacccctcttttccggtttctcaatcatgtttcttggtgatgctcatgcyaccagtccagggaccatattttgagaacactggattgaagaaacataactcactttttatgccatgtatatttaaactttgccaatacaatttcagaaaaatctgttcagacctcaaaaaaggaaactaatatacaaatgctttaattctgtttaattgaaaatgtaattcacattgttagggtacttacactaataactcctatacacacacatat

SEQ ID NO: 310578 - DNA, 554 bp, Homo sapiens
cgttttctctattccaacagtaagtagaaatctaaagaataactattaataatggtgatgttagatacatcattgactactatataccccaaagtccttatctccataatttttcagaagatatatatataaatttctatatttatatataaatctatatatataattttaaaaattatttttattgtggaaaaatacacataaaatttaccatcttaacctttttaagtgtactgttcagtgacattaaatacattcgtattgttatgcagccatcactaccatccaactgcagaatgctttttcattttgcataactggaactctgtatctattaaataataatttcccattcttctctttctccagtccctggcaagcaccattctaccttatgtctctatggtttgtctactgtacatccctcatataagtacaattacacagtatatttttgtgactggcttacttcacttaktataatgttctcaaggttcatccatgctgtaggatatgtaaaattgccttttttaaggttgaataatttttttttg

SEQ ID NO: 310579 - DNA, 596 bp, Homo sapiens
ctcctgcctcagcctcctgagtagctggaataacaggcgtgcgccaccacacccagctaatttttgtatttttagtagagatgaggtttcacccacgttggttaggctggtytccaactcctgacctcaggtgatccacccacctcaaaatataactttttaaatgttgatgtagttttcttctattcctagtttgctaagtgttttttattatgaaaagatattgaattttgacaaatgtatttcctcaattgcaattattctattttttcctttattctattaatgtgatatattatattaatccatttttatatctgaaaccattcttaaattccagaaataaatcccactttgtggtgtataattattttaatatgctgctaaatttggtttactaatattttttgaagagtttagtattaatgttgagaaatgatattgatttttcttttcttgtactgtctttgtccatctttggtattagggcaatgctggcctcaaagaataatttagaaaatattccctcctttaattttttcagaaagttctagaatgattggtgttaggtttttttttttatgtttgatattgat

SEQ ID NO: 310580 - DNA, 436 bp, Homo sapiens
gtgtagtggcacacgcctgtaatcccagctacttggaaggctgaggcaggagaatcgtttgaacccaggagtcggaggttgcagtgagccaagatcgccactgcactacagcctggcgacagaatgagactccgtctaaaaaaaaaaaaaaaaaaagaatgtgctgcttaacttaaacaaatttgtttrtgcattttccagttttccttctgttactggtttctaacttcgtttagttatatagtcagagcagatactttgtaccgtatctatttttgaaggctattgggacttaatttgtggctcatatcataatatggtctatcctggaatatgtcccatattcacttgagaagaatatgtgtattccgttattgttaggcaaagtgttctgtatatgtctgttggatctagagggtttattgcattattaaag

SEQ ID NO: 310581 - DNA, 634 bp, Homo sapiens
cactgagtatgtcctttggagggaaatatactaacactcatatatttttattattctggtttttccactaattgtaaaagaattactaggtattttattacactctcctctgtagaaagcctacttagtatctttctattcaaagaaatccacaagagtggggcaataatgatacaagataccttgagctgaaaattttacattacctcttactgagtaatatagtatttaaataagtttttttctctgtctatgagaaaattagcttttgcttatgttagtgacagaagaggaaattgtcgcagagaacaagcaattttgtgtgacgctcacaaaagagggaggacatctaacaagcaacataaaggtcatctgaatatttgatttttargggagataaaagtaattgtggtaattagcatttgtaatatttatttgattacataaatcatcataaaagccttcatgttgcctttatagaactaaatgacatctaatacaagtcagattctacattagagaaaaataactagtctaaatggtgaaagtgatttggaggttagcaaaaaaaaaaaaatacaattttacctttggtattttgtagacttatagaactgatagaaacattaaatat

SEQ ID NO: 310582 - DNA, 593 bp, Homo sapiens
aaaggtaaacatcctataaatatttgcaaaataaactcagaaatatattaaatatagtatatcatgcccaagtaaggttaatcccaggaatgcaaggatggattagactgattagagaatctacttatataattttccttatttaaattaaaggggaaaatgtaggtacataaccgtggaaaaacctttgatctaaagtcaatmgccatgtatcataaaatatttaagcaggctgggcagtgttttatgccggtaatcccagcactttgggcagcatagcgagactcccatctctataaaaataataataataataaaaaatagccaggcatagtggtgtgggccagtagtcttagctactcaggagatcaaggtggaaggatctcttaaactcaggagttcgaggctgcagatggccatgattgcgtcattgcactccagcctgggtagcagaacgagcccctatctcaaaaacaaacaaacaaaacaaaaacaaaaagaaactcctagcaaactaaagataacaggacaccacctaaagagaataaagaacaaacctaagccaacatagttttaatggtgaaatgttggaa

SEQ ID NO: 310583 - DNA, 363 bp, Homo sapiens
  misc_feature (1)...(363): n = A,T,C or G
aacttgtgttaaaattcatactaaatagagagatgagcctccaacacagggtctcctgacctcggaattcctgctcttaaccacagggctttccactaccttatcstatatttagtttaagtagtgccatttcncaggttcatattgattgtaagaaaaactgcgggttactacaacccttctttgtttagacaaaccactgcctatgaattcctcctgtattgtttgtaagaatacatcattcaccacccatactttctcttcaaagaaaccaatatattatctaattattttattatttcttggatgatagtcgtaaatcagtaaacctcaagttaaaccctgtttcccacaattacaaca

SEQ ID NO: 310584 - DNA, 594 bp, Homo sapiens
gtcactaaacaaataagcagaagcaagaaaaacaacaacaataaaaattttcaaagtctaagcaagaacaaatcttgagggttgaggactgataccagaatggctacgatatataatattttcaattttaaaaaatgaaacatgcaaagaaaaaggaaagcatgacacatttacagccaacagaaaatgtccctgaggagtcccagattttgatcttagaagacaatgtcttaagttattgtagagaagttcaaagaattaacaagaycatgtgtaaagcactcaagaaatgtaaagacagtaatgcctcacaaaataaaaaaatcagtaatcacacttatactaacattggaataatacagagaagagtagcatcacccctgcaaaaggatgcaacacaaattcatgaagcattccatatttttcaaaaaatgtatttttaaaaataaaaatagaaattatgtatatataagaactaaataaaaatgtttacctctcaccaaaaagatatcaataaagtatatcaaatttatatttgctttaaaaatgcagatataaattgtgaacttaaaaagacaaataacaaaaatatga

SEQ ID NO: 310585 - DNA, 621 bp, Homo sapiens
ttggccttctggtgtatagctccaaaatttcttggaatctctgaagtgattaaagtgtcttttgcatgctaatcagttcaaggtgtgattagaaggttgggactttcagccccaccttcaattttcagggaggggagattgatcatcaatgaacaaccatttaataaatcatgcctacataatgaagcctccataaaaacccaaaaggactgggttccaggagcttctagayagttgactgtgtgaaagttcctagagagaggccactaggagagggcatagaagctccatgcctatcccctgtgccttgtcccatgcatttctcccatcttgctcttcatctatatcctttgtaatatgctttataataaatgtgtaaacctaagtaaagtgctttcctgagttctgtgagctgctctagcaattaatagaactcgaggaggggtttgtgggaacccctgatttatagccagctagtcagaagtatcagtgacaacctactacaatcatgcaccacataagttcatctccatcaataacagagtgcatatgcgatggtggccccatcatggtgctgaaaaatgtcaccctagtggcctagtgacttcctgatattgtcat

SEQ ID NO: 310586 - DNA, 594 bp, Homo sapiens
gtcactaaacaaataagcagaagcaagaaaaacaacaacaataaaaattttcaaagtctaagcaagaacaaatcttgagggttgaggactgataccagaatggctacgatatataatattttcaattttaaaaaatgaaacatgcaaagaaaaaggaaagcatgacacatttacagccaacagaaaatgtccctgaggagtcccagattttgatcttagaagacaatgtcttaagttattgtagagaagttcaaagaattaacaagatcatgtgtaaagcactcaagaaatgtaaagacagtaatgcctcacaaaataaaaaaatcagtaatcacacttatactaacattggaataatacagagaagagtagcatcacccctgcaaaaggatgcaacacaaattcatgaagcattccatatttttcaaaaaatgtatttttaaaaataaaaatagaaattatgtatatataagaactaaataaaaatgtttacctctcaccaaaaagatatcaataaagtatatcaaatttatatttgctttaaaaatgcagatataaattgtgaacttawaaagacaaataacaaaaatatga

SEQ ID NO: 310587 - DNA, 547 bp, Homo sapiens
caagagacagttgtaatgattggaagttttttgacatcacttcagtcatagtctatgtctttatccttgtgatagtagatatcacatatgactgtgtttgaatattctattcaaaataagcaacaatatctcagtgattgtaaagactaaaaactgaattttagttacttcaattctattatttgacgtaactgcctgaamtttttattcatatttaaaatttgataggtgaaaattttagctcatacataaaatatgttactcagtttggatattttcaaaaaataaattatgttcttcattttcagttgtcagttgcttttttaaaactaaaaaatgagtccagaaaataatgattattaatgattatcacatggttattatgaaaattagttttgtcatttagatgatggtggtgggaaagaaatgatacaacccaagttcaaatgcactatgtatgccactgttaacaaacttactaaactagatagacacaacactagataaggctatgagatgttctctcaacctttctacttatcgccac

SEQ ID NO: 310588 - DNA, 547 bp, Homo sapiens
caagagacagttgtaatgattggaagttttttgacatcacttcagtcatagtctatgtctttatccttgtgatagtagatatcacatatgactgtgtttgaatattctattcaaaataagcaacaatatctcagtgattgtaaagactaaaaactgaattttagttacttcaattctattatttgacgtaactgcctgaaatttttattcatatttaaaatttgataggtgaaaattttagctcatacataaaatatgttactcagtttggatattttcaaaaaataaawtatgttcttcattttcagttgtcagttgcttttttaaaactaaaaaatgagtccagaaaataatgattattaatgattatcacatggttattatgaaaattagttttgtcatttagatgatggtggtgggaaagaaatgatacaacccaagttcaaatgcactatgtatgccactgttaacaaacttactaaactagatagacacaacactagataaggctatgagatgttctctcaacctttctacttatcgccac

SEQ ID NO: 310589 - DNA, 547 bp, Homo sapiens
caagagacagttgtaatgattggaagttttttgacatcacttcagtcatagtctatgtctttatccttgtgatagtagatatcacatatgactgtgtttgaatattctattcaaaataagcaacaatatctcagtgattgtaaagactaaaaactgaattttagttacttcaattctattatttgacgtaactgcctgaaatttttattcatatttaaaatttgataggtgaaaattttagctcatacataaaatatgttactcagtttggatattttcaaaaaataaattatgttcttcattttcagttgtcagttgcttttttaaaactaaaaartgagtccagaaaataatgattattaatgattatcacatggttattatgaaaattagttttgtcatttagatgatggtggtgggaaagaaatgatacaacccaagttcaaatgcactatgtatgccactgttaacaaacttactaaactagatagacacaacactagataaggctatgagatgttctctcaacctttctacttatcgccac

SEQ ID NO: 310590 - DNA, 566 bp, Homo sapiens
cactttttaaacaaatagcaacgaagaatgtatcatgggaatatcaagcacacacaaaggtactaggcacaaagagaaagtgtcaattgttttaactaaccaaaaaacttgcatcagaaaactgaaaatctaaaagacatttttgacaagtctgctgaaaatattcaaaggggagaaaaaaagaaaaatcaaggtgttgtatgaaaataatggtcatattttttaattaaaataatgtaaaaatcagagcataatcaagtaaataaaataaagtagaggggttatagagttgataatrccagcctgaagagtaaaatattgccatagatacatgtaagaaacaattttaaatgaaatacagatatataaaaagataaaaatatctatcagatatttcgtaagaattcacggaaaaaataatgacaagagcactgtttgaaaagttgagaactttttagaattgagaaattagataagtcctcatgttgatgaatcaaaacagatgcatacaaacacttcatgtgttatagccaccaagcatcaaagtaagaaagaaatcctaaatt

SEQ ID NO: 310591 - DNA, 566 bp, Homo sapiens
cactttttaaacaaatagcaacgaagaatgtatcatgggaatatcaagcacacacaaaggtactaggcacaaagagaaagtgtcaattgttttaactaaccaaaaaacttgcatcagaaaactgaaaatctaaaagacatttttgacaagtctgctgaaaatattcaaaggggagaaaaaaagaaaaatcaaggtgttgtatgaaaataatggtcatattttttaattaaaataatgtaaaaatcagagcataatcaagtaaataaaataaagtagaggggttatagagttgataataccagcctgaagagtaaaatattgccatagatacatgtaagaaacaattttaaatgaaatacagatatataaaaagataaaaatatctatcagatatttcgtaagaattcayggaaaaaataatgacaagagcactgtttgaaaagttgagaactttttagaattgagaaattagataagtcctcatgttgatgaatcaaaacagatgcatacaaacacttcatgtgttatagccaccaagcatcaaagtaagaaagaaatcctaaatt

SEQ ID NO: 310592 - DNA, 607 bp, Homo sapiens
gttctgtaaaacttattgtaaattgaattttactgtttacctattgtattagtccattctcatgctgctatgaagaaacaaatgaggctgaataatttataaagaaaagagctttaattgacttacacttccacatggctgggaggtgtcaggaaacttacaatattggtggaaggcacctctctgcagggtggcaggagagagaacaagtgcaagcaggggaattgccagacacttataaaaccatgagatctcgtgrgaactcactcattatcaggagaacagcatggggaaattgctcccatgattcaattacctccacctggtcccacccttgactcctggggattatggggattacaattcaaggtaatatttgggtggggacatagccaaaccatatcattctgcccctagccccacccaaatctcatgtcctcgaattttaaaacacaatcatgccttttcaacagtcctcccaaagtcttaattcagtccagcattaatccaaaagtccaagtccgaagtctcatctaagacttctgacgagagtctgtaaaatcaaaagcaagttgattacttcctagatacaatgggggtacaggca

SEQ ID NO: 310593 - DNA, 594 bp, Homo sapiens
atgtgggataatttacatctttagcggcaaccctcaaatggaagaagaagccaatgaaaacagacttccatccttcgggtgaacaattcacagatagttctggcaaattcacctcaggaagcttgtttatgccttctcgcattagcttttcttccctccttgcctttttttactcttcttgttgccttattcctgatttttgcaatcacctttcaaataaaacaactgcacccaggtccttgtcactagctctgtttataagggatcctaaactaagatagttggtcattgtatattaatctgactgatgtttctctgaaggcatacagtcaaaatcgaaggctacaaaccataatttgatttttagtaaaggtaargatttggtaagtactataccgaaatacttaacatacttcatttcacctgcaaaaatgggtatgttttgtttatactctacctatgtctatgcaatgctatagttgaattaaattttgcaaaacaaatctgacattaggaatttcctgcgttagtaaaaatcaactcttatccctttatgatatgagtttatgttcatattactcataagtaggtgat

SEQ ID NO: 310594 - DNA, 447 bp, Homo sapiens
aacacgatcactcatttaatacattaaaagraacatgtttttgtaaagtgaataaattgcttcaaaatagaaataatcttcagtttctcaattctgatttcaatatgacaaatttcttaatctgggaagctatacttattctgaaatgtacataatcaagatttgaacctttctcttgaaataaatggctcctaatttcttgaagaatatgtgaacttaaaaggacaaaatagaattgtcatgagttaatttcactgccattaaaattctgttattataaagcttatgaagtccacctagcacacattttataagctcccattggtaatataaattagaagaaaaatgtgcttaaataatcttgcatatatgaaatatatggaaaatataaaaaacactttaaagtgttattgttgaaaaataatttttaaactgtagttgatgaaa

SEQ ID NO: 310595 - DNA, 647 bp, Homo sapiens
ctgtgagaagcagtaaagcaccatggttaagaacagaagctttagatcaagactatctggtataaatcctcgctcttccattacaacctgtgtgacctcaagcaagttaagtaattacgtcatacctcagtttcatatctgtaaaatggggataataacagtcgctactcattattgatatgtgtaaaatgattggaacagtgcctgagtgtactgagtatataataagtactcagtaagggtcagctgtcattatagttatgatgaagtgaaatattaatataatcgactcactgcatttcctccactgtttttttgtcatcaagatatggtagaagattctccttgcctatttcaatgtgacacagccatctcagcagttgttttttgtttccttatttctttttgttttcagcagttattaatgctagcaaatcaggatttttccagccattcacagctatgacacatcatttcacactgttcttcagtgtgttctaaaagtatttctgtctgtctgagtctttcaggtttaatgagctcagcccaaagagcagtgttcctaaacggggcatggcagcaagagctcatggccattctggyacagaattgaggccacgttttcacagtaataaacagaaaaatgt

SEQ ID NO: 310596 - DNA, 544 bp, Homo sapiens
aaaacaaattgctgttaattaccagattattaccatccttaattttgataattctaggctatcaaaacagtgttttgaatcacaaatcatattatttagtttttccaacaagatggtagcacagggttcctcaatcataattccagcaaatacttgagagtgtgtgtgcacgcgcatttgacaaattcatagctattatagagtaaacaaggattattcatgagtcttgggaagatgagcagtttccttttcactggccaacatacatatttcattccccgaaagcttcacttctgaattattctgcataaatattgctcttcttataagcttccctgtcccctggagagaagtgaaatggaaagccaatgagagggasttaaggcatattggataacataacaaattctcaaaagttaaaaccttacggtgcaatccacatggttgctggtgtttccccagtcattttctcactaaatgttggacaataacattgaaactaccctaggaagtggatcagactgcattcagcctccagccagca

SEQ ID NO: 310597 - DNA, 386 bp, Homo sapiens
ctttgcagcagctgtttcctccgcctggcccattcctcccccagagatctcatggttcactttgctcaaacatcagcttcttgctgagacctctcctgaaatctctctttaaatttgcaacctagacttccaccttccctgaccttcttgccagtcyctataacattttctattttcgatcttggctaatacctcttatttttgggtttttttggttttctttctttctttctttctttctttcttttctttttttttttttttttttttttttgaggcggagtctcgctctgtcacccaggctggagtgcagtagcacaatcttggctcactgcaacctccatctccagggtttaagtgattctcctgcctcaggctcccatgta

SEQ ID NO: 310598 - DNA, 386 bp, Homo sapiens
ctttgcagcagctgtttcctccgcctggcccattcctcccccagagatctcatggttcactttgctcaaacatcagcttcttgctgagacctctcctgaaatctctctttaaatttgcaacctagacttccaccttccctgaccttcttgccagtccctataacattttctattttygatcttggctaatacctcttatttttgggtttttttggttttctttctttctttctttctttctttcttttctttttttttttttttttttttttttgaggcggagtctcgctctgtcacccaggctggagtgcagtagcacaatcttggctcactgcaacctccatctccagggtttaagtgattctcctgcctcaggctcccatgta

SEQ ID NO: 310599 - DNA, 386 bp, Homo sapiens
ctttgcagcagctgtttcctccgcctggcccattcctcccccagagatctcatggttcactttgctcaaacatcagcttcttgctgagacctctcctgaaatctctctttaaatttgcaacctagacttccaccttccctgaccttcttgccagtccctataacattttctattttcgatcttggctaatacctcttatttttgggtttttttggttttctttctttctttctttctttctttcttttytttttttttttttttttttttttttgaggcggagtctcgctctgtcacccaggctggagtgcagtagcacaatcttggctcactgcaacctccatctccagggtttaagtgattctcctgcctcaggctcccatgta

SEQ ID NO: 310600 - DNA, 606 bp, Homo sapiens
taaggtattttccttgagatgaaagaatcaatttgttcatttttcaggccacacctgcaaatacctatctcttaagtggcagagtttgtaagtcattctttagataaagaaggccattagtggaagaagcggttctgcaggttcatgggagagcacttggtgcctctgagctaagataaccatcaaatcctcggaagacgcacctctgcatacttcctgtttctcattcagaacattccagagggaacccggaatcccggtgctgcagcgggactgaagtttgctctcacccacacaataaacccagggagytcccccagcccccatcgcgaggccacagccttggtcctctgatccaggagggctcctgcagctccagcctacagggagaagcatgcacccacacatcagaaagccctcccaggcccagcgagcacttctgcttatgtgccagccaagtgtgtgtaacagggccacagccagctgtgaggcaggcagtgaggtacccagcaaatactcagggctcacatcactgagaaggaaggaaggttgacagcgaagtacccagcaaatactcaggcctcatgttacagaggaggaaagcag

SEQ ID NO: 310601 - DNA, 498 bp, Homo sapiens
ttgctccagggccaagaggggctgctgtgctgacagtcgtgaggcaggcagccttcgagctcctccagctgccgtcccgcaggcggggagggtggtgcctgractgccccacaggctaccccagcctgccaggctggtactctcaccccagccactgacaagagcccccatgttcaacatctggacacagtttttcttgaacatcagcttctgtttctctggggtaaatacccaggagtggggtcaccgggccccacgtttgtgtgagttcagttttgtaagaaactgctgagccgtctgcaccatgctgaaccgcagcatcacacaggagtcccggctgcctctgtcctcaccaccacctggtgctgaagaccttccatcagccgctccagcaggggtgtaaaaaaattcaccgcagctgcaatgcacatctcgctgaaaccagtcgcactgaaggtcatttcagatgctttcaggccaccctccccgtccttctcg

SEQ ID NO: 310602 - DNA, 598 bp, Homo sapiens
actaatgtatcagtatgttcagctctcttgttctttgttcttcattttaaacttcctcattctttacgtctcttgcccctagtttcagtaaataaccccctyctagcctctatcacctgctctgaccttagtcaccccggtcacctactctgaccttagtcatctttggtcacctgctctgttcttagtcaccctgagtcacctgttctgtaaccatccttcccaccaaactagtcaccctgccactccagctcgtacccctgctctttttaaaatagccaatcagaattagcttagactgtgtggtccaaccctagccaataggggaacgacacagcagtaggggctacctgcgtcagggataagaaccccttcccctcccttgttcaggtgtgctctcgccattgctccatccacaagatacacccttctacagaagtaaaattgccttgctgagaaaattaaatttatgtttgagtgctatttatttgtggcactgaaaatttatttccaacatctgtatagactactggagaaagatacctacaggaatgtcttctctgtactcctctattgatgtaaatcttgagccttttaa

SEQ ID NO: 310603 - DNA, 529 bp, Homo sapiens
ccatgtggggttgtggtaagttagagccaaaaaggatggatgtctctggagaccaaagtaatgaattttcttgagacagagtctcactctgtgacctaggggctagagtgcagtgtcaaatcacagctcactgcagcctccacctcccaggctcaagcgatcctcctgtgacagccaggtgggagggggtcctggagaaactccaaccagcctgcccactgaggtggagccttggaagttcactgcatttgcagcagggaggagcctggcccctccgcttcttgggtggaatctgggattcaaatgctgggcaggaagcactctagctgggactctggcctagtgagagtccctgtttcccccttttcttccttttaacccaataaaaccctgtcttactcaccyttcaaactgtctgtgaacctaaatcttcgtggccataggatagacaaggaccccatctttagctgaactaaggaaaagttctgcaacattccaacttcagcctcctaaatagctgggaccacac

SEQ ID NO: 310604 - DNA, 481 bp, Homo sapiens
tggaacataggaaatacaaggtaagaccaacctgggcaacatagtgagaccctgtctctacaaaaaaataaaacattagccaaatattgtggcacatacttatagtcttagctaccctggtggccgaggtcagaggatcacttgagtccaggtgttcaagattacagtgaccaatgattgcaccactgcattgcagcctgggtgacagagtgagaccctgtctcaaaaaaaaaaaaaaaaaaaargaaaaagaaaaaagaaaacaccgcgtaagactgtaatatcttaatagttcataaaacaaaaatttagtcaaagaccactgaagcaaaaatttgcgtcaaaaatacagaaagccattttttactttattttgtaagttcgcagtacacgtgcaggatgtgtaggtttgttacataggtaaacgtgtgccatgatggtttgctgcacctatcaacccatcacttaagtattaagcccg

SEQ ID NO: 310605 - DNA, 520 bp, Homo sapiens
aagaacatacaatagggaaagcacagtctcttcaataaatggtgctgggaaaactggacatccatatgcagaatcaaactagaccctatgtctcgccatatacaaaaatcaaataataatggattaaagatttaaatctaagatctcaaactatgaaactactacaagaaaacactgcagaaactctccaggacattggattgggcaaaacttttttgagtaataaccccccaagcccaggcaaaaatggacaaatgggatcacatsaagttaaaaagcttctgcacagcaaaggatacatcaataaagtgaagagacaactcacagaatgggagaaaatattcgtaaactatccatttaacaatagattaataaccagaatacacaaggagctcaaactactctataggtaaaaatctaataatctgactaaaaaatgagtgaaatatctagatagacatttctcaaaagaagacacacaaatggtaaacaggtatatgaaaatatgttcaacatcatt

SEQ ID NO: 310606 - DNA, 491 bp, Homo sapiens
gattagagtcctgcctcggagcaggtgagaggtgggcatgataaaatgtcagagagattctgtttcctgagacctgacacattcaacattgtaacaaaagactataagtaaggctatgggagtggcgagcatggaactgtggctgaaaaccaacaggtagrtagatagatagatagatagatagatagatagatagatagatagatagatagacagacagatagatagatagatagacagatcactactcccctagggtttttttgggaatggtaggatttttctgaatttggattcccaactttgagttcatggctaagcccctttaggaagccatgaaagatgaggacaaggaacccctaaaatggactggagaatgtcacagagttttccaggacataaaagaaaaattgatgattgctccttccctaggccttccaggtctaagaaaatcttctgacctttttgtcatgaaagacagcaagtaagcc

SEQ ID NO: 310607 - DNA, 542 bp, Homo sapiens
gatagtattatttttgttttgcagacgaggacactgaggttcagagggccaaggtaactgacctaatgtctcatggctaagtatgtggcaggcaggcacaggtattaactagtttctatgattctgcagcccgtccactctgctcgctatgccatgctacttcagctgtgtggcgtgctcaagaccctggctgggttgatgaaatttatctctggagtctttccatttctcyttcaatgcctctcctctcaccccctactccccacttccccaaggccttcacaataattgctaatccatttagtgtgtttctcttgtaggttatcaacccaggtatatagtcataactaaagtatgagatgatatgtcttatcatttaccaggaggcattcgttttgttttgtactaggagactcttgaagatggaaaattcttttgcagctcaaatgaacgaggttttaatagaggattgccaacttgtggggcttatattttcaaaacagaaggtcttttctggtgccttcaaagacttcacctgagag

SEQ ID NO: 310608 - DNA, 432 bp, Homo sapiens
tgtgcagctttcagaagattgtaacaaatgatcacaggatttactagtcattttctattttattttattttataataatagaagtcattaattttggaaggaaatagaccatttgcctatgtgtgctggaaatgtaggtctgtaaagagcatgagaagattatatatgatatttctgaaactagaaatcatagtctcttggtggttaatggttggtctccagcctgttattttgatgatagtctcatcatgccccttatggtgccactcatggtcactggtacacagataggcgtagctttggtgcaatttagaatagtgaaggttgaggaatatttttgasctgctgagaaaccttaggaaaaattactctatctccatgtaacattgatgattcttctcagaaaatttttaaacagttccttatgctaag

SEQ ID NO: 310609 - DNA, 547 bp, Homo sapiens
catagaatgtgaatcctaactacagcaacaagagaaagaaatacagggcatacaagttggaaaggaagaagtcaaattatccttgtttgcacgatatgatcttatrtttagaaaaacctaactttccatcaaaagagtattagagctgatgaaaaaattcagtaaagttgcaggatacaaaatcaacatagaaaaatcagtggtatttctatatgccaacagggaacaaactgaaaaagaaatcacgaaagtaatcccatttgcgataggtacaaataaaacaagatgcctaggcataaaagtaaccaaagaaatgaaagttttgtataatgaaaactataaaacattgatgcaagaattgaaaaggacacaaaggaaaagatattccatgttcctagattcaaagaatcaatattgttagaatgtccatactacccaaagcaatctacagattcaatgcaatccctgtcaaaacaccaatcacattcttcacagaaatagaaataataattctaaaatttatatgaaatcgcaaaagacccaggat

SEQ ID NO: 310610 - DNA, 627 bp, Homo sapiens
ctttgtggtttttgagtgcaccaatgagtctcatgatagtgactgagttccctagaagaatgcagtattttggacagtcygttagtacttggagccatggatttttttgagtcagatgaaagacacaaatactcataccagaaaactgcttttccaccccaaattttgtatagcgttttgggggttcatgtactccctacagctcatttttagacctaagtaaatataaaccattttttatcagaatgcaaaatgcagcccgccttccttgaattttaaaatttaatatctggcttcttactggcaaagatgtgatttgaaagacctgagttcaatgttccccaaaatatatttctagtagtttaatctaacaggaataagaacctaagaaggagtaagaaaaatgtagcatcaatggattcttctaatgccttacacatagtaggtacaatgagtcttatataaattaatgaaaagtcagtcttaaaattatgcagagctagcagctcaattccaatgttataaaagcagtaatgggcaagtacttattaaatgattcccggttatttttgtcatacacaaactacttcattattgtacaattttttaggcttctgaataaaggtt

SEQ ID NO: 310611 - DNA, 499 bp, Homo sapiens
ttcaagacaaaaactataaaaagagacaaagaaggtcataacataatgacaaaagggtcaatttagcaaaaggatataacaatttaaaatatatatgtacccaacactggtacaaagagatatataaagcaaatattactagaactaaagagagaaatagacccmaatacaataatagctggagacttcagcactctactttcagcattggacagatcatccagacacaaaatcaaaaagaaacattggacttaatgtgtactacaaaccaaatggacctaatagatatttacagaacatttcatccaatggctgcagaatatacagtcttctcttcagcacgtgagtcattctcaaggacagaccatgtgggtttctcccacaacacatgggaattatgggagctacaattcaagatgagatttgggtggggacacagccaaaccatatcacttgttctcacttatttgtgggagttaaaaattaaaacaattgaact

SEQ ID NO: 310612 - DNA, 587 bp, Homo sapiens
gtgtccagctttcagataaagctgtttacacagttgcagaggtcttactgtatacaacactatcctgaaaaaagctgtatctgtaaattaaggcaggaagtgaagactgttaggtctaattcaaaccatagggtagttttcattagctatagtgccagcattcagtcagaacaggacgagtgacctggttcttaaaggcccttargagtggcaagatagatctacatcttattttgaaaagacagtctaaaaaccaaggagcaatctttcttgagctcctgcctccatctgcattttggaaccaagagaaggaaaattcatttaaaatagattgtctgatgacagggagtcagacttatgaaaagaatatttaagctttatactaacgaaaggaagaataaaatacctttcttactggagcataatctttgtgaaactaaacatgtttaatgattatactccaaaaatgtcaagaagccctgtaataacaatgaggtcatcatcagaacagacacaaaacattatctcatcaaaggggatatataactatataaacacatgtttagattattatatgtctatatata

SEQ ID NO: 310613 - DNA, 617 bp, Homo sapiens
tattgctgaatgaaagaagtcaggctgaaaaggctacttactgtatgattccaatgatatgacattttggaaaaggcaaaactatatagacagttaaaagaattaaaagatcagyggttgccaaggttcaggggagagggaggggaggggagcataagtgtagcacagaagacttttaggtgggaaaactagtcagtgtgaaatagtcatggtgaatacctgtcattatgcatttgtcaaagcccacagaatgtacaacacaaagaatgaaccttaatgtaaatgatgcactgtagttgataataatgtgttaatggtttgttaattttaacaaatgtaccacatgaatgcaagatgttaataatagaggatgctgaggagggagaggtggttgggttattatatgaaactctataccatctgttaaatgattctataaatctaagactgtactaaaaagaaaatatacttttttttaataaactaaattaatgtatgagcatccagctagaggcattaccagccttacagaaactactccgaatgactttaaaatatggcaatttgactgcatattcccagtgaatacaaatcataagggtaaagaaattacaaat

SEQ ID NO: 310614 - DNA, 618 bp, Homo sapiens
tgccacatattggctatattctagcattgggcgcagtctctcaagggatttttcctcatctgtaatacaggggattgggctaaatgacctctaaagtactttttggtgatatgaccctatattggaaacaaaaagattgtgggaaaatctaaatcgttgtgaactgaaaggcaagtgaaggaagctgttgatagtaaaacattctgaaataccccagctttattgaatggaatcaggctataatgaaaacaacatctggatgtgattgtttaaaaccaaatgcataaagggaaatccaaattatgttagatgttacactgactaacatcagaaacttgggaaaagaaaccatttgrcagaaaaaacaagacagaaatggcctatatggaaagagtggttgctataaaccagagcatattattcaacatagaggaaattaaaagacgctaaagtcaaggaaactgacaaagccaggaatgtgaactatcccattaatacaacccttatgttagcctaattgacttcaaaatattttattctatctataatacaaatttatatctccatgatagtctaaatgataggcatcacccagacaagagttctgtctttaaaatg

SEQ ID NO: 310615 - DNA, 544 bp, Homo sapiens
cattcaaaacaaatgtttattgaatatttactatgtacatgacttttttaataatttcacctgctgtacttgaactaggtcagctttatctcatgtttagctgatttttgcctttttttcttatccctcctggattttctaacctagagtcctgctcaactccgattttctcattttattctaagctaatataacattttattaaacattggctgttaggcatagaagctttttccccacctacaagtacactgagtagttgtttggggtagatatttactaagtaatgcactacggttctttataaatcccttttatcagcaggccaacttaatgtgmaagttaagggctttgtgcaaacttcaaggtaaatttggtcttcccaaaagctttctcaagaaggcccacaccttcccagttttaagagctgtaaacttctttatggtgtgactgggtcttgaatttcacttgtattcctcagaagcgcagggatataaatggaacacaaaacagaaactcaatagatacatatgtaagtagactt

SEQ ID NO: 310616 - DNA, 470 bp, Homo sapiens
ataaaataacttctataacatatcattctcaatgtccagggtacaattcaaaattacttaaaatatgaagtaacaacataatgctggccattctcaattgaaaagataatcaatggagaccaaacctctaatgactcatatgttgaattactagagcattttaaattatttattataaatacattcaattatgtaaaggaaaatatgctcatggygaatgaaaagacaaagaaacaaaacctatagaaagaaattgatggaaattctagaattaaaaatacagtatctgaaataaaaatttcaccacctagcttaacattagaatgcaaatgacagagaaaagagaagataggtaagtagaaattatttgatctgaagatgagaaaaaaaatagggggaaaagggaacagggctttcagaacactgtaggacgatagcaaatggtctcatagatgtatatttgaagtccc

SEQ ID NO: 310617 - DNA, 559 bp, Homo sapiens
agaactacaaaacactgatgaaagatatcatagacaacacaagcaaatggaaaaatatcccaagctcatggattggaagaattaatcttgttaaaatgaccatactgcctaaagcaatatacacattcaatgcaattcctatcatattcccaaggtcttttttcacagaattaggaaaaaacctattctaaaattcatatggaactgaaaaagagccagaatagccaaagcaatcctagrcagaaagaactaggctggaggcaccatattacctgacttcaaattatactacaagctacaaggctatagtaaccaaaagagcatggtattagttgaaaaaaaaaaaaaagacacatagacacatagaccaatggaacagaatagagaaccagtaaataaagccacatagctaccacaaactgatcttcaacaatgttgacaaaaatatacattggggaaaagataccttttcaatacacggtgctgggaaaattggatagccacatgcagaggaatgaacctggaccctatcctttactatatacaaaaattaactcaa

SEQ ID NO: 310618 - DNA, 559 bp, Homo sapiens
agaactacaaaacactgatgaaagatatcatagacaacacaagcaaatggaaaaatatcccaagctcatggattggaagaattaatcttgttaaaatgaccatactgcctaaagcaatatacacattcaatgcaattcctatcatattcccaaggtcttttttcacagaattaggaaaaaacctattctaaaattcatatggaactgaaaaagagccagaatagccaaagcaatcctagacagaaagaactaggctggaggcaccatrttacctgacttcaaattatactacaagctacaaggctatagtaaccaaaagagcatggtattagttgaaaaaaaaaaaaaagacacatagacacatagaccaatggaacagaatagagaaccagtaaataaagccacatagctaccacaaactgatcttcaacaatgttgacaaaaatatacattggggaaaagataccttttcaatacacggtgctgggaaaattggatagccacatgcagaggaatgaacctggaccctatcctttactatatacaaaaattaactcaa

SEQ ID NO: 310619 - DNA, 574 bp, Homo sapiens
accccactactgagtatctacccaaaggacaagaaattatatcaaaaagacatctgcatgcattttttattgcatcactatttgcaatagtgaaatcrtggaaacaacctaagtatccatcaatggatgattggataaagaaaatgtgatatatattatatatatattatatatataacataatatatatataatggaatattacacagccataaaagagaatgaaatcatgttttttgcagcagcatgaatggagctggaggccattatcctaagtgaaataactcaggaacagaaaactaaatatcacatgttctcatttgtaagttgggagctaagcaatgagcacacatgaacatacagagagaaataacagagactgagggtctccaaaagggggaaacgtgagtggagggatgtaagttgaaaacttaaccattgggtatgatgttaattattcaggtgatgggtacactagaagcctaaactccaccactatgcaatatatctacgtaacaaacctgcacatgtacccactgcctgcatctataaaataaatgtttttatttaagaa

SEQ ID NO: 310620 - DNA, 555 bp, Homo sapiens
attgctgttagctcacaactaaatcctgttaaaatgaaaatcctctacatatatatgtatatatgtatatacatatatgtgtgtgtatatatgtatatgtgtgtatagacatcctccaataaaagaaaaaaaaagcattttgtataatcctccaataaagaaatcagggcttcttgaatagatggctgattctctgactgggacataatgagcctgggggcaacttgtagtaccagaaaataaagaattgctaaagtaaataactaaataaaatgaccctgggaggttaggggtgtgtcaaagggaaatagtagctacctgaaatggctcccaatgttctaagctggaacaatttgagcaaaaataaataaagtagaattggacccaaagtataaaataaataaccgagaatccatactgacataaataaatggttggataaataaatgggagagaagcaataaatccctcacrcagaagcattccaaatgctatatcctagatgtagaagatattccttcctcaagttggggcaggggagcttcattccctact

SEQ ID NO: 310621 - DNA, 580 bp, Homo sapiens
gtgaatctagtgtttggaaggcaaattagtgacaacaagctcagagacagatactaaaataaaataaaaaaaaaaaaaaactaattccatagaagaaaacagttagagccagaaaaacctaagccctcaacccaagaatttgggggtacattagaagggatccttgagttttatctctatatatggaatgagaactcaggtgaattttatgtgaatgccaaaggacagggtaccccagtgggctgttaggttgcaaaggtaaagtacttggcaagtacttgtatgcttaagtgctcaacaaataccagctatactattagtgaaggttttccttgttttgattttgggtgatattctggttatttaatatttgcacccaatattttccctcatagtgcttacyaacatttgtagccacatatttattttcatagcctaattgattatccttctttaatctcgatgtggctttttagaacatatacactagatctcttatacagctgcatacacattgacaaacttgtactatttaattcttcattttaccaagcacaaaatcataccacttacgtacaat

SEQ ID NO: 310622 - DNA, 480 bp, Homo sapiens
ctggccagaacatgtgaacggaaacaacacacacgagagggagggtgagtgagagagagagagagagagagagagagagagagagagagagagagagagagacaagagagagagagagaagaaacacagacagaatgtattcacatgatatttctggcctgtttaaaaggaggaaatactggaaatatgtttgaaagcatgatctcatgggatttcaatgccactttagaggaatgaagtatttggtttatatacataatcaaacattgggagctggcactagaaccagcccaaacaaaacctgcaactcttmcattgctacttgcaaactttatttgctggaattggaaacccaaaactattcaccctcttatgacaatttattattcagagattatgtcttaatgtgacttagatgtacttcatttgagtgatggaaaaatggaggtctgaatcacagaatactaacaaagcgatgca

SEQ ID NO: 310623 - DNA, 480 bp, Homo sapiens
ctggccagaacatgtgaacggaaacaacacacacgagagggagggtgagtgagagagagagagagagagagagagagagagagagagagagagagagagagacaagagagagagagagaagaaacacagacagaatgtattcacatgatatttctggcctgtttaaaaggaggaaatactggaaatatgtttgaaagcatgatctcatgggatttcaatgccactttagaggaatgaagtatttggtttatatacataatcaaacattgggagctggcactagaaccagcccaaacaaaacctgcaactcttcyattgctacttgcaaactttatttgctggaattggaaacccaaaactattcaccctcttatgacaatttattattcagagattatgtcttaatgtgacttagatgtacttcatttgagtgatggaaaaatggaggtctgaatcacagaatactaacaaagcgatgca

SEQ ID NO: 310624 - DNA, 632 bp, Homo sapiens
cctgtaccaggacctgtgcgaaacagcattttccttgtgttactctttacctttctctgttactcgtgtagctgtatactgaatagaaagaggtaacacaagccttcacagacctcaaaatctataattaagaactgtatctgacaaggtttttttttytcctactgacaaataaatgacactttttaaaagaatattacaggaagagtgttaaaaaaaaaaggcaaaagggcaaaaattgtttcctctcttcttcgtggcagaacacagagaggtgagtcttttttttttttttttttttttttttttggtaagtccttacaatgagtacactgttgacttggcatgcagatcaaaagactgacagatttaattcatgtttctatgctatacaaacaatgacatgtacaacccaatctgggctgctttcagcaagtaattgaaggtagtgcaaacacagactttaaaagatcagtggtgcacaactgaactgtttgacagaaagagatccgacagcgcatattctttttgctgtttcgctgagattcctctttgcctgccctctgccctgcccttaccctcctggaattaatagcgactgatagcccgtgcattgtgttaacggaaatgga

SEQ ID NO: 310625 - DNA, 512 bp, Homo sapiens
tcaaataaattctgacatgcaattttggaacattggaaaataatactaaaccagcctgagtagaaacaggaagtaaatcttggcagagctgtatgccttcagcttattaccaataatgcattgcatcgttgagtagggggtggtgcacagaatgattttcaaaaccagtctttaacttgagatggttttcccaaacttggagttataaattgaaacttgyaaagtcagaaaaaaaaatcctgttattactaaatcaggtagttcgtctggatagtttaaattgatctgtaaggaccctcatgttccaaagtaccaaatacagctgaaaagtcttatgagcttaattttaccctttggtccatggtatgcatcattacacatctcagaaaatctgtgctgatcttacttgcaggcataaagttctgttttattttcagtaagtccattcataccatatagttgtgaccaatgtacatccataaaaatattaacccgacttccaccccccgcaa

SEQ ID NO: 310626 - DNA, 624 bp, Homo sapiens
gctcagttgatccagataggggtttcttggtagctagaatggagtcttgagcctttagcatgtagaaatattaagaaaatgtgaaaagcactgattttgggggtcacaaaagtaatgagagagagagtagaagagacattttaagcatcaaagtacttacgcctgaaacctggaggatactcatggtgggatgtagatctcagagccattgggtctttcataggcccccaacctagaggttcctcctccctcctttgcattcaaagacaaccttagcctcatctcatttcaaatctaactaggccccggttctgtacaagatccagattgagcartggggcttgaagtcaaggcaggctatattatttcctttctggagctcatggtctggtaagggagatacctcacttccaggcttttccactttactaagaacttaacattgggtaggtcacttaacctctctgagcttcagttttctcatctggaaaagaataataatagtgcctacttcacaggtctgttaagagaattcagtgggataaagctggtctggtaaaagatgaagtgagttattatggataattacaatgatgaagcacttagcaaaatgcttggcacaaa

SEQ ID NO: 310627 - DNA, 607 bp, Homo sapiens
gagtctctgttttgtttgtttgtttgtttttgtttttgagacaaaggctcactttgtcaccctggctggagtgcagtggcctgatcttggctcactgcaacctccgcctcccgggttcaagctattctcctgcctcagcctctcgagtagctgggactttaagcacacgccaccatgcccggctaatttttgtatttttagtagagatagggtttcactatgttggccgggctggtgttcaactcctgacctcatgatctgcccaccttggcctcccaaagtgttgggattacaagcgtgagccaccgcatctggccagagtctccatttttaacaagcatggctgctttgcttgttcccaaagcactgttcttccttggggttcttgcacttgctgttccatctgtctttctctaatagctggatacagggctagcttcatgggcatgtgacctgcgcagtcacasaagaccccatgcttagaagggcctcacacttggtttaatgctctactgtcatctcttgaaatttttaatagtttgtgaacaagggcctcacattttcatatttttttactggccctgggcgaatgatggagctgattctg

SEQ ID NO: 310628 - DNA, 526 bp, Homo sapiens
acaaaactcatccttagagaacagggatcttactgtagtttatgtgcccggaatttaaacttttaaaatatggcaacagatctgcacaaagcaatatgtaaatctttgcagagaagcatgctcatatgctcccttggctctcctaggaatacatttggcaatacaacttcagactaaagtaagggccyatcctgagggaaagggctggtggcaatgaagcattgtagcacatccatggagatcttccaggaatcaattattagtcatctccaatctatactacattgaatggatcaaatttacaatgcacttaattctccctgtttcctctggaaagattggaaagatcagaattttagccccagtgatatctctggttagctatatccttggatcactgtaaaggagtctaacaaggtatctatttcatgggattgttgtgccattaaaagtaatggcaaaaaccgcgattacttttgcaccaacctaatatatgaaagctaatgtattattgttattatgcaca

SEQ ID NO: 310629 - DNA, 526 bp, Homo sapiens
acaaaactcatccttagagaacagggatcttactgtagtttatgtgcccggaatttaaacttttaaaatatggcaacagatctgcacaaagcaatatgtaaatctttgcagagaagcatgctcatatgctcccttggctctcctaggaatacatttggcaatacaacttcagactaaagtaagggcccatcctgagggaaagggctrgtggcaatgaagcattgtagcacatccatggagatcttccaggaatcaattattagtcatctccaatctatactacattgaatggatcaaatttacaatgcacttaattctccctgtttcctctggaaagattggaaagatcagaattttagccccagtgatatctctggttagctatatccttggatcactgtaaaggagtctaacaaggtatctatttcatgggattgttgtgccattaaaagtaatggcaaaaaccgcgattacttttgcaccaacctaatatatgaaagctaatgtattattgttattatgcaca

SEQ ID NO: 310630 - DNA, 551 bp, Homo sapiens
ccggccccacctcccgccccgctttcaataaggcatgaaacagtggccaggaggagcctgtgtgaaagtcctcagctcttcccaaaagagaggatgggttgttgactcatggagggggyggggtgggggcagggaagagaaaccagcagttcctttttctctgctgctcctgtggcctgtctgaccttctttctttctactctccctagctccctgagctccaggcacactggcctctgctgctgctgacatggccagacccacccttacgttggagccttgactgtgaccctcttgtctacatggtttatttcctcaccttccccaagccttagctcaaatgtcaccttctcagtgatgggctttttaaaattgcaccctctttctccactcctgtactccaaaccccatgaccttgttctactttttaattattccttgccacttgtctcgttcaagcatgctatataatttatttatccatctatttattattatataatttatttatctaataatataatgtattgatccatctattctgagtgcct

SEQ ID NO: 310631 - DNA, 551 bp, Homo sapiens
ccggccccacctcccgccccgctttcaataaggcatgaaacagtggccaggaggagcctgtgtgaaagtcctcagctcttcccaaaagagaggatgggttgttgactcatggagggggcggggtgggggcagggaagagaaaccagcagttcctttttctctgctgctcctgtggcctgtctgaccttctttctttctactctccctagctccctgagctccaggcacactggcctctgctgctgctgacatggccagacccacccttacgttggagccttgactgtgaccctcttgtctacatggtttatttcctcaccttccccaagccttagctcaaatgtcaccttctcagtgatgggctttttaaaattgcaccctctttctccactcctgtactccaaaccccatgaccttgttctactttttaattattccttgccacttgtctckttcaagcatgctatataatttatttatccatctatttattattatataatttatttatctaataatataatgtattgatccatctattctgagtgcct

SEQ ID NO: 310632 - DNA, 528 bp, Homo sapiens
cattttaatttggtgaccaaattcagcatcagtcactggcatcaactcaacattatgtgcctcttgatgtgttgtgaggttaagtacacaagcatcactatcagctgttatatgctgcctaagatgctaatttctctggtatggaatagaacctggacgctgacgttggaagtcttcacaagctccccagaagaacttagtatgcagttaaattagagacagaaycattaatttaaatatttgcaaggtacatattgagtacctctataaattattttgtaattgcatactagagtcctattgaaatgagctgagggaaaaaacacaagtgcgatggaagactaccttcctgattttggtaagcagccaagtaatctttttcaaagaccctttcccttctttttgcactatcataaatttttaaagaatatgtgtctttaaaatatgccatagtaagaaattacaagtcaatgggaaaaaaggtttctacagatcaaaggtagttaagtgctacttaaggatattttg

SEQ ID NO: 310633 - DNA, 622 bp, Homo sapiens
gtgctgcactccccatctcctcctggctccagcctcctggcccaattccaatgcctggatcatgccttatgttgttctctctgctcagaacactctcaccccactcccctctggctgactgctatcctactcatcccctggtctcatgcaagcttcacttcttcagggaagccttgtttggacctggagacaaggtctgggtcactccccatctccatgctacccctttaatcacatctgttcttggctttattacaactacttgctttatctctattttccttgctaatctctgtgagggagggggactgtatgagttttattcactgataaaatcctgactcccagcacagttcttgatctgaagtaggtatccaataaatattgtgtaacaaatgtcatgtgaaagaaatgagttcaaatgaacccrcaggtccagagctcattccactctatccactgcttcctctccctgtgatggagctttctgagatcatctaagcccacagaagttgccccttcctctaaatttgtatgcctacatcaccaatttgacatatcttgctatcttttcatgtatgttgcatgtatggttctctctccagctacactacaaactccc

SEQ ID NO: 310634 - DNA, 594 bp, Homo sapiens
atattgttacttcacatattattatgtattattttactgtggggtataagatgtaatctttaccaaataatagaatataacataatctttacattattttcagwgtagagatcatttatatcttttaactttttggtattttatgtatatacatatttttaaattaattaattaattaattttttgagacagggtctcactctgtcacccagaccggtatgcagtggtgcaatcatagttcactgcaacctcaaacacctggcctcaggcgatcttcctctcagcctcctgagtagctgagactataagcttgtgccaccacacccagctaattatttttatttgtagagatgggggtctcattatgttgccaggtctagtcttgaactcctggtctcaactcccacctcagcctctcaaagtgctgggattacaggtttgagccaacatgtctggcctgaatataaatgggctaaaaatgccacatacctcaaatcttctttggtatcaagtaaggcaattattatacagatagaagtacacacacacacacacacacacacacacacacccccatgcatatgcatatataca

SEQ ID NO: 310635 - DNA, 594 bp, Homo sapiens
atattgttacttcacatattattatgtattattttactgtggggtataagatgtaatctttaccaaataatagaatataacataatctttacattattttcagagtagagatcatttatatcttttaactttttggtattttatgtatatacrtatttttaaattaattaattaattaattttttgagacagggtctcactctgtcacccagaccggtatgcagtggtgcaatcatagttcactgcaacctcaaacacctggcctcaggcgatcttcctctcagcctcctgagtagctgagactataagcttgtgccaccacacccagctaattatttttatttgtagagatgggggtctcattatgttgccaggtctagtcttgaactcctggtctcaactcccacctcagcctctcaaagtgctgggattacaggtttgagccaacatgtctggcctgaatataaatgggctaaaaatgccacatacctcaaatcttctttggtatcaagtaaggcaattattatacagatagaagtacacacacacacacacacacacacacacacacccccatgcatatgcatatataca

SEQ ID NO: 310636 - DNA, 594 bp, Homo sapiens
atattgttacttcacatattattatgtattattttactgtggggtataagatgtaatctttaccaaataatagaatataacataatctttacattattttcagagtagagatcatttatatcttttaactttttggtattttatgtatatacatatttttaaattaattaattaattaattttttgagacagggtctcactctgtcacccagaccggtatgcagtggtgcaatcatagttcactgcaacctcaaacacctggcctcaggcgatcttcctctcagcctcctgagtagctgagactataagcttgtgccaccacacccagctaattatttttatttgtagagatgggggtctcattatgttgccaggtctagtcttgaactcctggtctcaactcccacctcagcctctcaaagtgctgggattacaggtttgagccaacatgtctggcctgaatataaatgggctaaaaatgccacatacctcaaatcttctttggtatcaagtaaggcaattattatacagatagaagtacacacacacacacacacacacacacacacacmcccatgcatatgcatatataca

SEQ ID NO: 310637 - DNA, 575 bp, Homo sapiens
cagaaaagttggggtgctagatgtgtggtccatttcatctctcctcacagagaagctaagagcagaagtttatctcctacttgctctgcactgagctgggaaggggagctgtggcaaaggtctgcatgctcattcagactgcatactctttcaaacttttgctttgctctctgtcacccctagcctagggtcccagtgaatgtcaggccctgtcagttctttgacacagatggtttagaggccagaccctctggtagcagccagaaaagttggagcccasacaggtagtcaactctttctaaggagaagctggaggcttgaaaaccaggaccttctttggtgctctcccaagcatgtggtcaaccagatgccctaagtatccaggactccatggtgagggcccatgcaggaaagcctggagagtgagtgcatcctctggccagcacagagtttctttcacggaatcatgtgtgatttgggcctccagaatagcactgatgcactgattcaggaaaacacactcacattagacacaggataaagaatcctcagatacactcactggctcataaaca

SEQ ID NO: 310638 - DNA, 575 bp, Homo sapiens
cagaaaagttggggtgctagatgtgtggtccatttcatctctcctcacagagaagctaagagcagaagtttatctcctacttgctctgcactgagctgggaaggggagctgtggcaaaggtctgcatgctcattcagactgcatactctttcaaacttttgctttgctctctgtcacccctagcctagggtcccagtgaatgtcaggccctgtcagttctttgacacagatggtttagaggccagaccctctggtagcagccagaaaagttggagcccagacaggtagtcaactctttctaaggagaagctggaggcttgaaaaccaggaccttctttggtgctctcccragcatgtggtcaaccagatgccctaagtatccaggactccatggtgagggcccatgcaggaaagcctggagagtgagtgcatcctctggccagcacagagtttctttcacggaatcatgtgtgatttgggcctccagaatagcactgatgcactgattcaggaaaacacactcacattagacacaggataaagaatcctcagatacactcactggctcataaaca

SEQ ID NO: 310639 - DNA, 536 bp, Homo sapiens
gaggaaggaaatcaaactttccaggtgctggtggctccgtgcgggacggggcagggaagccaccttctctccaactccaaaggccatatggagtcaacaggaacaggtctggcatgctggccaagggcatcagtgatctctgaacccgttctccaacaattttgccaactgagccatcagagagccactgcgtccccactccatctcacacccgatgctggaaggtgtccctctctccaagtgaggaggaagcgagtgcagctggccagtggctctgcgactgtgggagtgtcccagcagggctgcaaggggggcgacggcgatgtctgttgctaagtgttctttctctgcacaacttattgagtcttgataatctaytttcagatttttggaagtgtaatcatgtgtttcaggttagggtcttcataatttttctcagaatggatccctttggcatgtgttaacggccaagggagcaggtgttggtgaaaatggatcattcctctcctgccacccttcctgctgcctgcccttcc

SEQ ID NO: 310640 - DNA, 339 bp, Homo sapiens
ggaaatgaaaacctcaatcatcacaaataggtacccactcccctccttctctccctctccccgctcccccgccaccaacacagaggccaggatatggggggtctcagacacgactggaaaccccacttggaaggtctcttaggtcacagcgggtacgcagagttggaggcaggtacagagcccagctagagtccctgccgcgcctgccttccccagtgagccgggcacaggggcaaacctgagaaacatacttttcacgctccctggaggaacccgwtgcttcagtagcccaaatcttaaagcctgtgaagcacacacagaatttgtctccctaaccaa

SEQ ID NO: 310641 - DNA, 609 bp, Homo sapiens
aagttttgttgaaacatgataggagccactcttcagcactttaatacacatgccactcatccttccatttgttgttgttgtttttgagatggagtcttgctctgtcacccaggctacagtgtagtggcacgatctcagctcactgcaacctccgcaacctccgcctcccaggttccagtgattctcctgcctcagcctccgtagtagctgggactacaggcgtgcgccaccacacttggctaatttttgtatttgtagtagagatggggtttcaccatgttggcaaggctggtcttgaactcctgacttcaagtgtctagtgcagagtatgcgtatgtgaaaatgggtgctaatgacagattaccaggtggggaggtcaggaggactgtcccaagtcccaagaagagatgatggctaagagttagccaggaatcacaatggaaaagtagagagagagggaacagtgtgggtgagggctgggaggaggagaacatgtcccgttaggaagtgyagtcacagtgtatcccctgtaaggccattgctataccctcttctctcagcaatagatgaatgagttatttgcttaactgcattctgataaaaccaaga

SEQ ID NO: 310642 - DNA, 595 bp, Homo sapiens
attgctagttaggcacattgaagaaggttaaaatggtggcatttgatatcatctcaaggacctgaaagaggggagagaatttcaggtatgagcaccatgtgtggaagggccaaggtggggaggtacaggtgctggggcagcttgttgattgatttggtttaaataatgggttcatgtgaaggggactgggagattgggtagaaggtagtttggtgactaattgcaaaatactttaaatatcaggattttgtttcctttaagtacacaagataggagaggagggtttctgaataatgaggacatgatgaaatttttaaaatactctattatgcagattaggaaggttcaattgatctgactttaattcactgcttctctcttctacagcctccaatacattgyaaagcccttctggtgaatttttcatttcagatatagttttcacttctaggatttcctttttaaaaaatactttcacttgctctgctgagattctccatctgttcactcattaaatccaactttttctttaaatccttgaacatattaatatgagttattctaaagtcttagttaattccaacatccggattat

SEQ ID NO: 310643 - DNA, 595 bp, Homo sapiens
attgctagttaggcacattgaagaaggttaaaatggtggcatttgatatcatctcaaggacctgaaagaggggagagaatttcaggtatgagcaccatgtgtggaagggccaaggtggggaggtacaggtgctggggcagcttgttgattgatttggtttaaataatgggttcatgtgaaggggactgggagattgggtagaaggtagtttggtgactaattgcaaaatactttaaatatcaggattttgtttcctttaagtacacaagataggagaggagggtttctgaataatgaggacatgatgaaatttttaaaatactctattatgcagattaggaaggttcaattgatctgactttaattcactgcttctctcttctacagcctccaatacattgcaaagcccttctggtgaatttttcatttcagatatasttttcacttctaggatttcctttttaaaaaatactttcacttgctctgctgagattctccatctgttcactcattaaatccaactttttctttaaatccttgaacatattaatatgagttattctaaagtcttagttaattccaacatccggattat

SEQ ID NO: 310644 - DNA, 546 bp, Homo sapiens
gctgccatcctagctcaccacagcctccaactccagggctcaagctatcctcccacctgagcctcccgaatagcctccactacaggcatgtaccactacgcctggctgacatttttamcttttttttgttttttttttttttgcagggacaaggatctctctatgtttacccaggctggtctcaaagtcttgggctcaagccattctcccacctcggcctcccaaggcatgagctaccacagcagcttaatatcttgataacatggatttcagtctttcgtctctgcgctgtttggtttcataattgggatcacactatacatgcaactttgtgtgctgccctctttatttacctgctctatattttcagcatttcccatgccatgatagtccttggaaacataattctaacagttggctaatgttctgtcactggatgtactgtaaagtatttaacagttcttctaagtttgtacattgtaaatggatacttccgttaaaaaaaattttatgtatatatttacatagtgggcattgtgttcttta

SEQ ID NO: 310645 - DNA, 471 bp, Homo sapiens
ccagcatcaggattccataagtgcttgttgactgaacacatgaatgtgaaactaaactgggaggaaagtggtttagaaagttactctaccacttcctagttgtgggaccttcattaagttacataaccactttgttattcagctttcacataagcaagctgagtgtattcacacatagtaggtgccaataaatgcctttgaaagcaatatgaggttagtcacttaatagtgaatgaaaattgtatattttatcttaatatatttttggtgcatgagaaatcacagaaaaacagggaatcgttaactcctatgttgattaacattggcacatttataaatactgttctaactactcttgtatcattgtattagtccattttcacactgctgataaagwcatacctgagacggggcaatttacaaaagaaagatgtttaattggacttacagtttcacatggctgaggaagcc

SEQ ID NO: 310646 - DNA, 568 bp, Homo sapiens
agctaagaatcataggatcttagcttgggatgaattttttagataatttttcccaaatctgcatcaaatcactttgatagcattaaaattattgagattcctgagaccaattgttgacttattgtattattcatgcatctattcaacacccatgtactgaacacccttacttgtgaggatgctggggtgggcattgggtacagagtactgagtaaagctaacataggccctgaattaatayaacttatagtcttaaagcagggaggaggggtcagacagtcatttatcagttaatcacacaaataaatatataatcatacgctgtgattaagaaatatttcagggtgctaatgagtatgtcaatggcaggatctaaccttgtctgagctgagctccaaaagataagtagaagtcaaactgatgaatgtaggtggaagggtggaaaacatcaggcagagaaaacagtttgtgccaaggccctgcagccagaagggaatttgaagctgggtgatatgtgaagcattgaaggcaagcccatgtggttggagcacagagggaggaagctgga

SEQ ID NO: 310647 - DNA, 416 bp, Homo sapiens
cctttggacttcttagaatctagtttgaaaccttaaagaacttctggctttctgatttgaccttttatgccaattcaaatcaaggaatatttattgtgcgtcatctacctacaacactaagaggtcttgagagcattcagacatgaaaaatagcytatgcctgctcttcacaacctcctctgctctgtggataaattgcacttaattttactgtgatatgaatccccctcttctttagaccagctccaccatgtgcacccatcatatgcttctcctgtccatgggcatggccatgagcatggtgtaagtgctctaaccccctgaatcctgcttctgggtatcccttctccctccattccctagattagctagccccatcttccctgctctctgatcttgatcctgctcttccgatc

SEQ ID NO: 310648 - DNA, 611 bp, Homo sapiens
cctttgtttatgtttttgcttcttctcctgcatctgcccagcatttacttgtcacttaaggctcagcttaaatataatctcagtgaagtcatcactggctacctacgtacagttcatcctactctctcctatgttcccacagtattctgtgcatatctatcttacagcacttgcatcattgtataaaattactcaattatggtgcagaaaagctagttcataactagactattagcttcttgaagacagagatttcccaatttctcatattcatctttgcaggtgccaatctgtgtgtttggcatgattaccttctatcctcaatgaatgtcctaattgttaagattctataactctgactgattcactgagcttcttgatgtcacagaataaatttatcttcttaggtgtccttttacaartattaacttatttgtagaaaggagttattatacttaagatattactagaaacatacttataaatattatgcagattcattccttatgatcaaatgcatgcgcacattggggagaaaggctgtggggaacaagaaaagaaaccaacacccactgagtgactaatgtgtcaggaagtaggtaagggtcttc

SEQ ID NO: 310649 - DNA, 611 bp, Homo sapiens
cctttgtttatgtttttgcttcttctcctgcatctgcccagcatttacttgtcacttaaggctcagcttaaatataatctcagtgaagtcatcactggctacctacgtacagttcatcctactctctcctatgttcccacagtattctgtgcatatctatcttacagcacttgcatcattgtataaaattactcaattatggtgcagaaaagctagttcataactagactattagcttcttgaagacagagatttcccaatttctcatattcatctttgcaggtgccaatctgtgtgtttggcatgattaccttctatcctcaatgaatgtcctaattgttaagattctataactctgactgattcactgagcttcttgatgtcacagaataaatttatcttcttaggtgtccttttacaaatattaacttatttgtagaaaggagttattatacttaagatattactagaaacatacttataaatattatgcagattcattccttatgatcaaatgcatgcrcacattggggagaaaggctgtggggaacaagaaaagaaaccaacacccactgagtgactaatgtgtcaggaagtaggtaagggtcttc

SEQ ID NO: 310650 - DNA, 594 bp, Homo sapiens
cttcaatgtttcattatcattaattcatgcatgtattcagaaaatatatatttaggacctactgtgtagtaagactagtgtctaagggataaagaaagtaaaatatatttttaaataacatctgttttaagatcttacaaacttaggaagaaaataagaacttggtcaagggagaatgcttacatgctccaagagtatagacaaatgtttttagaattaacaggagggaggcactgattatgataatcaatggtgatggggctsgtggttttaggcattgctttggtaaggagacagaaagtgagctgggccttgaagtatgttaaaggcatgagaatattgaaatgggaaaggaaaggaggtgactacagaaatattgttaagtcagggaacaaagttgaggaaccaatgattgttggtaatcttgaattgataatgcccaattgctcaattatgccatttattcttggtattttcaggatataggggataggcacagaaaagtcagtagggattcacccaaccaccatggagaaggtggatgccattgaaggtcaaagaaaagaacaagccaaacagtggttgaaaaggcag

SEQ ID NO: 310651 - DNA, 601 bp, Homo sapiens
agtgagctgggccttgaagtatgttaaaggcatgagaatattgaaatgggaaaggaaaggaggtgactacagaaatattgttaagtcagggaacaaagttgaggaaccaatgattgttggtaatcttgaattgataatgcccaattgctcaattatgccatttattcttggtattttcaggatataggggataggcacagaaaagtcagtagggattcacccaaccaccatggagaaggtggatgccattgaaggtcaaagaaaagaacaagccaaacagtggttgaaaaggcagagtatggaatctaagatggagaacatcaaaaaagggggcaaaggatcaaccagcatcctgcatttagaggattttagggcatggtgtcttcaaggatcaactagatgtcagtgtaggcaaagagagggatcaaagctagcatgtattttatagatggaccttgtggtctacaaaggtaaattccgtaagacacagtgagaaaaaggagtagatgaygagagagcaaactcacaaaattgctgtgaggagagaaattctatctgaacgactgacatagtggttgagaaaaattgcaacagggggcac

SEQ ID NO: 310652 - DNA, 450 bp, Homo sapiens
actgttaaagaggaaaggagttgtgagattcttcttcatcttacatagatacagaaactagttgggacggccaatgtcttgtccaaaatcacaaagctagtgccaatgagcccaggtttcaagtccagattatcctacttattttattaatgaaaaaggttcagatatatacatttatgaaaagaaattttatttggcatcaataagaagaaaaatgattgatcatgcaacaamatgaattaattttacagacattacactgagttaaagaagacagacacaatgaggacctattatatgaagttctacaacaagcaaagtgaatctgtggtctatggtgatagaaggaaaaaagggattacttttttgtggttgcagaaaaacttactggatagggccatgagagaactatctggagtgatggacgtattctatatcttgatccatatg

SEQ ID NO: 310653 - DNA, 468 bp, Homo sapiens
aaggttaagacaattgcccaagaccacacggctggaaagtagtggaatcagaattcaaacatcaggcagttkggcttgagctcctacatgctaaaccaccacacacactgcctcttatcatgccaggggctcatatcctatgacacttaaatatagaaatattaagatctgcgtattctgttttagccacaaaatattacctgccaaaaggctggaaaacttgggagagtcactgctctgatacagaaacgataacacagcagcacttaactcttctgccatactcaacacaaccaacaccacactggtcccttctatttttaaacaaggtttcattggaggcttccctgatcctattaaacattcctaatcctgatactcatttgctcagcaaacatttcctaagggtctgcaatgaatgcaggcaatccaatcattcatttactcatttaacatttgaacacctat

SEQ ID NO: 310654 - DNA, 503 bp, Homo sapiens
cagctcttcctttctcactacatgaattcaatttcctcatctgtcaaatgagtataccaattcatatctcgaaagctgttgctgtgagaatcagataagcataacctcacagcttatgtctattagaacagcacttggcacatggtaaacactccaaagtatttgttaaatgaatgaatagattaaaaggtggcatgttttgtactaaactgttcaatgatagtgtaaaaccatttggtcataatgcggaaagggaagtaaggcggaattcctttaatctgtgttttacgcargttccaaaggagcgtggtggagagaaggatgcagatagtctgggtgagagctagaggctggagtcagcaggaaggactgaggccgttggtgcttggggagtgagggctcctttctgctctgtcctaggctaagttccccacccattccttcttgagatctacctcaaacacaaatccctcaattgaccacagggggcgccccttctatga

SEQ ID NO: 310655 - DNA, 503 bp, Homo sapiens
cagctcttcctttctcactacatgaattcaatttcctcatctgtcaaatgagtataccaattcatatctcgaaagctgttgctgtgagaatcagataagcataacctcacagcttatgtctattagaacagcacttggcacatggtaaacactccaaagtatttgttaaatgaatgaatagattaaaaggtggcatgttttgtactaaactgttcaatgatagtgtaaaaccatttggtcataatgcggaaagggaagtaaggcggaattcctttaatctgtgttttacgcaggttccaaaggagcgtggtggagagaaggatgcagatagtctgggtgagagctagaggctggagtcagcaggaaggactgargccgttggtgcttggggagtgagggctcctttctgctctgtcctaggctaagttccccacccattccttcttgagatctacctcaaacacaaatccctcaattgaccacagggggcgccccttctatga

SEQ ID NO: 310656 - DNA, 621 bp, Homo sapiens
atagaacatgctagtatttataaaatgctcataaattcttggcacaaagtaagctatrgactcaaaaatggtgattccagacctcaagaaataagaacttgaatttcagagaaatcttcccttattatccctgaggtccactccatagcttgatcaaagaagtgggatactatgtagtagactagtgtggcagcaccttaaacccacaaataagtttggctgttgtaaagagaagggaaaccaaaattatttcaggacctactatgtgcagagtttttatctgctatatacataggcatatgctattccatcagtggttcagagggcataaacagttaataaagctatctcagggatgattaaattgagagttgctcagggtcatacaatttttgagtcaggaattaaacccagggctatttcattccaaggcccatgttactttctggtaaaacaaataaccatgaaatataatatattttctttgaatccctaatagtgggtgctattatacccccaattacttaaattgatcctgtacattgccaagagattaaattataaattattgagttcaaaaagttaatttcttcctccaaagagatggcatcttacagttta

SEQ ID NO: 310657 - DNA, 597 bp, Homo sapiens
ccaaataatccctgaatagtgaaggatttactattgcacatttaaaatgtgtaaaatgttttaacattgtcttacaatgatgtctttattattatatgttagtaaattaaatatttacttataagttgtrtagatttattagcaacctcagttcttcatcccacttttttaggttcctgaaattaaattacatagtcttgttagaaatgcttgttccccggtgccataaagaaatagcacttgaacataaatttaatttcctcagcaaggcagtttttacctattgcagaaagggtacacttgccagcagttttgccacaagagtacaccgaacaaaggagacagggtcatttataacctgacccatccaccttcctgctgtgtccactttccattggctgaaacgggacctcacattctgtatttgtcctgattggctagcaacttaggactctttaaaagagtcaaaggcagaggagaacaaaggaaggaggaagtaacttgtggcatgctgacaaaggtaaaaacaccttaaaataaagaagaggaacaggctatgacctaatgcttgcttggaccagtataagcatgccaggg

SEQ ID NO: 310658 - DNA, 554 bp, Homo sapiens
agtttgttcaatggacacctcatgctgagtagaaatggaaaggaaaaatataaataaacatctgtgctctcaaagattattcaatctagatgagaagatgaaatacaaaagagaataaaggcaaacaggtagagggaaaaaacgtaatgaatttgtcttggcagaggactttctttgaaagcacttggagtagaagaggtataatctgaagttgttgcggtcagtaaacagaaagacccagggaggcagaaacttactctgcatgagtgagaagaaaggattcattaattcaatcctgaaaagaagggtgagagaaggaagagaaattaagggttgatcaggagatgggcagtccaggaagagaagaagagtcwgggactattgaagagccactattgcatattgcttagggtaggggagggaagacaatagacttttttttttttaaatttttaaatttagaaatttattctgtttaatccacaagctttatatagctttagtttaaaaaaaataaaaaaaaaaaatcaaaacaaaaacagtgaaaccgagac

SEQ ID NO: 310659 - DNA, 554 bp, Homo sapiens
agtttgttcaatggacacctcatgctgagtagaaatggaaaggaaaaatataaataaacatctgtgctctcaaagattattcaatctagatgagaagatgaaatacaaaagagaataaaggcaaacaggtagagggaaaaaacgtaatgaatttgtcttggcagaggactttctttgaaagcacttggagtagaagaggtataatctgaagttgttgcggtcagtaaacagaaagacccagggaggcagaaacttactctgcatgagtgagaagaaaggattcattaattcaatcctgaaaagaagggtgagagaaggaagagaaattaagggttgatcaggagatgggcagtccaggaagagaagaagagtctgggactattgaagagccactattgcatattgcttagggtaggggagggaagacaatagacttttttttttttaaatttttaaatttagaaatttattctgtttaatccacaagctttatatagctttagtttaaaaaaaatmaaaaaaaaaaatcaaaacaaaaacagtgaaaccgagac

SEQ ID NO: 310660 - DNA, 594 bp, Homo sapiens
attttgaaattgaactgcgtacaaaccaaataaaatttacatcataacaaacatttccccctaagactgtggggacacttgggccttcctcattgatctcagcagagacgccaatacagacgacaaaaccagcagtcttcatctgactctggttcctccttctcctcagaagatgaacgacccaagagatcccatgtgaagaatggtgaggttggcaagcggcggagacattccccttcccggagtgcttctccatcaccacgaaagcaccaaaaagagacttcccctcatggtagacggaggagaagtccatccccaccacccaccagaaggcgacggtctccttctcccgcccctcatcctcgacggctcaggactcccacaccaccaccaccacgasgaaggactccttctcctcccctacgtcggcgctcaccttctcctagaagatactctcctccaatacagaggagatactctccttctccacctccaaagagaagaacggcttcacctcctccccctcctaaacgaagagcatcaccatttccaccaccaaagcggcgggtctcccattctccaccttccaaagaa

SEQ ID NO: 310661 - DNA, 627 bp, Homo sapiens
gatcaggacgagaatcgtctctacatttattgtgctttcactgtgtgctggaaatggatcttcatattctacaaacagaatctcactaaatccctgctccacactgtgagggaagcacaactgcactccccgttttacagccaaggaaactgaagcacaaagaagctaaataacttgcccgaggccacacagctggtgtggggcagggccaggattggaacccaggcacccggaagcaggcaggctcaccttgtcatggacctgacggtgaggggccgtgtcctgcagcctctgggctcagcggcccctttcaaaggaggggtttcatgctggcagtgaggttgaattgggtatcagagttgtgccccttatggcctccaagggggmaactccatcccctctcaccccacctccatcactgcagccacttgcccgagtctgctcagcccccagaaactttttgcacacctgtgtgtcccaccctgagttgagatggcaacaaggtggcagagagctctcccagaacgctgctccctccccagagcccagcacgtcaccctgcttctggggcctcccctgggggccgagagtatgttatccctgattaccctcaacactccccaaata

SEQ ID NO: 310662 - DNA, 575 bp, Homo sapiens
aacatttttattatcatgccctatattaacatctttccgttttctgtttcatttctctatgctttacagttctttcctgagatcacctcccaaatccacaactttcccttttcatccttttctcagtttctgtttctggtcgaaccctaaactaaaacactctcctcttctgatagagctgtagcaaaaattatatgtaaaaatgcttttaaagtgacttgaggggtgttctctcagaagcagggagatagataaactacatggcatttaattgttatcttaagctatttcattctatttccaaatatatgaccatgtgtttttacactcattttaatgggaatttatatctcccattagatgtgactccacaaagaaagggaaaagatgtctggctggcaccctgaacctctaaattctctatcagttgcccaaagtagttctgagtgcacaaaaatataaagaagaaacaatacaaaaaawtgtgttaattatcttgggtctttggcctcgaatcctgtgtggagctcttggatcttgttagccaagctgtgctggcttctggtagatagata

SEQ ID NO: 310663 - DNA, 545 bp, Homo sapiens
tcttccttcaggctaggtgactgcaaatctccctagaaactgctatagccacatgtttataataaacattcaaggccagtagaatactgagagagtgtacttaggatacaagttcttgattccaagcccctgatcaaactagaggaaaaacttggaggccaagaatttgctttcttttactagtttaaatgtaagacttgacccctaatttttgatcatcccaggggaggaggtggcaattctccaatcatgcagcttaaaagtcttgaaagccaaaggttaggatgcttctctgagtcaaatgttgcatcctaaaaggtccatctgcattgttctagaattaaaagggccacagatgatcatacacttgctkttgtctctgtgcatttctccaataaatgccgtctcagaagacctagtatatatgctattagatcctttgcccttacttgtttgacagtggtttacccaatacgtgctttttactaatccctgagatacagaactccagtgattacaggtctaacatgagtggagttaatgag

SEQ ID NO: 310664 - DNA, 647 bp, Homo sapiens
gtgcttcaccttgcctgcgctatcccacttgatccatacattagccctccatcgttgctgctactcctaattatacaaatgaaggtgaagaaacgaatgaagaaacagcccccaatgaagttaagtgatttgctagacttgggattagaatccatatctgcttggctacaaagactcaattttttgagcccaggatgcatttgcttattaattataccttttctcatgttatttgttgttccattaaccaagaaaatatatatcccaaggcggcatcttatcaacactgaatcacatatmgaattattcatgacaaaagtgtacaattaaaaggaaaaattttgtatgatttcctttggatacttcagactaaatccttgctgttacttgatttttgatagaagtattggttcccctgggatgtaacacacctgttcttgtgcaggtcctaaacaagttgagaaataagatgaagggtagggtatatggaaaacagaaaatattgttgttttaactgataaaggccaagttgtgagggccaaagaggtttggtaaataaaccacagaattagtcagacttaacttacctggtcaaggcactgacagccaccagtgttgggaacagcctgctcccaagaacaacaggg

SEQ ID NO: 310665 - DNA, 647 bp, Homo sapiens
gtgcttcaccttgcctgcgctatcccacttgatccatacattagccctccatcgttgctgctactcctaattatacaaatgaaggtgaagaaacgaatgaagaaacagcccccaatgaagttaagtgatttgctagacttgggattagaatccatatctgcttggctacaaagactcaattttttgagcccaggatgcatttgcttattaattataccttttctcatgttatttgttgttccattaaccaagaaaatatatatcccaaggcggcatcttatcaacactgaatcacatatagaattattcatgacaaaagtgtacaattaaaaggaaaaattttgtatgatttcctttggatacttcagactaaatccttgctgttacttgatttttgatagaagtattggttcccctgggatgtaacacacctgttcttgtgcaggtcctaaacaagttgagaaataagatgaagggtarggtatatggaaaacagaaaatattgttgttttaactgataaaggccaagttgtgagggccaaagaggtttggtaaataaaccacagaattagtcagacttaacttacctggtcaaggcactgacagccaccagtgttgggaacagcctgctcccaagaacaacaggg

SEQ ID NO: 310666 - DNA, 581 bp, Homo sapiens
ttatcttggaaaggtagagctacttcattagcggtactgcagatgcacctggtgaacaaaatatacattttctcttttttttcataattggacctgctgagattgagtggagcacatgtctatccatctagagaggacacttgtcagactcccctatagttgtagccatatgactacattgtaaacagaagtttgttacaccctctcctagtctttccattaagataatttgagtgtgtactaccctggctttttctcccttcctgctgggtgggagattgtgtatatggaagtaacgactttggacttgaaaatataagcaacattttggagatggaaaaatccatctagtcaatccagagtaggtgaagaaacattytactactcacccacctcttaactctttctttctttctttctttctttctttctttttttttttttttttttttgagacagagtctcactctgttgcccagcctggagtgcagtggcacaatctcagctcactgcaacctctgcctcccgggttctagtgattctcctgcctcagcctctcaagtagctgggattatagacac

SEQ ID NO: 310667 - DNA, 444 bp, Homo sapiens
cagaaagtgggatcttgaatgaatggtactcacagaggccagttttggttaagagtacaaagatgggccaggactaagtgaggagatccagtggagctagcagggagggccacaggggagggccacgtacatgactgtgggatgaattcagccttgactcagttcctacttccaccaaagtaaggagtgtacagcatcattgtgccatctggatatttttgtttcacggaaactccctagatgttaaccacatcctgtyttccttcaaagcatcacttaaacatacagtgtttagcatacagagtggggatactaagtcttctttctctacatctccagcattccttgatcccaacttaattctctccacttaattttgacgaaaaatttaactttctaccttcttcttggctccatagctacctttgcatcactgaagactca

SEQ ID NO: 310668 - DNA, 588 bp, Homo sapiens
aacactaggcagatcattgaggtagaaaataaacaaagaaactctggacttaaactggactctagaccaaatggacctaatagacatttatagaacatgctaccaacaactgtaaatatatatttttttcatctgtgcatagaacatcctccagaattgaccataaagcaagtgtcaacaaactggaaaaaattgaaattatatcaagtgtcttttcagaccacagtggaatacaattagaaatcaaaaccaagagaaactcttagaattatacaaatacatggaaactaaacaacttgctctggaatgacttttaggtaaacaataaaattagggcagaaataaaaaattatctaagatggatgaaaatggagacacaacatacccaaacctctgtgaaggcaatgcaaggaggaaaatttatagcagtaaatgcctatatcagaaagataagaaaatatcaaattaaaaacctaacatcacacataaaggagctagaaaaacaagaasaaaccaaacacaaagctagcagaagaaaagaaataacaaaatgagagaaaaactaaatgagattgagacccccaaaaa

SEQ ID NO: 310669 - DNA, 569 bp, Homo sapiens
aatcctaagcaaaaagaacaaatctggggacatcacattacctgacttcaaattattttacaaggctatagtaactaaaacattatggtactttgacaaaagtagacacatagatcaatggaacagaatagaaaacccagaaataaaaccacattcctacaaccaattgatcttcaacaaagtcaaygaaaataagcaatggggaaaggactccccattcaacaaatggtgctgtgaaaattggctagccatatgtagaagaatgaaactggacacctatctctcaccatatagaaaaattaattcaagatggattaaagatttaaacatcagacctgataatataaaaaatctagacaaaaacttagaaaaaaaaacacttttggacattgacctaggcaaatgatttatgactaagacctcaaaagttaatgcaacaaaaacaaaaaccggcaaatagaacttaaactaaaaagcttctgcacaccaaaaatataatcaccagagtagacagacaatgaacagaatgggagaaaatatttgcaaattatgttttgaacaaagaacta

SEQ ID NO: 310670 - DNA, 582 bp, Homo sapiens
tttcacgatagccaacagatgcaaagaacccaagtgtccatcaacaatgaatggagaagcaaaatgtattatatcccttcaatggaatattattcagccataaaaagggatgaagtgctagcacatactacaatatgaatgaattttgaaaacagtaagtgaaatgaaagaaaccagtctcaaaaaagccacatataatgccatttgtatgaaatgtccagaatagacaaatatatagatacagaagtagattcgtggttgcttaagcctggggatatggggagcttggggtgtgacagggaaaggttgtgcgactcctttttgaggtgataacatgttctaaaattgtgtggtgatagttgcacaactctaaaaatgtcattaagtggtactgtctaaataggtgaattttatgatatgtgaattacractcaatacaactgtaaccaaaaaagaaaaagaaaaaagaactcacagctcactctgcttctgcacagcacaagacctccttgctactctagttcagcaagtatccacccagggacgtgacaaatcctgcagtagcaaatccactggctgagt

SEQ ID NO: 310671 - DNA, 430 bp, Homo sapiens
aaatgttaagtaacttggtaaaggtcactcaaattgtgattggaggtcttcaccttgagacgtcagtaactactgctcgaaagcccacgctcataatttttccactgtattgactcacagaaattatggggcagattggctcatctataaattgtgtttaattactacacagcttttcatagctctcctgcttgtgtaatctattgccattttacaagcgtatattctcttgaatgacaaacacatgacattaaaaataaaggaagcagagaaatggagtggagagaacaatttatagcattttccaaagcttttaaaaccaagttattagatgtcgtttaacattttaaaatctccatcctttaaaatgcataaggcctkaaattaaagcaaaagatttagagagttccaaacacagagccagcagcac

SEQ ID NO: 310672 - DNA, 380 bp, Homo sapiens
tccttctactgacatctcaagttctttgcttgtcagggttataaaatctgtcatgttctcggatttcacgggtttgtaacgaggatggctgcgcaagtttctcctttgtctgattgcccatttattcattcatggctgtcaaacactagtgggtggaggttcctgttccyttccagatgtactgatgaatgctttttggcttgctgaccttcttgggatttgaagagttacccatgagggtaaaactttcttccagactttgcctaccttatagaaatcattattagtactaacattgttaggggtcttgtcattttaaatacaacaaattgttcaaatgagtggtaaaatttaaatggaaaatagtgaaaatacttact

SEQ ID NO: 310673 - DNA, 525 bp, Homo sapiens
attgtaaattattaatagtgacagcttattatgtatccctgtagaaaaatacatggggaacacaggaaaatccactggttagttagattaaaaayaacatggcaaaacaccatctctacaaaaaataccaaaactagccaggcatggtggtgcacacctgtagtctcagctactggggaggacgagcaattgcttgagcctgggagatggagattgcaatgagctgagatcgcgccactgcactctagcctgggtgacagagtaaaactttgtctcaaaacaaacaaagaaacaaagaaacaaaaagcacaaaacaaaaaccaaccagaccacttgtgtgtgttatgtgaattatgtgactgaaattttcactttgaacaagttgtgctaatatggtgaaaacacagactacctcttgtgcttacacttgattaaaaaagaaaatgagcacagaaatatttgtgtattatattctatttccctctcctcatttacatcttttttctttgtttttttgtttgctta

SEQ ID NO: 310674 - DNA, 559 bp, Homo sapiens
ttaaagtataataataaaaaaaaatgtaatagagaagaaaaataaataaaaatctaaaaaaaaaaaaagaatatgggatcacagatcgcaatgaaatgaatgggatgaaattctctctgtcatagcacttgaggacgaatccaccagtggattccatccaaaaggctctgaaacaacaagggacttagtgcaggctgtggtccttggctccttggatagtaggcattcaatgaccaagccrctttcatttttgatgttatgcaattagatattaaaatgaaaaagaagttatcttttgaaaacactacttttaacagcatgtggcataccatttgctatcttaattccataatttcaaattgtagttttcaattagggtctgccaatcatttccagcctccttttgggatttcaaggagcttatgttctaacgtggtattttgtgtggatagcagaataaactaagtgtggatgggttggtccagttgttaaggacatgggtgctaatgagacccagggggtgggtttggcctctgcctgcaagcggaacagtagatgg

SEQ ID NO: 310675 - DNA, 626 bp, Homo sapiens
ttactatcaaacactagaagctagatgaggcaaagaaggattctccccsctagaactgtcagagagagcatggctttgccaacccctttatttcagacttgtaactcccagaactgtgagacaatagacttctattgttttaacccatccattgtttggtgctttgctatggcagccctgagaaactaacaaacctgatgctataaaataacagccagttccttaagactaatatacattaggcaatgtgctaagcatgttttttagttttaattttttaactgacaaataaaaatgttatgaccatcctggctaacacggtgaaaccccgtctctactaaaaatacaaaaattagccgggcatggtggtggacgcctgtagtcccagctacttggggaggctgagacaggagaatggtgtgaacccaggaggtggagcttgcagtgagccgagatcgcaccaccacactccagcctgggcaacagagcgagactctgtctataaaataaagtaaaataaaataaaatgagttatatattcatgtcatacaacatgaggttttgatatatgcgtacattgtgtaatcactaaatcaagccaattaacatatccattatttcacatt

SEQ ID NO: 310676 - DNA, 626 bp, Homo sapiens
ttactatcaaacactagaagctagatgaggcaaagaaggattctcccccctagaactgtcagagagagcatggctttgccaacccctttatttcagacttgtaactcccagaactgtgagacaatagacttctattgttttaacccatccattgtttggtgctttgctatggcagccctgagaaactaacaaacctgatgctataaaataacagccagttccttaagactaatatacattaggcaatgtgctaagcatgttttttagttttaattttttaactgacaaataaaaatgttatgaccatcctggctaacacggtgaaaccccgtctctactaaaaatacaaaaattagccgggcatggtggtggacgcctgtagtcccagctacttggggaggctgagacaggagaatggtgtgaacccaggaggtggagcttgcagtgagccgagatcgcaccaccacactccagcctgggcaacagagcgagactctgtctataaaataaagtaaaataaaataaaatgagttatatattcatgtcatacaacatgargttttgatatatgcgtacattgtgtaatcactaaatcaagccaattaacatatccattatttcacatt

SEQ ID NO: 310677 - DNA, 630 bp, Homo sapiens
tacagcaaagtttccaggaacacacaatggggaaagaatggtctcctcaataaatagtgttggagaaaccatatatccacatgcagaaaaatgaaactagaactttgtctcacaccgtatataaaaaatcaacttaaaatcaattaaagacataaatgcaagacctgaaatgtaaatcttatagaagaaaacatagggaaaaactccatgacattggtctgggcattaattttgtggatatgaccccaaaaggacaggcaatgaaagcaaaattagacaagtgagattgtagcaaaggaaacaatcatctgagtgaaaaggcagtctacagaatgggataaaatatttgcaaaccacatatatgataagtggctagtatctaaaatatataaggaattcaactcmatagcaagaaaacaaataacctgattttaaatgggctaagaacctgaatagacatttctaaagaaaagacacagaaatagccaacgggtccatgaaaagtgctcaacaccactaattgtcagggaaatgcaaatcaaaaccccaaggatatatcacatcacacttgttggaatgtctgttatcaaaacgacaaaaaataacaagtgccggtaaggatggggagag

SEQ ID NO: 310678 - DNA, 368 bp, Homo sapiens
aaattatgaaaaaataagttgtcttaatgtccacatcaatttagcaattcaatttttatatccatcaaatcgaggtgaattcttttactcaggcaggataatcttcttgatttggtcagactgagctatttcctagttcctgtatgtactctctcactttgcctagatttcccttcccccatctgtycatacacaaattccatctatccttcaataacaatttaaatggcacctcttccattaagtacttctcataatttcaaactgaaaatattattaactttttaaaattgtagctttttggttatgaaacttgccataatgatcattaattaatttcaaatacagaaagcctgtttaaagttcca

SEQ ID NO: 310679 - DNA, 453 bp, Homo sapiens
aaaatattatgaataaaactctgacaaagaatataatgagaacaattacttcgggtgatcagagggagcctctctaaggaaaagtcatttaaactgagacctgaaagtgaaaagaagccaaccctacagagtctggtaaagagccttctaggcacagggacgttcacctgcaaacctttcagcaatgtttcatgcacagaatggtaggcagtgaaagaaagtggtattagccaggctaaacacagaatcctatagcttatggtaaggagttgaactttttctttaacacattgggaagacattgacrtgttttgcgtaaacatgaattgatttgtctttagaataaatcagactggctgtttatttaaaaggtttgacagctggaagacagctggaagacatgtgaaagttgttgctataatacaggggcttgggccagggttgcagcgacag

SEQ ID NO: 310680 - DNA, 447 bp, Homo sapiens
ttccttgttactgtttctaatgatgacaaatatattccaaatccaaccacttattacatctccattccaacatcattaccatcatttccccaaagattacagaatagccaaataattatttggttcctatactagtccattttcatgctgctgataaagacatacccaagactgggcaatttataaaataaagtctaatgaacttacttasagttccacatggctagggaggcctcaaaatcatggtggaaggcaaggagaagcaagtcatatcttatggatggcaataggcaaagagaaagcttgttcagggaaactaccatttttttaaaccatcagatctcatgaggcttatttaccatcatgagaagagcatgggaaacacctgccccatgattcaattacctcccaccaggtccctctcacaacacatgggaattcaagatt

SEQ ID NO: 310681 - DNA, 620 bp, Homo sapiens
acattaagaaacagagatgtgggtcctgaactttaatccatttctacttcaaaaaaatctataatatatattgtaattctctttttttctgtttcacatatctattttatatccaatccttttaaaatttctgtattctagaaaaacatgttaattttttaatcaaacattgagttgtctttctgtagcttcaattctgctgtgtatgacctcaactgaatttaaattgctcatatttcattttawgttttctagcattttaaagttatttcagcctagttatattcacttagctatcattcatgaaattctagtttattttatggccctgaagattggctctaagccaattctaactgagatattatatagttacagtagacaattacttaaaatttggtgaggacaaattaatgttacttgggaaagttataatttctaattcttaatgtatatgttgctaagaagggatatcataacttatataccctgttgtctcaatatgatgtttctataatacaaaaatactgaatgcaataagagaaaatgtcccagaatgtaaagcacaaagacaaagtattaagaatataaaagagagttatgagacatggaaaatcaaa

SEQ ID NO: 310682 - DNA, 571 bp, Homo sapiens
attagtcaaaggaataatataagactatttaccaaagataagaaaaaacacaggccttcaaattaaaaatattcagcaatataaggtaaaaaaaaaaaaagacccacacttaggcacatactcctaagttttttgaagctggaaagaaggatcctaaaagcttatgaaagcattttataayagaataaaattggaggagctagcaaaaatggctgactagaagcagctacagtgcatggccctcacagagacgaacaaaaggggaaagtaaatacagcaacttcaactgaaacatccaggttctcacattgagactgatggggaaaacagttcaaaccacagagaatgagaaaatcagggaagagtggtggcccacccagaagcaacacagaggcaggggacccccccgccaccgacccagggaagcagtactggaaaatccaaagtgactggggactggagcagatgcccagcaaatcatagcagccctacagaaaagtggccagactattaaaaggaaaaacaaaacaaaataaacaaacaaacaacaacaacaacaaacacaaacccc

SEQ ID NO: 310683 - DNA, 604 bp, Homo sapiens
gatcagcaacttcaaagattgaaggtagttaagttcacaaagatgagaaaaaatcagcacaagaacacagaaaattcaaacagccaggatgccctctctcctgcaaaagaccacatcacctctccagcaaaagtttgaaatggggtgaggctgatatggctaaaataacagaaatagacctcaggatatggataaaaatgaactccactgaactaaaggatcatgttctaactcaatgcaaggaagctaaaaatcatgataaaatattacaagagctgaaaaacaaaatatccaggatagagaataacgtaactgacctgatagagctgaaaaacacaatatgagacttctataatgcaatcacaagtattaatagcagtatagaccaggcagaggaaagaatctcagagtttgaagactgtctttctgaaataagacaggcagacaagaatagaggaaaaattatgaaaaagaaggaagaaaactctgtatataaagagacmaaatctttgactgattggtgtacatgaaagagctggggagaatggaacctatttggaaaatgcatttcaggatatcctttaggataactttcccaaccttg

SEQ ID NO: 310684 - DNA, 561 bp, Homo sapiens
ataactaatggatactaggcttcatacctggttgatgaaataatatttacaaccaatccccatgacacaagtttacctatgtaacaaaccttcacatcctgcacatgtaaccctgaacttaaaataaaagttaaaaataaatgaataatattttaaaaacagaataaaattgactattttattctagaagtaagaagttgaatgacaacatgtttttcaacggcaacactggatgataaaacaggagacatccctcacttaaaaattttcagaataggccaggtgcaatggctcatgcctgtaatcccagtgctttgggaggccaagrcaggtggcccatgcgtgtagtcccagctatcgggaggatgaggcaccagaattccttcaacccaggaggtggaggttgcagtgagttgagattgcaccactgcactccagcctgggccaacagagtgaggctctgtctgtccccaccaaaaaaatttcagaatatcaggaaaataaaacttacacaagagtgggcataacatttctctgtaacagcttagttacttgtatggt

SEQ ID NO: 310685 - DNA, 561 bp, Homo sapiens
ataactaatggatactaggcttcatacctggttgatgaaataatatttacaaccaatccccatgacacaagtttacctatgtaacaaaccttcacatcctgcacatgtaaccctgaacttaaaataaaagttaaaaataaatgaataatattttaaaaacagaataaaattgactattttattctagaagtaagaagttgaatgacaacatgtttttcaacggcaacactggatgataaaacaggagacatccctcacttaaaaattttcagaataggccaggtgcaatggctcatgcctgtaatcccagtgctttgggaggccaagacaggtggcccatgcgtgtagtcccagctatcgggaggatgaggcaccagaattscttcaacccaggaggtggaggttgcagtgagttgagattgcaccactgcactccagcctgggccaacagagtgaggctctgtctgtccccaccaaaaaaatttcagaatatcaggaaaataaaacttacacaagagtgggcataacatttctctgtaacagcttagttacttgtatggt

SEQ ID NO: 310686 - DNA, 561 bp, Homo sapiens
ataactaatggatactaggcttcatacctggttgatgaaataatatttacaaccaatccccatgacacaagtttacctatgtaacaaaccttcacatcctgcacatgtaaccctgaacttaaaataaaagttaaaaataaatgaataatattttaaaaacagaataaaattgactattttattctagaagtaagaagttgaatgacaacatgtttttcaacggcaacactggatgataaaacaggagacatccctcacttaaaaattttcagaataggccaggtgcaatggctcatgcctgtaatcccagtgctttgggaggccaagacaggtggcccatgcgtgtagtcccagctatcgggaggatgaggcaccagaattccttcaacccaggaggyggaggttgcagtgagttgagattgcaccactgcactccagcctgggccaacagagtgaggctctgtctgtccccaccaaaaaaatttcagaatatcaggaaaataaaacttacacaagagtgggcataacatttctctgtaacagcttagttacttgtatggt

SEQ ID NO: 310687 - DNA, 561 bp, Homo sapiens
ataactaatggatactaggcttcatacctggttgatgaaataatatttacaaccaatccccatgacacaagtttacctatgtaacaaaccttcacatcctgcacatgtaaccctgaacttaaaataaaagttaaaaataaatgaataatattttaaaaacagaataaaattgactattttattctagaagtaagaagttgaatgacaacatgtttttcaacggcaacactggatgataaaacaggagacatccctcacttaaaaattttcagaataggccaggtgcaatggctcatgcctgtaatcccagtgctttgggaggccaagacaggtggcccatgcgtgtagtcccagctatcgggaggatgaggcaccagaattccttcaacccaggaggtggaggttgcagtgagttgagattgyaccactgcactccagcctgggccaacagagtgaggctctgtctgtccccaccaaaaaaatttcagaatatcaggaaaataaaacttacacaagagtgggcataacatttctctgtaacagcttagttacttgtatggt

SEQ ID NO: 310688 - DNA, 584 bp, Homo sapiens
gtcaatcacatctgaggtctaatctgtaacaattcatgatccattattcccatatattctgtaataactaaaacaaacagatcacaatggagtcaactcacaaaatttgttccttatttttttctcccatcttcctgccccaaagcaatgttctcattggttctatgaatgtatgctaatatatctagaatttctaacctgtttttcttattatgactattkgcttttgatctaggatgctatgatgcttagataataagcaaaaaagaccatcatgtttttattgacacaagttatttgaaggcagcaagttcaatacattcttccctgtgaatgtattgaaccttatctggttcctcatgctgacatttgaacataccttcttcctggtatgtttttattcaggttaatttctctatacatggtgaacctaacatttgcttggaagaaaggtttatcttctggtagagaactagcctctgacccagagaaggctcttaaggagcattcacatcatctatagtaaatacatatactatagtaaatggcgctttagaaaagaaggttttcaatcagtcttacaa

SEQ ID NO: 310689 - DNA, 550 bp, Homo sapiens
aaccccatctctactaaaaatacaaaaattagccaggcmtggtggtgcacgccagtaatcccagcttctcaggaggctgaggcaggagaatcgcttgaacccaagaggcggaggttacagtgagctgagatcgcgccactatacttccccctgggtgacagagtaaggaggctcatcccaaaataaaacaaaacaaaacaaaaaacaaaaaaagaaaaagcacataccatactatataaatgcttaagtagtgaaaatttaaagttatgaatatatgtgctatgtactattaaagatataggaatgtgaaatagtaattacagaggcaaaatgtgactatgttaaagatttttaaaacaaaatgatgagtgtgtgaaatattctccatttgaagtaagtgagatttattttggactgtcttatacagctttgattaaacaaaaaatgaaatgaatatacatgaagaaaatattagaaatcagtgatgattaggaaataaagtaaaactaaagacttgagttttggaaaaataatttggactttataacct

SEQ ID NO: 310690 - DNA, 566 bp, Homo sapiens
agacttgatttttacatagaaacagctgcctsgggaagcaatgagtcagtatcctgtcccagttggagttcaaacctttgctaaccagatagctaatgatacagaggcccaaaaaaaaggactagactttctcaagggcttatagctagtaagcagcagagcaaggaggaacacgtacttgcctgcctgtcaggccagtgagtcactgttcatttcatttgtcttgctttctctccagcaatccatcccatacccacaggtacccttttatcttatgcagaatatataagataagggaaaaatacaggagtttatagaaaagatggattactgttgagtagaagcattaaggaaagagttatgaaagagatagtattggagctgtctaaattaaaggatggaaagtgtttaaataaatccaaattaagaacacagaaaacaacatcaagtacagtagctcatagaactactttctcaagtcactggtgcttcccaggaaatggtaccaggactgaaccagtcctgctattatgtttgctattattttgagagtactcctaagaaca

SEQ ID NO: 310691 - DNA, 538 bp, Homo sapiens
aactgttttcacgtacaaaatttgtcaagggttaaggagtcagaatccggataaacacagcccacatacttacatggtcacactgaagtaaaaggtgtaagttcagcataagagcagtgactctggtattgcctcagtgcaaatgctagctctgccacttaccacctctggaagcctgggcatgatgtccgaactctttctgccttagtttcatcaccagtaaaattgagataatactagtacctaatttacaaggtggctataatgattaaatgatgctaagcttattatgtctggcacattttgtaaaatttaatttctacataaatgtatctaacctaccttaagtaactcagggcatttcaacagccatcaccartcactttcttctcattttattgcttacagaatgattctggttgaacccatatttttgtaagtgtgcaaatatttttatagatttgtgcaccttctgtcttctcctttaaatgctatccatctcaggaataagatattatattccttcagaattctaata

SEQ ID NO: 310692 - DNA, 573 bp, Homo sapiens
agcacttaaaaaattcaatcttctacatcttgttctgctacagtaatgaacagtaagaactgaacattaaaataatgacccctgtgtcagatcatcaaagataaatgcrgtatattcagcatgttttgattactaatttaagagttctgacaaaaaaagagggtttctattaataaaagctgtagttccccaggataccctcttttatgaagttaactgagttttcactattcatgttcttctatctttattagagatctatattagcctaaagatgtattaaagcaagtcatcagtgactaaacaagtggaaatattttgtacttctccattaattgaacatgtacggcatcattacacattaaggcattggttataatggttgattgatataatgaaatgtctttagaaatactgatacaataacagtgatactcagaaaagtaaacaaaacaatattcacagtgatatgcttctcttccaaatattttccccaactttctttcaaaatgactttgtttaatttcatagtggtacagtatataaatacctattattaattattattatttt

SEQ ID NO: 310693 - DNA, 582 bp, Homo sapiens
cctgggcaacatagcatgacctcatttctacagaaaaaaaaaaaaaaactagctgagcatggaagtgtgtgtctatagtctcagatactctggaggctgaggcgggagaatcccttgagccccaggaggttgaatgcagtgagccatgatcgtgccactgtattccagcctgggtgacagagtgagatactgtctcaaaaaaaaaaaagaaaaaaaaaaaaaaagcttctttatgtatctacctgattaatataaatgttaaggaataaaagtttatgtgggaaatttcagtttgcgtaatgggcctaacaacaatgtgtgtttttggttgagagaaataaatgagacagcatatacaaatatactttgtaacttgtgttacaaagggatctgccacaggtgtatttgcagtttcacttttaagccctgttaacttttaggatataagtcactaatggtggcatgtcagggatgtgkcaaagtgaatttgggacaaagtggacaaaatacatgataagcacaggacttccgtgtgctgttacagcaggcagtacagagacctcaagaaatttcaagcttgag

SEQ ID NO: 310694 - DNA, 605 bp, Homo sapiens
attcacactcctggctcaaatggtttctggtgcctagcattagatgtgacaataatgatagctagctagtcaaacctactgccttaaagatcaaccaatttgctccattctggttacttggcatggtaaatttatttaactaaaaagaataatggggtgaggtgatgtaaacctggctttcaataagatgcacaacaaattctaataaggccaaaactctgttgaggttaactggtgtcttgagtttactaaaataaaggcagtccataggaagcctcaaagagacattatcttaccacttggcaccacaaaaacaccaagctctcctctctgaaaatacaggccgggggtggtggctcacgcctgtaatcccagcactttgggaggccgaggygggcggatcacgtggtcaggagtgatccgtctctactaaaccccgtctctactaaaaatacaaaaaaattagccgggtgtggtggcacgcacctgtggtctcagctactcgggaggctgaggcagaatcccttgaacccgggaggtggaggttgcagtcagctgagatcgcgccactgcactccagcctgggcgacagagcaagaccccgt

SEQ ID NO: 310695 - DNA, 529 bp, Homo sapiens
tgtttccctttttggaaacagtcaatatctttacccatttttctattgggatttcagtattttcttattgatttttaagaattttatataatgggaagtcacccctttgtgatttgagttacaaatatttttcctggattataatttttttcgagtttacttatagtgaataacttcatgcaaaagtttacttggattttatgtgagagttaggaaggctttccccactttaaaattataaagtaggagaagtgtggtgkctcatgcctgtaaacccagcatgttgggaggccaaggagggaggatggcttgaggccaggagttcaaaaccaacctggtcaacacagtgagactcatctctatctatttataaaattttaaaaaattataaaataatctaagagatattttcaagatatacatttatagtgctgaaaatgaggaaagagaagtggccaaagattacctctacattttttagtttgggagtttaagagatgggggagagttgatctaatgacttaagaca

SEQ ID NO: 310696 - DNA, 347 bp, Homo sapiens
gaaatcggtgcaattcagtcttttcttggctcatgcttggcctccttgtctctccatgccaccccttcatgcttggccccatgtgggccctcaaaccctgagtttcaaacatattaattcatccagmcactggcttagactgcccaccacaatgcttttgctattttgaataactctttttttcttttaacaaaacttatgttttccagactgttgcttcactaaagtctaagtttaagaacatctttaggggccaaaacaatgacttcttggcttcagactccatctgttcatgatcaaaagtgctgcaactcattgattcaatcagtgagaaagcacaggggatc

SEQ ID NO: 310697 - DNA, 605 bp, Homo sapiens
ccctacactgttggtgggaatgtaaattagtacagccattatggagaacagtgtggaggttcctccaaaaactaaaaatagaactaccatatgttccagtaatcccactactggatatacatccaaaagaaaggaaaccaatacatcaaagaaatgtctgcattcccttgtttattgcagcactattcagcactattcataatggcaaaatatggaatcaacctaagtattcatcaacagatgaatggacaaagaaaatgttgtatacacagtaaagtatttcagccataaaaaagaatgcaatcctgtcatttgcaacaacacacatggaactggaggacattttgttaagtaaaataagccaagcacaaaaagacaaatattgtatgttttcactcatacataggagcaaaaaaataaataaaatttaactcatggagatagagactagaatgatggttgccagagsctgggaaaggtagcggggaggagggaataaagggaggttgtttaataggtacaaaactacagtttagatagaatgaataagatctagtagtcagtagcacgatagaatgactaaacagcaatttactgtatatttt

SEQ ID NO: 310698 - DNA, 552 bp, Homo sapiens
cttttcttaaaacatacctgaactaacagaaacatctgacaaagggtatttcctccttctgacctggcagacccaatygtactaaagttatctgaggtgataaaggattctgtgttaagtctctggtaagcccagtaagagaggtgcagtgttggtcctaagattgttgagcaagatcatcctctttgcaacagaaaacaactgtgcttttgaaaaacaatccctggtttattgaaacactgtttttgaaactaagaactgggacatgcatggtgaagtgactatgaaaactgagccacccatcatgagctgggtgtggtaatatccttcatgacatgtggtaagacagatgcaacgacatcctatattgtacaatggaagtgaaatatttaagctcaagctcaagcaaatccaagtttttgcactgattcctctcccttaacttacacctatggcctgaagacagtttctctatgactatttgacttaatggcagaagaactcaagcctggttcacaaagaggtcagtgtgatgtgttagtgctggtcaga

SEQ ID NO: 310699 - DNA, 613 bp, Homo sapiens
aatttgaaaatagcccatcaaaattccatggatttgaactgttttgaagttttctagggttctagtactctggacagggaacaaatcactccaaatttggaactacatgcacaagctggtcttaaacactgcataagggttaaaaggttagatgcaccgctgaaacctgaatacatcaaatattactctctagtttttaaccagtatcactgtatgaaatattttagcccatttttattttgcaactgacaatgaacattaaagataaattaatattttatgtaaacaattattttaagatttaaattttaagtaacttcatcctaatagaaacaagacactaaagactgcagcattattaatttgcaagccaaaatttacaaagatcaagtaatttttgtaaattaaacattaytctactttatttctggaatattttgtacaaactaataaatacagttgaaatttgttcatctgccttattgtatattcatgcccctttgccctatctctttacattattttgataactagcaaattatttaaaacaggaactggactttaatggcaattaagggctaagaaggagaatgctatgctatgataataatcc

SEQ ID NO: 310700 - DNA, 581 bp, Homo sapiens
ctctctgttattaggagtattcaagaagaggcttgagcaaaagagcctgcttggaatatgcagtagatgcctgcattgtactctgagagaacccaatcacttttaacctcaaggactccaggccttcatgaaatctctgattcagaacaatgacgatctttgctctcaaaaatgtttcttttttcttactttctgtttatttttttccaagtgcagactaagaggctagatgacacattctttagaaggggatgtgaaagttcgtggtcaattccctgactgttgagaaagatgccatctaggaccaatcattctctctgaaaaatgccttctggtgcctttgttagtgtcagtcataggaccaactgaatcacccatccaaatgaggaagtttggttcctaaaataaamgttcatattcctataattgaggatagaaacaattaataacaatgatatataaattagtttcacaattattgcagaggtaattggccaggtatttttggttttataatttggaaacacattcaatctttcattcatttattcagtaaatgataattagaacccatgtgacag

SEQ ID NO: 310701 - DNA, 581 bp, Homo sapiens
ctctctgttattaggagtattcaagaagaggcttgagcaaaagagcctgcttggaatatgcagtagatgcctgcattgtactctgagagaacccaatcacttttaacctcaaggactccaggccttcatgaaatctctgattcagaacaatgacgatctttgctctcaaaaatgtttcttttttcttactttctgtttatttttttccaagtgcagactaagaggctagatgacacattctttagaaggggatgtgaaagttcgtggtcaattccctgactgttgagaaagatgccatctaggaccaatcattctctctgaaaaatgccttctggtgcctttgttagtgtcagtcataggaccaactgaatcacccatccaaatgaggaagtttggttcctaaaataaaagttcatattcytataattgaggatagaaacaattaataacaatgatatataaattagtttcacaattattgcagaggtaattggccaggtatttttggttttataatttggaaacacattcaatctttcattcatttattcagtaaatgataattagaacccatgtgacag

SEQ ID NO: 310702 - DNA, 556 bp, Homo sapiens
gacaagccctgtggatattgagatgatgacagttttgtagttccctgaggagctccgagtctggtcagggtagagaaaggtgagcaattgaagtgtaatatgaagtcgtaggtgctgccataggcacctggccagcgtgctgtgagaacagaggggaaaacaatttttccagagaagccttatctaagggagtggcatttgggttgggttttaaaggataaacaggatttcatcaaaaagcgctakactggagctgagtgtatggacatgaggagggtatggaccagatgaaactgaaaaagaaaacagaaaccaactgaaagtacttaggattctagactgaggaacctgccttctagcccataagcagcagaaagccattgaaggcattagagcagatatgtggtgttatcaggtctgcttttccgaaagttaactgtcagaaaggtggaaaatgggctggaggtgggagaggctggagcctagacagcaagctttaggacagatgtaaatagatggaattgtgaggaaaaagtagagctacaggagactgatg

SEQ ID NO: 310703 - DNA, 582 bp, Homo sapiens
ggtttttggactattaaggctgtctcttcttgggtccattttgttacattacttttgtccagaaatttggccattttatttatttaagctactatatttattagcacaaagttacttgtaatattcttttgcaatcttctgaatctcagtgtctatattcatatcttttattcttgaaactggcccaattatcccatagaacttatgttaatcatttgtcttgaataaacatagaaattgacccttccagtctcraaacttgagaaagttacatttgtcttatctgagttcctttctcaggaagccaatcatcaggcctcccagacagcatcaaggaactaaaacataccagatcactgtatctggacaatgagatgccagacccccagttgttatgattgcctaactaaccacctgcttcctgttgaccaacccctcttctttacctctccccagttcctgtttttccatacacggttgtgtttctttcctgctatataaacccctaattttaatgggccagggaaatagatctgaaactgatctcctatctccttggctgcagcccagttaaatgagatt

SEQ ID NO: 310704 - DNA, 577 bp, Homo sapiens
tttggtaacatttttaatattattattttttatcttaatcagttttgacaattatatcgattttattaatattttcaaagaacctaaatttgactttgatgactctggtttatatgaatcatctatttctgatgtaagagcattggtttctgctcttacaatttactatttctttccttctaattctttgacttcattctgtcaccattggcagaacagatgcttatctcattaatttttagcctcttttccattttaatrtaagcatttaaggctataaatttccttcaagtatgctttagctgattctaacaccttttgctttgattctaaatgtttcctttttaaaattttcattatgctttcttcttcatctcacaagttagttaaaacatctttgtaaatttctaatatatggtcttataaaattattttagctatttatttttaacttaatctatcagttaaatgtgcttgcattattagactatatcaaggaccctatatcaaggacccaactacttttcatcacctccattcctaccatcctggtccaagaaattatttcttctcagct

SEQ ID NO: 310705 - DNA, 577 bp, Homo sapiens
tttggtaacatttttaatattattattttttatcttaatcagttttgacaattatatcgattttattaatattttcaaagaacctaaatttgactttgatgactctggtttatatgaatcatctatttctgatgtaagagcattggtttctgctcttacaatttactatttctttccttctaattctttgacttcattctgtcaccattggcagaacagatgcttatctcattaatttttagcctcttttccattttaatgtaagcatttaaggctataaatttccttcaagtatgctttagctgattctaacaccttttgctttgattctaaatgtttcctttttaaaattttcattatgctttcttcttcrtctcacaagttagttaaaacatctttgtaaatttctaatatatggtcttataaaattattttagctatttatttttaacttaatctatcagttaaatgtgcttgcattattagactatatcaaggaccctatatcaaggacccaactacttttcatcacctccattcctaccatcctggtccaagaaattatttcttctcagct

SEQ ID NO: 310706 - DNA, 525 bp, Homo sapiens
tttcattatgctttcttcttcatctcacaagttagttaaaacatctttgtaaatttctaatatatggtcttataaaattattttagctatttatttttaacttaatctatcagttaaatgtgcttgcattattagactatatcaaggaccctatatcaaggacccaactacttttcatcacctccattcctaccatcctggtccaagaaattatttcttctcagctagagactgcaaaagccttccaattgcttattcctgtttctacctcagcccattttactctattgtcataatgatcctatttatccttaagtcagagcatatcactcctttgctccagaccctcccacggctttctatctcagactaaaagccaaaggccttataatgacatggaaggccctgcatgatcagtacctcctattttctctctgaccttctcccctgctgccstctccctcactcacactgcttctgtcatattttacctcaatgtcccttaaacacatcatctcagttgtt

SEQ ID NO: 310707 - DNA, 635 bp, Homo sapiens
aatcattttttgttcttactcagaaccaaactgagtaagaacagactggttttgttcttactcagaaccaaaccaactggagaccacttaagaaattggggctgggtcaatggaaatctcttgctactattagaagagaaggtgtcctctctatgcttttactgtcattcaagtccccttccctgtctctgtcttctccactttttactatctcccagaagctccagtcaatatccatctattgcatttttggacacactgcatgataatgatctgtttatagctgtgtgtcttattagactatttgcaatttgagggcagtgactgtgtgtgtcccaaacgacagtctgctaaataaaagcaagtcttggtagtagtgattcagtagttttctcagtatgagatttccatggttgtactgagaggcataatttagaagttaagaacttggattttggagccagaataccagggttcaaatcccagctttgtcacttgctagctcaatggccttgggtaagtcgtttaactattcttgtattccaattttcttatttataaagttaggatacatttttaactaattttactattttaaatwtcttacataaaatgtacatattttactatttgta

SEQ ID NO: 310708 - DNA, 594 bp, Homo sapiens
tgatgtgcctgcttcccctttgctttccaccatgactagatgcttcctgaggcctctccagaagcagatgctgctatgcttcctgtacagcctggagaactatgagccaattaaatctttttatatatataaattacccagtctcaggtatttatagcagtgcaagaatggcctaatacagaaggcttccatgatatggaaaayagcagaaggatgggaggaaaagggattgaagaatttctggcttctgacataaagccagtataaaccttgtataataatacctccagcatgtaaactagaaaaataagtaaaagtgaactttgaaaagaaatgttataggaatatatgcatttctaggtcttggatctggttacaagtgggagaaatgtctctcctatgaatctacaaccataagcccacattctatcaggtttgggcctgaaacatcacaattaatttaataacttatttatttaaattaataaataatttaaagtggtctcaggtaacaatacccaaagctgtctggcaaaaacaatggaaatattatttggaggattagacttcaaaatcaggcttcagaggattacc

SEQ ID NO: 310709 - DNA, 599 bp, Homo sapiens
caacagaaggcttcttagagagagtaacacttaggttcataaaacaatagaattactaaaatgaaattgagtctcaattttgttgccaacataatcttaatgtgaagatttttagaccrtgactcaaacaaaactgaaaataatctggtacttatagagtataaagcacttgtgctcttctagctcaagtttatggaaatagatccagcaataaaaataaatggcaataatgacttttcagggaaaccagaaatgcttattatgtccctaataagtatttatatgcaatttatggatgtgaagaaaacataattgaatcaatcagtcaatgagttacagtgacaatgccattaagcaatgcactttggagaagaccatggtggcacctcacaaatacgtaacacaaatttatactaaatatagtttttacccaactctatttatagagtgcagataacattaatttatggcccatacatttttataaataacatttcaacaaatattttatttagaatgcatttcgaacactaaaattttgctcaactacagagagttcagcaatagtttatcatttatactgctgagagctagggatt

SEQ ID NO: 310710 - DNA, 502 bp, Homo sapiens
aacaagtaaccttaaaaacacagaatgagtaggagcgacctaacaggacaggagagggaaaactttgaggtagagggaactaaaatgtgccgaaagctcagagttaagaaagcgcatggtatgtctggggagctaaaagaaagctaaaatgtatgaagtgtagtgggcaaggagaaacagaaacttacagagaacaagattataaagggccacgctgaggagtttcaaggatttgtcctaaagataataggaaaccttgcaagattttgtgcctagagtatcataataccttcgcatttttgtatgataacttcaacttcagaatgtcaccattatttctagaatggaaaccgctgtcaagatggaagcagggagaccagttagraaactgttccaatggtcccaaggaatatatagatgatggtagcttgaacttggataatgatatatagctggagagagttagaatcatttgagatcaacttaacagattcaaagtgac

SEQ ID NO: 310711 - DNA, 540 bp, Homo sapiens
attggttctgcttctctaaagagccctgacaaatagaaggacgaacaacggcctgcagatcacaccttgagtggcaccgcccaatctccagtctccatccccaggtcctggcatgctccctatacttagcaagcatttgaggaagagagaaagagaagaactaacaactataactttttgttaaaaaaaggcataaaatgcctagcacatcataaactactagttatttaaaaagacatctcattataatattaratgctggggaagagggagagagaactgagaaaagcaaacaaatcaagtagataagtaagagcatgggatttggagtaagaaagagctgagcttaaattatggttcttccacttactaataaataacttaggcaaaatacttaacttttctgtgactcagtgtcttatgtaaaatgagggacatgggagcataagcatgagtgtgtgtgtgtgtgtgtgtgtgtgtgtacacacacaaatattacttcatatcaggcttacacagagtagatacttgtattagtca

SEQ ID NO: 310712 - DNA, 626 bp, Homo sapiens
atcaaccatccaattttaaggcagcagcctcagaaggaagagaaaaagacatgagttgaattaggtctctctcctttgacagaagggacattgaacaatgtcatgggaaatgggttaagcttcagcctttcaagggatataaactatcactaatgcattccagaagatgaggaatcaaatttacttgctgtgctcaatatcatgagagataaatatgctaataatatgatcagttagggtataacacaccagacttcctccatccaatgactctggtctgcttcaaagtagccacattaggaggcttttcatttacttccactgaaaatgccaccaatccctcaaagagctgggtgcccttatttaagggcctgcaaagcccattcccaaacaacaggcgctatcaaggacaatgaagatcaacaacaggaacacaggatggacrtggccctagccccttccctaagccttggttcctacagttgcaaagatctttatctctgcttcctgaggaaggctgtcaagagaagcaaatgagttagcgtacacacatgtagaggctctcatgcttacccgttctcccctcatcaagtatttatggaggacctataagatgccaggcatga

SEQ ID NO: 310713 - DNA, 610 bp, Homo sapiens
ttgtggcccaaatgctgcatatgtactcattattctgcaataaggttcttaaaagaggtatcttccaaaagccttccctccaaggccatttgctggtgtgtgccatccctcctctaaggaagttttaaggggacaaggcgagaattgttaagtcaaagtatgtgaggctgggtgggctgggtgtggcttctcagaggcagggcccagaattgytaagctttgcaattgtgctacagagaatctgggggggtgtgacaaagatgtttttctttgttcctattgccttaaggttctttgggactattgctttgctaatgaacacagcaaactacacagaaaaagcagccatcaaagccagagttttcactgtggcatgtgggtctacaaaacagcagtcctcatgcccatttgagtcattcatgtcttgacatctgccagtgtggatataatcattgattgttcttttaaagcctgaaatgcttgtaagtaccaggaaacagaaggtgagcttctggacatgagtggaaaagccccggcacctgagtttggtgggacaggacaatgtttgacccactgcccaggactggctttgtgggtgtgcaacttgtgc

SEQ ID NO: 310714 - DNA, 579 bp, Homo sapiens
gatgaaccttgaaaacatggcactaagtgaaataaaccagtcacaaaaggacactgtgattgcaccactgcactccagcctgggcgacagagtgagaccctgtcttagaaaacaaaaaacaaaacaaaacaaagcaaaagacaaatactgtatgattccacctacatgcagtacctagagtagtcaaattcatagaaagtacagtcgtggttgctacgggctgggggatggggaaaagggaagtgagtgcttaacgagtacagagtttcagtttrggaagataaaaaggttctgaagatggacggtggtgatggttgcacagcaacgtgagtgtacttaatgccacaaattgtgcactttaaaatggttaaaatggtaaattaatgccatgtgtattttaccacaatttaaaaaaagactatacagaacctattggtctttacaaaacaaagcaatgaatcttagatttttttccaaaaaagtcaattatatatattttaagtgcaaaagcaaactaaaggaagaacattttgttaattaggaagtgacatgtttgtagatgtgatagaacatagacac

SEQ ID NO: 310715 - DNA, 584 bp, Homo sapiens
agactctcctctctcctggtctagaggtagacacacatgtcccagctgggccagccagattcctcctggcaagtcacatcttgagcagagtgatctgaggactaaaaacaactgcagctgcttcaccctgagcgctgggccctgaagcagytgtccatcggtttcctcctcccagactctagacctgacccgtttctgcctggctctgggcatagacgtccagcttcccctctgactcatgagtcggtatccatccatttcttttagctgagctggtcttggttgcttgcaaccaaagaaagaactcaaactcacagagggcaggtaccctggcacagggaaactcaaaggccccacagtgggaggggaccactttagcaggacttcccagcaccctcagtacctagatgctctactctttcttgccgtatttttagcaggacttcccagcaccctcagtacctagatgctctactctttcttgccgtatttgcccatgccatccccccttttggaacagtctcctctccaacctatacactttgattctgcctgtgtgtgtatctacatttatatatttaatt

SEQ ID NO: 310716 - DNA, 603 bp, Homo sapiens
gttagctgaggagtccgtacagctgtagtggggctgggatacagactgacacccaggaggaagrcttgacattttagtcctggatgatgctgccaggagaaagacaacggtgggaaccttgtggcttcattcagtaagggaggtgctactccactcataacgctgtactgaagttcaggtatcatcttcccttagacaaatgttgattaccaattagatacttaattgtggtggaaaaaataaacatatctgttaaatattttccaaatactgtgttttccatactctcctttccctacatcggccattttaaacttggaatgtatcttacaatgtggtactttagttttccttgtaaatttgtgattgaatttgctgtcttctaatctgtgtatctcccaattctaaaccatttgaaatttgagataaaaggagaaggaagaaagataaatcacacagatgaacaaaaaaaaaaatctctacatactgatcaattagcagtggtgcagaagttctcagctgtgttttcaacaagatgatcttaaaaaaaaaaaaaagtaaacccagagggtttcttttctaaggccctaattaatagtcact

SEQ ID NO: 310717 - DNA, 221 bp, Homo sapiens
gtcttctaatctgtgtatctcccaattctaaaccatttgaaatttgagataaaaggagaaggaagaaagataaatcayacagatgaacaaaaaaaaaaatctctacatactgatcaattagcagtggtgcagaagttctcagctgtgttttcaacaagatgatcttaaaaaaaaaaaaaagtaaacccagagggtttcttttctaaggccctaattaatag

SEQ ID NO: 310718 - DNA, 606 bp, Homo sapiens
tcatcccaatagttgattgctaaataaatataccacagaacctcaatgggggtaggggttaggtcagcccattaaaaccagaaagaamaaaacagtatttatgaacaaaatgttccaatcttctgaaagatcaagtccaaattaaacttttggttggaagcaaatggtaaacacaggtagaattggttataaaattactttaaaaattagtcatttcttcttagaaaaaaatttacctcacatacaagagtatgagtgtaggttttacctttatagcaatatataatttgtttggaaactgagttataactagaggtagacacatcattttgctactttcaaattagccagcatccaatgacagtaatggagcaagaaaggtcatctctatttccgtcttactttgtgttgtgataacttcccagccatcctgagatttatgtaaaaatcttaaaatccatctagagctcaccaaaaagccttcagcgcaccagacgggcctcagataccctgggtcaaagatggatcagaaacacaccagagggaaaagctccaggtgatacagcccccgcgaagaatctttggctatcttcttcaacagggaat

SEQ ID NO: 310719 - DNA, 611 bp, Homo sapiens
caccagagtgaattctatttatggcaatgaagaacactgaccaacatacacagggtataacttctgtgttttaaaatttgaacttatttggaagagctagacgctaccatacaatcttctgcattaacttgattttggtgatttttttatcaatgtcaattctgctaccttcttctcagcagtaagagtagaaataaaacaagagttgaagatgtctgttttctctctttttacagttaacatataattttaaatttaaaagttttataaaatttattgggacatgatttgcatataataaaaataatgcacctattttaaacacagagtataatacatttgaccaatgtatacacccacatacaatagacacacccattgtaaacacaccaatgtataggcccatgacaatgtatacaacaaggtaaccaccatcacattttagatataagaatattttcaccattctgagacatcctttttggtcccttccaaatgaccttccygaccactcatcccacacaaaccctgatcgaatttctatcaccacatatcactttaatctgttctagaacttcgtacaaataggatcatatagtctgtagtgtttt

SEQ ID NO: 310720 - DNA, 624 bp, Homo sapiens
atcttcgtgcaaaagagttcagttcttccctgttgattatgatactagctgtaggtttcccataaatggcctttattatgttgagaaactttccttctgtatgtaaacaattaggggtttttattgagaaagagtgcaaaatgttatcaaccttgtttatactttaaaatttttcaacatgagtaattatttaagtaagggaaagaaggcctgtcagggtgaccagcggtccatgtttgcctggtcctgtcctggtgttttcactgaatttcttgtatcctggggaaattcctaaatcccaggcaacacgagtggctaaaccatcactccaccaattgtattgtcyttacatcttttaggttacattgcctttagctgtctctaatgttaaaggtctagtatttcatctgctcatccacataacaaacatcagctgagtcaacccaccaatgtgtccagctccatgagtacagataagaagaaggctcatccgagagctcacagtcctcatgggcagagctgaccttggcacataattacatcattatcacaccatgtcagactgacggaagccaatgtggtcagcatctgtggggtcctttataaacatctgctgttttcagc

SEQ ID NO: 310721 - DNA, 620 bp, Homo sapiens
gatagtgctattgcagatagacttaaattatttaaaactgtgtgttacatactttcaagaagccactaagatttgtcttaaaaaatataataatatggtcaaatagcagataaaataaaatcatataaacaagagaagaaagaaaaagaggggaaactcaaagaaacaaggaataaattcaaaaaatgaaaaacagcttcaaacatggtaaatattaatccaattttatcaataatctcattaaacatgaatggtctaaatatgccaattaaaagaaaggatatcagagtgagtrcgaaacaagaccggattctatgtcctctacttgccttccactttaatataaagacgtaagtaggtgggaaagagcaggaggcggaaggatgtgccatactaacatttagtccatgtcagtggcagaagtgaaagaaagaaggtcactttatatgctattgctttcacaacctgaaaacctaaagaaaagtgagcattcaccaagactgatgctgcaaataaacagaataattgccagctttagcattaattaacagtttaggggatgtaatttcttaactgcattttaaaaaccaaacatccaaatacattagattaattcttca

SEQ ID NO: 310722 - DNA, 620 bp, Homo sapiens
gatagtgctattgcagatagacttaaattatttaaaactgtgtgttacatactttcaagaagccactaagatttgtcttaaaaaatataataatatggtcaaatagcagataaaataaaatcatataaacaagagaagaaagaaaaagaggggaaactcaaagaaacaaggaataaattcaaaaaatgaaaaacagcttcaaacatggtaaatattaatccaattttatcaataatctcattaaacatgaatggtctaaatatgccaattaaaagaaaggatatcagagtgagtaygaaacaagaccggattctatgtcctctacttgccttccactttaatataaagacgtaagtaggtgggaaagagcaggaggcggaaggatgtgccatactaacatttagtccatgtcagtggcagaagtgaaagaaagaaggtcactttatatgctattgctttcacaacctgaaaacctaaagaaaagtgagcattcaccaagactgatgctgcaaataaacagaataattgccagctttagcattaattaacagtttaggggatgtaatttcttaactgcattttaaaaaccaaacatccaaatacattagattaattcttca

SEQ ID NO: 310723 - DNA, 611 bp, Homo sapiens
aatgtcccctaaagccgccatagggagggaggcagccctgccacatatgggtcttggacttctggaccccagaactgtgagagaatacatttctgttgttagaarctctcgagtttacggcaatttgttatagcagccctaggaaagtaaaagagataccagtatcattttctgtcttgatcaatgtgccatagtgatgtgaaatgttagtaataagggaaactaggaagggctgttaaaagatagaatttatttgagcaaacagggattcattaaccaggcagcaccaaactacaagctctgaagggcttccccaaaggggctgtggggatttatagggtgaatgtggaaacagagcaaaggaactgcttattggttgaagttggaaaatgcacagctggtggcctatgattgccagctcaagttccactttgtttatgtgggaacacagggcactagagccactctaacctaatggtgtaccacttaattattttaacaggggtggacagggattctctgtactatctttgcaacttttctataaatataaaattattccaaaataacaaagtttttaagaagtacaatttagttcaaagaaatgtaca

SEQ ID NO: 310724 - DNA, 611 bp, Homo sapiens
aatgtcccctaaagccgccatagggagggaggcagccctgccacatatgggtcttggacttctggaccccagaactgtgagagaatacatttctgttgttagaagctctcgagtttacggcaatttgttatagcagccctaggaaagtaaaagagataccagtatcattttctgtcttgatcaatgtgccatagtgatgtgaaatgttagtaataagggaaactaggaagggctgttaaaagatagaatttatttgagcaaacagggattcattaaccaggcagcaccaaactacaagctctgaagggcttccccaaaggggctgtggggatttatagggtgaatgtggaaacagagcaaaggaactgcttattggttgaagttggaaaatgcacagctggtggcctatgattgccagctcaagttccactttgtttatgtgggaacacagggcactagagccactctaacctaatggtgtaccacttaattattttaacaggggtggacagggattctctgtactatctttgcaacttttctataaatataaaattattscaaaataacaaagtttttaagaagtacaatttagttcaaagaaatgtaca

SEQ ID NO: 310725 - DNA, 623 bp, Homo sapiens
tttattgtattagttgattttaacactgctatacagatactaccccagactgggtaatttataaacaaaggaggtttaattgactcacagttctgcatggctgggaaggcctcaggaaacatagttatggcagaagtggaagcaggcacctycttcacaaggcaacaggagacagagagagagaaagagtgtgtgtgaaggagaaactgtcaaacacttataacaccatcaaatctcatgagtactcactcactatcatgagaacagcatgcgggaactgcccctatgctccccctggtccctccctcaatatgtgggcattacagggattacaatttgagatgagatttgggtggggacacaaagccaaatcatctcagaaacctttctaatgaaaaacatctgcatggcaaatccaagtttgaaacaatgaatctatacatttgattgcattatgttccatagctagggtatgctttctctgatttatagttgattaaggtgagtagtcttaaccagttctatcagttacatttatataaaatatcacttaactttagtccaatataaagttacactattattgcttccctaattctaaatttacctcatttctaagctta

SEQ ID NO: 310726 - DNA, 518 bp, Homo sapiens
ctcactatcatgagaacagcatgcgggaactgcccctatgctccccctggtccctccctcaatatgtgggcattacagggattacaatttgagatgagatttgggtggggacacaaagccaaatcatctcagaaacctttctaatgaaaaacatctgcatggcaaatccaagtttgaaacaatgaatctatacatttgattgcattatgttccatagctagggtatgctttctctgatttatagttgattaaggtgagtagtcttaaccagttctatcagttacatttatataaaatatcacttaactttagtccaatataaagttacactattattgcttccctaattctaaatttacctcatttctaagcttaattacaagttcatctaagkgtttaatcactgatgtaaatcgttagcttttcttatgtcttctttatttgaaccaaaattatttgactcaaagaaagcaaaacaccttatatacgtttatttttatttttattttaaccacagc

SEQ ID NO: 310727 - DNA, 518 bp, Homo sapiens
ctcactatcatgagaacagcatgcgggaactgcccctatgctccccctggtccctccctcaatatgtgggcattacagggattacaatttgagatgagatttgggtggggacacaaagccaaatcatctcagaaacctttctaatgaaaaacatctgcatggcaaatccaagtttgaaacaatgaatctatacatttgattgcattatgttccatagctagggtatgctttctctgatttatagttgattaaggtgagtagtcttaaccagttctatcagttacatttatataaaatatcacttaactttagtccaatataaagttacactattattgcttccctaattctaaatttacctcatttctaagcttaattacaagttcatctaagggtttaatcactgatgyaaatcgttagcttttcttatgtcttctttatttgaaccaaaattatttgactcaaagaaagcaaaacaccttatatacgtttatttttatttttattttaaccacagc

SEQ ID NO: 310728 - DNA, 581 bp, Homo sapiens
tctgataccctctttagccttcaaaacatctagattctactttgttccaccctaggctctcttgtttatataatgcccattctcataccctctttagccttcaaaacatctagattctactttgttccaccctaggctctcttgtttatataatgcccattctcataccctctttatcattctaggctaggctttctcaactttagcagtattgactttttgaaccagataattctttattttgggggactgtcttgagcattataggataagtcagtgtaaagattaattttatgtgtcaacttgggtgagcctcagtgccaaactgttttgtcaaacattatttygaatgtttctttcagagagagagagagagagagagagtgtgtgtgtgtgtgtgtgtatgtgtgtgttgatgagattattatctaaatcagtggactttgagtaaagtgggtaccctcgataatgtgggtgaacatcatccaatcagttgaaggccttcacaagacaaagactggccatccccaagcaggaataaattattccggaaggtttccattggacttggactgcaactg

SEQ ID NO: 310729 - DNA, 554 bp, Homo sapiens
caagctactgcccaggtctgtgggagtgatgctggtctcagagtctggggatgtgtcttctgccctagtgattgtggagaacagatcatcaagccaaagaggataattcttaggctttcaatctaatggattttgctcccctaggttttgaactttgtagggatccctgacctctttcttgtctctgagttcttcttttggaatggaatgcccaacttatgcctgtctcacaaggagagtatataactcacttgtctggtttcacagctgttgcaactttttccctaggatcaatcatacctcgagtctcacctgcatttgatttagaggmgatttaaatgagatttaggacttagagttggtgctggaatgagttaagactttgaggctgttgagatggggtgctgaatatattttgctagtgagagggacacagattgattttggaggtccagagagtaaagactgaaccggttcccttcaaattcatattttaaaacctaatccccagtacttcagatagagattttgcagacaaagccttttaggatgga

SEQ ID NO: 310730 - DNA, 539 bp, Homo sapiens
caaatgttttactggggatgacactgcttcaggttgataacccatgctcagacatagacaacagctacaaaagctcttacatggatcacccctstttgaaatgtcctgtgatttggtgttggtgacattgcactttctgtgtctgaagcttctttattctcccttctttttccattttctgtgttctttcccttgatattgtcatttagattttaaagtgttacttctaaataaatagaattcacatataatctctcttgtcctggcctctctcctgatcccaaagtgtgaattcccacttgccaattttccaaacagttcttctggaagactctacctggatattctaccaccacaaattcagttgacctctgccacactgtctcttttataatccctgttcagttaaacagttcagttcaattaaaaacaattttccaaacagttcttttgaaagactctaccaggatattctaccaccacaaattcagttgacctctgccacactgtctcttttataatccctgttcagttaaaca

SEQ ID NO: 310731 - DNA, 554 bp, Homo sapiens
caggtggagaggaaaacagataatatttcattgattttttactcatttaagtcagactaaagtgaacatgtctcttgaatgtaaatacttatgaactgatatttttctttcctttgagaaatttctaaatttcaatttaccagttcagagactatggatggtatttaggtcaaatgaatttccacgaaagttcttctcctatggatgagcaagagttccaacgttccatgccctgaccaacacaagctatgattcaatttttccagattatctcaaaattattttgttacatttaaaagaatattggtgttatttttaataaaagcattcttacgaaagtcttcaaaaacccccatgctaatgaatccaaaggtggattctctaaggcaggcacaatgtgtggctgcgccagtgctgtcttgtccgtgtcacagagaaacctcatactctrcctccccactgtggcatggctggaacggtccgactccatgggctccatctgcctaagattggtgtgcactgtgcttcccacctgcaccagcgcagcagcacgt

SEQ ID NO: 310732 - DNA, 620 bp, Homo sapiens
ccctcccagcccttcatgctgggctactgggtatgcttttgggatgtcaaggagggtcagtgtgtggtgccccaaagggtttgctttctcatgagggcaggaggaggaccctttctaacaattttgttttcaatgtttacatgacatccagcaaatttgggggcgaagggyggggtaattcctagtatgttgctggcattgtttcttgtttcccagcacagatgctcattttgcccagtgtttctatccacctggtcatttccttgggaaattactctgctaggagaagagttagatgcttttccttgagatttttttctaggtaggaaattgccatgtgttgttaaagtctgacattctttagtgtttggatatccaaacctgcctctatgccccttaattctggttccagctccagctcttccgttcttctctgattccagaaaggtccaatacccaacgttgatctatgtagcctaagctgtgcactgactcttctctctacagattctcaaaacatgttcttggaaagaacaccagctttcccttcagtgtctaacacctttctcatgtgtcatattcattctctctaattctcgtagagagttgatgccttgtca

SEQ ID NO: 310733 - DNA, 620 bp, Homo sapiens
ccctcccagcccttcatgctgggctactgggtatgcttttgggatgtcaaggagggtcagtgtgtggtgccccaaagggtttgctttctcatgagggcaggaggaggaccctttctaacaattttgttttcaatgtttacatgacatccagcaaatttgggggcgaagggcggggtaattcctagtatgttgctggcattgtttcttgtttcccagcacagatgctcattttgcccagtgtttctatccrcctggtcatttccttgggaaattactctgctaggagaagagttagatgcttttccttgagatttttttctaggtaggaaattgccatgtgttgttaaagtctgacattctttagtgtttggatatccaaacctgcctctatgccccttaattctggttccagctccagctcttccgttcttctctgattccagaaaggtccaatacccaacgttgatctatgtagcctaagctgtgcactgactcttctctctacagattctcaaaacatgttcttggaaagaacaccagctttcccttcagtgtctaacacctttctcatgtgtcatattcattctctctaattctcgtagagagttgatgccttgtca

SEQ ID NO: 310734 - DNA, 577 bp, Homo sapiens
gcagtcactggcccaaaaaagcagggagaactacgtaaaaaacaaatcaagtgccagcctcaagttcagtattgctaaaactctctcgccacatttctggttaaygtttttgtgtctcaaaaaatagttacctttggtctagttttttttctcatgggaacaatgctttgcattcacaaaagtacctctttcaaaaactctacgttacaaatatattattaatcttttgtgttgtacaggtagctcctgcctcctggctgggtgcaaaatgcgtttctttgtttgtttgtttgtttttgtttttttgagatggagtcttgctgtctcacccaggctggagggcagtggcgtgatctcggcttactgcaacgtccaccttctggttttaaacgattctcctgcctcagcctcctgagtagctgtgactacaagcactcgccaccaggcctggctaatttttatatttttggtagagtcaggatttccccatgttcgccagactggtctcaatctcctgaccttaggtgacccaccttgctcagcctcccaacatgttgggattacaggcgtgagccac

SEQ ID NO: 310735 - DNA, 574 bp, Homo sapiens
ctttgggcagtataaacattttaacaatatcaattattctgagaaacaaacattagatagctttccatttatttgtgtcttcctcaatctatgttattaatattttgtattttttagcctacagatctttacctccttggttaaatttattccaactattttgtttttaatgttatcgtaaatgggattgttttcttgatttctttttcagctaagttgttatttgtgtatagaagtgctgtggatatttagagttgcttcagcgtcctggtgccgctgcactgcggagaccgtgtggtcccttagccaagatgccygaggagactcagacccaagaccaaccaacggaggagtaggaggttgagacgttcacctttcaggcagaaattgcccagttgatgtcattgttcatcaatactttctacttgaacaaagagatctttctgagagagctcatttcaaatttatcagatgcattggacaaaatcctgtaggaaagcttgacggatcccagtaaattagactctgggaaagagccgcatattagccttataccaaacaaacaagatcgaac

SEQ ID NO: 310736 - DNA, 673 bp, Homo sapiens
tacatctacattaaatattcatttatttcataaagaagtattaaccaccaatttttggccyggtgtagtttcatcacaaaggctagggaaatgaattaaagcgcaaaactgaagaatagggaacttttgtcctttatgatactttctagcaggagacaagagatagcaagagaagcaacataagcacgtaaatacacggcatgttatgaagtagtgagtgctaaggtgtaaagtgtaataaagaagtgcagcagggaacactggagggactggtgctgtgggtttaaatatgacgggcggggaaggcttgactgaggtggggattctgtggaaagacctgaggagggcgaggaggtgacacatgtgactatgtaaaagaccagcatccaaagccgcgggaacagtggaaagtgcctgagacacctgtgtgccccaaggccaacatggctggaagaactgaccaaagggaaaattcacacagaggtaaggcgagcagaaagtgtgggcatttttcagtgattttaatgactttgagtttaaccagtgtaaaatagaacccactggaaggttttaagcaaagaattttaactcacaaagaaaatacacaattgaggctctcaattagaacttccaattcagatatgatttaattcatttttccataaccaatttt

SEQ ID NO: 310737 - DNA, 585 bp, Homo sapiens
aatctcaaggtatttaggaaactaaaattggaatttaggaatgaccaaggaagaaaagccgcaggaaacacccagactcttagtggggccctctggtggcgtcctttataaagagctcagatctttataaccatctcggaacagcatggttatctgtgatgggactgatgtgagatgttttatgtattccatgtcagctytttgaggacaatagggtcactctcctctggtggaaaacatccaaacactctattcttttctcatgcaaaattcctacattcaataaaaaaattagcacatttcaatgactaggacaagataaaaaacagacatgagaagcagatctaaagatgattcagatactggcattatcacacatgaatctaaaaataactgcaactagtgtgttcagtaaaataagattgagaattttgcatgagaacttaaatctataaaaaatgatcaaatagaaattctgcaactgaaaagtacaattactgaaactaagaataacagaaatggatttaatagcagattggacacaacagaaggaaaatagtgaggtggaaataggttagtaaaaat

SEQ ID NO: 310738 - DNA, 562 bp, Homo sapiens
atacctggcaaaatcgtcttcaaaatgacagtcaaatatatacatttccagagaaggaaaaaatagagaaactttgtcactaatagatctacatttaaaaaaatgctaaagggagttcttcagacaaagtgaaatttccccgaatacagtttggatatgtatcccctccaaactcgtgttgaaattcaatcccagtgttggaggtggagtctagcgggaactgttttggtcataaagggtgaatccctcatggatggctttggaccctccccatagtaatgagtgctctgttagttcgtatgagagctggttgttggaaagagcctggcagctctctcttgctctctcyctcaccacataaaatgccaattccccttcctctttcaccatgattggaagctccctgaagccctcgccagcagcagatgctagcaccatgcttcttgtgtatcctgcagaaatgtgtacaaaaatactcagcttcaggtattcctttacagctgcccaaaatggactaacatacacctcaacagcaaccaaataaagaaaaaggaaaggattg

SEQ ID NO: 310739 - DNA, 547 bp, Homo sapiens
tgctctgggacaggcacaaggagaataaatgtacttcgaaaaacaggctgttttaggcaatggctcacaccggtaatccaagcactttgggaggcgaaagtgggcaratcacttaaggtcaggagttcgagactagcctgggccaacatggggaaagcccatctgtactaaaataccaaaattagtctgtcatggtggtgcaggcctgtaatcccagcttctcaggagggtgatgtaggagaatcccttgaactcggaaggtggaatttgcaatgagccaagatcactccactttactccatcctgagccagagagcgagaccctgtctcaaaaaaaaaaaaacaaaacaaaacataaacaggctcttttgattcaaactttttgtagtttaaaaatgatgcctagttgactgcattattagagaaaataatggctaaaaacaagaacatttaaatactttcaagatcctgcttgacctgtttgactgcagggtcttaaacccttaagagttaataaatttgtttatttaatatttataatgagctg

SEQ ID NO: 310740 - DNA, 547 bp, Homo sapiens
tgctctgggacaggcacaaggagaataaatgtacttcgaaaaacaggctgttttaggcaatggctcacaccggtaatccaagcactttgggaggcgaaagtgggcagatcacttaaggtcaggagttcgagactagcctgggccaacatggggaaagcccatctstactaaaataccaaaattagtctgtcatggtggtgcaggcctgtaatcccagcttctcaggagggtgatgtaggagaatcccttgaactcggaaggtggaatttgcaatgagccaagatcactccactttactccatcctgagccagagagcgagaccctgtctcaaaaaaaaaaaaacaaaacaaaacataaacaggctcttttgattcaaactttttgtagtttaaaaatgatgcctagttgactgcattattagagaaaataatggctaaaaacaagaacatttaaatactttcaagatcctgcttgacctgtttgactgcagggtcttaaacccttaagagttaataaatttgtttatttaatatttataatgagctg

SEQ ID NO: 310741 - DNA, 547 bp, Homo sapiens
tgctctgggacaggcacaaggagaataaatgtacttcgaaaaacaggctgttttaggcaatggctcacaccggtaatccaagcactttgggaggcgaaagtgggcagatcacttaaggtcaggagttcgagactagcctgggccaacatggggaaagcccatctgtactaaaataccaaaattagtctgtcatggtggtgcaggcctgtaatcccagcttctcaggagggtgatgtaggagaatcccttgaactcggaaggtggartttgcaatgagccaagatcactccactttactccatcctgagccagagagcgagaccctgtctcaaaaaaaaaaaaacaaaacaaaacataaacaggctcttttgattcaaactttttgtagtttaaaaatgatgcctagttgactgcattattagagaaaataatggctaaaaacaagaacatttaaatactttcaagatcctgcttgacctgtttgactgcagggtcttaaacccttaagagttaataaatttgtttatttaatatttataatgagctg

SEQ ID NO: 310742 - DNA, 495 bp, Homo sapiens
tccagtattgcctcagtaatgtttctttaatcaaaaatattttactaaaattatttacagtcttacattayttaaaagtcttgcttcctaagatctgtaaaatatgctttctgtacaaaacaaattatcttaagttctgaggaaaatattttttattcaaatatgtgtaaaccacacctggctaaatggtattcttgtctctgttgcttgatatttagcactataatcaaaccatattgcagcgttcacagcttctgatgagccctaaatgaggctccatcaatctggcagactatttcaagagtagaactaaagacaaaaaatatcacctttcttctaaaataaaactctactccaccaaatgcatccaaactaaatcatttaagtaggaataattgaatctgggcattccttaaggattattcctgagccataatctgccccagctggctctaatccttactaaatgatatgtgtcctaagaatattaccagc

SEQ ID NO: 310743 - DNA, 415 bp, Homo sapiens
tatggccacgcgcagtggctcacacctataaycccagcacttttgggagcccgattctagtggatcacttgaggtcaggagttcgagaccaacacaatgaagccctgtgtctactagaaatacaaaaattaaccaggcatggtgttaggcgcttgtgatcccagctattcaggaggctgaggcttgaacccagaaggtggaggttgcagtgagccaagattgcaccactgcactccagccaggactccagccaggacagagcaaggctccttttcaagaaaaaaaaaaaaaaaagaaaagaaaagaaaaaataaattgcaaataatatgtgcaccaagacataagacagtaagctttttttttttttttttttactcctatgtcagttcctgaacagtttggtagaacatctcct

SEQ ID NO: 310744 - DNA, 523 bp, Homo sapiens
tacataactatttcatggtatttcatcttgaatttttttggaatacagaaaactgtattttttccttcctctttccttttctcccgctctcctttctttcctttctgtcttcctaaaagtgtttcttttctacctaccaaattttaaaccctgcttgaggcagtgaggaccgtatggtgaacagttgaggttgatgctcgtagagctgcatcttttttttttttttttctgagatggagtctcactctagtgctcaggctggrgtgccatggctcaatctcagctcactgcaacctctccctcctgggttcagtcaattcttgtgccccagcctctggagtagcagggattacaggcatgcaccaccacgcccagctaatttttgtatttttagtagagacaggattttgccatgttggccaggctggtctcgaactcctgacctcaagcaatccacccactttggcctcccaaagtgcggggattacaggtgtgagacaccacgcccagctagagctgcatc

SEQ ID NO: 310745 - DNA, 523 bp, Homo sapiens
tacataactatttcatggtatttcatcttgaatttttttggaatacagaaaactgtattttttccttcctctttccttttctcccgctctcctttctttcctttctgtcttcctaaaagtgtttcttttctacctaccaaattttaaaccctgcttgaggcagtgaggaccgtatggtgaacagttgaggttgatgctcgtagagctgcatcttttttttttttttttctgagatggagtctcactctagtgctcaggctggagtgccatggctsaatctcagctcactgcaacctctccctcctgggttcagtcaattcttgtgccccagcctctggagtagcagggattacaggcatgcaccaccacgcccagctaatttttgtatttttagtagagacaggattttgccatgttggccaggctggtctcgaactcctgacctcaagcaatccacccactttggcctcccaaagtgcggggattacaggtgtgagacaccacgcccagctagagctgcatc

SEQ ID NO: 310746 - DNA, 526 bp, Homo sapiens
ctctccataaactttactcagtgggggttaacttccgttcttcctccatgaatacatggctggccccgtgcgtgttcagcatattcttggacagtatacattctttcagtcgttttaagaaacaacatagtcaccattcagcaaataaacttccagtacacgactacattaaaaaatagaagtagctataaaagaaaatatttcttctctctgtagctcaggtccgtgtgttaaagaaagcctaagctctctcccttcttttaatccctatcactgtctgcttttttttttttttttctgaggcagagtcttactctgtcacccaggctgcagtgcagtagtgccatctaggctcactgcaacctccgcctcctgggttcaagtgatcctcctatcacagcctcccaagtagctgggactacaggtgtgcactaccacgagcatgcctggctaatttttygtatttttatatgaaatgggttttcactatttttgcccaggatggtcttgagctccttggctcaag

SEQ ID NO: 310747 - DNA, 589 bp, Homo sapiens
tggttccaagtctttgctattgtgaatagtgccgcaataaacatacgtgtgcatgtgtctttatagcagcatgatttataatcctttgggtatatacccagtaatcagattgctgggtcaaatggtatttctagttctagatccctgaggaattgcctcactgacttccacaatggttgaactagtttacaggaggactgaataatttcaatgtcgcagtctctgtattgctactgtggaaatgatcattatgtgcttcactggtgaatattcatggagctatctgtaataacagattatttcctccttttatattgccaaagtagtatgtgtataatgtatctactccccagttacgtcgcagtttatctttcctggtatatttttgtcatttttggttggcttttataacagaaaataaaacaaagaaaatggcagaatagaaataagtattctaaagtatttataaagaataaagtgatttttttattgatttctaattaaatatggtattagtactattyacttgaatttgtatctttatgaaaaatctgatgttaattgttttgcatctttttaaaagattaca

SEQ ID NO: 310748 - DNA, 569 bp, Homo sapiens
tacgtgtaaatgtgtatttatgcacttttattggaaccactgcttttataaagtctcaaactttaagaaatcatagttgtatattcacaattcttaaagagtgtgtcttcgacatctctataactcattgcctctacaattaaataatatcacagagcgtaataccactcaacaaatgtatcaatgtctagcaatcagaataatgttaacacatctcatattaaagtacttcttgaaactctattgacataagtgtcttttgctgatttgtacctggtaatgactataataacaactccctttatatatattatggaataaggtatcttttaaatgataaacatgttttttctgtacatatcaaaacactatctgtgtaactaaaatgcataacaattaccatcaggacgtatgggaaatacattttacaaatrgtgtgttgcagctaaggttccaaaatgctacctatctctaatgtaataccttagtgtctctcttgcttacaagatctatttttcactttcagacttgagggcatatttgtttagcttcttgacctttttgctgct

SEQ ID NO: 310749 - DNA, 547 bp, Homo sapiens
gtcaccataattcatctacaagtagaatttacagcaccatgtcatacatagttcatcctgaattcatctggtagctgggaaggccatccctgtatgctaactggttataatcaatgacaaagtaaagctttcacatcttcatgactagaggtagttttgcaacttgaaccccagggcctgctgaaggtaggctttgactcttctacaaaaagtgttgattcgggtgctatctttttggctatttacattttaaagcaatagctctctactctctgagcactgggctagaacactcctgctttccctctcttggtggctagtgtactctcttgaccccaccatctgccactgaggcacagcccacagcacagggctcacagctggaaactcacatcttaggtgaaccccawttgccacagcagcactccagtgccacatcagacagtgaagcctgagcagcaggaggagagcctgcaggcctcctgggtagaattgcaccttcacaataatagaaaagggagcactgtttcagcctcagtttttattt

SEQ ID NO: 310750 - DNA, 664 bp, Homo sapiens
catgaggtcataatattcttatttcttttgacaaattaacttcatttaccatattctgatttcagataatattcttctttctgctctatatttgctagcttttggtcaaatcttatctgaactcaatagaaatcaacaaaataaatcgattctaccacaagcattttattattgatgcatctgcttattttgcttaaaatacattagcttttgaaaagatttatagttttgtttccgagtgttgcttttttctgagaagttgctgtcatgctagaaarctgctattctcagctctactcacaatgactaatagcaagtggaagtgatgtgtggatgagaagcaaatgtgtcttctctgcatctcttttttaatcaattggctgaagaaagagaatgcagatagaaggtgaaagaaaatataatccctgaaagatcttgaaaaagtcctttgaatcagaaaaaaaaggaaatggtgatttgagcagaatatatatttaaaaagacttctttttttaatctttcttctttttatgaaatataaaaaaagctgaccaaataaagtctaaatgaattaagtatagctcctagtataactcacagttaatataagttgactatcctctctgtagacaacatttttcatcagcatttttcagcatacagc

SEQ ID NO: 310751 - DNA, 529 bp, Homo sapiens
attctgcaatatttgctgttctgcagcctccgctggtgatacccaggcaaacagggtctggagtggaactcgagcaaactgcaacagacctgcagctgagggtcctgactgttagaaggaaaattaacaaacagaaaggacatccacacyaaaaccccatctgtacatcaccatcatcaaagaccaaaggtagataaaaccacaaagatggggagaaaccagagcagaaaagctgaaaattctaaaaatcagagcacctcttctcctccaaaggaacacagctcctcatcagcaatggaaaaaaggtggatggaaaatgacttagatgagttgagagaaggcttcagatgatcaataataacagccttatccaagctaaaggaggatgttcaaacccatcgcaaagaagctaaaaaccttgaaaaaagattagaagagagctaactagagtaaacagcatagagaagaccttaaatgacctgatggagctgaaaaccatggcacaagaactacgtgatgcatgcacaag

SEQ ID NO: 310752 - DNA, 591 bp, Homo sapiens
aacaaaaattctgttattttcaatcacagggattaacctggaggacattatattagttgaaataagcaaggcacagaaagattcatgtctcatgatttcacttacacgtggcttctaaaaaagttcatctcattracgtagagagtaaaatggtgaccaccaagtgccaaggtatttagaagaaataggggcattgaaagatgtctgtcaaagaatatataattatacttggataaaagaaataatttccagagatttattgtacagcatggtgactatagttcataataatgcatttgtatttttgaaaaatgcttacaatttcatgttgtctaaccacaaaaatgttaccaatatgagacaaagcattaatcacatagaactaagcatttgacaatgtatatacacttcaaaatgttgttttataaaataaatattttgtcaagttaaaaatatatttttagacactatagaaggataacaatgttccaaatactgtctgtttcttttataaaacttagcagtatcctatcgtacagtttttcagctgttttgccagtcataaccataggaacgttgatgttcaacagc

SEQ ID NO: 310753 - DNA, 482 bp, Homo sapiens
cgttgacacacagtattaaccaccacacctagttaagagagtcaacatctctccatttggctgagtccaggtgaaacagtcatcaccatttttytaagctgaatccagaaatgagtcagcattctacctgtgggcagattcacatatcacagtcacaattccaactgtgaattttttttttttttttttttttgagatggagtctcgctgtgtcacccaggctgaagtgcagtggcacgatctgggctcactgcaactcctgcctcagcctcccgagtagctaggactacaggcacccgccaccatgcccggctaatttttttttgtattttaactagagacagggtttcaccgtgtgttagccaggatggtctcaatctcctgacctcatgatccgcccacctcggcctcccaaagtgctgggattacaggtgtaagccactgtgcctgccccaaactgtgaatttttttggtgtgtgaga

SEQ ID NO: 310754 - DNA, 577 bp, Homo sapiens
cactttggtgatagatgcagacatatgtcacaaggcygcctatgggcagggcttattaagtagcctctgatccagtcctgtaggtgttcggtccagctacatgtcacaataccaaaaatatgcatggctcagcaaaagaaaagatttacatcacctaagtgctggatccagtgatatgtcacaatcctcttctttggcatggccgaggaagaagtagagagtcacatcacctaggcgttggaccaagccatatgtcacaatacacaataaatgcagggctcatgaaaagagagtcagatctcttaggtgtggaacagtggtacatcacaatttctcgtttgtcagagccacatcacctaggtgcttggtccagtaatatgtcaaaattcccttgagaggtgagcccaggaaggaaagtcacatcatttcggtgagaagcccacagatgtgtcactattttccctgtgaatagggctcaggaagaaaaggatagtcacatcatttaaatgatgggcccagagatggattacaatggctcctgggtacaaaaacaaggcagaagaattacatcacctgt

SEQ ID NO: 310755 - DNA, 631 bp, Homo sapiens
attggagataatattatgttactaaaacctgtagatattacaataacttgtttagatagaaaagtatgaaaacatgctaaaatgtagatttttaaatacaaatgagtagtcttggaaatcatttgaaaaaaattygagaaaacaatttgagaattcggtgatatttttcaattgttttaattatatattcatattgctaggataaaatacaatacaattgatcataaatgaggtattagaatgtgaagaaattacattttattgaaatatttgtgatatacaaaaatatgtagtctaaaaaaatgacagtgacatagaattaccatatttcagactttataaaccaatgttatcataattcttataatgaattacctatgtgatataattttaaattgatgatttacatactggatcctttataaaaactggttaattacatatgaagttagtattcttaacaatattggtgtttaatatgtatatgagcatgcgcttcatatgtatgctctccctttttccttttctctttttttaagtgcctaatgtataagtaggtgagatttgttagtagttgcatttactaaatatattatttcaattatcaaatatatatgcatttatatgaatt

SEQ ID NO: 310756 - DNA, 581 bp, Homo sapiens
tcaaactgtgtacttgatctctcaagtcacctgcttggccctctttaaagcatgcattattcctttcattcctgacctaaaactttttaataaactttcactccttctctaaaacttgccttggtccctctttctgccttatgcccctcagtcgcattctttcttctgaggaggcaacaatggaggttgctgaaagttccgtatatatttgtggttaacaataaaacgttttacttaccatcattattaaactgaagattcaaatacatgtcatagggatagtttgttggattttaaccactgtttwatagtcacattttcaatgtaaatatgtcagataaatgataccgatatattattaagcattcaaaatatggagtgatgtgtagcctgctttttaactttgttgtaaaatgtttttactaatacttacaaggagaacttataaagtgtactttcaaatagccaaccatgacaaaagtgagacaatgataatgatagagaataaaatgttaatagacacagacttagatttaaagcaagaacaaaccatacaggttatctgaacaataatgaattca

SEQ ID NO: 310757 - DNA, 609 bp, Homo sapiens
aatttttatgagtggcttttattattctgacatatattccttcaatacatagtttcttgagagttttttttatcatgagttgatgttagactttatagaaaactttttccctgcatctattgagttgatcatggttttgcttttaattctgtttatgcgatgtatcacatttttgattagcatatgttgaatcagtcttgcatcacaagaataaagcttacttgattgtggtgtattaactttttgatgtactgctgaatacagttcgctagtatttggttgaggatttttttatytgtcttcatcagagatattgacctgaagttttcttttttcctgggaattttgagtgacataacttactaatactctggtattacaaatttagtaaatgttaatgtaaattaaatatacctgacaaaagtatactataattatatatttcaatagccattccagctgctttacttataagacacaaaaacctaaccagtattcattttaaatttaaaaaataattcatttatatagtcctgcaaaaatatgggctttacatcatgcattgtataattctttatgtttgctttagaattcaggaatatgtgtgta

SEQ ID NO: 310758 - DNA, 508 bp, Homo sapiens
atttagttgggtcatttggtgcatgagactatttcctcaatttatttgctgtactttaaccgaaaagcaatattatagaaaaccatgatggtaagtaatggattcagtaagttcagagatagtgctaacagaaccattgtgggcagtgcaagagtttattccagtgccaagaaatcttctaacaagacatcraaaagtccctaaacaacaagaatattctaggttggcttgtcagaattccattgattcaaaccataagaaatcaatgagcctaaatggatttagatagtttattaatcacggtccagcagaaacctggtgtgtgcattggttccccttgtctcgtaagtccaatacttctgaatcagaataagcccaagtgaacattgagcacaaaagagtctgtgtcaaaactgagcaatactgagcttagccagcccctaatcctataaggaatttgacagcaaacctgcccatcctttgccctggaggaagactatattatact

SEQ ID NO: 310759 - DNA, 633 bp, Homo sapiens
cttttgtctgcatttaatcctggggtgctgtgaccccctaaatattttttaatctgcctaaaataggcttacttcatatagtaaatttttatgggttttaaaaaatgtttagtgttatctactactgctgtagtaccacacaaaatcattttgccaccctaaaatctgctctttactttagttattcaactcactgcaagctccaaacycctcccagccaattatctgtttaccatatctatggtcttgctttttctagaacgttatataaacaatattatacaatacgtagccttttgagtaacttccttcactttgtaatatgaatataatattcactcatgtttttgcattgcttgatggtttatttcagcactgaatagtattctagtatatggttataccatactttgtttatccatttctgggaagattactaattaaagattaaatttatttatttctgtagattatcaaatgtatattgtttcttgaatctgcattgtaattatagagctttagaatttacttcctgtattgatttgctaggactactatacaaagtaccacaaattgggtgaattaaagaatattaatttattgtctaaatagttcaggaacctagtagtatga

SEQ ID NO: 310760 - DNA, 520 bp, Homo sapiens
tgtttggttccctttccaccatgattgtaagtttcctgaggcctccccaatcatgctgaagtgtgagccaattaaaccttttttccgttataaattacccagtctcaggtatgtctttattagcagtctgagaatggactaatacatttcctcctggccacaataatacagctgtttcctacaatcaaaatatgttcagtcctcctcgcacagcatcaaagtcttctccctttaggayatcagccctaagttcagaatttcattgtgtaaataatgttttgataatgatgaggctctttctgtgtgctttcttgaatacagttctttgtatatggtacttactgagcaggtatttacctgtgaaggaagaggctagttatctgcccctccactcacccaatatacaactgtgatagagaggaatgataactcccatgaggcattcctaatcaaaatgagagaaaaacgagcacctatatgtggcctacctatgtagtaagagatttttgcaggatagaac

SEQ ID NO: 310761 - DNA, 621 bp, Homo sapiens
aggcagtagttgggtccttgaaaacatcgctgagatgctaaattaaccaaactctgctgtacttaggaacatcttatttgwaacaatatatcttattgtttgagttttctattactccttgctgaaaggatcctactgagtacattaatggtaggccagcatttttcaaatgtgtctatatactaggcttacttgagacattaaaatgtagcaatgcccaatacacaccctcagcagggtaaatcacaatcgccaggcattggtgatttaaaaatttctccatttgactccattttacagcccttgttcaggagcacataggtagaaagatgagttttctctgcagtactataaagtcttcgactcaactacctcttctgttaaataaaagaacagatttttggagtctgtgtaagttaaagctcttaagatcaggagagcaggctgcctctttattctgtgttggaactgctttatctttactccagtgtctccaactgagcaagtttaagtcactacaggctcttctctgtttctacctttggaaacatcactactgggcagagtggtcactttcttagggaaagagttgtttatgctttcattatgtgtgacatcact

SEQ ID NO: 310762 - DNA, 548 bp, Homo sapiens
tgctgttattctccatttaatcatttcaaatctattaaagataccagcatagttccttagattgtcattaaaagactttaaaaatggctcagtactggaatttcttcatattgctccatctagataaacattaagcaaccattacattaagctttgcccattaggtgaatagagaatatgcttcaaaggcataatttatctgctcagagttsaagaaaatccttgctttaactttgatatttgctctatctactttgtacggattcctgaatcatgtctcttcagtaacattgcttactaataataaaaataaaggaatatagaagaatttttacttggcaaattttctttttagtattgctttgtttttatcaaaataaaagagtatatttcctctttaaaaattattctgaactttcagtttttctaaattccaggctaattataatcccagttaatctaagggcaaatcattttttcaggatagttcagaagaaactttgacccacctcttcctcattttatattaatatatatgagctcaccaa

SEQ ID NO: 310763 - DNA, 529 bp, Homo sapiens
agtattacacatccggttatagaagtgagtctttccttttgattacaggaaaaaatgtaaatgaaaagagatattggctttatgcctttatttcttgtaccataaaattatttattcattaatatatttatttacttctaacttcttctataatcatggtcatcagcataagaatgtaaattatatttagattgctgaatgtgttctttttttttttttgagacgagttttgctcttgttgcccaggctggagtgcaatagcgtgatcttgactcactgcaacctctgcctcccaggttcaagcgattctcttgctcagcctccctagtagctgggattacagatgcccgccacgatgcccrgctaattttttttttgtatttttagtagagatggggttttgccatgttggccaggctggtctcgaactcctgacctcaggtgatccatgagcctcggtaggtcttctaaagtgctgggattacaggcgtgagccaccacttctggccatgtgttctctttaaataaa

SEQ ID NO: 310764 - DNA, 529 bp, Homo sapiens
agtattacacatccggttatagaagtgagtctttccttttgattacaggaaaaaatgtaaatgaaaagagatattggctttatgcctttatttcttgtaccataaaattatttattcattaatatatttatttacttctaacttcttctataatcatggtcatcagcataagaatgtaaattatatttagattgctgaatgtgttctttttttttttttgagacgagttttgctcttgttgcccaggctggagtgcaatagcgtgatcttgactcactgcaacctctgcctcccaggttcaagcgattctcttgctcagcctccctagtagctgggattacagatgcccgccacgatgcccagctaattttttttttgtatttttagtagagatggggttttgccatgttggccaggctggtctygaactcctgacctcaggtgatccatgagcctcggtaggtcttctaaagtgctgggattacaggcgtgagccaccacttctggccatgtgttctctttaaataaa

SEQ ID NO: 310765 - DNA, 587 bp, Homo sapiens
tttggcatatcaaagttgccagcatcaccactctggcactttgaaaattttattaagtaaagtaaaggtgacttgaacacaagctctgtaatactgagacagttgatttgattgatcacccagccagatgctaagtgactaacaggtagcatagacagcacaggtatgcttgacaaacggatgattcatgtcctgggcaggaaagggatagtgtgattttatcgttatacttggaacaacatattttaaactcatgaattgtttatttctggaattttctatttattacttttaaactgtggccraccagagatcactgaatctccaaaaagcaaaacaatggataaaaggggactactgtatgcattagtatcttgattttataagtgatgaccattcgtatgaggaagactatgtgaattactgattatcactcaactgggaaaaggcaggtccacttcgttctctctaccacctatgcttgttatattacatcatgttgtctctttatatattggtgagtatgtattagatttacaaacaccagtcaaagaataagcattactgactataaataacatgatata

SEQ ID NO: 310766 - DNA, 587 bp, Homo sapiens
tttggcatatcaaagttgccagcatcaccactctggcactttgaaaattttattaagtaaagtaaaggtgacttgaacacaagctctgtaatactgagacagttgatttgattgatcacccagccagatgctaagtgactaacaggtagcatagacagcacaggtatgcttgacaaacggatgattcatgtcctgggcaggaaagggatagtgtgattttatcgttatacttggaacaacatattttaaactcatgaattgtttatttctggaattttctatttattacttttaaactgtggccgaccagagrtcactgaatctccaaaaagcaaaacaatggataaaaggggactactgtatgcattagtatcttgattttataagtgatgaccattcgtatgaggaagactatgtgaattactgattatcactcaactgggaaaaggcaggtccacttcgttctctctaccacctatgcttgttatattacatcatgttgtctctttatatattggtgagtatgtattagatttacaaacaccagtcaaagaataagcattactgactataaataacatgatata

SEQ ID NO: 310767 - DNA, 671 bp, Homo sapiens
taatgtagctaaatatttatgagaaatctgaaggttttaaaaaatgtttcttaaactaaattttctaaggtgattccattattgttatgatttactgatcacaagatcatattatatggatgaagatacatttttacattcttaatattatgttaatactaaaactactgtcatgtccagggtaatagaacttttcaaagacagtcacaagacaaatataagaaagttatgtttgtgcatccgtgtcataaatattatgaatatttatataatttattgcctctttttaagtgattacatctataaatataaaaatattgttcaaattatgaaaatgattttaacagaatattactagaaaaactgaactattattcaggcattattcttaatattgtgtggaattgcartttattaattgatatacctaaaattttattgaatgtcaaacttgttttttgtatctgcaaatgtttcaatcttttgtcaatcagtcatttgcatacataccttggaaattagttcagcaatgatgtttagacattagtgttgactgtgagatattctggctcagtgaagagttttattagcagacacacatcaaacactaaggtgtggtaacagcttctggtttactgaagaaatgatctcatttttaaagtaatatgtgt

SEQ ID NO: 310768 - DNA, 671 bp, Homo sapiens
taatgtagctaaatatttatgagaaatctgaaggttttaaaaaatgtttcttaaactaaattttctaaggtgattccattattgttatgatttactgatcacaagatcatattatatggatgaagatacatttttacattcttaatattatgttaatactaaaactactgtcatgtccagggtaatagaacttttcaaagacagtcacaagacaaatataagaaagttatgtttgtgcatccgtgtcataaatattatgaatatttatataatttattgcctctttttaagtgattacatctataaatataaaaatattgttcaaattatgaaaatgattttaacagaatattactagaaaaactgaactattattcaggcattattcttaatattgtgtggaattgcaatttattaattgatatacctaaaattttattgaatgtcaaacttgttttttgtatctgcaaatgtttcaatcttttgtcaatcagtcatttgcatacataccttggaaattagttcagcaatgatgtttagacattagtgttgactgtgagatattctggctcagtgaagagttttattagcagacacayatcaaacactaaggtgtggtaacagcttctggtttactgaagaaatgatctcatttttaaagtaatatgtgt

SEQ ID NO: 310769 - DNA, 459 bp, Homo sapiens
ggtgtggtaacagcttctggtttactgaagaaatgatctcatttttaaagtaatatgtgtccmttttattctatttccttaaatatatggataagtacccccttttaatgttgttttatattaaaataaattttataatttgcatgaattccgctttcaattcaaactggctatatggaggtcaattcaagaagtaactaattttgtagcaaatttagcctaaaatctttttctatggaattgtcaattataattttttaaaatgtacttatagtaatatatagcagtatctgtgtatatatatctatgtacaaatggccactgagtttattacagttagggcatgactgataaaacaattacagaaataggtaagatctaaacattgttaaggaaattggctttgatggttttcactgtttattattctaattcatagacctgatgttatatgtgagt

SEQ ID NO: 310770 - DNA, 459 bp, Homo sapiens
ggtgtggtaacagcttctggtttactgaagaaatgatctcatttttaaagtaatatgtgtccattttattctatttccttaaatatatggataagtacccccttttaaygttgttttatattaaaataaattttataatttgcatgaattccgctttcaattcaaactggctatatggaggtcaattcaagaagtaactaattttgtagcaaatttagcctaaaatctttttctatggaattgtcaattataattttttaaaatgtacttatagtaatatatagcagtatctgtgtatatatatctatgtacaaatggccactgagtttattacagttagggcatgactgataaaacaattacagaaataggtaagatctaaacattgttaaggaaattggctttgatggttttcactgtttattattctaattcatagacctgatgttatatgtgagt

SEQ ID NO: 310771 - DNA, 459 bp, Homo sapiens
ggtgtggtaacagcttctggtttactgaagaaatgatctcatttttaaagtaatatgtgtccattttattctatttccttaaatatatggataagtacccccttttaatgttgttttatattaaaataaattttataatttgcatgaattccgctttcaattcaaactggctatatggaggtcaattcaagaagtaactaattttgtagcaaatttagcctaaaatmtttttctatggaattgtcaattataattttttaaaatgtacttatagtaatatatagcagtatctgtgtatatatatctatgtacaaatggccactgagtttattacagttagggcatgactgataaaacaattacagaaataggtaagatctaaacattgttaaggaaattggctttgatggttttcactgtttattattctaattcatagacctgatgttatatgtgagt

SEQ ID NO: 310772 - DNA, 579 bp, Homo sapiens
tgattatttcagttatctgatgatgtataattaattactggttcaacacaatgatttatttcttcatcgttctccactttgggttggattttccataaatggattgttgctgctccgtatgatgttgtgatgttggctggcagacatgtgcctacattcacacatctgccatctcagctggattgctgctggaatgactgagggttggctagacctctcttttcatgtaagttgtcgttcattctgtggtccctataagtggtcttactcttcactagaaagtcagaattctttacatgacagctgactgacttctaagaggatagatataaaggaaactgcaacgcatcttaaaacctaagccgagatcacacaaygtcattttcacacgttctgttggtcaaaagatatttccaggataggccaaattcagtgggacaaataatgttttttttttcttttgacaagaagaacagaacaaaaacacaagtatgggagtaattgataattactgcaaagttaatgtactataagcctcaatatataaattttaatgtattttacattggcatatacttt

SEQ ID NO: 310773 - DNA, 620 bp, Homo sapiens
ttgtagaaagtctgagaatcttagatcactacagaagaaaatgtaataaaaacatttgtgatgtaagttaccacaagatagaagtctatggaacataaayatttaagcaatagtttaatagaaaatatgaatagggaataattttattgaaaagaatgcaaaaaacaccaaaatatttcaaaatgttttagctatataaaggaaattaatgtactaaaatatttaaattaaaacttgaacaaaggaaagatgtgccatgtttctatctaaaacaattgacatttataaaggtgctaattacccaagataaatgtatatatataaaaaactactatagaaaataatttaacagacatttattaaagtttgaatactagttttataattattatgttgtccttagtggttgggaaaaactaaaattcaatcagtcgtcaaaaatcaaaacaaaaacattcttgacaaaaatggtaagcctgcaatgactaatgactttgtacacatagaatattctagtaatgtacccaggaactaaaagttaatacttcaaaactcacttcagaaaaagttatattactagagataaaaagaggaaatacataatgatgcagtcaattctt

SEQ ID NO: 310774 - DNA, 578 bp, Homo sapiens
ttataggacaatttaaaatggtaaagacagtatttcagaaagagaggtttggaaaatatacaccataagctattaagacatttttaataaagctagataaattaatacagttggtacaaagaaagacaaatacacaaacggatcacagtagagcatcaagaaacagacccacatataaaatgtcaatttattytacatatttttatattcatttagcaggaaaataaattatttcaattaatgttgatgaatggtttcattgaccagcaaaatactctctttttttacatgtctgagtattttttctctttccatattccatttgattgtctgcttttttaatgtttatttttacaggggaccagggggatttataattagttgtactcaatacattctagatgtgagtccctttttcattatttatgctacaaatatatattacagcttttgttttttcattttcttaataaatttcctgaatgcattctatcatcttgccttctgaagctttctcattttgtcatttgtacttaggtctacaatccaatggggacttttttttttggtagtagaaa

SEQ ID NO: 310775 - DNA, 525 bp, Homo sapiens
ggaaatacatagaaaatacctttgaatggacaaaaatgtggattttcccctctccacgtggctattctttgcttttttgcctctgagtgtagtttcttttctctgttctccattttctgtttttccctgtattagagatttgttcctggtctcacttgagttgtcagaaaaaggttactacacccttgagtttcaacagaaaaatgaaaaactaaaataaccaataaatctctttcatttctctcttcagtcagtccttcacacaggyttcccatatacagtgtgaggttaatattccatcacatttttatctcttcaccgctaaataggaaacagctttaagaaaaagaaaagtgggcaaaggacatgaacagacacttttcaaaagtagacacaaaagtggccagtaagcatataaaaaaaagttcaacatctgtaatcattagagaaatgcaaatcaaaaccacaatacgtcatctcatcctagtcataatggctattatttaaaagtaaaaaaaaaaaata

SEQ ID NO: 310776 - DNA, 525 bp, Homo sapiens
ggaaatacatagaaaatacctttgaatggacaaaaatgtggattttcccctctccacgtggctattctttgcttttttgcctctgagtgtagtttcttttctctgttctccattttctgtttttccctgtattagagatttgttcctggtctcacttgagttgtcagaaaaaggttactacacccttgagtttcaacagaaaaatgaaaaactaaaataaccaataaatctctttcatttctctcttcagtcagtccttcacacaggtttcccatatacagtgtgaggttaatattccatcacatttttatctcttcaccrctaaataggaaacagctttaagaaaaagaaaagtgggcaaaggacatgaacagacacttttcaaaagtagacacaaaagtggccagtaagcatataaaaaaaagttcaacatctgtaatcattagagaaatgcaaatcaaaaccacaatacgtcatctcatcctagtcataatggctattatttaaaagtaaaaaaaaaaaata

SEQ ID NO: 310777 - DNA, 506 bp, Homo sapiens
atagtaggtccaaattcccaacatcattctgtgaggtgttagcaatttgcatacatcatttcttgtcatcaagtccagtgttttttccacagcactctatagattcaagtttatttcaatcatcacagcattctttgttaagtatcaaatacatcccccacatggggcaagtgaggtgaatgtatttcactgtcttttctgttcagacccattttagggcactgtgatatatcctaattaacccactataagaacatcattaacaaaggaatgtgcccagaagatagcaaacagaacattaaaayacatgatatggtaccataatagaaaaattggaaggtgttaagagccacaaatgtggtcaaaagaaagtttacatcatatctcattagctattactgaataactgaagcactctaattaaattaaaaaaattaaacttgggatttgtgcacactggtctctaacatttttttcattctatactttagcacaactgaaatcat

SEQ ID NO: 310778 - DNA, 527 bp, Homo sapiens
agattctacaaaaacactgttcccaaattgctcaatgaaaataaatgttgaactctgtgagttgaatgcactcatcacaaagcagtttcctggaaagcttctttccagtttttatatgaagatatttcctttttcaccataagccacaatgcrcttccaaatatcccttcacagattctaccaaaaccgtgtttccaaagtgctcaatgaaaagaaaaatttacctgtgcaggatgaattcacacatcagaaagtagtttctcagaaagcttctttctagtttttctctgatgacatttccttcttcaccataggcctcaaagtactcccatacatctcttcatagaatctaaaataaacagtatttccaaactgctcaatgaaaagaaagatttaactctgtgagaagaatgcacacatcacaaaacggtttttatctgaagatatttactttttcaccataggcctcaaattgctcccaaatacacctctgcagattttacaaaaacagggtctccaaactgctt

SEQ ID NO: 310779 - DNA, 527 bp, Homo sapiens
agattctacaaaaacactgttcccaaattgctcaatgaaaataaatgttgaactctgtgagttgaatgcactcatcacaaagcagtttcctggaaagcttctttccagtttttatatgaagatatttcctttttcaccataagccacaatgcacttccaaatatcccttcacagattctaccaaaaccgtgtttccaaastgctcaatgaaaagaaaaatttacctgtgcaggatgaattcacacatcagaaagtagtttctcagaaagcttctttctagtttttctctgatgacatttccttcttcaccataggcctcaaagtactcccatacatctcttcatagaatctaaaataaacagtatttccaaactgctcaatgaaaagaaagatttaactctgtgagaagaatgcacacatcacaaaacggtttttatctgaagatatttactttttcaccataggcctcaaattgctcccaaatacacctctgcagattttacaaaaacagggtctccaaactgctt

SEQ ID NO: 310780 - DNA, 552 bp, Homo sapiens
gtttctagttttttctgaagacattccctttttctccttagacctcaaagcactccaaaatatccgtttgcagatactataaagccagtgttgccaaactgctcagtcaaaagaaatgtttaactctatgagatgaatgctctcattccaaagcagtttctcagaaagctactttctagtttgcatttgaagatatttcctttttcaccataggcctaaaagcactcyaaaatttctcttctcatattcaacacaaaaatatttccacactcctcaattaaaagaaaggtttaactctgtgagatgaatgcacacgtcacaaaaatgtttctgagaaagcctctttctagttagtatctgaagatatttcctttttcatcataggcctcaatatgctcccaaatatctcttcacagatacttcaaatacagtgttttcaatctgctcaatcaaaagaaaagattaacactgtgagaagaatgcacatgtcacaaagtgctttctaagaaaccttctttctagtttttatctgaagacatttcctttttcacc

SEQ ID NO: 310781 - DNA, 552 bp, Homo sapiens
gtttctagttttttctgaagacattccctttttctccttagacctcaaagcactccaaaatatccgtttgcagatactataaagccagtgttgccaaactgctcagtcaaaagaaatgtttaactctatgagatgaatgctctcattccaaagcagtttctcagaaagctactttctagtttgcatttgaagatatttcctttttcaccataggcctaaaagcactctaaaatttctcttctcatattcaacacaaaaatatttccacactcctcaattaaaagaaaggtttaactctgtgagatgaatgcacacgtcacaaaaatgtttctgagaaagcctctttctagttwgtatctgaagatatttcctttttcatcataggcctcaatatgctcccaaatatctcttcacagatacttcaaatacagtgttttcaatctgctcaatcaaaagaaaagattaacactgtgagaagaatgcacatgtcacaaagtgctttctaagaaaccttctttctagtttttatctgaagacatttcctttttcacc

SEQ ID NO: 310782 - DNA, 502 bp, Homo sapiens
gcagttacttccaaaacagtgtcaccaaattgctcaatgaaaagcaaggtgtaactctgtggaggaatgtttgcatcacaaagcagttgccgagacaccttctttctggtttttatctaaagatattttctttttcatcatatgcctaaatgcgctcccaagtatctctttcctgattctaccaaaagaatgtttccacactgctcactcaaaagaaaggcttaactctgtgagattaatacacacatcacaaagcagtttcctcagaaakcttctttctagttttaatctgaggatatttcatttttcaccttaggcctcaaagtgctacaaaatatctcttctgagattctacaaaaatactgttgccaaactgcccaatcaaaacaaaagtttaactctgtgaggtgaatgtattctacacacagcagtttatcagaaagcttctttctactttttatctgaagatatttcctttttcaccataggcctgaaagtgctc

SEQ ID NO: 310783 - DNA, 213 bp, Homo sapiens
tcttcacttaaaaactaaacagaagcattctctgaaactcctctgtgaagtgtgtgttcaattcacatcgttgaacctttcttktgatagagcagtgttgaaacatactttttgtagaatctgcaagtgtccatttcgagttcttttgtgcgtatgttggaaaaagtgatatcttcacctgaaaaatagacagaagcattccagaaactgctt

SEQ ID NO: 310784 - DNA, 238 bp, Homo sapiens
tcttcacttaaaaactagacagaagcattctctgaaactcctctgtgaagtgtgtgttcaattcacatcgttgaacctttcttttgatagagcaktgttgaaacatactttttgtagaatctgcaagtgtccatttcgagttcttttgtgcgtatgttggaaaaagtgatatcttcacctgaaaaatagacagaagcattccagaaactgctttgtaacatgtgcattcaactcacag

SEQ ID NO: 310785 - DNA, 216 bp, Homo sapiens
tcttcacttaaaaactagacagaagcattctctgaaactcctctgtgaagtgtgtgttcaattcmcatcgttgaacctttcttttgatagagcagtgttgaaacatactttttgtagaatctgcaagtgtccatttcgagttcttttgtgcgtatgttggaaaaagtgatatcttcacctgaaaaatagacagaagcattccagaaactgctttgt

SEQ ID NO: 310786 - DNA, 611 bp, Homo sapiens
ttaactctgttagatgattgtatatatcacaagtcagtttctcaaaaacttctttctcattattatccaaagatatttcctttttcaccatatgttcccatgtgctgccaaatatcccttcrcagattctacaaaaaccatgtttccaaactgctgaatcaaaagaaaagtttaactctttgagattatcctacacatcagaaagcagtttctcataacgtttcttttcactttttatctgaagatactttctttttctccataggcttttctgcactacctaaattcacttcacagattttgcaaaaaaggtgttttcaaactgctcagtcaaaagaaatgtttaaagctgcaagatgaatgctcacatcacaaagcaatttctcaataacttttttctagtgtttatccgaagatatttgatttatcaccataggtttgaaggtgctcccaaatatagcttcacagattctacaaaaacagtgtttccaaactgatcaatcaaaagaaaattttaactctgtgagaggaaatcatacatcacaaagtagtttctgagataacttctgtctaattcgtctctgaagatacttccttttccacattaggcc

SEQ ID NO: 310787 - DNA, 611 bp, Homo sapiens
ttaactctgttagatgattgtatatatcacaagtcagtttctcaaaaacttctttctcattattatccaaagatatttcctttttcaccatatgttcccatgtgctgccaaatatcccttcgcagattctacaaaaaccatgtttccaaactgctgaatcaaaagaaaagtttaactctttgagattatcctacacatcagaaagcagtttctcataacgtttcttttcactttttatctgaagatactttctttttctccataggcttttctgcactacctaaattcacttcacagattttgcaaaaaaggtgtttycaaactgctcagtcaaaagaaatgtttaaagctgcaagatgaatgctcacatcacaaagcaatttctcaataacttttttctagtgtttatccgaagatatttgatttatcaccataggtttgaaggtgctcccaaatatagcttcacagattctacaaaaacagtgtttccaaactgatcaatcaaaagaaaattttaactctgtgagaggaaatcatacatcacaaagtagtttctgagataacttctgtctaattcgtctctgaagatacttccttttccacattaggcc

SEQ ID NO: 310788 - DNA, 447 bp, Homo sapiens
tgagattatcctacacatcagaaagcagtttctcataacgtttcttttcactttttatctgaagatactttctttttctccataggcttttctgcactacctaaattcacttcacagattttgcaaaaaaggtgttttcaaactgctcagtcaaaagaaatgtttaaagctgcaagatgaatgctcacatcacaaagcaatttctcaataacttttttctagtgtttatccgaagatatttgatttatcaccataggtttgaaggtgctcccaaatatagcttcacagattctacaaaaacagtgtttccaaactgatcaatcaaaagaaaaktttaactctgtgagaggaaatcatacatcacaaagtagtttctgagataacttctgtctaattcgtctctgaagatacttccttttccacattaggcctcactgcacttcaaaa

SEQ ID NO: 310789 - DNA, 575 bp, Homo sapiens
tctacaaaaaccatgtttccaaactgctgaatcaaaagaaaagtttaactctttgagattatcctacacatcagaaagcagtttctcataacgtttcttttcactttttatctgaagatactttctttttctccataggcttttctgcactacctaaattcacttcacagattttgcaaaaaaggtgttttcaaactgctcagtcaaaagaaatgtttaaagctgcaagatgaatgctcacatcacaaagcaatttctcaataacttttttctagtgtttatccgaagatatttgatttatcaccataggtttgaaggtgctcccaaatatagcttcacagattctacaaaaacagtgtttccaaactgatcaatcaaaagaaaattttaactctgtgagaggaaatcatacatcacaaagtagtttctgagataacttctgtctaattcgtctctgaagatacttycttttccacattaggcctcactgcacttcaaaatatccctttgcagattctacaaacacagtgtttcctaactgtccttgtgaaagaaggacttaaatctgtgacatg

SEQ ID NO: 310790 - DNA, 612 bp, Homo sapiens
tgaatgcacatagcagaaagcattttctcataatgcttctttccagtttttatctgaagatatttccttcttcaccattggcctttttgtgatacctaacatcctttcacagattctaaaaaaacagtgtttccaaactgtccaatcaaaagaaaagtttaactctgtgagataaatgcatacatcaaaaagaagtttctcaaaaagcttctttctcgtttttatctgatgatatttccttcatcaccataggmttcaatgcattcccaaatatcccatcacagattctaaaaaaacagtgtttccaaactgctcaatgaaaaaacaggttaaactctgtgaattgactgcatacatcacaaagtagtttctcagaaagcttctgtcttgttattctctgaagatatttccgtttccaccacaggcctcaatgcactcccaaatattccctcatagattctacaaaaacagtgtttctgaaatcttccatcaaaagaaggatttaactctttgagacgaatgcacacatcagaaagcagtttcccattgtgcttctttctggatatttgcctaaagatatttcccttttcatcataggctttcttgtgctac

SEQ ID NO: 310791 - DNA, 612 bp, Homo sapiens
tgaatgcacatagcagaaagcattttctcataatgcttctttccagtttttatctgaagatatttccttcttcaccattggcctttttgtgatacctaacatcctttcacagattctaaaaaaacagtgtttccaaactgtccaatcaaaagaaaagtttaactctgtgagataaatgcatacatcaaaaagaagtttctcaaaaagcttctttctcgtttttatctgatgatatttccttcatcaccataggcttcaatgcattcccaaatatcccatcacagattctaaaaaaacagtgtttccaaactgctcaatgaaaaaacaggttwaactctgtgaattgactgcatacatcacaaagtagtttctcagaaagcttctgtcttgttattctctgaagatatttccgtttccaccacaggcctcaatgcactcccaaatattccctcatagattctacaaaaacagtgtttctgaaatcttccatcaaaagaaggatttaactctttgagacgaatgcacacatcagaaagcagtttcccattgtgcttctttctggatatttgcctaaagatatttcccttttcatcataggctttcttgtgctac

SEQ ID NO: 310792 - DNA, 612 bp, Homo sapiens
tgaatgcacatagcagaaagcattttctcataatgcttctttccagtttttatctgaagatatttccttcttcaccattggcctttttgtgatacctaacatcctttcacagattctaaaaaaacagtgtttccaaactgtccaatcaaaagaaaagtttaactctgtgagataaatgcatacatcaaaaagaagtttctcaaaaagcttctttctcgtttttatctgatgatatttccttcatcaccataggcttcaatgcattcccaaatatcccatcacagattctaaaaaaacagtgtttccaaactgctcaatgaaaaaacaggttaaactctgtgaattgactgcatacatcacaaagtagtttctcagaaagcttctgtcttgttattctctgaagatatttccgtttccaccacaggcctcaatgcactcccaaatattccctcatagattctayaaaaacagtgtttctgaaatcttccatcaaaagaaggatttaactctttgagacgaatgcacacatcagaaagcagtttcccattgtgcttctttctggatatttgcctaaagatatttcccttttcatcataggctttcttgtgctac

SEQ ID NO: 310793 - DNA, 590 bp, Homo sapiens
caaatattgattcacagatttcacaaaaacagtgtttccaaactgctcagtcaaaagaattgtttaactatgggaaacgaatgcacacatcacaaacaagtttctcaaaaarctttccagtttatgtccaaagatattttttatcaccataggcttctctatgtgctcccaaatatcccttcacagattcttcaaaatatcactccacagattctacaaaaactgtgtctccaaatagatcaatcaaaaaaaagttttaattctgtcagttgaatgcaaacatcacaaagcagtttctcaaatatcttttttctagtttttatccgaagatattttcttcttcaccatagtcctcagtgcactcccaaacatcccttctcatattctacaaaaacagtgtttccaaactgctcagtcaaaagaaacgtttaactctgagaataatgcacacatcacaaactgttttctcaaaaagcttctttctagttttcatctgaagttatttcctttttcaccttaggcctcttgggctcccaaattcgtttttgcagttactacaaaaacagtgtttccaaactgataaaataaag

SEQ ID NO: 310794 - DNA, 577 bp, Homo sapiens
cccttttcatcataggctttcttgtgctaccaaatattgattcacagatttcacaaaaacagtgtttccaaactgctcagtcaaaagaattgtttaactatgggaaacgaatgcacacatcacaaacaagtttctcaaaaagctttccagtttatgtccaaagatattttttatcaccataggcttctctatgtgctcccaaatatcccttcacagattcttcaaaatatcactccacagattctacaaaaactgtgtctccaaatagatcaatcaaaaaaaagttttaattctgtcagttgaatgcaaacatcacaaagcagtttctcaaatatcttttttctagtttttatccgaagatattttcttcttcaccatagtcctcagtgcactcccaaacatcccttctcatattctacaaaaacagtgtttccaaactgctcagtcaaaagaaacgtttaactctgagaataatgcacacatcacaaactgttttctcaaaaagcttctttctagttttcatctkaagttatttcctttttcaccttaggcctcttgggctcccaaattcgttttt

SEQ ID NO: 310795 - DNA, 588 bp, Homo sapiens
tacagattctacaaaaagagtgtttccaaagtgctcaaaaagaaaaaaaaagtttaactctgtaagatgaatgcacacatcacaaagcagtttctcaggtagtttctgtctagttcttctctgaagatatttcctttgccaccataggccacaatgcactctgaaatatcccttcacagaatctacagaaacagtgtttccaaattgttcaatcaaaagaaagacttaaaactgtgagatgaatgcgcacatcacaaggcagtttcttttaacgattctttccagtttttctctgaaattattcttgttcaccataatccttttatgcgctacctaacattgcttcgcaawtgattgtaaaaccgtgttcccaaactgctcagtcaaagactagtttaactctgtgtgatgaatgcatccatcagaaaacagtttctcaagttctttctagtttttttctgaagatatttccttttatgccataggcatcagtgagctcccaagcatccctttgcagattctacaaaaacagtgtttccaaactgatcaatcaaaagaaaggtttaactctgtgagatgagagcgtac

SEQ ID NO: 310796 - DNA, 588 bp, Homo sapiens
tacagattctacaaaaagagtgtttccaaagtgctcaaaaagaaaaaaaaagtttaactctgtaagatgaatgcacacatcacaaagcagtttctcaggtagtttctgtctagttcttctctgaagatatttcctttgccaccataggccacaatgcactctgaaatatcccttcacagaatctacagaaacagtgtttccaaattgttcaatcaaaagaaagacttaaaactgtgagatgaatgcgcacatcacaaggcagtttcttttaacgattctttccagtttttctctgaaattattcttgttcaccataatccttttatgcgctacctaacattgcttcgcaaatgattgtaaaaccgtgttcccaaactgctcagtcaaagactagtttaactctgtgtgatgaatgcatccatcagaaaacagtttctcaagttctttctagtttttttctgaagatatttccytttatgccataggcatcagtgagctcccaagcatccctttgcagattctacaaaaacagtgtttccaaactgatcaatcaaaagaaaggtttaactctgtgagatgagagcgtac

SEQ ID NO: 310797 - DNA, 513 bp, Homo sapiens
taaagcttccttctcatttttatccaaagatatttcctttttcaaaatakgcttcaatgtgctcccaaatatcccttcacagattctacagaaatagtgtttcaaaactgctcaatcaagagaaagttttaattctgtaagatgaacgcacacatcacaaagcagtttctcagaaaacttatgtctatttcttctctgaagatatttccttttccaccataggcctcaatatgctcccaaatatccctttgcagattctacaaaaccagtgtttccaaactcttccacataaagaaggagttagctgcatcacatgaacatgcacaacacaaagctgtttctcataacgcttctttccagtttttatctgaagatatttccttgttcactatagtctttttaatggtgcctaatattgcttggcagatttttcaaaaacgttgtttccaaactgcttagtcaaaagaaaggtttatcattgtgagatgaatgcacaagtcacataagtttctc

SEQ ID NO: 310798 - DNA, 597 bp, Homo sapiens
taaagcttccttctcatttttatccaaagatatttcctttttcaaaataggcttcaatgtgctcccaaatatcccttcacagattctacagaaatagtgtttcaaaactgctcaatcaagagaaagttttaattctgtaagatgaacgcacacatcacaaagcagtttctcagaaaacttatgtctatttcttctctgaagatatttccttttccaccataggcctcaatatgctcccaaatatccctttgcagattctacaaaaccagtgtttccaaactcttccacataaagaaggagttagctgcatcacatgaacatgcacaacacaaagctgtttctcataacgcttctttccagtttttatctgaagatatttccttgttcactatagtctttttaatggtgcctaatattgcttggcagatttttcaaaaacgttgtttccaaactgcttagtcaaaagaaaggtttatcrttgtgagatgaatgcacaagtcacataagtttctcaaaaagcttctttctagtttttatctgaagatatttttttcttcaccataggcttcaatgcaatcccaaatatcccgttgcaga

SEQ ID NO: 310799 - DNA, 370 bp, Homo sapiens
gtttccaaactgctcagtcaaaagaaaggtttaactctgtaagatgaatgcacacatcacaaagccgtttctcaaaaagcttccttctagtctttatccaaaggtatttcctttttcaccattggcttcaatgagctcccaaacatccctttgcaggtactacaaaaacagtgtttccaatctgctcagtcaaaagaaaggtttaactctgtgagatgactgcacatgcacacaacacaaagcattttctcagaaagcttcttcctaattmttctctgaagatatttcctcttccaccataggcctcaatgcgctcccaaatatctcttcacagattctacaaaaacagtgttttcaaactgttccatca

SEQ ID NO: 310800 - DNA, 435 bp, Homo sapiens
cccttcactgatcctacaaaaagagtgtttcaaaactgctcaataaaacaagattaacactgtgagttgaactcacacatcagaaagcagtttctcataamgcttctttcccatttttatctgaagatatttccttcttcaccatagccttttttgcgttacctaatatcactttgttgatagcgcaaaaagagtgtttccaaactgctcagtcaaaagaaacttttaacactgggggatgaatgcacacatcagaaagcagtttctcaaaaagcttctttctagtttttatccgaagatatttcctttaacactataggcacaatgcactcacaaatatcccatcacagattctacaaaaacagtgttttcaaactgcttaatgaaaaaataagtttacctctgtgagttgaatgcacacatcacagagcaatt

SEQ ID NO: 310801 - DNA, 435 bp, Homo sapiens
cccttcactgatcctacaaaaagagtgtttcaaaactgctcaataaaacaagattaacactgtgagttgaactcacacatcagaaagcagtttctcataacgcttctttcccatttttatctgaagatatttccttcttcaccatagccttttttgcgttacctaatatcactttgttgatagcgcaaaaagagtgtttccaaactgctcagtcaaaagaaacttttaacwctgggggatgaatgcacacatcagaaagcagtttctcaaaaagcttctttctagtttttatccgaagatatttcctttaacactataggcacaatgcactcacaaatatcccatcacagattctacaaaaacagtgttttcaaactgcttaatgaaaaaataagtttacctctgtgagttgaatgcacacatcacagagcaatt

SEQ ID NO: 310802 - DNA, 435 bp, Homo sapiens
cccttcactgatcctacaaaaagagtgtttcaaaactgctcaataaaacaagattaacactgtgagttgaactcacacatcagaaagcagtttctcataacgcttctttcccatttttatctgaagatatttccttcttcaccatagccttttttgcgttacctaatatcactttgttgatagcgcaaaaagagtgtttccaaactgctcagtcaaaagaaacttttaacactgggggatgaatgcacacatcagaaagcagtttctcaaaaagcttmtttctagtttttatccgaagatatttcctttaacactataggcacaatgcactcacaaatatcccatcacagattctacaaaaacagtgttttcaaactgcttaatgaaaaaataagtttacctctgtgagttgaatgcacacatcacagagcaatt

SEQ ID NO: 310803 - DNA, 538 bp, Homo sapiens
tctagtaggttcttttttattttcccttagtgtcatctggtctgagaaataaagggataaaatataacagagagaaattttaaagctgagtgtccaggggaggcatcacatgtcggcacattccatgatgccccctgagccataaaaccagcaagttttcattagtgattttcagaagggtaggtagtgtagaatagggtgtggttcacagagatcacatgcttcacaagataatgagatatcacaaggtaaatggaggcagggcgggatcacagaaccacaggaccggggcaaaattacaattgctaaagaagtttcaggcacacactgtcattgataacatcttatcaggagacagggtttgagacagggtttgatcagacaactggtctgatcaaaatttattaggcaggaatttcctcatcctaataagcctgggagggctgcaggagacrggggcttatttcacccctgcagctgcaaccataaaagatggccacccacaaagcagccatttcagaggcctaccctcagggaa

SEQ ID NO: 310804 - DNA, 604 bp, Homo sapiens
cttatctttgtgagaccaatgcacacatcacaaagcagtttctcagaaaatgtctttctagtttttatgtgaatatatttcctttttcaccataggcttcaatgcactcccaaatatcccttcgcagattctacaaaaatagtgtttcctaactgctcaaccaaaagaaagttgtaactctgtgagaagaatgtacacattacaaaayagttcctcagaaagcatctttctggtttttatgtgaggatatatcctctcttaccatacgccccatgcattcccaaatatcctttcacagattctgcaaaaactgtgtttccaaactacttaatcaaaagaatgcttaaattctatgagacggaagcagacatcacaaagcagtttctcagaaatctcctttctctttattatctgaggatatttcctttttctccataggactcaatgtgctcctaaatatcactttgcagattctacaaaaacagcgtttccaagatgctcaattaaaagaaagtttaacactgtgagatgaatgaacacatcacaaagcagttaatctgaaagcttcttttaagtttttatctgaggatagttccttttttac

SEQ ID NO: 310805 - DNA, 604 bp, Homo sapiens
cttatctttgtgagaccaatgcacacatcacaaagcagtttctcagaaaatgtctttctagtttttatgtgaatatatttcctttttcaccataggcttcaatgcactcccaaatatcccttcgcagattctacaaaaatagtgtttcctaactgctcaaccaaaagaaagttgtaactctgtgagaagaatgtacacattacaaaacagttcctcagaaarcatctttctggtttttatgtgaggatatatcctctcttaccatacgccccatgcattcccaaatatcctttcacagattctgcaaaaactgtgtttccaaactacttaatcaaaagaatgcttaaattctatgagacggaagcagacatcacaaagcagtttctcagaaatctcctttctctttattatctgaggatatttcctttttctccataggactcaatgtgctcctaaatatcactttgcagattctacaaaaacagcgtttccaagatgctcaattaaaagaaagtttaacactgtgagatgaatgaacacatcacaaagcagttaatctgaaagcttcttttaagtttttatctgaggatagttccttttttac

SEQ ID NO: 310806 - DNA, 626 bp, Homo sapiens
agattctacaaaaacagtgtttccaaactgctaaataaatagaaagccttatctttgtgagaccaatgcacacatcacaaagcagtttctcagaaaatgtctttctagtttttatgtgaatatatttcctttttcaccataggcttcaatgcactcccaaatatcccttcgcagattctacaaaaatagtgtttcctaactgctcaaccaaaagaaagttgtaactctgtgagaagaatgtacacattacaaaacagttcctcagaaagcatctttctggtttttatgtgaggatatatcctctcttaccatacgccccatgcattcccaaatatcctttcacagattctgcaaaaactgtgtttccaaactacttaatcaaaagaatgcttaaattctatgagacggaagcagacatcacaaagcagtttctcagaaatctcctttctctttwttatctgaggatatttcctttttctccataggactcaatgtgctcctaaatatcactttgcagattctacaaaaacagcgtttccaagatgctcaattaaaagaaagtttaacactgtgagatgaatgaacacatcacaaagcagttaatctgaaagcttcttttaagtttt

SEQ ID NO: 310807 - DNA, 557 bp, Homo sapiens
taactctgtgagaagaatgtacacattacaaaacagttcctcagaaagcatctttctggtttttatgtgaggatatatcctctcttaccatacgccccatgcattcccaaatatcctttcacagattctgcaaaaactgtgtttccaaactacttaatcaaaagaatgcttaaattctatgagacggaagcagacatcacaaagcagtttctcagaaatctcctttctctttattatctgaggatatttcctttttctccataggactcaatgtgctcctaaatatcactttgcagattctacaaaaacagygtttccaagatgctcaattaaaagaaagtttaacactgtgagatgaatgaacacatcacaaagcagttaatctgaaagcttcttttaagtttttatctgaggatagttccttttttaccagaggcctcaatgtactcccatataacccttcgcagattctacaaaaacagtgtttccaaaatgctacatcaatagaaaattttaattctgtgagatgaatggacacatcataaagctgttaatca

SEQ ID NO: 310808 - DNA, 426 bp, Homo sapiens
tcctttttcaccatgccctcaatgtgctcacaaatatccctttgctgattctaaaaaaaacagtgtttccaaactgctcaatcaatagaaaggtttatttctgtgagatgaatgycctcatcacaaagccgtttctcaggaagcttccttttgtttttttctgaatatatttactacttcaccataggccacaaagtgctcccaaatatcctttcatagattctacaagaacagtgtattgaaacagctcaaaggaaaggtttaccactgtgtgacaaatgcacacatcacaaagctgtttctcagaaagaatctttccagtttttatctgaagatatttcctttttcaccataggcctcaaagggctcccaaatatccctttgcagattcttcaaaaacaggggttaaaaactggacaatcaaag

SEQ ID NO: 310809 - DNA, 426 bp, Homo sapiens
tcctttttcaccatgccctcaatgtgctcacaaatatccctttgctgattctaaaaaaaacagtgtttccaaactgctcaatcaatagaaaggtttatttctgtgagatgaatgccctcatcacaaagcmgtttctcaggaagcttccttttgtttttttctgaatatatttactacttcaccataggccacaaagtgctcccaaatatcctttcatagattctacaagaacagtgtattgaaacagctcaaaggaaaggtttaccactgtgtgacaaatgcacacatcacaaagctgtttctcagaaagaatctttccagtttttatctgaagatatttcctttttcaccataggcctcaaagggctcccaaatatccctttgcagattcttcaaaaacaggggttaaaaactggacaatcaaag

SEQ ID NO: 310810 - DNA, 426 bp, Homo sapiens
tcctttttcaccatgccctcaatgtgctcacaaatatccctttgctgattctaaaaaaaacagtgtttccaaactgctcaatcaatagaaaggtttatttctgtgagatgaatgccctcatcacaaagccgtttctcaggaagcttccttttgtttttttctgaatatatttactayttcaccataggccacaaagtgctcccaaatatcctttcatagattctacaagaacagtgtattgaaacagctcaaaggaaaggtttaccactgtgtgacaaatgcacacatcacaaagctgtttctcagaaagaatctttccagtttttatctgaagatatttcctttttcaccataggcctcaaagggctcccaaatatccctttgcagattcttcaaaaacaggggttaaaaactggacaatcaaag

SEQ ID NO: 310811 - DNA, 426 bp, Homo sapiens
tcctttttcaccatgccctcaatgtgctcacaaatatccctttgctgattctaaaaaaaacagtgtttccaaactgctcaatcaatagaaaggtttatttctgtgagatgaatgccctcatcacaaagccgtttctcaggaagcttccttttgtttttttctgaatatatttactacttcaccataggccacaaagtgctcccaaatatcctttcatagattctacaagaacagtgtattgaaacagctcaaaggaaaggtttaccactgtgtgacraatgcacacatcacaaagctgtttctcagaaagaatctttccagtttttatctgaagatatttcctttttcaccataggcctcaaagggctcccaaatatccctttgcagattcttcaaaaacaggggttaaaaactggacaatcaaag

SEQ ID NO: 310812 - DNA, 478 bp, Homo sapiens
ccctttgcagattcttcaaaaacaggggttaaaaactggacaatcaaaggacagttttaactctgtgagaagaatccacacatcacaaatcagtttctgagaaagcttctttctagtatttatatgaagctatttccctaggcctgaacgttttcccaaatatccctttgcagattctacatgaacattgtttccaaactgctcaatcgaaagaaagatttaattctgtgagatgaatgcactaatcacaaagcagtttctcagaaagcttttttttcatttttttctgatgatatttcctatttcacaataagtcgcaatgtcytcccaaatatcccactgcagattctgccaaaacagtgtttccaaactaagcaatcaaattaagttcaactctgtgagagttaaacaaagcagtttctcagaaaacttctttgtagtttttctctgaagttatttcatttttcaccatgggctt

SEQ ID NO: 310813 - DNA, 478 bp, Homo sapiens
ccctttgcagattcttcaaaaacaggggttaaaaactggacaatcaaaggacagttttaactctgtgagaagaatccacacatcacaaatcagtttctgagaaagcttctttctagtatttatatgaagctatttccctaggcctgaacgttttcccaaatatccctttgcagattctacatgaacattgtttccaaactgctcaatcgaaagaaagatttaattctgtgagatgaatgcactaatcacaaagcagtttctcagaaagcttttttttcatttttttctgatgatatttcctatttcacaataagtcgcaatgtcttcccaaatatcccactgcagattctgccaaaacagtgtttccaaactamgcaatcaaattaagttcaactctgtgagagttaaacaaagcagtttctcagaaaacttctttgtagtttttctctgaagttatttcatttttcaccatgggctt

SEQ ID NO: 310814 - DNA, 589 bp, Homo sapiens
aaagcttctttctagtatttatctaaagatatttgcctaggtctcaatgcattcccaaatatcattttgtagattagacataaacagtgtttccaaactgctcaatcaaaggaaagktttaattctgtgagatgaatgcattcatcacaaagccatttctcagaaagcttcctttaatttttttcttaacatatttcctatttcacaataggcctcaatgcactaccaaatatcccatcacagattctgccaaccagtgtttccaaactactcaatcaaattaaggtttaactctgtgagatgaatgcacagatcacaaagcagtttctcagaaaagttctttgcagattttctctgaaaatattttgtttttcaccatgggcctcaaagtgaacacatatatccctttgtttatactagaaaaaccatgtttccagactgcacaatcaaaagaaaggtttaactcagggagatgaatgcactggtcaccaagcagtttctcagaaagattccagtttttatctgaagatatttcttttttcacaatgtctacattcactccaaaatatcccttcagagattctaccaa

SEQ ID NO: 310815 - DNA, 589 bp, Homo sapiens
aaagcttctttctagtatttatctaaagatatttgcctaggtctcaatgcattcccaaatatcattttgtagattagacataaacagtgtttccaaactgctcaatcaaaggaaaggtttaattctgtgagatgaatgcattcatcacaaagccatttctcagaaagcttcctttaatttttttcttaacatatttcctatttcacaataggcctcaatgcactaccaaatatcccatcacagattctgccaaccagtgtttccaaactactcaatcaaattaaggtttaactctgtgagatgaatgcacagatcacaaagcagtttctcagaaaagttctttgcagattttctctgaaaatattttgtttttcaccatgggcctcaaagtgaacacatatatccctttgyttatactagaaaaaccatgtttccagactgcacaatcaaaagaaaggtttaactcagggagatgaatgcactggtcaccaagcagtttctcagaaagattccagtttttatctgaagatatttcttttttcacaatgtctacattcactccaaaatatcccttcagagattctaccaa

SEQ ID NO: 310816 - DNA, 497 bp, Homo sapiens
ttcttttttcacaatgtctrcattcactccaaaatatcccttcagagattctaccaacacattgtttcctaactgctcactcaaaagaaaggtttaactctttgtgctgagtgcacacatcacaaaacagtttctcagaaagattctttttaggttttctctgaagacatttcatttttcaccatgagcctcaaagcactctcatatatccctttgtttatactacaaaaaccatgtttccaaactgctcagtcatattaagatttaactttgagagaagaatgcacacatcataaagaagtttctcagaaagtttctttttagtttttctctgaagacatttcctttttcaccacaggcctcaatgtgctcccaaatattccctcgcagattctaaaaaaacagtgtttctgaatggctcactcaaaacaaaggtttgcctatgtgagatgaatgcacaaatcacaaagccatttcacagaaaacttctttctatt

SEQ ID NO: 310817 - DNA, 519 bp, Homo sapiens
aaaagtgttacaaacagctccatcaaaagtaaagtttaactctgtgaagtgaatgcacacatcacaaagcagtttccttgaaaatttctttctaatttttatctcaaggtatttccttttcaaccataggcctctatgctctcccatacatcccttcataggttctacaaaaactgggtttctagactgctcaatcaaaatacmtgtttaactctgtgagaagaatgcacacatcacaaatcagtatctcaaaaagcttttttctggtttttatctgaagatgtgtcctttttcaccataggccccaatgcgatacaaaatattccttcacagattctaccaaaacagtgtttccaaactcctcaataaaaacaaaggttaaactccgtgagataaattcacagatcacaaagctgtttctcagaaaactttatatagtattgctctgaagatatttccttcttcaccctaaacctcaatgtgctcccatatatccctccacagagtctacaaaaacag

SEQ ID NO: 310818 - DNA, 593 bp, Homo sapiens
tatttccttcttcaccctaaacctcaatgtgctcccatatatccctccacagagtctacaaaaacagtgtgtcataactgctcaatgaaaagaaaggtttaactctgtgagaagaatgcaagcaacacaaaacagattctgggaaagtttctttttagtttttatctgaagatatttcatttttcaccataggcctcaacrctctcccaaatataccctcgcatatcctacaaaaacagtgtttccaaactgctcaatcaaaagaaatgtttaactctgtaagaagaatgcacacgtcacaaaggggtctctgagaaagcttctttctagtatttatctgaagatatttcctttttctccacaggcctacatgtgctccaaaatatacctctgcaggttatacaaaaacagtgtttccaaactgctcaatcaacagacagtttttattctttaaagtgaatgcatccatcacaaagcagtttctcagaaagattctttcagtttttatctgaaggtatttcctttttcaccatataccttaatgcactcccaaatatcccttctctgaactgctcaaacaatagaaatattta

SEQ ID NO: 310819 - DNA, 593 bp, Homo sapiens
tatttccttcttcaccctaaacctcaatgtgctcccatatatccctccacagagtctacaaaaacagtgtgtcataactgctcaatgaaaagaaaggtttaactctgtgagaagaatgcaagcaacacaaaacagattctgggaaagtttctttttagtttttatctgaagatatttcatttttcaccataggcctcaacgctctcccaaatataccstcgcatatcctacaaaaacagtgtttccaaactgctcaatcaaaagaaatgtttaactctgtaagaagaatgcacacgtcacaaaggggtctctgagaaagcttctttctagtatttatctgaagatatttcctttttctccacaggcctacatgtgctccaaaatatacctctgcaggttatacaaaaacagtgtttccaaactgctcaatcaacagacagtttttattctttaaagtgaatgcatccatcacaaagcagtttctcagaaagattctttcagtttttatctgaaggtatttcctttttcaccatataccttaatgcactcccaaatatcccttctctgaactgctcaaacaatagaaatattta

SEQ ID NO: 310820 - DNA, 609 bp, Homo sapiens
cttctttttagtttttgtctgaagatatttcctttttcaccataggcatcaatgggctcccatatatccctccttagaatttacagaaacagtgtttccaaactgctcaatgaaaagtgaggttaaactctgtgagaagaatgcacacatcacaaagcagtttctgagaaatcttccttctagtatttatctgaagatattttctttttctccataggactcaaagcactccaaaatatcccttggcagattctaaaaaaaaacagtgtttccaaattgctcaatcaaaagaaaggtttaattgtatgagatgaatgcacaaatcacaaaactttttccagaaaacttttttctagtatttacctgatratatttcccttttcaccataggcctcaaagagctcccaaatatcccttctcaaattctacaaaaacagtgtttccaaactgcccaatcaaaacagttttaactctatatgctgaatgcacacatcacaaagcagtttctcagaatacttctttctagtttttatctgaagatatttccttttttaccctcagccttaaaatactcccaaatatcccttcttaagtaattcaaaaagagtg

SEQ ID NO: 310821 - DNA, 532 bp, Homo sapiens
aatcaaaagaaaggttttactctgtgagaagaatgctcatatcacaaagcagtttctgagaaagtttctttctagtatttatctgaatacatttcctttttcaccataggcttcaaggagctcttaaatatccctttrgagattctgaaacacagtttttccaaattgctccataaaaagaaatgtttaattctgtgagataaatgcacttatcacaaaccagtttctcagaaagcttctttttatttttttctcaatatatttcctttttcattataggcctcaaagcactcccaaatatcgtttcaaatattctaccaaaacagtgtttccaaacagctcaatcaaaaggaaggtttaactctgtgagatgaatgcagtcattccaaagcagattctcagaatgcttcattgtagttcttctctgaaggtatttccttttacaccataggccttaaagggcttttatatatcccttggtagaatttacaggaacagtgtttccaaaatgcttaatcaaaaatgaaattaa

SEQ ID NO: 310822 - DNA, 532 bp, Homo sapiens
aatcaaaagaaaggttttactctgtgagaagaatgctcatatcacaaagcagtttctgagaaagtttctttctagtatttatctgaatacatttcctttttcaccataggcttcaaggagctcttaaatatccctttggagattctgaaacacagtttttccaaattgctccataaaaagaaatgtttaattctgtgagatraatgcacttatcacaaaccagtttctcagaaagcttctttttatttttttctcaatatatttcctttttcattataggcctcaaagcactcccaaatatcgtttcaaatattctaccaaaacagtgtttccaaacagctcaatcaaaaggaaggtttaactctgtgagatgaatgcagtcattccaaagcagattctcagaatgcttcattgtagttcttctctgaaggtatttccttttacaccataggccttaaagggcttttatatatcccttggtagaatttacaggaacagtgtttccaaaatgcttaatcaaaaatgaaattaa

SEQ ID NO: 310823 - DNA, 536 bp, Homo sapiens
agaagaatgctcatatcacaaagcagtttctgagaaagtttctttctagtatttatctgaatacatttcctttttcaccataggcttcaaggagctcttaaatatccctttggagattctgaaacacagtttttccaaattgctccataaaaagaaatgtttaattctgtgagataaatgcacttatcacaaaccagtttctcagaaagcttctttttatttttttctcaatatatttcctttttcattataggcctcaaagcactcccaaatatcrtttcaaatattctaccaaaacagtgtttccaaacagctcaatcaaaaggaaggtttaactctgtgagatgaatgcagtcattccaaagcagattctcagaatgcttcattgtagttcttctctgaaggtatttccttttacaccataggccttaaagggcttttatatatcccttggtagaatttacaggaacagtgtttccaaaatgcttaatcaaaaatgaaattaaactctgggagaagaatgcacacatcacaaa

SEQ ID NO: 310824 - DNA, 536 bp, Homo sapiens
agaagaatgctcatatcacaaagcagtttctgagaaagtttctttctagtatttatctgaatacatttcctttttcaccataggcttcaaggagctcttaaatatccctttggagattctgaaacacagtttttccaaattgctccataaaaagaaatgtttaattctgtgagataaatgcacttatcacaaaccagtttctcagaaagcttctttttatttttttctcaatatatttcctttttcattataggcctcaaagcactcccaaatatcgtttcaaatattctaccaaaacagtgtttccaaacagctcaatcaaaaggaaggtttaactctgtgagatgaatgcagtcattccaaagcagattctcagaatgcttcattgtagttcttctctgaaggtatttcctttwacaccataggccttaaagggcttttatatatcccttggtagaatttacaggaacagtgtttccaaaatgcttaatcaaaaatgaaattaaactctgggagaagaatgcacacatcacaaa

SEQ ID NO: 310825 - DNA, 535 bp, Homo sapiens
tcccttcacaaattctacaaaaacagtgtttccaaactgcacactcaaaagaaaggttcaactctgttagatgaatgcacacatcacaaagcagtttctgagaaagcttctttctggcttttatctggagatatttcctttttcaccataggcctcaatgcacttccaaatgtcccttcacagatttaaaaaagcagtgtttccaaactactcaatcaaaagaaaggtttacttctgtgagctgaatgcactcatcacagagtagtttctcagaaaacttctttctagtgtttatgtgaagatatttcctttttcaccatgggyctcaaagcactgaaaaatgcccctttgcagattctacaaaaacggtgttgccaagctactcaattgaaaaaaaaagttgaactctttgagatgaatgcactcatcacaaagcagtttctcagaaagcgtctttctattttttatctgaagatatttccttttatactacaggcctcaatacgttcccaaataccccttggtgaattttaca

SEQ ID NO: 310826 - DNA, 535 bp, Homo sapiens
tcccttcacaaattctacaaaaacagtgtttccaaactgcacactcaaaagaaaggttcaactctgttagatgaatgcacacatcacaaagcagtttctgagaaagcttctttctggcttttatctggagatatttcctttttcaccataggcctcaatgcacttccaaatgtcccttcacagatttaaaaaagcagtgtttccaaactactcaatcaaaagaaaggtttacttctgtgagctgaatgcactcatcacagagtagtttctcagaaaacttctttctagtgtttatgtgaagatatttcctttttcaccatgggtctcaaagcactgaaaaatgcccctttgcagattctacaaaaacggtgttgccaagctactcaattgaaaaaaaaagttgaactctttgagrtgaatgcactcatcacaaagcagtttctcagaaagcgtctttctattttttatctgaagatatttccttttatactacaggcctcaatacgttcccaaataccccttggtgaattttaca

SEQ ID NO: 310827 - DNA, 535 bp, Homo sapiens
tcccttcacaaattctacaaaaacagtgtttccaaactgcacactcaaaagaaaggttcaactctgttagatgaatgcacacatcacaaagcagtttctgagaaagcttctttctggcttttatctggagatatttcctttttcaccataggcctcaatgcacttccaaatgtcccttcacagatttaaaaaagcagtgtttccaaactactcaatcaaaagaaaggtttacttctgtgagctgaatgcactcatcacagagtagtttctcagaaaacttctttctagtgtttatgtgaagatatttcctttttcaccatgggtctcaaagcactgaaaaatgcccctttgcagattctacaaaaacggtgttgccaagctactcaattgaaaaaaaaagttgaactctttgagatgaatgcactcatcacaaagcagtttctcagaaagcgtctttctattttttatctgaagatatttccttttatactacaggcctcaatacrttcccaaataccccttggtgaattttaca

SEQ ID NO: 310828 - DNA, 504 bp, Homo sapiens
gtcacagaattaaacctttyttttgacagagcagtctggaaacactgtttttgtagaaaccacaaagagatatatgggagtacttagaggagaatggtgaaaaaggaaatatcttcagaaaaaactagaaagaaactttctgagaaaccacttttttatgagtatattcatgtcacagagctaaacctttcttttgattgagcagtttggaaacactatttttgtagaaactgtgaagggatacttggcagtgcatggaggcctatggtgaaaaatgaaatatcatcagataaacactagaaagaagctttctcagaaaccgttttgtgatgtgtgcactcttttcacagagctaaactttccttttgattgagcagtatggaaacactgtttttctaaaatatgcaaagggatatttgggagcacattctggcctaagatgaaaaaggaaacaccttcagaaaaaacattgaaagaagttttctcagaaactactttgtgatg

SEQ ID NO: 310829 - DNA, 517 bp, Homo sapiens
aagggatacttggcagtgcatggaggcctatggtgaaaaatgaaatatcatcagataaacactagaaagaagctttctcagaaaccgttttgtgatgtgtgcactcttttcacagagctaaactttccttttgattgagcagtatggaaacactgtttttctaaaatatgcaaagggatatttgggagcacattstggcctaagatgaaaaaggaaacaccttcagaaaaaacattgaaagaagttttctcagaaactactttgtgatgtgtgcattctcctcacagagttaaaacttgcttttattgagcagtttggaaacattgttttgatagaatctgtgaagggacactttgaagtacattgtggcctatcgtgaaaaaggaaatatcttcagataaaaagtagaaagaaaccttctaggaaattgctttatgatgggtgcattcatctcacagagttaaacctttcttttcactgagcagtttgggtaccgtatttttgtagtatctggaaa

SEQ ID NO: 310830 - DNA, 517 bp, Homo sapiens
aagggatacttggcagtgcatggaggcctatggtgaaaaatgaaatatcatcagataaacactagaaagaagctttctcagaaaccgttttgtgatgtgtgcactcttttcacagagctaaactttccttttgattgagcagtatggaaacactgtttttctaaaatatgcaaagggatatttgggagcacattctggcctaagatgaaaaaggaaacaccttcagaaaaaacattgaaagaagttttctcagaaactrctttgtgatgtgtgcattctcctcacagagttaaaacttgcttttattgagcagtttggaaacattgttttgatagaatctgtgaagggacactttgaagtacattgtggcctatcgtgaaaaaggaaatatcttcagataaaaagtagaaagaaaccttctaggaaattgctttatgatgggtgcattcatctcacagagttaaacctttcttttcactgagcagtttgggtaccgtatttttgtagtatctggaaa

SEQ ID NO: 310831 - DNA, 517 bp, Homo sapiens
aagggatacttggcagtgcatggaggcctatggtgaaaaatgaaatatcatcagataaacactagaaagaagctttctcagaaaccgttttgtgatgtgtgcactcttttcacagagctaaactttccttttgattgagcagtatggaaacactgtttttctaaaatatgcaaagggatatttgggagcacattctggcctaagatgaaaaaggaaacaccttcagaaaaaacattgaaagaagttttctcagaaactactttgtgatgtgtgcattctcctcacagagttaaaacttgcttttaytgagcagtttggaaacattgttttgatagaatctgtgaagggacactttgaagtacattgtggcctatcgtgaaaaaggaaatatcttcagataaaaagtagaaagaaaccttctaggaaattgctttatgatgggtgcattcatctcacagagttaaacctttcttttcactgagcagtttgggtaccgtatttttgtagtatctggaaa

SEQ ID NO: 310832 - DNA, 562 bp, Homo sapiens
  misc_feature (1)...(562): n = A,T,C or G
nnnnnnnnnnnnnnnnnnnnnnnnnnnnnnnnnnnnnntttcttttgattgaaaagtttggagacactgttttggtagaatctacgaagggatctttgggagtttctcagaaacaaaaaagaaggtttctgagaaactgctttgtggtgactgcattaatctcacagggttaaaccttgcttttgattgatcagcttggcaatggtgtttttgtagaatctgtgaagggatrtatgggatcactttgagagacctgtggtgaaaaatgaaatatctgcagataaaaactagaaagaagctttctgggaaattgcttcgtgatgtgtgcattcttctcacagagttaaaacttccttttgcttgagcagttttgtaacactgtttatgtgaaatctgcaaagggaaatttgggagtgcattgaggcttattttgaaaaaggaaataccttcagataaacactagaaagaagctttctcagaaaccactttgtgatgtgtgcattcttctcagagttatacctttcttttgattgagccgttttgaaacactgtttatgtgaaa

SEQ ID NO: 310833 - DNA, 562 bp, Homo sapiens
  misc_feature (1)...(562): n = A,T,C or G
nnnnnnnnnnnnnnnnnnnnnnnnnnnnnnnnnnnnnntttcttttgattgaaaagtttggagacactgttttggtagaatctacgaagggatctttgggagtttctcagaaacaaaaaagaaggtttctgagaaactgctttgtggtgactgcattaatctcacagggttaaaccttgcttttgattgatcagcttggcaatggtgtttttgtagaatctgtgaagggatgtatgggatcactttgagagacctgtggtgaaaaatgaaatatctgcagataaaaactagaaagaagctttctgggaaattgcttygtgatgtgtgcattcttctcacagagttaaaacttccttttgcttgagcagttttgtaacactgtttatgtgaaatctgcaaagggaaatttgggagtgcattgaggcttattttgaaaaaggaaataccttcagataaacactagaaagaagctttctcagaaaccactttgtgatgtgtgcattcttctcagagttatacctttcttttgattgagccgttttgaaacactgtttatgtgaaa

SEQ ID NO: 310834 - DNA, 562 bp, Homo sapiens
  misc_feature (1)...(562): n = A,T,C or G
nnnnnnnnnnnnnnnnnnnnnnnnnnnnnnnnnnnnnntttcttttgattgaaaagtttggagacactgttttggtagaatctacgaagggatctttgggagtttctcagaaacaaaaaagaaggtttctgagaaactgctttgtggtgactgcattaatctcacagggttaaaccttgcttttgattgatcagcttggcaatggtgtttttgtagaatctgtgaagggatgtatgggatcactttgagagacctgtggtgaaaaatgaaatatctgcagataaaaactagaaagaagctttctgggaaattgcttcktgatgtgtgcattcttctcacagagttaaaacttccttttgcttgagcagttttgtaacactgtttatgtgaaatctgcaaagggaaatttgggagtgcattgaggcttattttgaaaaaggaaataccttcagataaacactagaaagaagctttctcagaaaccactttgtgatgtgtgcattcttctcagagttatacctttcttttgattgagccgttttgaaacactgtttatgtgaaa

SEQ ID NO: 310835 - DNA, 268 bp, Homo sapiens
cagaaaccggttagtgacgttttgcattcctctcacagagttaaaccttcytttttattgagcagtttggaaacagagtttttgtagaatatgccaagagatatttgggagagcattgaagcctatggtgacaagggaaatatcttcagataaaaactagaaagacggtttctgagaaactgctctgtgatctgtgcattcttctcatagagttaaactttctttagattgagcagtctggaaacactgtttttgtagaatatgtgaa

SEQ ID NO: 310836 - DNA, 484 bp, Homo sapiens
atctatgaaatgatatatgggagcacattgaggcctagggtgaaaaaaggaatatattcagagaaaaattaggcagaattattctgaaaaactgctttgtgatatgtacattcttctcaaagagataaacctttctttttttgagcagtctggaaacactgtttttgtagaatctgtgaagggatatttaggatcgcattgaggcctatgctgacaaaggaaatagcctcagataaaaatagaaagtagccctctcagaaaccggttagtgacgttttgcattcctctcacagagttaaaccttcctttttattgagcagtttggaaacagagtttttgtagaatatgccaagagatatttgggagagcattgaagcctatggtgacaagggaaatatcttcagataaaaactagaaagayggtttctgagaaactgctctgtgatctgtgcattcttctcatagagttaaactttctttagat

SEQ ID NO: 310837 - DNA, 268 bp, Homo sapiens
cagaaaccggttagtgacgttttgcattcctctcacagagttaaaccttcctttttattgagcagtttggaaacagagtttttgtagaatatgccaagagatatttgggagagcattgaagcctatggtgacaagggaaatatcttcagataaaaactagaaagacggtttctgagaaactgctctgtgatctgtgcattyttctcatagagttaaactttctttagattgagcagtctggaaacactgtttttgtagaatatgtgaa

SEQ ID NO: 310838 - DNA, 345 bp, Homo sapiens
cgaagggatatttgggagcgcattgaaggcaatggtgaaaaaggaaacatcttcagatcaaaattaaaaagaagctttctcagaacyactttgtgatgtgtgcgttcttctcacagagttaaatcattctttggattaagcacttttgaaatgctgttttggtagcatctgcaaagggacatttgggagctctttgaagcctatgttgaaaaaggaaatatctgcagataaaaagtagaaagaagctttctgagaaactgctttggaatgagttcattcgtctcacagtgttaaacctttcttttcattgagcagtttggaaacacagttgtacaatctgagaag

SEQ ID NO: 310839 - DNA, 345 bp, Homo sapiens
cgaagggatatttgggagcgcattgaaggcaatggtgaaaaaggaaacatcttcagatcaaaattaaaaagaagctttctcagaaccactttgtgatgtgtgygttcttctcacagagttaaatcattctttggattaagcacttttgaaatgctgttttggtagcatctgcaaagggacatttgggagctctttgaagcctatgttgaaaaaggaaatatctgcagataaaaagtagaaagaagctttctgagaaactgctttggaatgagttcattcgtctcacagtgttaaacctttcttttcattgagcagtttggaaacacagttgtacaatctgagaag

SEQ ID NO: 310840 - DNA, 345 bp, Homo sapiens
cgaagggatatttgggagcgcattgaaggcaatggtgaaaaaggaaacatcttcagatcaaaattaaaaagaagctttctcagaaccactttgtgatgtgtgcgttcttctcacagagttaaatcattctttggattaagcrcttttgaaatgctgttttggtagcatctgcaaagggacatttgggagctctttgaagcctatgttgaaaaaggaaatatctgcagataaaaagtagaaagaagctttctgagaaactgctttggaatgagttcattcgtctcacagtgttaaacctttcttttcattgagcagtttggaaacacagttgtacaatctgagaag

SEQ ID NO: 310841 - DNA, 428 bp, Homo sapiens
aatgaaacactccttttgtagtatctgattgtgtatatttggaaatctttgagttattcgttggaaacgggtatcttcacataaaaagtagacccaagcattctcagaaggttctttgtgatgtgtgcgttcaactcacagacttgaaactttcttttgatagagcagtgttgaaacacactttttgtagaatccacaagtattcmtttggagcgctttgttgcctatgtgggaaaaaggaatatcttcacttaaaaactagacagaagcattctctgaaactcctgtgtgaagtgtgtgttcaattcacatcgttgaacctttcttttgatagagcagtgttgaaacatactttttgtagaatctgcaagtgtccatttcgagttcttttgtgcgtatgttggaaaaagtgatatcttcacctgaaa

SEQ ID NO: 310842 - DNA, 238 bp, Homo sapiens
tcttcacttaaaaactagacagaagcattctctgaaactcctstgtgaagtgtgtgttcaattcacatcgttgaacctttcttttgatagagcagtgttgaaacatactttttgtagaatctgcaagtgtccatttcgagttcttttgtgcgtatgttggaaaaagtgatatcttcacctgaaaaatagacagaagcattccagaaactgctttgtaacatgtgcattcaactcacag

SEQ ID NO: 310843 - DNA, 528 bp, Homo sapiens
tcttttgacagagcaggaatgaagcactccttttgtaatatctgattgtgtatatttggaactctttgagttattcgttggaaacgggtatcttcacataaaaagtagacccaagcattctcagaaggttctttgtgatgtgtgcgttcaactcacagacttgaaactttcttttgatagagcagtgttgaaacacackttttgtagaaaccgcaagtattcatttggagcgctttgttgcctatgtgggaaaaaggaatatcttcacttaaaaactagacagaagcattctctgaaactcctctgtgaagtgtgtgttcaattcacatcgttgaacctttcttttgatagagcagtgttgaaacatactttttgtagaatctgcaagtgtccatttcgagttcttttgtgcgtatgttggaaaaagtgatatcttcacctgaaaaatagacagaagcattccagaaactactatgcaacatgtgcattcaactcacagtgttgaaacttccttttgagagagcggtt

SEQ ID NO: 310844 - DNA, 528 bp, Homo sapiens
tcttttgacagagcaggaatgaagcactccttttgtaatatctgattgtgtatatttggaactctttgagttattcgttggaaacgggtatcttcacataaaaagtagacccaagcattctcagaaggttctttgtgatgtgtgcgttcaactcacagacttgaaactttcttttgatagagcagtgttgaaacacacgttttgtagaawccgcaagtattcatttggagcgctttgttgcctatgtgggaaaaaggaatatcttcacttaaaaactagacagaagcattctctgaaactcctctgtgaagtgtgtgttcaattcacatcgttgaacctttcttttgatagagcagtgttgaaacatactttttgtagaatctgcaagtgtccatttcgagttcttttgtgcgtatgttggaaaaagtgatatcttcacctgaaaaatagacagaagcattccagaaactactatgcaacatgtgcattcaactcacagtgttgaaacttccttttgagagagcggtt

SEQ ID NO: 310845 - DNA, 528 bp, Homo sapiens
tcttttgacagagcaggaatgaagcactccttttgtaatatctgattgtgtatatttggaactctttgagttattcgttggaaacgggtatcttcacataaaaagtagacccaagcattctcagaaggttctttgtgatgtgtgcgttcaactcacagacttgaaactttcttttgatagagcagtgttgaaacacacgttttgtagaaaccrcaagtattcatttggagcgctttgttgcctatgtgggaaaaaggaatatcttcacttaaaaactagacagaagcattctctgaaactcctctgtgaagtgtgtgttcaattcacatcgttgaacctttcttttgatagagcagtgttgaaacatactttttgtagaatctgcaagtgtccatttcgagttcttttgtgcgtatgttggaaaaagtgatatcttcacctgaaaaatagacagaagcattccagaaactactatgcaacatgtgcattcaactcacagtgttgaaacttccttttgagagagcggtt

SEQ ID NO: 310846 - DNA, 567 bp, Homo sapiens
ttttaactctgtgagatgaatgcacacatcacaaagcagsatgtcagaaaatttccctctagttttactctgaagatagtttatttttcaccctaggactcaaggtgctctcatatatacattctcacattctacaaaaactgagtttccaatctgctcaatcaaaagaaagtttaactgtgttagaagaatgcacacatcacaaagcggtttctgagaaagcgtttttctaatttttctcagaagatacttcgtttttcaccatagacctcaatgccctcccaaatatctcttcacagattctataaaaccagtgtttctacactgctcaattaatagaaaggtttaactccgtgacatgaatgcatgcctcacaaagcagtttctgagaaacattccttctggttcttatgtgaaaatattttgttttttaccataggcctcaaatcactcccaaatatccctttgcagattctataaaaacactgttgccaaactgctcaatcaaaagaatgatttagctgtgtgagaggagtgtacacatcacaaagcagtttctctgaaagt

SEQ ID NO: 310847 - DNA, 578 bp, Homo sapiens
atatgaaaatgttttttgtgtaagtctttgaaattcagtatgtattttacacttagagtacatcttatttcatattttaggtgttcagtagtcacatgagctagtggctactatactggacaacataattctagaggttttagataagaagatatatataaaaggagatctaggtacttgagaattttgtagaagagaaattagttcagtaagaattactctagcacaattgtaggtccactgttaatagcaatcttttaaatttgcagaccaaatataaattctccttaaagctcctaattttaaaaaattattttgtagggtgcttctttcttccctttctattggttttccccagagaagactacgtgtggatatctactataaaacatgtgtgcatggaaaattgtagggccagatgcttctggattaagagaacatgaccaggtgagtgygccaagcaagtgcttggagatattaatgtcttaattggagatacttacttgaaaaacagattgaatccacacattgtaaacatgatcgccaagtaacccacaacaccaaatgcatagctgagt

SEQ ID NO: 310848 - DNA, 591 bp, Homo sapiens
tttgcctctttcttttatacgtttaggatgacttttaagcaccatatataaaaaggttaggtaataatgattcttattgataagatggcatgttttcttcgaatgtggtttctagttaagtgctaggttccaagtttctcataaaaaacagatttttgaaggagtgtgctgcatatttcgtgygtagataagaaagagctggaataggctagtatctaaggaatacatgcatcctgaagcaaagatgtttcattcacatgtttaaacacaattttaagttactgcatcctacttcaaaatatatgtttaaatataattttttgaaatcacatggttgatgttcaaattaaggaaggtgaaagaaaagtttaatgtttgatttagtcactaacgaaaaccagagaatttatgcatcagaaatatcttgtgccacaatatctgagttagtcgtcgtttatgaagatgataccagaaaaggcatgctattagtatccatttaaaaaatcttaaataatcacattttattaaaggagtccaagtccttatcattttatattttaactacttattgcagttatatataaacttgtt

SEQ ID NO: 310849 - DNA, 416 bp, Homo sapiens
gtagacttttctatctttgcaacaccacctgcatttctgaaaggcttatttgcaaaccaggcaattccttcttgaatacatttatttcttgtaatttcttgtcaatcacaatcaataacaactaacacacattactaagtttctgttttctaacctgttcccccttaggccaccaagtgcattaagtacgtggtctacttccctgattactgcaggcaacagttaccaaaggtgacaacagtgattatctttaaagcttctcatatcagttttctactrcctgctgcctaaccacgaatgtcacctattttaagtttttttttaaacatcagcattttacaactgcatatccatatctgtgtcaagatagacaaaattataacattttgtatttactaacctcagaggcttaacac

SEQ ID NO: 310850 - DNA, 593 bp, Homo sapiens
tttctcatttacttggcaagccattttataacttcttataaaattccctttctacttmagttggctagaaaatttgggcctagttttcagaagattttatatgatatgttggcattacctgaatgtagatattgacagttctacagccccacttctgggtggctttgaaggaacagcagtgaagggaaggcctcccagtgggttgtacacacttgctcatttggcctggaagaagaggtatcctgattaatggatgaggattaatggtttgactagactctcaaagacttggaaggaacacaattggtagcccagtgacaaagcaatctggggaagagatatgtggatggatctttccaagtaggcagaacataaatatatttgtgtcctgtatgaatgctcaccaaagagcagccttagtcaggatgaactcagtaattgggtagacaagtttggtgaacttccctttggttctccccagccacctttgtccttgctcagtgtgcttatggataaagtggccagagcagcaaggataggggttaggtatgttctcagcaacacagatttccatgcactaaagggaatgcaac

SEQ ID NO: 310851 - DNA, 560 bp, Homo sapiens
cccggccccacaacgaggacgcccctgcagctggctgggccgcttcctcttgccacgcggggggacctgtgcccgcggccgtgcacctccgtgtacgcttctgctcctcggaccccatcggttcagacgcggatttccgagaacgagaccagagtctgcgtytggagagcctttgcccctcatcttaggaagagtctagtctgagaacaaacagtttgccaactcctaccccgagctcttgcgcgtatctccttaaatatttcaagggtctgggccccagatgggtgctcggaaagcaaacgaagggtccagggaggccgaggccaacgcggagctcagcgcccccttcttgcctgaaggggcgcgctggaggaggaagggcgcggcggagacgcagaaggcggttccttgggggcaaagcaggagccagtctggggcctaccccttctcgccctgagggattctgtcctggagagaactgtaattgcccaggtctgtgtaagcaatctggtctgtgggttcaaagccagtgtgaaccccacgttcccgagacctctttg

SEQ ID NO: 310852 - DNA, 560 bp, Homo sapiens
cccggccccacaacgaggacgcccctgcagctggctgggccgcttcctcttgccacgcggggggacctgtgcccgcggccgtgcacctccgtgtacgcttctgctcctcggaccccatcggttcagacgcggatttccgagaacgagaccagagtctgcgtctggagagcctttgcccctcatcttaggaagagtctagtctgagaacaaacagtttgccaactcctaccccgagctcttgcgcgtatctccttaaatatttcaagggtctgggccccwgatgggtgctcggaaagcaaacgaagggtccagggaggccgaggccaacgcggagctcagcgcccccttcttgcctgaaggggcgcgctggaggaggaagggcgcggcggagacgcagaaggcggttccttgggggcaaagcaggagccagtctggggcctaccccttctcgccctgagggattctgtcctggagagaactgtaattgcccaggtctgtgtaagcaatctggtctgtgggttcaaagccagtgtgaaccccacgttcccgagacctctttg

SEQ ID NO: 310853 - DNA, 581 bp, Homo sapiens
aaagcacttttaagaaagaaaagtactttctgaattaactttctttaatcaaataaaatccttgagccaactgaaatgtgatggggctgtagctagggatacacatttatgatatatttgtatagcatgcattactgrtcctcatgaattaaattttctttttgcatttcgcggtgatccagctatgaaaatatgttcatgaaatgtaaactgccaggagattagataaataccatagattgagggaaggaagataaaggaaccctccaagatattttgttgctcttgttttctgtggaacaaggaatggcaaaaagaggaagaacatgcttcaacactccccaggggagggcagtcagagtcttatcgtcagagagggggaaatgaggattgcagatgttttcttaaattctcttcttcagcattgttacaaccaaagaaagcaaatcctgtgatttaatttcagatatatatttggtgctgggacatatcagtgtcccttaggctgatatctgggacaggctgataggaagaactcaaattgtgttcaaatctggtttcactactttccagctgtgaga

SEQ ID NO: 310854 - DNA, 620 bp, Homo sapiens
ggatggggctgggaatgaactcccagtatcatcccaggcagggaaggatgttaaggatggggctgggaatgaactccacagcatcatcccaggcagggaaaacaaatctgactcacrttttgttgcatgttcaaaagaaaatcaggctcactaaattaaaaagagatctaattatttaaaaaatgttgttactgttgttggaatttgaattttaaatcaaaattatattgcaaaatagatgacaagtagttgaaatattaactgagggaaacagttttggcactccaagaaaaacccttgtaattaatcttcactggtaatctcctcaggctaaccattactaattagaaacatgttttgtcaacccatccagactttaagcctggtgatggtaggagtatatttttttgtactgccatagccccaagactgagtagtatgctttgcatacagcaaatgtataatcaatgaagtttgttactactttgcactgagggctaaacataacatcatacacttaaggcaaacacagaacagaaggcttttcctgggatggagctattctcttttccaatcacgtgctgttgttgagagaccatctatgtggaaagagtgatttg

SEQ ID NO: 310855 - DNA, 557 bp, Homo sapiens
agttcttcccatgccagtgttcaaatcatgtgtttgcttttaagttctgttacattttcatcaggcatgtgttggcttctttctgctaagatcaatcaccttattcctctgtgtatttctaaagcaaattaaatgcatttttttccccaaaccaatgctggcatcactgtttaaggaattggaataaagagctgtggattccaggttgccaataactttcttcatgaagtctagctgattacatggaaagccaggagcaaggtttattgggagaaagaaagaataaagagtttaaaatttggttaggaagaaaagagaaatatatgaaaatatagttagttaacatggcatatgataagggcaaattagtcttgcattattctcagtttatttacattggactggggaagactcatcattragtttggttttgaaataactctgatttgaaacaaatgagacattttagtagaattctgaattgtttaaaaaatatttggcctaactcctgggagatagattatatattttttcaaatgttcttctcaaaagcacag

SEQ ID NO: 310856 - DNA, 575 bp, Homo sapiens
tcctcacaacatgaaactaattttacatgtgtctacttaatgaaatatgttttttggaaataatcttakttatttccctgtatcccatgaagccaaatctctcctcaaatcaatctcttcctttctctcctttttagtgtaacagacatttgttgtttttgctattgggacctgggtagttaaaaaatttgattatcaactcaaaatttccaaggtacgtattttcttatgggaagtgatggatagatgtcataaaatgcaatgctaatgtcatgagacattaaaaacaataagcgtccagaactttaatcgctaactgaataaggcttccatcaaagtagtcacctttggagacgagatgcttggatgatcatgcccctgctctaaacaattttggaacttttcttttggaaagaactttggagtaaggaatgggcaatgccaaaaattatttcaagattgtaccgactaactatcttttgtacgagaagacatgttacccagcataatcacccacatgcagacttgacttctttatccgtcagggttcaagcaagaaatatattgctcactta

SEQ ID NO: 310857 - DNA, 603 bp, Homo sapiens
aatagggcttctacttctctggcacaattaggctatcttttatccaaattaagagattgaacatttttcctatgaaaatcaggtcaatttttggtcttgtaattcaccagttattgtgcacagttactatctctgtctgttgaataacagtggttcaaaggtcctaaatgagatactaggagaaagcatttattgtatgttcttttgagtaattgagacagaatagagtgtgatatcaaaactggtttttgtccttaagaaaacccgaggtacagatggattcagtggtaacttctagcaaatatttaagggagcgatgccaatcttatacaaattctttcagaaaatagaggaggagaaaatgtgtcccaacctgtcttatgagccaacayagccctgatgccaaaacctgtcaaagatattaccaaaaataaaaaaaaagaaaagacaggaaaattgcagaccaatatttctcatgaacatagggaccagattctcaatgaaatatcaacaaattaaatcaatagcacataaaagaatattacataataacaatgtggaagttattccagaaatgcaagattgatttaatacttaaaaatc

SEQ ID NO: 310858 - DNA, 603 bp, Homo sapiens
aatagggcttctacttctctggcacaattaggctatcttttatccaaattaagagattgaacatttttcctatgaaaatcaggtcaatttttggtcttgtaattcaccagttattgtgcacagttactatctctgtctgttgaataacagtggttcaaaggtcctaaatgagatactaggagaaagcatttattgtatgttcttttgagtaattgagacagaatagagtgtgatatcaaaactggtttttgtccttaagaaaacccgaggtacagatggattcagtggtaacttctagcaaatatttaagggagcgatgccaatcttatacaaattctttcagaaaatagaggaggagaaaatgtgtcccaacctgtcttatgagccaacacagccctgatgccaaaacctgtcaaagatattaccaaaaataaaaaaaaagaaaagacaggaaaattgcagaccaatatttctcatgaacatagggaccagattctcaatgaaatatcaacaaattaaatcaatagcacataaaagawtattacataataacaatgtggaagttattccagaaatgcaagattgatttaatacttaaaaatc

SEQ ID NO: 310859 - DNA, 603 bp, Homo sapiens
aatagggcttctacttctctggcacaattaggctatcttttatccaaattaagagattgaacatttttcctatgaaaatcaggtcaatttttggtcttgtaattcaccagttattgtgcacagttactatctctgtctgttgaataacagtggttcaaaggtcctaaatgagatactaggagaaagcatttattgtatgttcttttgagtaattgagacagaatagagtgtgatatcaaaactggtttttgtccttaagaaaacccgaggtacagatggattcagtggtaacttctagcaaatatttaagggagcgatgccaatcttatacaaattctttcagaaaatagaggaggagaaaatgtgtcccaacctgtcttatgagccaacacagccctgatgccaaaacctgtcaaagatattaccaaaaataaaaaaaaagaaaagacaggaaaattgcagaccaatatttctcatgaacatagggaccagattctcaatgaaatatcaacaaattaaatcaatagcacataaaagaatattacataataacaaygtggaagttattccagaaatgcaagattgatttaatacttaaaaatc

SEQ ID NO: 310860 - DNA, 627 bp, Homo sapiens
gtagggtgactttttcccttttattcataattcacaattatgggtgtaattagagatatggtaggcagcatttttacttcttttgttttcacattaaaataaagatccacccagggaatgcacaaaagcaagaaacacaaagcagacaaaggaatttctaatgaaaatcaagcccctcacccatcccgtccaacaacagtccttctcagaggttgtcactttgaactgcttcagttttcaattatgtcagtggccacttaataatttcaggtagtatggatacacsattggttttgaattcatctttttttgttctttgctgttttgaaatttcaattctgtgtccaagtggttccctttatatgcagcgtactccatgagcccatacaaataaaagactcactttctccaggtctgagaatatttgattattatttccctaataatctctcactcttcattttctctattctcccttttaggaaatcctactggatcattcctcctcatgtctcccctccctccatcctgctccctttctttccgttggttagagaagattttgtttttgttcctggaaggtaaacactggcttacctacctctctgtgaacagggtaactggtcc

SEQ ID NO: 310861 - DNA, 627 bp, Homo sapiens
gtagggtgactttttcccttttattcataattcacaattatgggtgtaattagagatatggtaggcagcatttttacttcttttgttttcacattaaaataaagatccacccagggaatgcacaaaagcaagaaacacaaagcagacaaaggaatttctaatgaaaatcaagcccctcacccatcccgtccaacaacagtccttctcagaggttgtcactttgaactgcttcagttttcaattatgtcagtggccacttaataatttcaggtagtatggatacaccattggttttgaattcatctttttttgttctttgctgttttgaaatttcaattctgtgtccaagtggttccctttatatgcagcgtactccatgagcccatacaaataraagactcactttctccaggtctgagaatatttgattattatttccctaataatctctcactcttcattttctctattctcccttttaggaaatcctactggatcattcctcctcatgtctcccctccctccatcctgctccctttctttccgttggttagagaagattttgtttttgttcctggaaggtaaacactggcttacctacctctctgtgaacagggtaactggtcc

SEQ ID NO: 310862 - DNA, 556 bp, Homo sapiens
cagcttgtacactcagattatttctgggtggtagcacttatagagatataattttgaggttaatgccatataggttccttgattactttaggtgatctatccaggcaataatgagtcaataaaagtctctagcttgtactcccatcctgcctattgtgaaggctttgtcccttcccctggaccaygtcatttcccctaccttttgaaggtaactttgatttctgcttcattaagaaaatctaactcatcaggcttttagcttcctcattcttctctttttcatcttttctaagctgtccttttattaatcctacctcctctccttctgttttcaggaaaaagtggatctgtccttttgtctgggggcaatcctaccttcctccccttggttgcctttgatttaccttctcaatgatttccttcactcttcccagtgccctcttcctctctggcatataaagcctcttctattgactccaatccctacacgtatgcattcacgacactactttatcttgatttcaggtgatcctaatactctttccagctgcctgag

SEQ ID NO: 310863 - DNA, 556 bp, Homo sapiens
cagcttgtacactcagattatttctgggtggtagcacttatagagatataattttgaggttaatgccatataggttccttgattactttaggtgatctatccaggcaataatgagtcaataaaagtctctagcttgtactcccatcctgcctattgtgaaggctttgtcccttcccctggaccatgtcatttcccctaccttttgaaggtaactttgatttctgcttcattaagaaaatctaactcatcaggcttttagcttcctcattcttctctttttcatcttttctaagctgyccttttattaatcctacctcctctccttctgttttcaggaaaaagtggatctgtccttttgtctgggggcaatcctaccttcctccccttggttgcctttgatttaccttctcaatgatttccttcactcttcccagtgccctcttcctctctggcatataaagcctcttctattgactccaatccctacacgtatgcattcacgacactactttatcttgatttcaggtgatcctaatactctttccagctgcctgag

SEQ ID NO: 310864 - DNA, 584 bp, Homo sapiens
ggaattccaatgttccacaaaggagcttctgctggtctcctatagcattsaagttcacaaggtgctcacgtctctagtcaatttcaggaatatatttataatttacccataaggcactcatacatgcaaatccatcctttccactatttccacattagtgggagtgacattgttatccccatgtttctagtagtaagaaatgaccagattaaggggtctgtattaatctgtgtcccatcaaatgatcctatgtgccacaaaagcttaagaaccatggacctaggcctcccttatcttattcaggttgtcaatcatttatattataaattcatagagagaaagtattttagtcttcaaagcatgaaaatttttctctcattggttgttagcatcagctggacctataagacatcttacatcaaccgtttctggctggcccctggaatacaaatgaagatagtgtttgtgttactacagggccagtgagggggtgtgagcccttattatcaattccagtgagctcttctcatatgtaaaaatgcctttgctctaaaccaatacacaaaaaatacaaaagaatcaca

SEQ ID NO: 310865 - DNA, 595 bp, Homo sapiens
cctgtgtctataacaggtagatggaattccttgttgaaattttttatggattgctttgtagcagaaaacatgcctttagacatctcatactacaaaatagtcctgatgtaactgagctgagccatgtggccagagtatgtagtatgagtatgtcaatattggttatcactcatactatcactcatactacatactgatatctcatactacaaaatagtcctgatgtaaccttcagagcacatagcatgtgttcccaggacaaagtgatgcacaaagatgtccatgtaatacccaaactgccacaatgaatcccacatgcttgtaaaagattatctgataaaacttggggccaaatgttggtacataaactatctcttactgtggtcatgtcttattcctcctattataaattaaactccatatacacaatgtayatgttccatcttcttctttcccttcctctgttcaatcctccatcacttcactaacatacatccattactgtaatgttttcagtgataacaatattgaacaaatgaaggaatgaggtatcaaagctatatcaggtatgcatatgtttggctataaaaaataa

SEQ ID NO: 310866 - DNA, 635 bp, Homo sapiens
tgaaccaaattaaaatttataaattcaaagcgaactaacaaaaacactcagaccaaaaaaacattactccaaaataggtagtgtgctaacatatagaagtgtattactaacgctacaaacttacttgctaggaccctttcttgtatctttacagaacatgtatgtttatggtttacatgatgctgaatggagggagaatcacttaaggcttaaatagtttctactggtttgaggaacaaaaagcactttgtgcaggcagaaaraacacagaaggcaagagagtatgtgccagaagccaatattccctacgaagactctatctaacatatgagacagatactcatcccaataaatcttgaattctgcaaatgtgtaactttattccctaattttaacacgtcttttttaaagattcctattaaatttgtgattctggggtttgcagctaataagcagagtcataattgaaacgattaaataaatatagtcatctattctccagaaaatgcaagttatttgtactctgcagttcacatggcttttggtggtccctagattgttgttttttgttttttgtttcttgttttttgtttttgagatggagtctctgttgcccaggctggagtgcagtggtg

SEQ ID NO: 310867 - DNA, 635 bp, Homo sapiens
tgaaccaaattaaaatttataaattcaaagcgaactaacaaaaacactcagaccaaaaaaacattactccaaaataggtagtgtgctaacatatagaagtgtattactaacgctacaaacttacttgctaggaccctttcttgtatctttacagaacatgtatgtttatggtttacatgatgctgaatggagggagaatcacttaaggcttaaatagtttctactggtttgaggaacaaaaagcactttgtgcaggcagaaagaacacagaagscaagagagtatgtgccagaagccaatattccctacgaagactctatctaacatatgagacagatactcatcccaataaatcttgaattctgcaaatgtgtaactttattccctaattttaacacgtcttttttaaagattcctattaaatttgtgattctggggtttgcagctaataagcagagtcataattgaaacgattaaataaatatagtcatctattctccagaaaatgcaagttatttgtactctgcagttcacatggcttttggtggtccctagattgttgttttttgttttttgtttcttgttttttgtttttgagatggagtctctgttgcccaggctggagtgcagtggtg

SEQ ID NO: 310868 - DNA, 528 bp, Homo sapiens
ctaataagcagagtcataattgaaacgattaaataaatatagtcatctattctccagaaaatgcaagttatttgtactctgcagttcacatggcttttggtggtccctagattgttgttttttgttttttgtttcttgttttttgtttttgagatggagtctctgttgcccaggctggagtgcagtggtgtgatctccactcactgcaacttctgcctcccgggttcaagcaattctcctgcctcagcctcccgagtagctgggrctacaggcacctgccatcacgcctgactaattttttgtatttttagtagagatggggtttcaccgtgttagccaggatgctctcgatctcctgacctcgtgatccactggcctcagcctcccaaaatgctgggattaccggtgtgagccactgcgcccggccagtccctaggttttcttttttttttcttttttttttttttttttgcaggattcttgagattccaaggatcatttgtaggcagcacagtttttgctaacagc

SEQ ID NO: 310869 - DNA, 528 bp, Homo sapiens
ctaataagcagagtcataattgaaacgattaaataaatatagtcatctattctccagaaaatgcaagttatttgtactctgcagttcacatggcttttggtggtccctagattgttgttttttgttttttgtttcttgttttttgtttttgagatggagtctctgttgcccaggctggagtgcagtggtgtgatctccactcactgcaacttctgcctcccgggttcaagcaattctcctgcctcagcctcccgagtagctggggctacaggcacctgccatcacgcctgactaattttttgtatttttagtagagatggggtttcaccgtgttagccaggatgctctcgatctcctgacctcgtgatccactggcctcagcctcccaaaatgctgggattacmggtgtgagccactgcgcccggccagtccctaggttttcttttttttttcttttttttttttttttttgcaggattcttgagattccaaggatcatttgtaggcagcacagtttttgctaacagc

SEQ ID NO: 310870 - DNA, 528 bp, Homo sapiens
ctaataagcagagtcataattgaaacgattaaataaatatagtcatctattctccagaaaatgcaagttatttgtactctgcagttcacatggcttttggtggtccctagattgttgttttttgttttttgtttcttgttttttgtttttgagatggagtctctgttgcccaggctggagtgcagtggtgtgatctccactcactgcaacttctgcctcccgggttcaagcaattctcctgcctcagcctcccgagtagctggggctacaggcacctgccatcacgcctgactaattttttgtatttttagtagagatggggtttcaccgtgttagccaggatgctctcgatctcctgacctcgtgatccactggcctcagcctcccaaaatgctgggattaccggtgtgagccactgcgyccggccagtccctaggttttcttttttttttcttttttttttttttttttgcaggattcttgagattccaaggatcatttgtaggcagcacagtttttgctaacagc

SEQ ID NO: 310871 - DNA, 402 bp, Homo sapiens
taaaaacattccattagaatgcaaaacaatgatgatagcattgcccataaatattgtgcttcctctgaatatcctatcyacttccaaactatattttcataaatttaagtttataaggaatttgatcatgtgtcataaggtgtttgaagtatgtttccacttttgctcatctggagttttttgttttagtttttagtgtcatgtaaaataaataagactttgttttaaatctgcaattatcatgagtaaatacatttcacaaagttttttctttttaaatcaccctaaaccagactttggtttatattaaaaagttccccagggaactagattttacatttgagaccctgatttagctaaaatatttataagggcacatgtagaaatacaggtccccactgg

SEQ ID NO: 310872 - DNA, 478 bp, Homo sapiens
tgatctcattattactgacccatcatcakgagaataaagcccactttaaactgttgtttcccacagaggtgatggatttgtgcagatccatccatattctcctgggctcatttgtgagtagctggtagagaaaaggcataagctatggccagaagagggcaaaacaggtgacctgtgtggagatcaaacctatagtctttttagcatgttctacacctaacccctctgagaggcctcagggagctgaatagaagataacagtaataagactcggtcatcaagaaagacaaggagctggggagatgaacacaaatgaataggtacttgatgtggacaataactaactatgtctttgggagataacatggatattaaacagatgattaaatcttgtaaagtatgtaatagttctgtgaatgttatgatctttgttttcgaaattaagtcaagaaataattatatagcaattttaagtaaa

SEQ ID NO: 310873 - DNA, 569 bp, Homo sapiens
agagtttaggaaccctaaacatgatctaagtgagaaatcatagattatgggtgaaaaaatataaagtgttgattgctcaatatttctaggcaaggatgctgtgctgcagagagccagatggattccagttaggactgactctggcaactgaggattactgcctgttggttaaagagcagaccaaaagagaagcagcacctcagtgcaaaccatacacatgtgtaygatgtcagacccagaactggagtggccagagacagcagacccccaaaatctaagtagattatatacacagactctggacaaaaacagaatagcccacataaacaatcaaacctctaacatactgagagcaacgccactgggactcttgaaatggtgagagaaatacaagctgtcttactatacataaattttatccacaacaattcattattttaaaaaaaagatggccacagaatgcaccttgcagtaagtccagtagaaatcgtcccttttttgcaaaagagtacccagtgctaataatcccaaattaaaatgtatgagcataatgaacagtcatcatcatc

SEQ ID NO: 310874 - DNA, 608 bp, Homo sapiens
ttttgtctttttccattagcttttgagggcaggcaccaactctattcattgttggattcacacaatatggcaaacaatgattggatgcatatatgaattagtaataagtgattagaaaacatgtgtttggtagtgaagaataagcccagaatgaacttttaactctgttaaatgaactagaaagataggccattaccttttaagttatattggtcagagtttggttcaaaaaaaacagaattcatttattttagtcaaggttttagcagaaaagcaatgccagtgtgaatgatatggaataacggaattattaaagtgactgaccttatgcaattgtagaaactgctaaagaattcartggaagactgttattgccccgtgggtctggtgcaggccacctcaagttgtaaatctgtggactggaaagcaaagaaaaggtaagtgtgaagtaggggaacccagaaagacaaactgtaacgtgcatctgtctctcaacttccccaatctcaatggggatgtgcagaaagtgctggcacacttcaccacgaaactgtaaacacacctgacctaagattcagaaaaactgaaggatgaggtctgacaggagc

SEQ ID NO: 310875 - DNA, 618 bp, Homo sapiens
gtgtgttcatatcaaaataagaaagaaacactcgtaatagtatgatgcttttatttcaactagtcatatggtcttagctgatatttatacttttcttcttccattatccattccatattccttttgcctcagcagacatcttagctcagacatatttctccttgctgcattgtttagcagcaaccctcaacaagccagaatcaatcactccagtmattatagcaatgctccctcctccctcaaccactgcttattcatttgatggtatgagggcccaagtgaacagagggcaaattcaactcccagtttaagggaaccatgggtgtatcccctggaggaaattttcctcctttgggaactaagtcttctatgtttgtggaatacaaagtcactgagatgggaagcaaaattttcactactaaaactctagggttaatagtaagtggagctactcttatttccactccttgatttcctggatatataaatcctggttatggagagattagttgctgctttatagcaaccacataaggtgttcccacccaaatggcattgtaactgaatcttcaaaaggccactctaccattctatctggccaactgcttcagggtattg

SEQ ID NO: 310876 - DNA, 544 bp, Homo sapiens
gtgtgaggtacccaggatacaaagatttttagaagtacatgcatataactcctgctctcaaggagaataggggrtgagtctgtctaacagggggtgagtcaagataggcattaacaaattgaccctgagatctcagaattttaatataccaaggatatgtttctcacgcatgcttgcacagtgggagagggctaaggtgaggggagggaggatctgctccacacggtgactcagggaccaacactgacagatgcttcacatatcaacactttccaaatcactacagcagtggaagaaggagctggagggcttcacatggatccttaaatgcttgagtctgaaaatgacaagcattgcttctgctctgcccattggccagttatctcatagccctgcctagctacaaaaggctaggaaatgtgagggaacatggagattctctgaaccataatcatctctgacataaatgggaaagcagaaaagcaacagcagttaaataaaacttaaacattgtctgctgcctcaggcggcacaaggaataggc

SEQ ID NO: 310877 - DNA, 557 bp, Homo sapiens
aggaaagtaggtgaatcttagcaggtgatttctacatctataaaaggggatcggggtatttgtgcaggcccatggaacgcataattccaggtaagttcatcttcatcctgcccatgtccccagttcatgccatccactacttcacccacctgtagcctagctttggaataactgaccacagagctattccatactctcctccgaccttttctgatcatctcctttctgccccatagacagataactttgtcataaattgacatgggagatcaagtgtcccaarggatcacagttcaaaataagatagcacacctccagtctaccaaatcccattgaggaatatatttcccagagctgtctcctagcagccactgaggggctctcatgaattgggcagggttcttatgtcccagtccctatagcactagcagtcactggacttcttgatttttgttagacatcctttgaaaacattcaagtcatttttcaatgaaaggaaaccaatatgttcaatcctgctaatgtttagtgccctgcagaaataaggtattgaatag

SEQ ID NO: 310878 - DNA, 500 bp, Homo sapiens
gatgtacagctcgctcagacaagaataagtcttgtaaaataatgtctctaagaagtgctgcactattcaccatagcaaagacatggaatcaacctaggtgcccatcagcaaataattgggtaaagaaaatgtgrtacatatacaccagagaatactacacagccataaaaaataatgaaatcatgacctttccagcaacgtgaatgcagttggtggccattatgctatgcaaattaatgcaggaacagaaaaccaaataccacatgttctcattcataagtgggagctaaacagtgggtacacatgggcaataaatatggcaacaatagacactggggaatccaaaagagagaacagagggaggagggcaagggctaaaaaactacccacagggtttccatccttctacttaggtgatgggatcatttgtaccccaaacctcagcatcctgcaataagcccatgtaataaacctgtacatgtacccctgaatctaaaata

SEQ ID NO: 310879 - DNA, 615 bp, Homo sapiens
gtttccatccttctacttaggtgatgggatcatttgtaccccaaacctcagcatcctgcaataagcccatgtaataaacctgtacatgtacccctgaatctaaaataaaagttggaattatacaaaataaaagaaatgctactgatctgggttttttccccttttgacattagactcttgactctaataattggaaaaataccacctggtatttctctttaacactactgcaagggttctttaatcctaaacttaatacgggtaaccaaaggatattttaagaccaacatgaaatctaatcttcatgcgtctccatacccmagcataagacacacgcagaaggttctgataccaagcaggcttgaattcactgaggagcagctaaagaaaacttgtggtgtcattgggatccttttctggatgtctcacatattcttgtccccaaagcggggtgtgtcctacacatttatttttctggaatcacaattcatatcaaatctcctacctactcagaaagaagtcaatgatctcccaccaacaattagagaaaatccatactctggtatacctttgggcttcttttccactatcaccttccacagatctttcatatta

SEQ ID NO: 310880 - DNA, 577 bp, Homo sapiens
tcccaaatgtataaaacaattactactagacctaagaaatgagatagacagcaacacaacaatagcaggggacttcaatactccactgacagcactagaaaggtcagcaagacagaaaatcaacgaagaaacaacggacttaaactataccctagaacaaatggacttaacagatatttacagaacattctacgcaacaactgcagaacatacattctattcgtgagcacagggaacattctccaagatagaccatwtgataggccacaaagcaagtctcaaaaaatttaagaaaatcaaaattataccaagtactctctcagaccacagtggaataaaattgaaaatcaactccaaaaggaaccctcaaaaccatgcaaatgtgtggaaattacaaacctgctcctgaacaatcactgggtcaacaatgaaatcaagatggaaattaaaaagttctttgaactgaacgataatagtggcacaacctatcaaaacctctgggatccagcaaagtggtgctaagaggaaatatcataggatcgaatgccttcatcaaaaagtgtgaaagaggacaaac

SEQ ID NO: 310881 - DNA, 619 bp, Homo sapiens
atcaatggttgagcattctctctagctttacaaaagtgtccagaaaaggattcttttattagcaaactgcttttacagcatatgattacgtttgcacaaacgttataaacaaacagtatctattggatgctttcggagtcaactaatagtactgaacacttactatggatcagccactgtactagaaattcagagatatttaatgagcttgttcttgatatgagagcaaataactagtgaggttggattctagcctctctgcaactaattagttatagtcccttggccaaggtttttaatttctctgaactatatttcacaaaggggataaaaaataattacctctcaaggtacctgaggtaatgtacagaaagcacttatcatagctgtaataataatagtaatttatatatagtaattttatgtataattattatgagtattatagtaattataatatatattaatatgttcctaatattgatagaggttacaatatcaagtcatggagataaatttcactatgtagccccttgtagaaaagagccagcaatgttgtgaatcttataaacatgttcaaagctctcartagctagtcttatacatgccaagaacaaca

SEQ ID NO: 310882 - DNA, 595 bp, Homo sapiens
agcattctgctctggctccaaattcatgtttttctcacacataaaatatattcatttcatcccaattgcccctaggtcttaacttgttctggtaaaagtccagtgtctcatctaaatcaggtatggatgagactcaaggcacaattcatcctgaggcaaattccctctagctgtgagcctgtgaaattaacaagttctcttcttccaaaatacaatgacaggtcaggcagaggatagatattcccattccaaaagggagaaataggcaagaagaaaggagtarcaggccccaagccagtctaaaacttaacaaggtaaacaatactaaatcctaagacttgaggatactcttctttgactccatgtcctactttctgggcatagtgaggtagggtttggaaccttgaggcctcaggaacagccttgcccccccatggctttgctaggcttagcccacacaactctcacaggttagaatctcatgtccgtagctctcctaggctggagttgcatgctgcatgcccatagctctcctaggctggagttgcatgctgcatgcccatagctctcctaggctggagttgcatgctgcatg

SEQ ID NO: 310883 - DNA, 574 bp, Homo sapiens
cctggactctgtagcttatagattcatgttcaaaatctggctcagttgaccagctatgttgatcttggacaaagtgcttggcctcgctgtgctttggtgtcctcagctgtgcatagagagtaacatttaggtctcaatgttgggagaattgagccataggatatatggaaggtagctgacacttagtaggacctcacggaggttcccttttccttaaggcaccatggatatcaatgagtcctgtttttgtcrtgaccttagcaggcttcctcttagtgtttttcagggcatgcattttactggtatgttggtaaacagaaatatacaatttcactttgggtctgagaggttttcattattttttgaaccacaaaatgattttctttctttcctcttctgtaaattcattgaatgttggaattcctttgcagtacctttgccataaattctactcactacatataatttaaatcaagcaggtataacataattgccctcattaggagagtgtaggacggtatactaactttgcttccaaggaattcacattaccatttgaaaaaatttcgaaact

SEQ ID NO: 310884 - DNA, 574 bp, Homo sapiens
cctggactctgtagcttatagattcatgttcaaaatctggctcagttgaccagctatgttgatcttggacaaagtgcttggcctcgctgtgctttggtgtcctcagctgtgcatagagagtaacatttaggtctcaatgttgggagaattgagccataggatatatggaaggtagctgacacttagtaggacctcacggaggttcccttttccttaaggcaccatggatatcaatgagtcctgtttttgtcgtgaccttagcaggcttcctcttagtgtttttcagggcatgcattttactggtatgttggtaaacagaaatatacaatttcactttgggtctgagaggttttcattattttttgaaccacawaatgattttctttctttcctcttctgtaaattcattgaatgttggaattcctttgcagtacctttgccataaattctactcactacatataatttaaatcaagcaggtataacataattgccctcattaggagagtgtaggacggtatactaactttgcttccaaggaattcacattaccatttgaaaaaatttcgaaact

SEQ ID NO: 310885 - DNA, 574 bp, Homo sapiens
cctggactctgtagcttatagattcatgttcaaaatctggctcagttgaccagctatgttgatcttggacaaagtgcttggcctcgctgtgctttggtgtcctcagctgtgcatagagagtaacatttaggtctcaatgttgggagaattgagccataggatatatggaaggtagctgacacttagtaggacctcacggaggttcccttttccttaaggcaccatggatatcaatgagtcctgtttttgtcgtgaccttagcaggcttcctcttagtgtttttcagggcatgcattttactggtatgttggtaaacagaaatatacaatttcactttgggtctgagaggttttcattattttttgaaccacaaaatgattttctttctttcctcttctgtaaattcattgaatgttggaattcctttgcartacctttgccataaattctactcactacatataatttaaatcaagcaggtataacataattgccctcattaggagagtgtaggacggtatactaactttgcttccaaggaattcacattaccatttgaaaaaatttcgaaact

SEQ ID NO: 310886 - DNA, 611 bp, Homo sapiens
ttgtaacacctttattgagatataaatcacataccaaatgattcactcattcacagtgtatamgtcaatggtttttagtatattcaagaagttgtataatcgttaccacaatcaattttagaacatttttattactttccacagaaaccctgcatccttccatcaccactcctcaataccccctcctccaaccactaatctactttctgtttttatagatttgactattttagatagttcatagaaaagaaataatacaatatatagtcttttgtgactggctttttttccccactcagcataatgctttcaaggttcatccatgttgtagcatgtattagtacttcattctttttcaaggccacttagtatttcattgtatagatataccacattttgtttatctatttatcagttgatgaacatttaagctatttatactttttcactattacatataatgctgctatgaacatttgtttataagtttttcttttttttttgagacagggtcttgctctgttgcccaggctggagtgcagtggtgcaatcatggcttactgcagcctcaacctcttgggctcaagcaatccttccacgtcagcaggagc

SEQ ID NO: 310887 - DNA, 611 bp, Homo sapiens
ttgtaacacctttattgagatataaatcacataccaaatgattcactcattcacagtgtatacgtcaatggtttttagtatattcaagaagttgtataatcgttaccacaatcaattttagaacwtttttattactttccacagaaaccctgcatccttccatcaccactcctcaataccccctcctccaaccactaatctactttctgtttttatagatttgactattttagatagttcatagaaaagaaataatacaatatatagtcttttgtgactggctttttttccccactcagcataatgctttcaaggttcatccatgttgtagcatgtattagtacttcattctttttcaaggccacttagtatttcattgtatagatataccacattttgtttatctatttatcagttgatgaacatttaagctatttatactttttcactattacatataatgctgctatgaacatttgtttataagtttttcttttttttttgagacagggtcttgctctgttgcccaggctggagtgcagtggtgcaatcatggcttactgcagcctcaacctcttgggctcaagcaatccttccacgtcagcaggagc

SEQ ID NO: 310888 - DNA, 611 bp, Homo sapiens
ttgtaacacctttattgagatataaatcacataccaaatgattcactcattcacagtgtatacgtcaatggtttttagtatattcaagaagttgtataatcgttaccacaatcaattttagaacatttttattactttccacagaaaccctgcatccttccatcaccactcctcaataccccctcctccaaccactaatctactttctgtttttatagatttgactattttagatagttcatagaaaagaaataatacaatatatagtcttttgtgactggctttttttccccactcagcataatgctttcaaggttcatccatgttgtagcatgtattagtacttcattctttttcaaggccacttagtatttcattgtatagatataccacattttgtttatctatttatcagttgatgaacatttaagctatttatactttttcactattacatataatgytgctatgaacatttgtttataagtttttcttttttttttgagacagggtcttgctctgttgcccaggctggagtgcagtggtgcaatcatggcttactgcagcctcaacctcttgggctcaagcaatccttccacgtcagcaggagc

SEQ ID NO: 310889 - DNA, 552 bp, Homo sapiens
tcctgccccagcctcccgagtagctgggactgtgggcacccgccaccacgcccagataatttttgtatttttggtagagacgaggtttcacattgttggtcagaatgatctcaatctcctgacctcgtgatccacccacctcagccccccaaagtgctgggattataggtttgagccaccgtgcccggccaatttttcttttttaaatctaaattatatagttgtgtgtatccctaagaagtttcactcctattctggtttctatgtgttagaattcagattttcataatctgatatttggttttcttgcataatatggaccaagccatgacctaaagagtgtaatttgtcttgtgatcccaaaatgttaactttttcctaactaaaccctgcctggtttaagtaggtagtctaaatgtcatttattcaatattcatgaatgacttctatcctaagaagagtggtttctggctctgaaagccccagtggcttttactttgtacactgcatgtgaaaatcaaayctgccccatgctatagacgttctaaggcc

SEQ ID NO: 310890 - DNA, 533 bp, Homo sapiens
ctaaatccataacattctttagtttccacactgaaagaagaaaatgtaataaatatagtttctatagggtgtgatgaaacagaatttggggatgatagcrttgataggtagaaaggatagaagataatatgaggaaattaaaatagaggggaggtaaatgagcataagaaaatgttcagggcagtaatcatctagcacagtcggaagtctcaggctatcagctccaaggcagcaaggaaaatactggttttattctcagctgcctgatacatagaaagaactcaaaaacctcttgctcaatgactgagtgagacatagcagattccaatatgtaaggaggtagttatataagggggaagtgtaaaatgaaggttaaaaatgaagttagggccatattgtgcagagtatggaatgccagagtgagcaatgtagccattaacttatatgcaaatgatgggagtggatatgtgagaattgcatccagtaatagcaaatagctcttattaagacaaactcagagaaaataatcatca

SEQ ID NO: 310891 - DNA, 542 bp, Homo sapiens
aacagctttaaaaatactcagcattctttgaaagaacataacagaatccagaatctctacaacatgttatttaatatattcagaataagatatttcacataaaaagaaataggcttataatacctattttaaatagaaaagaaaatgatcggtttccaattcccaggtgacccagatgttggaattagcagacacaaattctaaagcagttttcataactatgctgaataaagttaaagaaaatatgcttataataagctaaacgatagtgaatctcagcagataagtcctagaaataaaaaagtaaatatctgaaatatgtaaagaaaattactagagtggaatggatttaatagaaaaatggagatgacagaaggaattcagtgaatgtgaagataaatcagtgggaggtattcaatctaaagatacagctgatactgaaaaaaaaatgaacaaagcttcagaaattgaaarggagtaggaacccccttaggagcctactgggcacccttcccaacattctaccccaaaacccatgtccc

SEQ ID NO: 310892 - DNA, 631 bp, Homo sapiens
tttattccctccgaatctcatgttgaaatttaattcccaaaattggaggtgaggcctaatgggaggtgtgtgagtcatggaactggatctctcagtgacagattgattaatgccctttcttgttggaggtgagtgcattctcccgctattagttctctaagtgctctctagagagctgtttgttgaaaggagtctggcacctaaccccatctcgcttgcttcctctcttaccatgtgatctctgcacagccagctccactttgccttctaccatgagtggaagcagcctgaggccctcaccagaaatcaagcagaggctggtgccatgtattttatacagcttgcagaactataagccaaataagccactttttaaaaatatattacccagattcaggtattccttgatagcaacaacaacaacaaraaaatagacaacaacactcaacaagtaaacaactgcaagagtaatacagaaaaatatggtgtctatcttaaacagatacaaagagcatatgcacagtgcttagcagtatgttagagacattgtcagttcaaatgtctttgctagtaacaaaatgtccaactaaaagtcatataaagtttatttttcacacataacaagaaatct

SEQ ID NO: 310893 - DNA, 673 bp, Homo sapiens
catggaactggatctctcagtgacagattgattaatgccctttcttgttggaggtgagtgcattctcccgctattagttctctaagtgctctctagagagctgtttgttgaaaggagtctggcacctaaccccatctcgcttgcttcctctcttaccatgtgatctctgcacagccagctccactttgccttctaccatgagtggaagcagcctgaggccctcaccagaaatcaagcagaggctggtgccatgtattttatacagcttgcagaactataagccaaataagccactttttaaaaatatattacccagattcaggtattccttgatagcaacaacaacaacaaaaaaatagacaacaacactcaacaagtaaacaactrcaagagtaatacagaaaaatatggtgtctatcttaaacagatacaaagagcatatgcacagtgcttagcagtatgttagagacattgtcagttcaaatgtctttgctagtaacaaaatgtccaactaaaagtcatataaagtttatttttcacacataacaagaaatctggagataaatgaatgtggaattgtgactcaaagagaactttgttcctcttttcacacagacacccttatcatgctatctgcagccttgtcacatcaaggatgcaaggtagttccaag

SEQ ID NO: 310894 - DNA, 559 bp, Homo sapiens
gatgaaaacacagcattgctcacatgctatttgatagagaataattggtctaaagcagattaatgatagattttcttattgatatctttaagaggatgttgatttctgtttgtatatgcaagtccagtttattataataaatacctgcctaggagaaayagaaagcataaagaggtccttttatgattttatgcagtgctacttcctccatctcaccagatagaaaataatgacaatggtactaatgatgataatcaaaaatattcttagtggtgatgcagtattcctcaattttgtaaccatagataagtttttaggattaaataacaattataaatttaaattgagagggtacaaattttgactattgaactacaccacaaggaaagcaactttcttcatttttatgactagcattaagggaagcaataatatggctgtgaaatagctaatcaaacttatggatacatttctggcttatgggtactttttcctctttcctttcctttgctatcctctcatttcttttaaatgattaaagcaggaggtaattttaaac

SEQ ID NO: 310895 - DNA, 545 bp, Homo sapiens
ctttggtggaaacaaacatttaaacaacagcacactgtgacaaacataaagaatctctttgatgggctcattagtagactggacacagttgaaagaatttatgagcttggggatattgtaatagaaattttcaaaactgaaaaaattttttttgaaaaaacagactagaaactgtaagacagttacaaaaagtgtaacatatgtgtaataagactatcaggagaataaatagagaaaagaatagwagcaatatttgaagtagtaatgactgagaatcaaaaagaagtctcagctatatgttttctacaagaaacctatgttaaataatacacatatgcattgaaagtaaaggttgaagaaagatataccatgctcaactatttaaaagaaaaaaggcaaagtgcagtggcttatgcctgtaatccgaaaaagttgtcaggccaaggcaggaggattgcttgaggccaggtgttcaagactagcctgggcaaaacagggagacccttatctcaacaagtacaacagaattaactaggcatggtggt

SEQ ID NO: 310896 - DNA, 564 bp, Homo sapiens
cacaaatttgaaaaactagatgaaatagaccaattcatacaaaaagaaacaatctgaataaaccaatatctattaaagaaatttattaaacattaataaacttcccaaacagaaagcattgtattcagataagttcactggtaaattccattatatacttcagaagaaaattgtaccaattctctataattacttcaagaagacagaagaagatggaatacttcctaaatcactctatgaattmaacattacataatatcaaaaccagccaaagatattttaagaaaagaaaataacaggctaatatctctcataaacatagattcaaaaatcctcagtaaaatgtaagcaaattaaatccaacaaagtataaaaggaattatacccacaaccagatacgatttttcccaagtatgcaaggctggttcatcactagagaatcgattattataattaattatatcaaaaagctaaaaaagaaaaaagaagcacatgattatataaatagatgaagaaaaagcattagaaagaaataaactgtttgcagataacattattttctat

SEQ ID NO: 310897 - DNA, 553 bp, Homo sapiens
taaaaaatcaagttaataatcgaaaagaaaaaatgtattgctgcttctttatatatttatcatgaatataattttactttaagaaatgcaaataataaaaaaagcgtaaatagagagaaagaaactttaagcacagattcttacatcttgcttctgagctaagattctaataggaatggcacttaaatgagaaatcgatacctartcattttcaaactctccaaattagcacctttatccaattataggcctgcacggattctgttccaaaaagaaacacagtataaatagtcaacatgagttcaacagactaaaacatgtgtgtcccaaattgctggatttaggtcattatatttttccaggcagctaattttcccctttgaagtgctcacagaaggtcagaaacagtttaagcatcaaagctttatgaattaaacagtttcctcgcgaacagaggaaggcggctttgcctgcagaaacactattgtgaagatctctggctaaccttcaactaggatgcattccacaatggggagatcaatagcccacagtc

SEQ ID NO: 310898 - DNA, 468 bp, Homo sapiens
aatcctagagcatatagacacaaagcaaagtacagaaaaatcaaaacagaatactaaaatatgttcaagcaacccagaggtagtcaggaaagaaaaaagagaaaagaaaaacagaggtaaacaaataaaaaacaatatcataacaaatttaaattctagcatatctataattacattaaatgtaaatgatcatgtcacaacaattaaaagataaagactgtcaaacttgttacccaaaaaatgatccaactatatgcaatctataagaaacttacttccaatgtaaacaaaattttaaatgtaaaaggatgaagaaagwtataccatacagactctaattatactgaatgggcaaaaactggaaacattccctttgaaaacctgcacaagacaagggtgccatctctcatcacacctattcaatatagtattggaagttctggccagggcaatcaagcaagggaaaga

SEQ ID NO: 310899 - DNA, 630 bp, Homo sapiens
ttttctgtattgatattgtacaagaaaaatattttgtaaattttaccattaggtgaaaatggagaaaggattcagtgatctctaagtattatttttgcaattaacactaagccatattatatacatatatatatattatatagatgtgtgacaaaaattaaaagatttacatattaaaatccatgggctgcagtgaaagcagggctgygagggaaattgatagaataaactgtttatgttagaaccgaagaaaagtctaaaaccaataataggagcttccacttcaagaaactaaaaaaaggtagatatacatgtcaagtaaatagaattaaaaaattagattgtattagaaatcaataaaattcaaaatagaaaaataatagagaaaataaattaaacaaaaagctgataactcaaaatatcagtaaaataattaatttctggcaagtatgactaagaaaaagagaaggaatacacatatgacaaatatctggaaggaaatatcggatatcatcacagaacctaagacattaacagggtaagagattatggtaacaattccatgcatatgaatgagaaaacttatatgacatggatagattcctgaaaaaccataaattattataattc

SEQ ID NO: 310900 - DNA, 630 bp, Homo sapiens
ttttctgtattgatattgtacaagaaaaatattttgtaaattttaccattaggtgaaaatggagaaaggattcagtgatctctaagtattatttttgcaattaacactaagccatattatatacatatatatatattatatagatgtgtgacaaaaattaaaagatttacatattaaaatccatgggctgcagtgaaagcagggctgtgagggaaattgatagaataaactgtttatgttagaaccgaagaaaagtctaaaaccaataataggagcttccacttcaagaaactaaaaaaaggtagawatacatgtcaagtaaatagaattaaaaaattagattgtattagaaatcaataaaattcaaaatagaaaaataatagagaaaataaattaaacaaaaagctgataactcaaaatatcagtaaaataattaatttctggcaagtatgactaagaaaaagagaaggaatacacatatgacaaatatctggaaggaaatatcggatatcatcacagaacctaagacattaacagggtaagagattatggtaacaattccatgcatatgaatgagaaaacttatatgacatggatagattcctgaaaaaccataaattattataattc

SEQ ID NO: 310901 - DNA, 630 bp, Homo sapiens
ttttctgtattgatattgtacaagaaaaatattttgtaaattttaccattaggtgaaaatggagaaaggattcagtgatctctaagtattatttttgcaattaacactaagccatattatatacatatatatatattatatagatgtgtgacaaaaattaaaagatttacatattaaaatccatgggctgcagtgaaagcagggctgtgagggaaattgatagaataaactgtttatgttagaaccgaagaaaagtctaaaaccaataataggagcttccacttcaagaaactaaaaaaaggtagatatacatgtcaagyaaatagaattaaaaaattagattgtattagaaatcaataaaattcaaaatagaaaaataatagagaaaataaattaaacaaaaagctgataactcaaaatatcagtaaaataattaatttctggcaagtatgactaagaaaaagagaaggaatacacatatgacaaatatctggaaggaaatatcggatatcatcacagaacctaagacattaacagggtaagagattatggtaacaattccatgcatatgaatgagaaaacttatatgacatggatagattcctgaaaaaccataaattattataattc

SEQ ID NO: 310902 - DNA, 630 bp, Homo sapiens
ttttctgtattgatattgtacaagaaaaatattttgtaaattttaccattaggtgaaaatggagaaaggattcagtgatctctaagtattatttttgcaattaacactaagccatattatatacatatatatatattatatagatgtgtgacaaaaattaaaagatttacatattaaaatccatgggctgcagtgaaagcagggctgtgagggaaattgatagaataaactgtttatgttagaaccgaagaaaagtctaaaaccaataataggagcttccacttcaagaaactaaaaaaaggtagatatacatgtcaagtaaatagaattaaaaaattagattgtattagaaatcaataaaattcaaaatagaaaaataatagagaaaataaattaaacaaaaagctgataactcaaaatatcagtaaaataattaatttctggcaagtatgactaasaaaaagagaaggaatacacatatgacaaatatctggaaggaaatatcggatatcatcacagaacctaagacattaacagggtaagagattatggtaacaattccatgcatatgaatgagaaaacttatatgacatggatagattcctgaaaaaccataaattattataattc

SEQ ID NO: 310903 - DNA, 585 bp, Homo sapiens
ctgtgtctgctttaccgttttacccaccaagcacagagtactgggagtcctttgcacaaaactgatgatcagaaatggtttattcttaattatttaatttatttatwaatattccctacttaagcatacatcaacacatatagatatataatgggcatgttgatgttgtcaggagaaaaatcttcatagtaaattaagtatatttcaaatagtcaccaaaatgtattttaaattatcgatttacaaatctattggatctgttatgggttgaattatgttctcccaagaagaaatgttgaaatcctagccttcagaatcctcagaatttgatcttatttgaaagtaagtttacaaaggtaatgaagttaaaacgagatccttaggataggctctaatccaatggttattatctttataaaaagagaaaatgtggacacagaaacagacatgcatagaaagaagacgatatgaagacatacagggagaagatggccatgagagactggaatgatgtatctacaagccaaagaatgccaataattgctggcaaacattagaatctagtacaattgagagaaagattat

SEQ ID NO: 310904 - DNA, 585 bp, Homo sapiens
ctgtgtctgctttaccgttttacccaccaagcacagagtactgggagtcctttgcacaaaactgatgatcagaaatggtttattcttaattatttaatttatttattaatattccctacttaagcatacatcaacacatatagatatataatgggcatgttgatgttgtcaggagaaaaatcttcatagtaaattaagtatatttcaaatagtcaccaaaatgtattttaaattatcgatttacaaatctattggatctgttatgggttgaattatgttctcccaagaagaaatgttgmaatcctagccttcagaatcctcagaatttgatcttatttgaaagtaagtttacaaaggtaatgaagttaaaacgagatccttaggataggctctaatccaatggttattatctttataaaaagagaaaatgtggacacagaaacagacatgcatagaaagaagacgatatgaagacatacagggagaagatggccatgagagactggaatgatgtatctacaagccaaagaatgccaataattgctggcaaacattagaatctagtacaattgagagaaagattat

SEQ ID NO: 310905 - DNA, 585 bp, Homo sapiens
ctgtgtctgctttaccgttttacccaccaagcacagagtactgggagtcctttgcacaaaactgatgatcagaaatggtttattcttaattatttaatttatttattaatattccctacttaagcatacatcaacacatatagatatataatgggcatgttgatgttgtcaggagaaaaatcttcatagtaaattaagtatatttcaaatagtcaccaaaatgtattttaaattatcgatttacaaatctattggatctgttatgggttgaattatgttctcccaagaagaaatgttgaaatcctagccttcagaatcctcagaatttgatcttatttgaaagtaagtttacaaaggtaatgaagttaaaacgagatccttaggataggctctaatccaatggttattatctttataaaaagagaaaatgtggacacagaaacagacatrcatagaaagaagacgatatgaagacatacagggagaagatggccatgagagactggaatgatgtatctacaagccaaagaatgccaataattgctggcaaacattagaatctagtacaattgagagaaagattat

SEQ ID NO: 310906 - DNA, 449 bp, Homo sapiens
tgtgtgtgtgtgtgtgtgtgtgtgtgtgtcactcaaaccaaaatgctgcatgaatgycatgatgaccagaccaaggatttggtactaaaatcgctcaagacacagccatatacacacacacacacacacacacacacacacacgtgtatatgtgtatatatgtgtgtgtgtgtgtgtgtgtgtgtgtgtgtcacaaaaagaatcttcctaaagtcgcaagtgccataagggatacctacccatgcgaattcagaggaggtataaattattgttgacagggaaggagtcagggaaggcatttgacctgtgccttgaaagacaggtggggtttgctcacatgaagatgaaggaaacggcacgggaggcataagcataagagacaaagcctaggacatttacgggaaacagaaggaattcaatttggctggagcatagggcatagaagagcc

SEQ ID NO: 310907 - DNA, 449 bp, Homo sapiens
tgtgtgtgtgtgtgtgtgtgtgtgtgtgtcactcaaaccaaaatgctgcatgaatgtcatgatgaccagaccaaggatttggtactaaaatcgctcaagacacagccatayacacacacacacacacacacacacacacacacgtgtatatgtgtatatatgtgtgtgtgtgtgtgtgtgtgtgtgtgtgtcacaaaaagaatcttcctaaagtcgcaagtgccataagggatacctacccatgcgaattcagaggaggtataaattattgttgacagggaaggagtcagggaaggcatttgacctgtgccttgaaagacaggtggggtttgctcacatgaagatgaaggaaacggcacgggaggcataagcataagagacaaagcctaggacatttacgggaaacagaaggaattcaatttggctggagcatagggcatagaagagcc

SEQ ID NO: 310908 - DNA, 558 bp, Homo sapiens
gaaacaaataagttcacactacttgtttccttatgagacagagtgaaaacaatagctttggatttcttctgtttagtattgttaagataatggtgttgttcttgctttagttcaaactaatagataaattattcccccaagattaacccataaaacacatacagaattggcatcctctggcttgttcatttgccctcatgatctagttacttattttttattwtaaaactgcaaaatgagtaagtgatttttttacagttagtagtagcaattctaaattggtcattgaaatttagttcacaaatggaatctttcccactgaagctaggttatctaattctttctaagatatgtgaagagttaggatatacattaccatgttttaactagctgttttctgtcactatgctttaggctagaggtgctataaacttaataaaattatgaatgtaacaaatatttccttaataccaatgttgcaagttttatgaggactctggccttcaaaaaccaatgaagtttaaaaaaaatgatgggtttgttggagaagctctgtaa

SEQ ID NO: 310909 - DNA, 616 bp, Homo sapiens
aatcctaagaaagggttatatataaactaatggggtaaaargggccatcagcatcccaacactcagtgttgttattctttctcttcccatgtggtttccatctgttgcttgtgaataatttcactgaggtccagttcacagtagggctaactgagccctttagaagagcctgaccctcagctgagagtttgggtctaaggtgtaaattgtggatctgattacgtcttccatcctggcccagttcaggaaattagaacctggccagctgtgtttcccagtttgtaggttgcaggcagttacctggctctctctcagacagcctgctgtcctttacttgagagtagacacagatgtatccactaagccagttttacccaatgttcaatcatgattttgatctatcagtaccacctaccttcttatttacttaacagtttgcatgaatgtaagatatagagtcattttttacagtatttaaatgtatttttaaaagtttgcgtggtaagtgaaatggaaaacaactactaccatttgaaataaaaactagatagctatgaaaatgctgtgaaatcaaagcaaagtttctaaatgtgaactatatgttatggcatgcctg

SEQ ID NO: 310910 - DNA, 616 bp, Homo sapiens
aatcctaagaaagggttatatataaactaatggggtaaaaagggccatcagcatcccaacactcagtgttgttattctttctcttcccatgtggtttccatctgttgcttgtgaataatttcactgaggtccagttcacagtagggctaactgagccctttagaaragcctgaccctcagctgagagtttgggtctaaggtgtaaattgtggatctgattacgtcttccatcctggcccagttcaggaaattagaacctggccagctgtgtttcccagtttgtaggttgcaggcagttacctggctctctctcagacagcctgctgtcctttacttgagagtagacacagatgtatccactaagccagttttacccaatgttcaatcatgattttgatctatcagtaccacctaccttcttatttacttaacagtttgcatgaatgtaagatatagagtcattttttacagtatttaaatgtatttttaaaagtttgcgtggtaagtgaaatggaaaacaactactaccatttgaaataaaaactagatagctatgaaaatgctgtgaaatcaaagcaaagtttctaaatgtgaactatatgttatggcatgcctg

SEQ ID NO: 310911 - DNA, 616 bp, Homo sapiens
aatcctaagaaagggttatatataaactaatggggtaaaaagggccatcagcatcccaacactcagtgttgttattctttctcttcccatgtggtttccatctgttgcttgtgaataatttcactgaggtccagttcacagtagggctaactgagccctttagaagagcctgaccctcagctgagagtttgggtctaaggtgtaaattgtggatctgattacgtcttccatcctggcccagttcaggaaattagaacctggccagctgtgtttcccagtttgtaggttgcaggcmgttacctggctctctctcagacagcctgctgtcctttacttgagagtagacacagatgtatccactaagccagttttacccaatgttcaatcatgattttgatctatcagtaccacctaccttcttatttacttaacagtttgcatgaatgtaagatatagagtcattttttacagtatttaaatgtatttttaaaagtttgcgtggtaagtgaaatggaaaacaactactaccatttgaaataaaaactagatagctatgaaaatgctgtgaaatcaaagcaaagtttctaaatgtgaactatatgttatggcatgcctg

SEQ ID NO: 310912 - DNA, 616 bp, Homo sapiens
aatcctaagaaagggttatatataaactaatggggtaaaaagggccatcagcatcccaacactcagtgttgttattctttctcttcccatgtggtttccatctgttgcttgtgaataatttcactgaggtccagttcacagtagggctaactgagccctttagaagagcctgaccctcagctgagagtttgggtctaaggtgtaaattgtggatctgattacgtcttccatcctggcccagttcaggaaattagaacctggccagctgtgtttcccagtttgtaggttgcaggcagttacctggctctctctcagacagcctgctgtcctttacttgagagtagacacagatgtatccactaagccagttttayccaatgttcaatcatgattttgatctatcagtaccacctaccttcttatttacttaacagtttgcatgaatgtaagatatagagtcattttttacagtatttaaatgtatttttaaaagtttgcgtggtaagtgaaatggaaaacaactactaccatttgaaataaaaactagatagctatgaaaatgctgtgaaatcaaagcaaagtttctaaatgtgaactatatgttatggcatgcctg

SEQ ID NO: 310913 - DNA, 551 bp, Homo sapiens
acatctgtagcacaggaatactctgtatgccttacatggttttgtgtatcaattaagtaagagcttatggaagcgttctaatctaccctgtactccctaagcataaaaggttaaccctgccccctaaaatcttatggctatacctatacttttctgcaagttattatttttaaatttacattttaaktaaatatcaaaaaacaatgcatttagttgttttgaatgcaatcaaatggatacaaatagatactctaaataattgaattggtactattagatggcacacttgaacattggttactgccagaatcaactgaaattcatgatctctggctgacggatttcagaatcttttttcttgacagatggagagatttgaaaatagtttaaaacacataagcttactcaccgcaattgatttgaacatatttactggattgttttagcttaaatagacagaagtcaaacctaaagactttttataagagttgatcaccacatataaaagttctattgtgagcttaagactgaggatgaaaatttatatcaga

SEQ ID NO: 310914 - DNA, 551 bp, Homo sapiens
acatctgtagcacaggaatactctgtatgccttacatggttttgtgtatcaattaagtaagagcttatggaagcgttctaatctaccctgtactccctaagcataaaaggttaaccctgccccctaaaatcttatggctatacctatacttttctgcaagttattatttttaaatttacattttaagtaaatatcaaaaaacaatgcatttagttgttttgaatgcaatcaaatggatacaaatagatactctaaataaytgaattggtactattagatggcacacttgaacattggttactgccagaatcaactgaaattcatgatctctggctgacggatttcagaatcttttttcttgacagatggagagatttgaaaatagtttaaaacacataagcttactcaccgcaattgatttgaacatatttactggattgttttagcttaaatagacagaagtcaaacctaaagactttttataagagttgatcaccacatataaaagttctattgtgagcttaagactgaggatgaaaatttatatcaga

SEQ ID NO: 310915 - DNA, 564 bp, Homo sapiens
acaaatgtaattttggggcaaaacacacacacacacaaaactccttgaaggttttggagagtaaacaaaagcctgctccatcagaataaatctgtatccattcctagccaaatcatagccaaaggatgacaggaagaagaagagtcaatgtgagatcaggctgcataggctgctatggttaatccaggaagtctgtaggtctccacagaggagagagtatctaagggtttcctcagtgactcaaaaacggtttggcagcttccatacagggccccaatttcatctggaaaatggggggcccaggagtgcctatctagcttgtttaaggagcgaaggacacagagagttccaaaggagatgctggatctcccattccragcctgggaaccacctccagcaccacccacctttaaaagccttcttgaaactgacactggctgtcggcctacaacaaatgttaactatttcccagagggactgggagcagtatgagtggtttgctaccctgacttatgacaagaagcctggcctgggttctagccctgggacctggtcaacttcttc

SEQ ID NO: 310916 - DNA, 527 bp, Homo sapiens
cacacgtttgcacaattgtttaactcatggcagaatctgcttgtgctcacaccactggggctccgtggaatgattcacagtttagattgtctgctatttttataagacactttcagcggcttaataactggctcttcytgataagacatttgggaactgtgcataagtgacagaataatattaaaatcaaatcaagttcagagataaatacacaaatctctgctctacctacgtgatatgcgccctatgaatcacaaaagataattgttttagttgatacagctgttgtgtgttttgtacaagcattttctctttcaaagacatctcatgaaaatctcattctcttatgagatatgagaccatgttacaccttttcccattttaaatacatttcctacatgttgttgatttgatccccagttccatttagaacactgaaggggtaatctatgcagtgggatcccagtggcctcaaagtatggctgcagtttttcaaagtgcctgttcgaagatcgttcatagaagta

SEQ ID NO: 310917 - DNA, 527 bp, Homo sapiens
cacacgtttgcacaattgtttaactcatggcagaatctgcttgtgctcacaccactggggctccgtggaatgattcacagtttagattgtctgctatttttataagacactttcagcggcttaataactggctcttcctgataagacatttgggaactgtgcataagtgacagaataatattaaaatcaaatcaagttcagagataaatacacaaatctctgctctacytacgtgatatgcgccctatgaatcacaaaagataattgttttagttgatacagctgttgtgtgttttgtacaagcattttctctttcaaagacatctcatgaaaatctcattctcttatgagatatgagaccatgttacaccttttcccattttaaatacatttcctacatgttgttgatttgatccccagttccatttagaacactgaaggggtaatctatgcagtgggatcccagtggcctcaaagtatggctgcagtttttcaaagtgcctgttcgaagatcgttcatagaagta

SEQ ID NO: 310918 - DNA, 539 bp, Homo sapiens
tcatggatggaacattcatgggatttaaaagttctccctacactcagggaggccaagacacagggccatgacagaattctgtcgattacagggacagacaaagtagaagcacagttctgtcgggaggttgttgtcgaaatccaggcgagagcagccgggggcttaggtggcgaggataatggtggaggtgatgagaaggcttcagtgtgtggattcggatggtagaggcccctggattcctgccagattggcccttaggtgtgaggaaaagcagaaaaaggatgatrtgaggattttagcctgagctgaaggtgggagggagtcaccacttgccgggactgggtgtagccagcgtccctcgcacccatgtaccagtcaccgggtgctcctcccctattgctcatggactcttcaaagaggggtgtggagtggggaggcgttatcctcattttattttcttttgagtaaaggaaggaaggggaggaaaggggcttcctcattttagagattagaaaattgaattagaagagattaaggag

SEQ ID NO: 310919 - DNA, 539 bp, Homo sapiens
tcatggatggaacattcatgggatttaaaagttctccctacactcagggaggccaagacacagggccatgacagaattctgtcgattacagggacagacaaagtagaagcacagttctgtcgggaggttgttgtcgaaatccaggcgagagcagccgggggcttaggtggcgaggataatggtggaggtgatgagaaggcttcagtgtgtggattcggatggtagaggcccctggattcctgccagattggcccttaggtgtgaggaaaagcagaaaaaggatgatatgaggattttagcctgagctgaaggtgggagggagtcaccacttgccgggactgggtgtagccagmgtccctcgcacccatgtaccagtcaccgggtgctcctcccctattgctcatggactcttcaaagaggggtgtggagtggggaggcgttatcctcattttattttcttttgagtaaaggaaggaaggggaggaaaggggcttcctcattttagagattagaaaattgaattagaagagattaaggag

SEQ ID NO: 310920 - DNA, 553 bp, Homo sapiens
tggaggtgatgagaaggcttcagtgtgtggattcggatggtagaggcccctggattcctgccagattggcccttaggtgtgaggaaaagcagaaaaaggatgatatgaggattttagcctgagctgaaggtgggagggagtcaccacttgccgggactgggtgtagccagcgtccctcgcacccatgtaccagtcaccgggtgctcctcccctattgctcatggactcttcaaagaggggtgtggagtggggaggcgttatcctcattttattttcttttgagtaaaggaaggaagggraggaaaggggcttcctcattttagagattagaaaattgaattagaagagattaaggagttcctccaatgtcatagagttggtaagcagagccaggatctgtgcttgggtggtcttaatttcagagttcttacctttttttttgcttttgctttttcttttcttttttttttttttttctttttgagatggagtctcgctctgttgcccaggctggagtgcagtggcacaatcccggctcactgcaacctctgtc

SEQ ID NO: 310921 - DNA, 553 bp, Homo sapiens
tggaggtgatgagaaggcttcagtgtgtggattcggatggtagaggcccctggattcctgccagattggcccttaggtgtgaggaaaagcagaaaaaggatgatatgaggattttagcctgagctgaaggtgggagggagtcaccacttgccgggactgggtgtagccagcgtccctcgcacccatgtaccagtcaccgggtgctcctcccctattgctcatggactcttcaaagaggggtgtggagtggggaggcgttatcctcattttattttcttttgagtaaaggaaggaaggggaggaaaggggcttcctcattttagagattagaaaattgaattagaagagattaaggagttcctccaatgtcatagagttggtaagcagagccaggatctgtgcttgggtggtcttaatttcagagttcttacctttttttttgcttttgctttttcttttcttttttttttttttttctttttgagatkgagtctcgctctgttgcccaggctggagtgcagtggcacaatcccggctcactgcaacctctgtc

SEQ ID NO: 310922 - DNA, 430 bp, Homo sapiens
tcctgcctggctgagctgccttctcaaccctcccctccccaggacactcagctgtgaaaggcgctgatttgcacaggtggatctaatgagctcatctcgcttccccctacacatttcagttgatccgaggcccagggctgccaagtggggcccgggctgtctgtggtagtgggagcttccccaacagccgtagactctccggggaaatcaccagtcagctctctacagcttcctcattccccacaygccatctgcagctcaggacaccggaaactcaaatcatcaaaaaccggagctggaagctcccttaggaagctgctccagctcctccagcccctcaaaagccaggctgagagaggggaagtggcccatccacactcagccagggagtcggtggcaacgccaagactcaagttgtgtccctttaacc

SEQ ID NO: 310923 - DNA, 507 bp, Homo sapiens
tgcacctgtagtcccagccactccggaggctgaggcaggagcattgcttgaaccyggcaggcggaggttgcagtgagccgagatcgtgccactgcactccagcctgggtgacagagcgagactcctggaaaaaaagaaaaagaaaaagaagaaaagatgtaagcacatcttcaatctttgatctttgagtgagggtgttgagaagaacatgtgtttgaaaaatgaataaagcagagagaagttaggggtgaatgtgcatatccagttgggacaatgagtaagagaagagtgaatgggcaccgagggagagaatgtcactataaataattgaaaagagagtgagtgcacatgagagcttggggaaaggcaggttgtgcctataagtcataggcatattttataactgcattctgcagctcaaatcgcaatcttgggcaggcattaacattgatttagggcttttagtccacctgatactatgtaatatcgagcacaatgaaacatcat

SEQ ID NO: 310924 - DNA, 571 bp, Homo sapiens
ctttgcacctgtcccagattgatgacatatttttgtaattgatgagtcttttcatctattaggagatctgtcgttaggaaaggccttccacatgttaactcaacaggacttaattatacgttttactttggagcagttcaaacccgcagtaagctatgggtgttggagrtagtcaggcgtctgatttagctggagtcttctgtagagtaggattagccctttcacctttccagaggactgcagtctccacacagagtgaaggtaatattggattcttaaagctgagataggtgttgggttacgcctgatgtgaaagatgggccattgtcactttgcaggcttttagattacccaaactgaggagttatttcttctggtaaacatttttcagatggggtggggaatgcctcaatctaaccagtgaaggtatcagtaagcattagcaaatatttgaatctcctgcagaaaggcttcggggtaaattagagttgccagttctcatgtagattggttcctcaatgttggacaggtttaactggagaaggagaaaattgctggccgtttgggtcat

SEQ ID NO: 310925 - DNA, 571 bp, Homo sapiens
ctttgcacctgtcccagattgatgacatatttttgtaattgatgagtcttttcatctattaggagatctgtcgttaggaaaggccttccacatgttaactcaacaggacttaattatacgttttactttggagcagttcaaacccgcagtaagctatgggtgttggagatagtcaggcgtctgatttagctggagtcttctgtagagtaggattagccctttcacctttccagaggactgcagtctccacacagagtgaaggtaatattggattcttaaagctgagataggtgttgggttacgcctgatgtgaaagatgggccattgtcactttgcaggcttttagattacccaaactgaggagttatttcttctggtaaacatttttcagatggggtggggaatgcctcratctaaccagtgaaggtatcagtaagcattagcaaatatttgaatctcctgcagaaaggcttcggggtaaattagagttgccagttctcatgtagattggttcctcaatgttggacaggtttaactggagaaggagaaaattgctggccgtttgggtcat

SEQ ID NO: 310926 - DNA, 571 bp, Homo sapiens
ctttgcacctgtcccagattgatgacatatttttgtaattgatgagtcttttcatctattaggagatctgtcgttaggaaaggccttccacatgttaactcaacaggacttaattatacgttttactttggagcagttcaaacccgcagtaagctatgggtgttggagatagtcaggcgtctgatttagctggagtcttctgtagagtaggattagccctttcacctttccagaggactgcagtctccacacagagtgaaggtaatattggattcttaaagctgagataggtgttgggttacgcctgatgtgaaagatgggccattgtcactttgcaggcttttagattacccaaactgaggagttatttcttctggtaaacatttttcagatggggtggggaatgcctcaatctaaccagtgaaggtatcagtaagcattagcaaatatttgaatctcctgcagaaaggcttcggggtaaattagagttgycagttctcatgtagattggttcctcaatgttggacaggtttaactggagaaggagaaaattgctggccgtttgggtcat

SEQ ID NO: 310927 - DNA, 584 bp, Homo sapiens
gtcaggcacagagctcacagggctgagtcacctgttttagtgtcttgaaaagatttacccctataaacaaatgagacattaacagaaacaaagaatcccttctagggtgaaaagaatcatgaaagtgctgagttatactcctgtgattggtacttggcgttagtaatttattaccatcattcagcccgaggggccctggactgaaatgcaatccctggcccattttcgttcttcttcagggtattccggcccagttctatgtatgctgaccagcacgcccacaagcttcattggccctttcagtgcagkggccttggctgtggcatctacaagggcatttccttttacatggtcagtctctcttttgatgtcctctgcaattaattatagtcactttttggcagcaaagcagcactctaacaagctcaaaatctgaatgatgttgtatggaaaagcccttgggggtcaggagtccccacccattccaaattgcagcataagcatgaagcactaaaaaatcatacttggaatcagtgtaaatgttaacttttaaatcctttccaactgcagggacctagtaagtt

SEQ ID NO: 310928 - DNA, 562 bp, Homo sapiens
attaatttctaagcccctattgactaaatggacmcctcttcttggataaggacattccaaagttaacctgaaaagctacttcaagccatgggtcacacctgcctcattagactctccttttggttttaattgtaatttttaattaatttttgtgggtacatagttggtgtatatatttatgggggtacatgacatactttgatacaggcatgcaatcagtaatacacaataaaaaacagggtatccatcccctcaagcatttatagcttgttttataaacaatccaattatactattttagtttttataaaatgtataaattatttttttaccataatcaccctgttgtgctaccaaatactgtcttattcattctttctaacaattttttgtacccatttcgcatccccactaaccccgttcccccactgcccttcccagcctctggtaaccaaccttatactctctatctctatgacatcaattgttttgaattttagcgcccacaaacgagtgagaacatgtgacatttgtctttctgtgcctgacttatttcacttaa

SEQ ID NO: 310929 - DNA, 562 bp, Homo sapiens
attaatttctaagcccctattgactaaatggacccctcttcttggataaggacattccaaagttaacctgaaaagctacttcaagccatgggtcacacctgcctcattagactctccttttggttttaattgtaatttttaattaatttttgtgggtacatagttggtgtatatatttatgggggtacatgacatactttgatacaggcatgcaatcagtaatacacaataaaaaacagggtatccatcccctcaagcatttatagcttgttttataaacaatccaattatactattttagtttttataaaatgtataaattatttttttaccataatcaccctgttstgctaccaaatactgtcttattcattctttctaacaattttttgtacccatttcgcatccccactaaccccgttcccccactgcccttcccagcctctggtaaccaaccttatactctctatctctatgacatcaattgttttgaattttagcgcccacaaacgagtgagaacatgtgacatttgtctttctgtgcctgacttatttcacttaa

SEQ ID NO: 310930 - DNA, 562 bp, Homo sapiens
attaatttctaagcccctattgactaaatggacccctcttcttggataaggacattccaaagttaacctgaaaagctacttcaagccatgggtcacacctgcctcattagactctccttttggttttaattgtaatttttaattaatttttgtgggtacatagttggtgtatatatttatgggggtacatgacatactttgatacaggcatgcaatcagtaatacacaataaaaaacagggtatccatcccctcaagcatttatagcttgttttataaacaatccaattatactattttagtttttataaaatgtataaattatttttttaccataatcaccctgttgtgctaccaaatactgtcttattcattctttctaacaattttttgtacccatttcrcatccccactaaccccgttcccccactgcccttcccagcctctggtaaccaaccttatactctctatctctatgacatcaattgttttgaattttagcgcccacaaacgagtgagaacatgtgacatttgtctttctgtgcctgacttatttcacttaa

SEQ ID NO: 310931 - DNA, 585 bp, Homo sapiens
taactgagtcacagttccacgtggctggggaggcctcaggaaacttacagtcatggcagacgaggaagcaggcacctcttccatgacagcaggygagagagcatatatgtgaagcaaagggggaagagccccttataaaaacatcagatctcatgagaactcactcattgtcagaagaacaacctggaggaaaccaaccccatgatccaatcatcttctaccaggtctctccctcaacacctggggattacaattcaatatgagatttgggtggggacacaaagcctaaccatatcacatcgctattaattgcttttcagatgggtaattcacaaatattttctcccattctgtgggttttctcttcactttgtttccttcactttaaaaaagctttctgacttgctgtaattccatttgttcatgtttgctttggttgtctgtgcttatggggcattatttaagaaatttttgctcaaaccatgccctaaagggtttccccagtgttttcttgtaaaattttgatagtttgaggtgttaggtttaagtttttaatttattttaatttgatttttgtatgtggca

SEQ ID NO: 310932 - DNA, 585 bp, Homo sapiens
taactgagtcacagttccacgtggctggggaggcctcaggaaacttacagtcatggcagacgaggaagcaggcacctcttccatgacagcaggtgagagagyatatatgtgaagcaaagggggaagagccccttataaaaacatcagatctcatgagaactcactcattgtcagaagaacaacctggaggaaaccaaccccatgatccaatcatcttctaccaggtctctccctcaacacctggggattacaattcaatatgagatttgggtggggacacaaagcctaaccatatcacatcgctattaattgcttttcagatgggtaattcacaaatattttctcccattctgtgggttttctcttcactttgtttccttcactttaaaaaagctttctgacttgctgtaattccatttgttcatgtttgctttggttgtctgtgcttatggggcattatttaagaaatttttgctcaaaccatgccctaaagggtttccccagtgttttcttgtaaaattttgatagtttgaggtgttaggtttaagtttttaatttattttaatttgatttttgtatgtggca

SEQ ID NO: 310933 - DNA, 417 bp, Homo sapiens
ggtgttaggtttaagtttttaatttattttaatttgatttttgtatgtggcaagaaatagggytctagtttcactcttctgcctatggcttgccagttttcccagccctatttattacagaaactgtcttattttttcttgtatgttatcaacacttttgttcaaaataagtttagtttagctgtatgagtttgtttctaagttctctatttcattccatttgtctttgtctttgtattctagtgtcatgctgttttaattactataacttgatagtataatttaaaaccaggtaatgggattcctccagttttggtttatatactcagaatagctttgactattatagtgttttgtggttccatatatatttcagattttttttctatttctatgaggaatgtcattgttattttg

SEQ ID NO: 310934 - DNA, 622 bp, Homo sapiens
ttcattccatttgtctttgtctttgtattctagtgtcatgctgttttaattactataacttgatagtataatttaaaaccaggtaatgggattcctccagttttggtttatatactcagaatagctttgactattatagtgttttgtggttccatatatatttcagattttttttctatttctatgaggaatgtcattgttattttgacagagatggcatgaaaagtatagactgctttggatcgcatggacatttttaaaaatactgattcttccaatctgtgaacatagatataactttccatttttttgtcttctctttcttttatcagtgttttacatttttaattgttgagaacttttatttctttggtaaattcccacacattttgttttatttgtggctaytgcaaataggattacttttttgaattcttttccagtttgttgactgttggcatatagaaatcctactgatttgtacatgttgattttgtattatgcaaatttactcaagttattacttctaatagttttttgatggatatattaggccattctcacattgctgtaaaaataatcggtgactagttaatttataaaggaaataggtttcattggc

SEQ ID NO: 310935 - DNA, 622 bp, Homo sapiens
ttcattccatttgtctttgtctttgtattctagtgtcatgctgttttaattactataacttgatagtataatttaaaaccaggtaatgggattcctccagttttggtttatatactcagaatagctttgactattatagtgttttgtggttccatatatatttcagattttttttctatttctatgaggaatgtcattgttattttgacagagatggcatgaaaagtatagactgctttggatcgcatggacatttttaaaaatactgattcttccaatctgtgaacatagatataactttccatttttttgtcttctctttcttttatcagtgttttacatttttaattgttgagaacttttatttctttggtaaattcccacacattttgttttatttgtggctattgcaaataggattacttttttgaattcttttccagtttgttgactgttggcatatagaaatcctactgatttgtacatgttgattttgtattatgcaaatttactcaagttattacttctaatagttttttgatggatatattaggccattctcacattgctgtaaaamtaatcggtgactagttaatttataaaggaaataggtttcattggc

SEQ ID NO: 310936 - DNA, 515 bp, Homo sapiens
atcacctccccactaggcccacttccaacattgaggattacatttcaatgtaagattttggtgggaacacacacctaaactatatcattttgcccctggccattccaaatctcatatccttctcatatttcaaaatacaatcatgacatcccaataatcccyaaagtcttaactcatttcagccttaactcaaaagtcaaaagtctcatctaagacaaagctagtttattcctcctataagcctgtaaaataaaaaacaaattaagtacttccaagataaaaatggggcataggcattgggtaaatactcctattctaaaaggaagaaatcagccaaaagaaagaggccacaggacccatgcaagtctgaaacccagaaggggagttattgaattttaaggctctaaaataattatttttgactctatgtcccatttccagggcacagtaatgccttgggacgtttagaccttgtggcttttcatggttcagcccccacagctgctctcatgggc

SEQ ID NO: 310937 - DNA, 515 bp, Homo sapiens
atcacctccccactaggcccacttccaacattgaggattacatttcaatgtaagattttggtgggaacacacacctaaactatatcattttgcccctggccattccaaatctcatatccttctcatatttcaaaatacaatcatgacatcccaataatccccaaagtcttaactcatttcagccttaactcaaaagtcaaaagtctcatctaagacaaagctagtttattcctcctataagcctgtaaaataaaaaacaaattaagtacttccaagataaaaatggggcataggcattgggtaaataytcctattctaaaaggaagaaatcagccaaaagaaagaggccacaggacccatgcaagtctgaaacccagaaggggagttattgaattttaaggctctaaaataattatttttgactctatgtcccatttccagggcacagtaatgccttgggacgtttagaccttgtggcttttcatggttcagcccccacagctgctctcatgggc

SEQ ID NO: 310938 - DNA, 515 bp, Homo sapiens
atcacctccccactaggcccacttccaacattgaggattacatttcaatgtaagattttggtgggaacacacacctaaactatatcattttgcccctggccattccaaatctcatatccttctcatatttcaaaatacaatcatgacatcccaataatccccaaagtcttaactcatttcagccttaactcaaaagtcaaaagtctcatctaagacaaagctagtttattcctcctataagcctgtaaaataaaaaacaaattaagtacttccaagataaaaatggggcataggcattgggtaaatactcctattctaaaaggaagaaatcagccaaaagaaagaggccacaggacccatgcaagtctgaaacccagaaggggagttattgaattttaaggctctaaaataattatttttgactctatgtcccatttccagggcacastaatgccttgggacgtttagaccttgtggcttttcatggttcagcccccacagctgctctcatgggc

SEQ ID NO: 310939 - DNA, 515 bp, Homo sapiens
atcacctccccactaggcccacttccaacattgaggattacatttcaatgtaagattttggtgggaacacacacctaaactatatcattttgcccctggccattccaaatctcatatccttctcatatttcaaaatacaatcatgacatcccaataatccccaaagtcttaactcatttcagccttaactcaaaagtcaaaagtctcatctaagacaaagctagtttattcctcctataagcctgtaaaataaaaaacaaattaagtacttccaagataaaaatggggcataggcattgggtaaatactcctattctaaaaggaagaaatcagccaaaagaaagaggccacaggacccatgcaagtctgaaacccagaaggggagttattgaattttaaggctctaaaataattatttttgactctatgtcccatttccagggcacagtaatgccttgggacgtttagaccttgtggctttkcatggttcagcccccacagctgctctcatgggc

SEQ ID NO: 310940 - DNA, 590 bp, Homo sapiens
taggtttcacattttatgtctaaaaatataggtattaaacactcaaggatggataaaagaaatcacaagagaaaacagaaaatatctagagacaaattaaaaatatgaaataccaaaagttaagagatacatcaaaaacagtaccataagggaaaaatttatagctataaatgataataaaaaataagataccgaatcaacaactttactcctaaggaactaaaaacagagggaaaaagggggacaactaaaagagggacaactaaaagagggacaactaaaagctagcaaaattttaaaaatgataaagatagcagtggaaataagtgaaatagagaacagaaaaacaatatcaaaaatcaacaaaaccaagtttgttctytgaaaaagatcaaaattgacaaaattttatctagattgactaagaaaaaaagggaatactcaaattactaaactcaaaaataaaatgggtacattactaacaaatttttggagtaaaaaaaggatgcacgagagtaccataaggaactatacactaaaaaattgagtaacctaaataaaatgaacaaattcctagaaacaaaaaacct

SEQ ID NO: 310941 - DNA, 378 bp, Homo sapiens
accataagggaaaaatttatagctataaatgataataaaaaataagataccgaatcaacaactttactcctaaggaactaaaaacagagggaaaaagggggacaactaaaagagggacaactaaaagagggacaactaaaagctagcaaaattttaaaaatgataaagatagcagtggaaataagtgaaatagagaacagaaaaacaatatcaaaaatcaacaaaaccaagtttgttctctgaaaaagatcaaaattgacaaaattttatctagattgactaagaaaaaaagggaatactcaaattactaaactcaaaaataaaatgggtrcattactaacaaatttttggagtaaaaaaaggatgcacgagagtacc

SEQ ID NO: 310942 - DNA, 587 bp, Homo sapiens
caaaaaaccaaacaccgcatattctcactcataggtgggaattgaacaatgacatcacatggacacaggaaggggaatatcacactctggggactgcggtggggtcgggggaggggggagggatagcactgggagatatacctaatgctagatgacacattagtgggtgcagcgcaccagcatggcacatgtatacatatgtaactaacctgcacaatgtgcacatgtaccctaaaacttagagtataataaaaaaaaataaataaawaaaaaaataaataaaaaaagatattccaatttttaaaaaagtaaaattttctgtttgcagatgacatgactttatatattaaaaatcttttagtttctgtgagataaactatcagatgcaataaataacattcagcaaaactgcaggatacaaaatcaagacacaaaaatcggttgtatttctacaataacaaactatctgaagaagaaatcaagacaacagtatcatttatgacagcatcaaaagaataaaatacttagaagccaacttaaccaaggaaatgaaaaacctgtacagcagaactataaacattgcagga

SEQ ID NO: 310943 - DNA, 587 bp, Homo sapiens
caaaaaaccaaacaccgcatattctcactcataggtgggaattgaacaatgacatcacatggacacaggaaggggaatatcacactctggggactgcggtggggtcgggggaggggggagggatagcactgggagatatacctaatgctagatgacacattagtgggtgcagcgcaccagcatggcacatgtatacatatgtaactaacctgcacaatgtgcacatgtaccctaaaacttagagtataataaaaaaaaataaataaaaaaaaaaataaataaaaaaagatattccaatttttaaaaaagtaaaattttctgtttgcagatgacatractttatatattaaaaatcttttagtttctgtgagataaactatcagatgcaataaataacattcagcaaaactgcaggatacaaaatcaagacacaaaaatcggttgtatttctacaataacaaactatctgaagaagaaatcaagacaacagtatcatttatgacagcatcaaaagaataaaatacttagaagccaacttaaccaaggaaatgaaaaacctgtacagcagaactataaacattgcagga

SEQ ID NO: 310944 - DNA, 583 bp, Homo sapiens
gtacttctcctggaggcggaagtttggtcagaagcttcctcctttaggagtctaagcagggatgtggagagaagatggggaaaatatttgccctctacgaacagaagaagaaaatttgaagtatctaggttacttttggtgatctggtagattgaaacatcagttcggtgaactgatgtgctggagtaatacattgccttgagaaaccccaaaagttaggaggatgctgactcctttgcaaacaatgtagggtaatgtcactcacactgccacacctattataggatacgctttttataatattgttctttaattgatgtataacaatggtacatatttatggagtacacactgatgtttcaatacatamagtgatcagaccagggtagttagcatatccatcatctcaaatagaatatcttttaatttcagacatttcataatgatagagcaatgaattttagaatttatgttttcatactctatcccttggggaagtgatagcaaaattatttaaaaaagagaacataaatcactgtttttatactaataaaattagctagaacctctcatatatgacatg

SEQ ID NO: 310945 - DNA, 606 bp, Homo sapiens
ttggaaatgtcttacctttgtgtgttcattatgcataaagtttagcaaaagaataatcacagaacgttttttccaaaaatggtggtgtatggagtgaatatgaagtattaacatcttgcaattacttgagaaataacattggatgttgattttcttccttgtcaaaaatcacaatttttcttagagatgctgaattacagttgctatgggaaggcatggctggaactatcagacaaaataccagttgctttattacgtaagttccactctccctgtgggactcaagtttcctctgtgatttgcaaaatgatgacatcccagcaaaagcaacagtttacattcttacactccacaacatctatggcaaaagagktacacggaggaagacaacggagtctttttctggatgagcaaagcgtctctgtagttaaaaaaaaccggagttgattcctcttctactgttgaagaaaaagagaaggggggccctttgaactacatcatcttcagacagtagtctcaaagagaactacttgtaatgtttgcagttgattacattgtaatggaccttaaagtacttccacacaggttgtgtgataatatgtagcc

SEQ ID NO: 310946 - DNA, 494 bp, Homo sapiens
gtgggagaggaccctgccaccccaacacctcatcactcttgggggttgggaatgtcagtttctgtccaaatccagtcttttctatgtcatttttcttctttctttggggactctcacaacacctatcttttcttttataatgttaagagtgttgttgcaaactacaaagatattattgggtagaatgggcacttagcctaatcacaaaaaatgtaattcagaacaatgtggttaccatctattcttagattcagggaggatacagtgattaagagattttcccctgttgaaagaatctatttgcataagagcaagaggctttttccctcagacaccttcccctccctgcaattaagctgggtttgtttttgtttttttttttacctttccttcaccatgtcaggagttaacacagccctgcaaatacagggagttttccatgcragaagattttttattccttttgtaaggcatcttaccagccagttcctcaa

SEQ ID NO: 310947 - DNA, 346 bp, Homo sapiens
aatttaggtaattagtagagtaaataatgaggatttaattaaattttgaggctgcttccaggtcctaaagtttagatcactgaaatagctgtaattgaacatttggcatttagataatcaggrcagtatgagaagcacagtctttattagcattgtttttcttcagatgagctaaaggcccccatgggcacatattgtatattgtggcctagaaaaagaatacttatggttctgtcattgcaatattaatattggtaacttcccccttggatagtcatcttcatgataatatacttcatgattaatgtagccacttctcatgaagaaacagggttttcacagtatc

SEQ ID NO: 310948 - DNA, 346 bp, Homo sapiens
aatttaggtaattagtagagtaaataatgaggatttaattaaattttgaggctgcttccaggtcctaaagtttagatcactgaaatagctgtaattgaacatttggcatttagataatcaggacagtatgagaagcacagtctttattagcattgtttttcttcagatgagctaaaggcccccatgggcacatattgtatattgtggcctagaaaaagaatacttatggwtctgtcattgcaatattaatattggtaacttcccccttggatagtcatcttcatgataatatacttcatgattaatgtagccacttctcatgaagaaacagggttttcacagtatc

SEQ ID NO: 310949 - DNA, 411 bp, Homo sapiens
ctctccaacactttttttttttaaataatggtcatcctaatgaatgtgaggtggtatgtccatctgtaaatgaaaaagctattgaaaaaattaaatgtgatatagacctaaaataattattgtgcttgtcaaggaaaaagcatccagtaagtagtygccattttcattctcagatagattaggcagagatgagagatcagatgacatgagggaaggcagatggtgtgcttgcgagggagacacctaggaggacatttttctgtgtgggagagcaggcctggggcattctgagaatgccaggcaccaagataaggatagtgtcatggtggcaggtttgggaagggggagatgatgtagatgatactggttgataggtctggaaggagaaatggaagtttacaaattgttaaa

SEQ ID NO: 310950 - DNA, 411 bp, Homo sapiens
ctctccaacactttttttttttaaataatggtcatcctaatgaatgtgaggtggtatgtccatctgtaaatgaaaaagctattgaaaaaattaaatgtgatatagacctaaaataattattgtgcttgtcaaggaaaaagcatccagtaagtagtcgccattttcattctcagatagattaggcagagatgagagatcagatgacatgagggaaggcagatggtgtgcttgcgagggagacacctaggaggacatttttctgtgtgggagagcaggcctggggcattctgagaatgccaggcaccaagataaggatagtgtcatggtggcaggtttgggaagggggagatgatgtagatgwtactggttgataggtctggaaggagaaatggaagtttacaaattgttaaa

SEQ ID NO: 310951 - DNA, 574 bp, Homo sapiens
tgaccaattgcctgtgaaacatcctcaggagattctgagaacatgtgcccatggtagtcaggctacagcttggttttatacattttagggagacacaagacatcaatcaatacatgtaagatgtacattgattcagtctggaaagttggaacaactcaaagtgggggcttccaggtcataggtggattcaaagattttcttattggcaattgattgacacaatttacctaaagtcctcggaccaatacaaggaaatgtctgtgttaagataaggggttgtggagaccaaggctcttataagtaaatgaagcmcccaggtagcagactttagagagagtatattatacatatttcttatcagacttataaagtgccagactcttaattaattctctcctggatcaggaaaaagacctggaaatggaaaggaattctctacagaatgtagattttctctataagagacagccttgtaaggccatttcaaaatatgccaaagaaatatattttggggtaaaatagtttaatttatttcagggtctgctgtctgtcacgttggtacaaagattctgtt

SEQ ID NO: 310952 - DNA, 390 bp, Homo sapiens
tggacaaattcagtccaaaataatgttttcaatgtttttcctttttttcttttccttttctccccacttttcctgatttgaaaacatgaaaaattaagttctgctattcttaaagccctgtgaactgaagctaacaacttaaacttcagaagacaataacagcatccyatttatatacacaaaccactttcatacctacctactgatgtgtagacttcagggtaatatgacctatttcagttttccaggcttgttcttccctctttttttgttttgttttgttttgttttgtttgtgtgttgttttatttctctcttgttcccactatattttcctcatgggacatgagactccacaacctgctaaaaatgagctttcctaacaatgtgg

SEQ ID NO: 310953 - DNA, 390 bp, Homo sapiens
tggacaaattcagtccaaaataatgttttcaatgtttttcctttttttcttttccttttctccccacttttcctgatttgaaaacatgaaaaattaagttctgctattcttaaagccctgtgaactgaagctaacaacttaaacttcagaagacaataacagcatcccatttatatacacaaaccactttcatacctacctactgatgtgtagacttcagggtaatatgacctatttcagttttccaggcttgttcttccctctttttttgttttgttttgttttgttttgtttgtgtgttgttttatttctctcttgttcccactatattttcctcatgggacatgagackccacaacctgctaaaaatgagctttcctaacaatgtgg

SEQ ID NO: 310954 - DNA, 645 bp, Homo sapiens
aataatctactatgggactctgatgttacagtgtgcattcccagtgtctcagatgaaagccactcaatcagtctcctggatccctagccagaggatatttgaaagrgaagacagtcaataaaaactattcaagtaagttagagacatatatatatatatatatctccatcataccaagaggagattgaacctcaggccagaaatgccaaaatgagtcctttctttttttctgttttggagacagagtctcactctgtcgcccaggctggagtgcagtggtgtaatcttggctcactgcaacctccacctctggggttcaagcgattcttctgcctcagcctcccgagtagctgggactacaggtgcacgccaccaggcccagctaatttttgtatttttagtagacacggggtttcaccatctaggccaggatggtctcaaactcctgtccttgtgatccaccctcctcaccctcccaaagcgctgggattacagttgtgagccactgcacctggccaagtcctttcttaaataaaaaactcatttcttagtaattccctgacctaattgaaatctgtatctgtgggatagattaggatatctagaatcacagacaatagataaaccattattcaggagttgagt

SEQ ID NO: 310955 - DNA, 645 bp, Homo sapiens
gcatgtgcctgtaacaatagctgagtcttggccaatcccagaagccatacttcagcccctcatacactgctgagtgttcaatctatgttcaagtaaggcaaacgccaacctgtaacgaatccagctgtgtctgtacctcacttttgatttctgtacgtcgcttcctttcttttgtctataaatttgttctgaccacaaggcagccctgaaatatctctgaatctgctgtgattctggggggctgcccaaytcacaaattgttcattactcaattaaatgcctttaaatttaattgggctaaagtttttattttaatacagtcattttcagtattattttatcctaaccaaatgacgtttatatatctttctaaatacacaacaaatatccatttccatgaagaaatctttaaaaatataaaaccaagaagaaaggattttatttttaaaatcagtaacaatctcaacatttcaaagaaaatcactgctatcttttggtatgttttctttctatgttttttttttcttaatgacaatatctgtgttatggacacaaatgtacgataaaattatttgtaatctttttcatttattgtgctttccctgcatcaacctttgacaatatgatttttaagttactcactgg

SEQ ID NO: 310956 - DNA, 592 bp, Homo sapiens
tgaatctgctgtgattctggggggctgcccaattcacaaattgttcattactcaattaaatgcctttaaatttaattgggctaaagtttttattttaatacagtcattttcagtattattttatcctaaccaaatgacgtttatatatctttctaaatacacaacaaatatccatttccatgaagaaatctttaaaaatataaaaccaagaagaaaggattttatttttaaaatcagtaacaatctcaacatttcaaagaaaatcactgctatcttttggtatgttttctttctatgttttttttttcttaatgacaatatctgtgttatggacacaaatgtacgataaaattatttgtaatctttttcatttattgtgctttccctgcatcaayctttgacaatatgatttttaagttactcactggaatctactatatagatgtggtgatgaaaaatgccaaactccatgaaatatttaaagaaatttattctgagccaaatatgagggctatgaccatgacacagcctcaggaggtcctgagaacatgtgcccgaggtggttgggttacagctttgatttatacatttt

SEQ ID NO: 310957 - DNA, 613 bp, Homo sapiens
aagctatcctggctcacaagaaatccttgtccagaatgagagagagagagagagtttgtgcaaaacaaagcaaaagggcttgaccacagagtaaaagagtgtttgctttctttcagaggcccctttctacttgcccaacttactaagctagttccacaaaaaaagcataaaagaacatttatgaattcaagaaactaaagascctggagaactgattaatttacctccaggatgcgtaagtcagctttattttcatcctgttgcgtgcaactagtggtaaaagatggagccttcattgacactgtgagtctgcggtcctcattttcacaacagtttttccaggctcccaagactcttgatacttttcaagatattctttactactctgagtacctactgcttccctcccacctttctgcttagcagaagagaaaaccggagccaaaaatatgaatagacccagaatttttcaagccctgtttgtagtatattttaaactttcagctactgggactcactgctcacattatagtttcaagtacagtttgtggcaggtcttctttaatgaaaagattcaccagtaactattaagatccattttcaatgtttcttc

SEQ ID NO: 310958 - DNA, 626 bp, Homo sapiens
atcagagaaaaagaaatggaaatataactcatttaaagaaataataatagaacrgttcccaaatgtagagagggaagtgaaagtacagctctgtgaatcccaaagaaccccaaatagattaaacataaaaagatcttcaccaacataacattataatcaaattctcaaagtcaaagaaaaaattctgaaggcagtaagagaaaagcaaatcatcacataaaagtgaaattccatagactatcagcaggcttttcagcagaccaagatagagcaagatgatatattcaaactacaggaaaaataaataaatgaccaaccatgaatactatacccagtaagctatccttcagaaatgaatgtgatataaagcctcccagataaacaaaagctgagacggctcatcaccattaggcctgcctcaacaagaagtgctaaatttcaattcttcaagttgaaataaaaggatgctaccaacatgaaaacatatgtaagtataaaatttgtggtaaagataagaatatagtcaaatgcagtatactctatactgtaatagtgatgcatatatcacttttcactctagtataagattaaaagtaatcccagcactttgggaggccaaggcgggt

SEQ ID NO: 310959 - DNA, 617 bp, Homo sapiens
caagggcacacaagggaaatgatagtctctttaaaaatggcatagagaacactggataaccacatgcagaagaatgaaattgaaccatatttcaccttattgagaaattgaaccttatctcacaccatgttaaaaattcaacccaaaaaatcgattaaagacttaaacataaggcctgaaatttttaaattactggaagaaaacaggggaaaaccttcttgacattgatctttgcaatgactttttggatatgacrccaaaaacacaggaaacaaaagcaaaaatagacaaatgggattgtatgaaaataaaaaccttctgcacagataaagatacaatcaatggagtgaagagatagcctatttaatgggagaaaatatttgcaaggcatatattcaaaaagaggttaatatttgaaacaaagaactcaaacagctcaatagcaagaaaacaaataagctgatttcaaaatgggcaaaggacctgaataggtatttctcaaaagaagacacagaaacagccaccaagtaggtgaaacaatgttcaacatcactaatcatcagggaaataaaaaccaaaaccacaatgaggtatcacctcacactagttcaaatagc

SEQ ID NO: 310960 - DNA, 563 bp, Homo sapiens
ctatgacacaatggatataaaaatggaatagtcactgtgacagctgctctaacactcacctaggctgatttaactgctgctgttgcttctgaatgtccaactctgaacaatgcaaatcaacaataagatgagctctcagtatggcaccatctttctaacaaaacacacagccttttggtaaggggtggattaccttggacctctkcctccctgaaggggcactgatttatcttgaagggaactgtgttgttttgcctttcctgcttgcaggccttcatatagcactatcatctaaagacttgcaggtttacgtcattgacacaggattctgcataaaattatatcaaactaagagattaactgtaacaaaaggattgcagcagtaggcatgtgacataagatacacttgtcctatcacatactacactacccagaagtcccagtcagatagagtgacgggatggcttttacaggtgtaactgacaggccagcttggaaactataccattcaaggatgggcatgatgctccaggactcagtaaatcgatgaatataatttggtg

SEQ ID NO: 310961 - DNA, 579 bp, Homo sapiens
ccttggctgtctacctcatgaagacacacggtgtacttacctttcagcccaatatattctggatatcctgcttcttgcccartggaagattggccaaattatgggggataataaagtcatggcaggcttgtaggatgatgggatataaaaggtaacataagttagattcacagatcatgaaatgccacatcatccatcactttttagcagctgtattgaatgtaaaaaggttattaccttgcatccatcctggttcctgaatattttgctgtattcatgtatagcagcccatttttgatttttcaaaaagtatttactgagcacagaaaaatagcataaaaccaaatagctgtcacctgcagtaaaataaaagatttctccagagatcctagtttccatgtaattttggagaagctaatattgttcagaattgatacgtatggagaaaaccattttctacctttctttttgatttggaaacaaaatcctcaaaggagtgaacatcagcacgttaaacagctgggccaggatttggtggcaggtattgccagaagcaaaacaagatttttttgttttttc

SEQ ID NO: 310962 - DNA, 492 bp, Homo sapiens
ttgatattgtgtttgcatcattggagtcctcctctcactaaataagagcatggaaagtcaagagtattattttaaaaggttacagttcaagagccccttcatttctcaratttgttattggcatgagccaagaacaattcctccagtttctcagtatgagacggaagaaattgctatttagcttgtctctgtagcccaaggtcatttcccagactgtggtatccaatttggattgttctgtaaacagcacaaatgttaaccaaataataatttatacaatggcatgcattaggacagataaaagagagaaagctgatgccaaagaaatagctacatagctggtcattgtattttcttctctaactcattctgggaatattaaaaagtggttgggagtaatgtcccaatgaaaaaataagtcttttgagcaacgtgattagctatcttgtaatacaatattcgagtacacaaggataaacgtagttgggtaaa

SEQ ID NO: 310963 - DNA, 539 bp, Homo sapiens
catttctggctagattttggttctcagggtttgtttgaaagctgctggctgcctgagagagaagaaggggaaaggagggtygtgaaggtcatggcatgaagaaagcagcagtagcagtaatgaagaaaggacagggggcacttctcctaggacccccggtattttaggggtaagtggtgaaatcctacccacaagcagaaaattttcagagagcagctctgcagagggtgtaatcacatgtctgaaaaaagaggccaacctgcccttgtccacttctggctatgagttgataaaatggattgccaatactttgaatgataactgggattctgcagaatctatagcttgtcatatctgcagattaaatacatgcatttttttctgttgagtaaacctcagtctgtatcaatatcttgagcatgcgtttaattgaggaacattagtcttcccatggtagtatgttttgtcctaattgagatgagatatactcaaactgtgaccatgtgttagaagtgatccatcgtgttatacatatatca

SEQ ID NO: 310964 - DNA, 539 bp, Homo sapiens
catttctggctagattttggttctcagggtttgtttgaaagctgctggctgcctgagagagaagaaggggaaaggagggtcgtgaaggycatggcatgaagaaagcagcagtagcagtaatgaagaaaggacagggggcacttctcctaggacccccggtattttaggggtaagtggtgaaatcctacccacaagcagaaaattttcagagagcagctctgcagagggtgtaatcacatgtctgaaaaaagaggccaacctgcccttgtccacttctggctatgagttgataaaatggattgccaatactttgaatgataactgggattctgcagaatctatagcttgtcatatctgcagattaaatacatgcatttttttctgttgagtaaacctcagtctgtatcaatatcttgagcatgcgtttaattgaggaacattagtcttcccatggtagtatgttttgtcctaattgagatgagatatactcaaactgtgaccatgtgttagaagtgatccatcgtgttatacatatatca

SEQ ID NO: 310965 - DNA, 539 bp, Homo sapiens
catttctggctagattttggttctcagggtttgtttgaaagctgctggctgcctgagagagaagaaggggaaaggagggtcgtgaaggtcatggcatgaagaaagcagcagtagcagtaatgaagaaaggacagggggcacttctcctaggacccccggtattttaggggtaagtggtgaaatcctacccacaagcagaaaattttcagagagcagctctgcagagggtgtaatcacatgtctgaaaaaagaggccaacctgcccttgtccacttctggctatgagttgataaaatgkattgccaatactttgaatgataactgggattctgcagaatctatagcttgtcatatctgcagattaaatacatgcatttttttctgttgagtaaacctcagtctgtatcaatatcttgagcatgcgtttaattgaggaacattagtcttcccatggtagtatgttttgtcctaattgagatgagatatactcaaactgtgaccatgtgttagaagtgatccatcgtgttatacatatatca

SEQ ID NO: 310966 - DNA, 526 bp, Homo sapiens
taatactaatacagtctctcttatgataggaatttcacattagtagcagctcaggaacaaattatactcatattttctgtcagtgttcaatgttwgggaaacgtacctgatatttattcatgagacaaaactagaaaaatcttggtctaaaaacatgttcacatagttatacaaactattaaacaataataaaacccaaacagaatatatgaaaatctattataaaatttcccatggcaatgttggtgtttatcctcttagctgtttgacatgaaagctatgtggtacccatatatgcaatcattacttctaaacttctggatcggcataagaatgaatttgtattctggtgtagattgcctaaaatgtctctgaattccctagttaaaaaggtcttactagtatctccatactagaattgaagggctagcaattagaagaaattgagtcgttagtcacacaggacttagcatttcttttaagtgcatgatgactataaagcaatgatatcagagaatgataagca

SEQ ID NO: 310967 - DNA, 526 bp, Homo sapiens
taatactaatacagtctctcttatgataggaatttcacattagtagcagctcaggaacaaattatactcatattttctgtcagtgttcaatgttagggaaaygtacctgatatttattcatgagacaaaactagaaaaatcttggtctaaaaacatgttcacatagttatacaaactattaaacaataataaaacccaaacagaatatatgaaaatctattataaaatttcccatggcaatgttggtgtttatcctcttagctgtttgacatgaaagctatgtggtacccatatatgcaatcattacttctaaacttctggatcggcataagaatgaatttgtattctggtgtagattgcctaaaatgtctctgaattccctagttaaaaaggtcttactagtatctccatactagaattgaagggctagcaattagaagaaattgagtcgttagtcacacaggacttagcatttcttttaagtgcatgatgactataaagcaatgatatcagagaatgataagca

SEQ ID NO: 310968 - DNA, 572 bp, Homo sapiens
acctttttctattaataaaaactttacagkttttattaatataaacagtgatttttaccattaattcaaccagtttgcacagggagagagaggccagaagtctgactggtaagaacttttaccctttttctggcatgtcaagcttctgggttccctctttccagctcagtttttaagccaagcagtttatggtttggggaaattaaacttttctcagaggggagtgtcttgtggtacagagacgtgatcacccctccacaaagataggacagagaaggaaacaggaaaaaaaaaaagaaggtttttttttttttttttttttttcaaaggagtcccagtgatgcaggatgcagtcaagagaagtacagactgaagatggttggtttctcatctggaaagaggagaaaaaggcatcccttaggtcctttctctttccagtgaatacctggggtatgtgaaggagagagagaaaaaatggtgttccctttttctcttccatctttatatccttgagtcctggtgaccttggcatgtgttgcccatgggtgccaatcgaggctctcacccatgta

SEQ ID NO: 310969 - DNA, 491 bp, Homo sapiens
ggtaagaacttttaccctttttctggcatgtcaagcttctgggttccctctttccagctcagtttttaagccaagcagtttatggtttggggaaattaaacttttctcagaggggagtgtcttgtggtacagagacgtgatcacccctccacaaagataggacagagaaggaaacaggaaaaaaaaaaagaaggtttttttttttttttttttttttcaaaggagtcccagtgatgcaggatgcagtcaagagaagtacagactgaagatggttggtttctcatctggaaagaggaraaaaaggcatcccttaggtcctttctctttccagtgaatacctggggtatgtgaaggagagagagaaaaaatggtgttccctttttctcttccatctttatatccttgagtcctggtgaccttggcatgtgttgcccatgggtgccaatcgaggctctcacccatgtaacagggaggcctagagggtaggaact

SEQ ID NO: 310970 - DNA, 572 bp, Homo sapiens
acctttttctattaataaaaactttacagtttttattaatataaacagtgatttttaccattaattcaaccagtttgcacagggagagagaggccagaagtctgactggtaagaacttttaccctttttctggcatgtcaagcttctgggttccctctttccagctcagtttttaagccaagcagtttatggtttggggaaattaaacttttctcagaggggagtgtcttgtggtacagagacgtgatcacccctccacaaagataggacagagaaggaaacaggaaaaaaaaaaagaaggtttttttttttttttttttttttcaaaggagtcccagtgatgcaggatgcagtcaagagaagtacagactgaagatggttggtttctcatctggaaagaggagaaaaaggcatcccttaggtcctttctcttyccagtgaatacctggggtatgtgaaggagagagagaaaaaatggtgttccctttttctcttccatctttatatccttgagtcctggtgaccttggcatgtgttgcccatgggtgccaatcgaggctctcacccatgta

SEQ ID NO: 310971 - DNA, 618 bp, Homo sapiens
aaatgtttgcaccctcagaactaagatctctgcactcggtaaataattggagaacaatgcaaaggaacagaggatagtggccagcaggcgggaaagggcatgggaggccagaggcaagagagatcagtgtgaaacagcagctgggaagcctcatgggccatgtggagaagacagggaagtgcagtactgacagagaagtggcctgagcaggtgtggaagtggacacagatgaaaaccatgggtttggggaggaaataaaccaggtcagacaaagcktctgccaggagtcttagaggtaatgtggggtaggaaaaatgaaaacaggttattgaatcatttcataatgaagcagccccagggtaaatgatgacaatggaaaccaacacaacctaaattcttcagtactgaagcccaagcccatttcaggattgaattaaaaaaaaaaaaaatctagagcacatcactattttggattttgtcactctatgtgggatttttaaaaatccagtcccagctgcttgggaggctgaggtgggagaatcacttgaacccgggtggttgaggcttcattgagccataattgtgccactgcactctagccttgatgacagagtgaga

SEQ ID NO: 310972 - DNA, 667 bp, Homo sapiens
gctaggctagttagtccaaattgagttcccagtgtgtatcctgacatgatgcttggtcttcacatagaatggattcttggctaaaaatctgacattcttacagattaggattttctaaagatttaagattgttaaaaaccaattcctgggagacagagttaggagcactttatgctctcatggcttcctgattttgtgccatattatatatggaattaaaatttcctttttgcctgttctttccacttctgtatagactctatgaagaaaagractgaggttttttttccctctattgtatctacagtagctagaaaaaataatattgataaatatatttggatatattaatattttataaacaatgcagatgaagaaattaaatttttatattgagcagtaatttttaaaaggctaccaacaagcatttgctggctaaaaactatttgagcatcaatgccctaagttggtggcttttaaatttttcctctgtaactcacaaaatatatactgtgatatagtttacacaatcatgcacaggcatataaaactaaaaaacacttttatgaaatcattcatgtacttactacttgtgttccactctgatatttcctattctatttaattttattaaaggaaaatcatgagtggacctaccaagtcaata

SEQ ID NO: 310973 - DNA, 587 bp, Homo sapiens
tgagctagatcttaggtctgtttttggtttacaaataatttctttttttgattgagaggtgtcaaggttagagatcaagattccttggctgggaattgttcattttctttctgagggtgttctgagctttctttgctggacttgtgcacacacacatgaacacacacacacatacacatgcccacaaaagtttatatcaggacccctggacccagccagaaggtatgtagctggtggctgtgagattggaatatttgtccaattccacacagaaactctgcttccaggtaggctccacagtgttatctagaggtttctttctggagaggtttttctactttctagagggatgactatttcatgcttagtcttgcacccaaaagaagtyattccagactggagaatgtaagttagattaccatgattttgtcaattcactttcttttcttgttgttgttgatattttgggggacaagctatgtttagaaaacatgccatatactactggaaatgtgtgttgttatcttttggcaccacttttcaaagttgaaggcataaagttgtttttttattatatggttattttt

SEQ ID NO: 310974 - DNA, 647 bp, Homo sapiens
ggcagaatttcaagcaggaggaatattgtgactcagggttctcaggagcaggtgcttaggaagcccctccctggtgatcagcccacctctggggacccggtaagcaggaagtggcgaaagggaaggagcctgtaaaaggatctggggaaacacagtgttgtaggaacccagcccaggcaaacccaatctctggttttctcctgccccttctgattgattaattcagcaattaacaagtctatagtgcttattgacttattgtttattcattccctttagtaacaaaaaatagaagggattctagaatatcatctggctccattgcctgtgcttcaacgcaggttgttgatcaggacctctctctgaaagaaagtgatataggaaaagaagagaggaaaacaggcataacaagaaactggaagactagactcctgtgaccatatgggtarcctcccacggccaggattgactgttgggaattgaggatcacgtcgggctgtgtgaatctctgggtttgttagttcttagttcaaacgggagaattatgtccaggcgtcttgacaagtcatgctgttttggagcactgtagttctgagtattggattagtctatggggagtgagaaagtgtttttgatagtactgcaga

SEQ ID NO: 310975 - DNA, 564 bp, Homo sapiens
aggcactggagggagtgcagccctgcccataccttgactgggggcttmtggtctccacaactgagacattaagatcctgtgttttgttttgttttgttttgttttgttttgtttttttgagatggagtctctctctgtcacccaggctggagtgcagtaatgcaatctcagctcactgcaagctctacctcccaggttcacgccattgtcctgcctcagcctctctgagtagctgagactacaggcacccgccaccatgcctggctaattttttctagttttagtagagacggggtttcaccgtggtctcgatctcctgacctcatgatctgcccgcctcggcctcccaaagtgctgggattacaagcatgagccaccacacccggccaagatcctggtgtttcaaaccactctgtggtcatttgttatggcagccatgggaaactaatacaccaggtaagccaagagaggaacagcaaagcagacgatagaagcagacccacaggtgatcccgctattggagttacagagacaggcttaacaaaagtgcacttaagaaagtag

SEQ ID NO: 310976 - DNA, 564 bp, Homo sapiens
aggcactggagggagtgcagccctgcccataccttgactgggggcttctggtctccacaactgagacattaagatcctgtgttttgttttgttttgttttgttttgttttgtttttttgagatggagtctctctctgtcacccaggctggagtgcagtaatgcaatctcagctcactgcaagctctacctcccaggttcacgccattgtcctgcctcagcctctctgagtagctgagactacaggcacccgccaccatgcctggctaattttttctagttttagtagagacggggtttcaccrtggtctcgatctcctgacctcatgatctgcccgcctcggcctcccaaagtgctgggattacaagcatgagccaccacacccggccaagatcctggtgtttcaaaccactctgtggtcatttgttatggcagccatgggaaactaatacaccaggtaagccaagagaggaacagcaaagcagacgatagaagcagacccacaggtgatcccgctattggagttacagagacaggcttaacaaaagtgcacttaagaaagtag

SEQ ID NO: 310977 - DNA, 564 bp, Homo sapiens
aggcactggagggagtgcagccctgcccataccttgactgggggcttctggtctccacaactgagacattaagatcctgtgttttgttttgttttgttttgttttgttttgtttttttgagatggagtctctctctgtcacccaggctggagtgcagtaatgcaatctcagctcactgcaagctctacctcccaggttcacgccattgtcctgcctcagcctctctgagtagctgagactacaggcacccgccaccatgcctggctaattttttctagttttagtagagacggggtttcaccgtggtctcgatctcctgacctcatgatctgcccgcctcggcctcccaaagtgctgggattacaagcatgagccaccrcacccggccaagatcctggtgtttcaaaccactctgtggtcatttgttatggcagccatgggaaactaatacaccaggtaagccaagagaggaacagcaaagcagacgatagaagcagacccacaggtgatcccgctattggagttacagagacaggcttaacaaaagtgcacttaagaaagtag

SEQ ID NO: 310978 - DNA, 564 bp, Homo sapiens
aggcactggagggagtgcagccctgcccataccttgactgggggcttctggtctccacaactgagacattaagatcctgtgttttgttttgttttgttttgttttgttttgtttttttgagatggagtctctctctgtcacccaggctggagtgcagtaatgcaatctcagctcactgcaagctctacctcccaggttcacgccattgtcctgcctcagcctctctgagtagctgagactacaggcacccgccaccatgcctggctaattttttctagttttagtagagacggggtttcaccgtggtctcgatctcctgacctcatgatctgcccgcctcggcctcccaaagtgctgggattacaagcatgagccaccacrcccggccaagatcctggtgtttcaaaccactctgtggtcatttgttatggcagccatgggaaactaatacaccaggtaagccaagagaggaacagcaaagcagacgatagaagcagacccacaggtgatcccgctattggagttacagagacaggcttaacaaaagtgcacttaagaaagtag

SEQ ID NO: 310979 - DNA, 611 bp, Homo sapiens
gcagacataaacacgcagttcattgtacggatacacagcactctcccccaaaactgcaggagacacactcttttcaagtacctaaggaatagtaaccaaaatttatcatatttggggacagaaatcaggctttgacaaacgtcaaaggcagggccaggactagggtgagtccagtgagttcccctaggcccaaaatataaagggatgctcactcccagattcacgcaggcagaggagtgggagggaacacaggagaactcaattagaaaaggatgagaagaaagcagggaaaattcacgataataaaacaaacgatccgaaaacaagagaagggagcttccttactccgatcaaaagcacctgcaaaaagcctggagaatatattctacctaatggtgaaatcatggaaggtttcccacaagattagagatgagacaaagatggcagctcccctgtgtagtttaagtcacacatgctgaggtcctcaccagtgtgatcacaccaagaaaaggaaataagaggcatttgattrgaaaggaagaaataaaacttttattataggtggacaacatgattttatatgtaaaatatcttaaggacgctacagataa

SEQ ID NO: 310980 - DNA, 519 bp, Homo sapiens
tgtgccctgcctggtgcctgagctgccgtcccagcacccccagtcctgaggggagaagggcccctttcctagctaatgacaaggaggcgaggtccctgctcccctcagcccttcctagaaatagtgacaggctcctcctatgcacgcctggcctccccaccctgggacacccagcacgggggtgctgcctgcttcctggagtcagtgctgtttctggggttggggggccaggtgtctggagggaaggcgatgtttcccaggactcgcagggatctcctggggtacagggagtgtgagagcctggacctagatcaggctgccacgtggaacscggccatgcacttagtaagcacccctcatcctcctctcccaagcctggacctagatcaggctgccacgtggaacctggccatgcacttagtgagcacccctcaccctcctctcccaaagggggatggcagcgttgcccatgtcgggtggaagtggggattcagagggctcattttgggacagtacctg

SEQ ID NO: 310981 - DNA, 519 bp, Homo sapiens
tgtgccctgcctggtgcctgagctgccgtcccagcacccccagtcctgaggggagaagggcccctttcctagctaatgacaaggaggcgaggtccctgctcccctcagcccttcctagaaatagtgacaggctcctcctatgcacgcctggcctccccaccctgggacacccagcacgggggtgctgcctgcttcctggagtcagtgctgtttctggggttggggggccaggtgtctggagggaaggcgatgtttcccaggactcgcagggatctcctggggtacagggagtgtgagagcctggacctagatcaggctgccacgtggaacgcggccatgcacttagtragcacccctcatcctcctctcccaagcctggacctagatcaggctgccacgtggaacctggccatgcacttagtgagcacccctcaccctcctctcccaaagggggatggcagcgttgcccatgtcgggtggaagtggggattcagagggctcattttgggacagtacctg

SEQ ID NO: 310982 - DNA, 620 bp, Homo sapiens
aatcaaaaatctcccaacaaagaaaaggccaggacctgatggcttcactggtgaattctaccaaatatttaaagaactaacacgaatcctcaaacttttccaaaaaatcaaagaggaaggaacacttcctcagactcattctatgaggccagcattaccctgataccatagccaaagacactacaagaaaactacagaccattatcccgtatgaatattgaggcaaaaatcctcaacaaaatactaacaaaacaaattcagcaatttgttaaaatgatgacacacgtgaccaagtgagatttattgctagaatgcaaggatggttcaacatacaaatgtcaatttatgtgatgtaccacattaacagaatgaaagggaaaaaatgatcatctcaactgatgcagaaaagcatttgacaaaattcarcacccttttatgataagaatactcaacaaactaggaatagaaggaaactgcctcaatataaaatccatatatgaaaaacccacagcaaacatcatactcaatgatgaaaaagaaaagtttttcctctaagatcaggaacaaggcaaggatgattgcttttgcacttctactcaacattgcactggaagttatag

SEQ ID NO: 310983 - DNA, 504 bp, Homo sapiens
tcctctcttttttctgcctccaccctctggccagcacacgtggctctgggcacagtgacccctcacactggggagtgcttcccacagttgtaccagccagagggtgcctgtsatgtccccatttggaagtcaggacctgggcacaccgactgccctggcagagagctgtctgacacacgatgggtcagggcccgggtctggggtcctggcttcctgcctgtgggtcccacggggggccggggcagaggatggctatggtgaggctgctgcctggcatctgaaatgtatcgtcaccagtaaagacccgatgggactgcccatcctggaggacacagaccgagcagatggccccgcccaccctcactctcctgtctccctcctggagccttgaggctgaggatcgcacctgtcaccccctgctgagcctcatcctcccaggggtgtggataagtttcccgttgatgctgcaacaaagacaatcattgtggcttaaaataacacaca

SEQ ID NO: 310984 - DNA, 545 bp, Homo sapiens
gcggctgtgtggtacactccgcgctgctcctcggctcctgggagtgctgcccagtctctggctccggcttcaccgggcatctctctgcctgtgtatctgtgtccacgctctccctttgtgtaaggacacccctcatggtggatgaggggccccccactccagtgtggcctcaccgccattgttccrtcaaatgaacatttattcccaagtcaggtcacactccgaggtcctgggctgagaactgcaacttatgaatttcatgggacacagttcagcccacatgggtcccccacaggctgagtgagctgacgtggtgggggcgaggggctggggccgtggctggcatggggtcactgctgtgtcctgcttagtgacagacagttctgcctctgcaggcatcattttggctcctgaccgcaatgtgtggggaaatctggctgcttctggcaggcacttgcctcggcctgtcggtgcccagcagagctgctgtctatgtggcctcttgagtccccggaactctgacccggccagggtccagcaggagc

SEQ ID NO: 310985 - DNA, 545 bp, Homo sapiens
gcggctgtgtggtacactccgcgctgctcctcggctcctgggagtgctgcccagtctctggctccggcttcaccgggcatctctctgcctgtgtatctgtgtccacgctctccctttgtgtaaggacacccctcatggtggatgaggggccccccactccagtgtggcctcaccgccattgttccgtcaaatgaacatttattcccaagtcaggtcacactccgaggtcctgggctgagaactgcaacttatgaatttcatgggacacagttcagcccacatgggtcccccacaggctgagtgagctgacgtggtgggggcgaggggctggggccgtggctggcatggggtcactgctgygtcctgcttagtgacagacagttctgcctctgcaggcatcattttggctcctgaccgcaatgtgtggggaaatctggctgcttctggcaggcacttgcctcggcctgtcggtgcccagcagagctgctgtctatgtggcctcttgagtccccggaactctgacccggccagggtccagcaggagc

SEQ ID NO: 310986 - DNA, 568 bp, Homo sapiens
atgtggcctcttgagtccccggaactctgacccggccagggtccagcaggagcactggtcacactaagtgtttccacagaggggacttgatgagggcattgggttcaggagctgcggctgcccgcagggcacgagggtacctgagggtagcccagggctggtgagtgagggaagctgggagcaggctggagccgtaggttccagacactcagaggagagccccacagagcaggggtcccccttcagagctggggtgctgctagagagggcacaatggggctggctcaatggggtccccagagaggctagaggccagaaccacctgcagccgccaggactgagtccactgcttggggaagagctggcaggggccgctaggccaagtcctcctcagcgcttgcttcccagctggcccagggccccggtgagcagaacctcaccagggttctggtgaggcaagggagcgggcaagggagaaagaatctgttgggtccttgcccgcatctcaaagtgtggcagggcaggytgggagctgaggggccccaggaaaatgctgggcacagtcacc

SEQ ID NO: 310987 - DNA, 545 bp, Homo sapiens
agcagcatgggggtaactgcccccatgatgtaatcacttcccactgggtccctctcacaacttgtggggattacaggaactacaactcaagatgagatgtgggtggggacacagccaaactgtatcagtaactatcwatctagaattctatagacagcaaaagcatatttcaaaaaaaggtcagaaaaagacatttctaaccaaacaaaatctgagaagttgtgagcagcagatgctcactaaataggaaacattgaaaggttcaatagaaagaaaaagaccttcatatggaaagtcaaagatccaggaaggaataaagagcaccacaaatggaaaatatgtggttctgtttatatgagtaccgactgtataaacaaaagtaacaaacatatacaattaagatatgtaatatcaatgacataaaagttggagaaataaaatggaattaaggtattctaaaatctttgcattgtctcagaagagagcaaaattatcaagtaatattatattttgataaggcaagaacgcctgctgtaatctcttgg

SEQ ID NO: 310988 - DNA, 562 bp, Homo sapiens
tagggtcacactataaaaatattccactgcaacaggaaatataactttttcccttgtccatggcaatggtgaacccaagccaggagggaaactcagccttaatgaatacagcatggtggtaataaagagagattctgatgttgaattactcttttagttgctaccctcttttgtttcattttgtttttttccaaaggcaaaaagaccttcgactaagcttgtcctgagattcctgtgtcgtcttttgtgcttttcctacatcaccttctaaatccatactttacttttagaagaaaatgagaatctctcagtgactcttctcgtagtttgtctgagttttggcaaactgacaactgggagtctgcctttgtaactttctgtctttctgacatgttcactgagatctccaataaaagacacaacaacccagtcttgccatggtctccatgatagtgctcatcaataggaaacaagattgctrtacctcttagaaatgaaatttcttgttgatacgtcttttcatttctcagaaatttgccaaaattaactttcttctcacatt

SEQ ID NO: 310989 - DNA, 484 bp, Homo sapiens
acagtggaaaaacataagtgaaatctttggattttaatgagtagtaatttcaaaaggaaaagcaagaaaaaaataagcaaatatgagaagtaaaatttaccagctggtcaaaaatcaactygaaacgtgattttcacccaattattaaagctaagtcttgagtttctagtcattcacaatggatggatgcatgatgactgtgactattagaattccacgggtgcaaggctctcaggctctcctgcttttctcatgattcctctgtacctctcagtctgactatctctttatttatttgccctttattctttcttctgtccctcccctatctttatctctctacatgtagtctcttcctttgtacccctcagcctttctttccaccccattttcttctctttcaaaaaaaggaaactggaacagagagaggaagctaagctcacaggcatctctcagtcactgctctttaaaaagggtgaaaaat

SEQ ID NO: 310990 - DNA, 586 bp, Homo sapiens
aaaaaataagcaaatatgagaagtaaaatttaccagctggtcaaaaatcaactcgaaacgtgattttcacccaattattaaagctaagtyttgagtttctagtcattcacaatggatggatgcatgatgactgtgactattagaattccacgggtgcaaggctctcaggctctcctgcttttctcatgattcctctgtacctctcagtctgactatctctttatttatttgccctttattctttcttctgtccctcccctatctttatctctctacatgtagtctcttcctttgtacccctcagcctttctttccaccccattttcttctctttcaaaaaaaggaaactggaacagagagaggaagctaagctcacaggcatctctcagtcactgctctttaaaaagggtgaaaaatacagagcagagaagccagaggccttgggacactgaagggcagagtgaagtagagagaaaaaaaggtagcagtttcaaattaagataattcaaaaggtgtgtaaaaggatattattttaatgttgtcaatagaatataggaaaaccactcagaatagtgcaataccacag

SEQ ID NO: 310991 - DNA, 586 bp, Homo sapiens
aaaaaataagcaaatatgagaagtaaaatttaccagctggtcaaaaatcaactcgaaacgtgattttcacccaattattaaagctaagtcttgagtttctagtcattcacaatggatggatgcatgatgactgtgactattagaattccacgggtgcaaggctctcaggctctcctgcttttctcatgattcctctgtacctctcagtctgacyatctctttatttatttgccctttattctttcttctgtccctcccctatctttatctctctacatgtagtctcttcctttgtacccctcagcctttctttccaccccattttcttctctttcaaaaaaaggaaactggaacagagagaggaagctaagctcacaggcatctctcagtcactgctctttaaaaagggtgaaaaatacagagcagagaagccagaggccttgggacactgaagggcagagtgaagtagagagaaaaaaaggtagcagtttcaaattaagataattcaaaaggtgtgtaaaaggatattattttaatgttgtcaatagaatataggaaaaccactcagaatagtgcaataccacag

SEQ ID NO: 310992 - DNA, 586 bp, Homo sapiens
aaaaaataagcaaatatgagaagtaaaatttaccagctggtcaaaaatcaactcgaaacgtgattttcacccaattattaaagctaagtcttgagtttctagtcattcacaatggatggatgcatgatgactgtgactattagaattccacgggtgcaaggctctcaggctctcctgcttttctcatgattcctctgtacctctcagtctgactatctctttatttatttgccctttattctttcttctgtccctcccctatctttatctctctacatgtagtctcttcctttgtacccctcagcctttctttccaccccattttcttctctttcaaaaaaaggaaactggaacagagagaggaagctaarctcacaggcatctctcagtcactgctctttaaaaagggtgaaaaatacagagcagagaagccagaggccttgggacactgaagggcagagtgaagtagagagaaaaaaaggtagcagtttcaaattaagataattcaaaaggtgtgtaaaaggatattattttaatgttgtcaatagaatataggaaaaccactcagaatagtgcaataccacag

SEQ ID NO: 310993 - DNA, 581 bp, Homo sapiens
aaaaccaaagttactctctatcaaagagtgaagtttttagttttgtctgttttgcctttaaaaatcttttatcaatttggctgaatgaattactattattttatagtgaccctattttactatcaaatttaaagtactgatatttgataaactttccccaaatcaaattttttttttttttctgagacaggatcctgttctttcccccaggctagagtacagtggcacaaccttagctcactgcagccttaaactgctgggctcaagtgatcctcccacctcagcctcccaagtagctgggactacaggcacacaccaccataactggccaattttttaaaaaaacaattttttgtagagagcaagtcttggytctcactttgtggcccaggctgttcttgaattcctggtttccagtgattctcctacctcggtatcccaaagtgctgagattacatgtgtaagccacatccagcctcaaatttcaaattctaaattaagtctttctgacctcaaactaatgttggacatttcaaaaagagcccatggaaccctaagagaagcatattaggcttacctga

SEQ ID NO: 310994 - DNA, 568 bp, Homo sapiens
tttctttgtcttggatggattgggttaatttgaaagccttgtctttgagctctgaagtttttcttytttttgtttgattctattgctgagattttcagtgcatttttcagttctctaagtgtgtcctttctcgaaatcacaatttctagaagttgtgattgttttttatttatgctatttcactgaagattttttctctcatatcttcatatcctgtatcatgtttttgatttattttctttctttttctttttttattttttttaagatggagtctctctctatcacccaggctggagtgcaatggcatgatcttggctcactgcagcctctgcctcctgggttcaagtgattcttctgcctcagcctcctgaatagctgggactacaggcgtgcacccctacacccagctaatttttctatttttggtagagatggggtttcaccatgttggtcagaatggtctcaatctcttgagctcgtgatctgcctgccttggcctcccaaagtgctaggattacaggcgtgagccaccgccaccatgcccggcttagttttgatttcttta

SEQ ID NO: 310995 - DNA, 568 bp, Homo sapiens
tttctttgtcttggatggattgggttaatttgaaagccttgtctttgagctctgaagtttttcttctttttgtttgattctattgctgagattttcagtgcatttttcagttctctaagtgtgtcctttctcraaatcacaatttctagaagttgtgattgttttttatttatgctatttcactgaagattttttctctcatatcttcatatcctgtatcatgtttttgatttattttctttctttttctttttttattttttttaagatggagtctctctctatcacccaggctggagtgcaatggcatgatcttggctcactgcagcctctgcctcctgggttcaagtgattcttctgcctcagcctcctgaatagctgggactacaggcgtgcacccctacacccagctaatttttctatttttggtagagatggggtttcaccatgttggtcagaatggtctcaatctcttgagctcgtgatctgcctgccttggcctcccaaagtgctaggattacaggcgtgagccaccgccaccatgcccggcttagttttgatttcttta

SEQ ID NO: 310996 - DNA, 501 bp, Homo sapiens
ggaggcttaggcaggagaatagcttgaacccaagaagaggttgcagtgagctgagatgccaatccagcctgggcraaagaccgagactctatctcaaaacaaaaatgaaaacaaaaaatacattctactgtcaacttttgtttttgcttagctaatggatataaaataatgggtcattttgtatatttcatttatgtttgtcttatgtttataattcctagactagtgaagttgaacaatttttcatatgtttaatgaatgctatattttgagtgtgtctgtgttagttttttctcacattgctataaataaatacctgagactgggtaatttataaataaaagagatttaattggctcatagttctgcagtctatacaagaagcatgatgctggcatccacttggcttctggggaggcctcaggaaacttacagtcatgatggaggatgaaggggcagcaggcacgtcacacggccagagcaggagcaagagagagaaag

SEQ ID NO: 310997 - DNA, 501 bp, Homo sapiens
ggaggcttaggcaggagaatagcttgaacccaagaagaggttgcagtgagctgagatgccaatccagcctgggcgaaagaccgagactctatctcaaaacaaaaatgaaaacaaaaaatacattctactgtcaacttttgtttttgcttagctaatggatataaaataatgggtcattttgtatatttcatttatgtttgtcttatgtttataattcctagactagtgaagttgaacaatttttcatatgtttaatgaatgctatattttgagtgtgtctgtgttagtttkttctcacattgctataaataaatacctgagactgggtaatttataaataaaagagatttaattggctcatagttctgcagtctatacaagaagcatgatgctggcatccacttggcttctggggaggcctcaggaaacttacagtcatgatggaggatgaaggggcagcaggcacgtcacacggccagagcaggagcaagagagagaaag

SEQ ID NO: 310998 - DNA, 563 bp, Homo sapiens
tttgtttttgcttagctaatggatataaaataatgggtcattttgtatatttcatttatgtttgtcttatgtttataattcctagactagtgaagttgaacaatttttcatatgtttaatgaatgctatattttgagtgtgtctgtgttagttttttctcacattgctataaataaatacctgagactgggtaatttataaataaaagagatttaattggctcatagttctgcagtctatacaagaagcatgatgctggcatccacttggcttctggggaggcctcaggaaacttacagtcatgatggaggatgaargggcagcaggcacgtcacacggccagagcaggagcaagagagagaaaggtaggggttgctacacatttttaaatgagcaggtctcacaataacacattatcattaggagagtaccaagagggatgctgctaaaccattcatgagaaatctgcccccagaatccaatcatttctcaccaggccccacttccaacactggggattacatttcaatatgagatttgggtggagacacacattcaaacta

SEQ ID NO: 310999 - DNA, 563 bp, Homo sapiens
tttgtttttgcttagctaatggatataaaataatgggtcattttgtatatttcatttatgtttgtcttatgtttataattcctagactagtgaagttgaacaatttttcatatgtttaatgaatgctatattttgagtgtgtctgtgttagttttttctcacattgctataaataaatacctgagactgggtaatttataaataaaagagatttaattggctcatagttctgcagtctatacaagaagcatgatgctggcatccacttggcttctggggaggcctcaggaaacttacagtcatgatggaggatgaaggggcagcaggcacrtcacacggccagagcaggagcaagagagagaaaggtaggggttgctacacatttttaaatgagcaggtctcacaataacacattatcattaggagagtaccaagagggatgctgctaaaccattcatgagaaatctgcccccagaatccaatcatttctcaccaggccccacttccaacactggggattacatttcaatatgagatttgggtggagacacacattcaaacta

SEQ ID NO: 311000 - DNA, 620 bp, Homo sapiens
cagccctacgctgtatcttttccttccttccttcctttcttcctttctttgtttttttcttccttccttccttccttctttcctttcattcctcctctctcaatttcttgctgtcactcttattctccttatagtaggagattttaagctttgtatcattctgtacttcatacagaagmtgagcattatataaatctgtgaaatgcagttgataaatatcagcaagatccttagaggtaacaagatggaatcagttcatcccaaacacttcaatgtccagcttctcaggaaaataattgggttctgactttgcaaatgagcaccatccctagttataattgactacttcttcctagcatagataagcagtccaagaatttgagatgatgctcagcatatgagtgtttctttgcctatagcactaggaaagaaattataaggcttggaagttatgacccttaatttatagacccaggcaccaagttaagaggtcagccaccttggagttattaaaatcaaatatatcattaaggcaatctcatactcttccaacaggtaactttagttggccctggagaaagagagaaggtgggaaagagaaaatggaaaagcaaaaggaa

SEQ ID NO: 311001 - DNA, 620 bp, Homo sapiens
cagccctacgctgtatcttttccttccttccttcctttcttcctttctttgtttttttcttccttccttccttccttctttcctttcattcctcctctctcaatttcttgctgtcactcttattctccttatagtaggagattttaagctttgtatcattctgtacttcatacagaagctgagcattatataaatctgtgaaatgcagttgataaatawcagcaagatccttagaggtaacaagatggaatcagttcatcccaaacacttcaatgtccagcttctcaggaaaataattgggttctgactttgcaaatgagcaccatccctagttataattgactacttcttcctagcatagataagcagtccaagaatttgagatgatgctcagcatatgagtgtttctttgcctatagcactaggaaagaaattataaggcttggaagttatgacccttaatttatagacccaggcaccaagttaagaggtcagccaccttggagttattaaaatcaaatatatcattaaggcaatctcatactcttccaacaggtaactttagttggccctggagaaagagagaaggtgggaaagagaaaatggaaaagcaaaaggaa

SEQ ID NO: 311002 - DNA, 583 bp, Homo sapiens
  misc_feature (1)...(583): n = A,T,C or G
atctaacatcaaagtcttataaggaacccattgaaagatacagactgaactttcagtgtttaatgtatatggctctaattgtttcaagcctgtagaactatcccactatatggctgcnttcttctgcttttttatttttgcatcgaatctaaattaataattaaactgtttcgtctggctgaacacgtggctggagtaactccaaaagtggcggcagggatttccacacrggattgccccaaaccatgcccagatggagcccgttgagattccaaagcaagaggcactaaatgccagggggatcagtcctaagcttttgttagggaaacttaccgagtgctgtagcaatgctcacaaaggactgaaagagaaaaggggtgctctacctagttatgtccctggtgagggggtcagggtagggagtttatatgaaggtttaaggagtttggctgagtctgggatgatgtttgtgcaacaacctagatacttttatcagtgcctgggaatgaattgtcaaggccttgtttggattcaagccttcaggaaaaacctgtagctcactgggtcacagagtgatcaaagc

SEQ ID NO: 311003 - DNA, 519 bp, Homo sapiens
ccacagaatagtcatttttctaatttgtgcatggaacattctccaaaataraccatattcttggacataaagcaagtctcaatttttttttaaatttgaaataatatcaagtatcttctttgaccacaatggaataaaattaaaagtcaaaacagagaggaactctcaaaactacacaagtacgtggaaactcaaaaacttgctcttgaatgacctttgggtaagcaggcaaaattaaggcagaaataaaaatatttttggaaacaaatgaaaatagagacacaatataccaaaacctctggaatacatcataagcagtgttaaatggaaagctaatactgctaaatgtctacctcaaaaagaaaaagttctcaaattaacaacctaactttgcacctcaaggaactagagaaacaaaaatgaaccaaacacaaagctaacagaataaaaaaacaacaaatatcagtgcaaaactaaatgagattgagaccccaaaaataatgcaaaataacaactaaa

SEQ ID NO: 311004 - DNA, 580 bp, Homo sapiens
ctatgttcattaacaattgaatatatatggcttttcaactcatgggctagaataaaaataacagcttatttatgatagttaagacaatgagaatggatgaaactgcctagagagagagagagagagcataaagtgagaacaaaatttgttctataacacaattgtgagaaatgtcaagatttgaaaagcagatgggggaagacaatacagtagaaaatagtgaagagcaacagttatctgagtaggtaaaccatagcaatgtgtcatcagagtccgctgatgatagatctaagcagaggggagatygaaagtctaaaatgaggcaagtgcagagtcaacaaaaaaagttgctgtccttaagcatgtgtaaaagctaaaagaaagaaggtagtaaaggtaaagttaaaaatccatgtgaaaatggaaaccgagaatccaggggtaagaaatttactttaatcaaagttataacttatctaatagttactaaatgctacatcttctagttatattgtctggtatgattttaccttgatactaggagaaagaatttaatcactgttttactgattactgtaca

SEQ ID NO: 311005 - DNA, 508 bp, Homo sapiens
ctgttatttttctcatgtgttggtgtttttgttaagtaggttttggctaagatcagtacctggttttatgcctcacaaaactaaaatatatatgaaaattatgcaaattaaatattttattaaagcatttcagaataaactcctttgtttataattataaacgctttcattgtaattgatttcacagtaacaagtaaatacaacttaaaacatcgaacaggtaaaaacagaattttaagaatcttccaacaagcaaagattctaacgttatatgcattgatttgattagtcatattcatgamgatcaattaatataacaagggagaaaggcacatttacaaaggaggcactttagtccatatgcttcaaaatggaaacagacagtatcttcaggaggactgtttcaaggattctaaatacagaacaagatttaatttttgtaaatgcttagattctaattttatctaaaatattattttaaacgactataattttgaaacttcttgtc

SEQ ID NO: 311006 - DNA, 595 bp, Homo sapiens
gctgagcacagtaaaagttacgaaatatcagtgtaaatgtcatgagaggaccaacaagcactaaagccaaatcacccacagatttgtgcataagaatttaaaacaacagaaccatgttccaaaggtttaaatacgtacacttaaaattatcaaagatgaacaaaggagtaacactcataaagtaattaaaagaagtaccatgaactgtgggatataaaaagatctacagttaacccttgaacaatgcaggggttagggtgactgacccttgtagttgaaaatccacgtgtaacttttgactcccctackatgtaactactgataaaagacaaacttcagctgagttaaatttaaaggcgtttaattgcgcactgaacgattccaatccagcagcacccagaatcacagcagattcaataaagtaaatgagatcacaggggcaattaatgaactgatgaccagaagtgaggaatcacccaaagcaaagaacagagcattagagagctgaaatttatgaaattttatgtttagtaagaaagtccaaatcaccctgtttaaatattccatttattttgtacaagatccatgatgaata

SEQ ID NO: 311007 - DNA, 585 bp, Homo sapiens
tctgtgatacagaattactgaagattgctcacaagaaasagaataatacattcaagctaaaaatgccttgaaagtgttttccccatccataattcattaaaaatgagtaaaaataaaaatcatagatgaggatgtcctaatttggagacaaatatcaagggttttattcattactgtatgtgaattcacataacttatattctcatggtataacttattcacaatattgtctggaggatattctaggacaacagtataaacttgcctttttgctgagtcctaaaccttccttgtctctaccttttctgaattttgacatagtcaaatactttgacagaatttcctgtacttgtcaacttccaactgaagatcttttatagtaatgaaacttacttctctttgagtgataatgctctactcctcacaacctggagaagagatgtctgtatgtgtgaatctgaacaaagaacaaatgcacttacaaatattttttatgaaaccagtattttatcattatacttttttggtatttggtatgattttttggcatattttgcatttttcctgaaattactcagaattaat

SEQ ID NO: 311008 - DNA, 602 bp, Homo sapiens
gataatgctctactcctcacaacctggagaagagatgtctgtatgtgtgaatctgaacaaagaacaaatgcacttacaaatattttttatgaaaccagtattttatcattatacttttttrgtatttggtatgattttttggcatattttgcatttttcctgaaattactcagaattaatttcttttgtttttacttctttattttgcgtttctccagaaggacatcctcaaggatgagaatgaaagttatatatttattctcagaaaacactggtagaatacggacacatgagacaaggccagaaaggaagtcaataaaatgtgattactaagcaaattaccaccagagaagcagaaggaaatccctcttcaatattttgagagacagtaaagaacattccctggagttaggacaaatgaagagcaagaagtttgtgcgtatctgacaacttttcttccatcactggttgagggctacttccaaagatttaacgttcctgccctttcagattaactgctctggcttagtgtacccacaacaaggaagaaaaaaaatccttaggcagagagtctcaggtgtttgtaattggcaccatggata

SEQ ID NO: 311009 - DNA, 602 bp, Homo sapiens
gataatgctctactcctcacaacctggagaagagatgtctgtatgtgtgaatctgaacaaagaacaaatgcacttacaaatattttttatgaaaccagtattttatcattatacttttttggtatttggtatgattttttggcatattttgcatttttcctgaaattactcagaattaatttcttttgtttttacttctttattttgcgtttctccagaaggacatcctcaaggatgagaatgaaagttatatatttattctcagaaaacactggtagaatacrgacacatgagacaaggccagaaaggaagtcaataaaatgtgattactaagcaaattaccaccagagaagcagaaggaaatccctcttcaatattttgagagacagtaaagaacattccctggagttaggacaaatgaagagcaagaagtttgtgcgtatctgacaacttttcttccatcactggttgagggctacttccaaagatttaacgttcctgccctttcagattaactgctctggcttagtgtacccacaacaaggaagaaaaaaaatccttaggcagagagtctcaggtgtttgtaattggcaccatggata

SEQ ID NO: 311010 - DNA, 602 bp, Homo sapiens
gataatgctctactcctcacaacctggagaagagatgtctgtatgtgtgaatctgaacaaagaacaaatgcacttacaaatattttttatgaaaccagtattttatcattatacttttttggtatttggtatgattttttggcatattttgcatttttcctgaaattactcagaattaatttcttttgtttttacttctttattttgcgtttctccagaaggacatcctcaaggatgagaatgaaagttatatatttattctcagaaaacactggtagaatacggacacatgagacaaggccagaaaggaagtcaataaaatgtgattactaagcaaattaccaccagagaagcagaaggaaatccctcttcaatattttgagagacagtaaagaacattccctggagttaggacaaatgaagagcaagaagtttgtgygtatctgacaacttttcttccatcactggttgagggctacttccaaagatttaacgttcctgccctttcagattaactgctctggcttagtgtacccacaacaaggaagaaaaaaaatccttaggcagagagtctcaggtgtttgtaattggcaccatggata

SEQ ID NO: 311011 - DNA, 451 bp, Homo sapiens
ggtaaaagatgagtcagggagaagtagaattttttgcatctattttaatattgtaatttatagggtggcttttttggagatttctttattatggttatatatatatataacacaatttaccattttgttataagtgtacaatttattgacattaagtacattcccaatgstgtgctaccatcactactatctattttcacaatttttaaattattaaacagaagttctgtacccattaaagaataactctcacataaaccctagtccccagtaacttatatactacttcctgcctatgaattttcccttttaccttatagtctaccttatataagtagaatcatacaatatttggcctttgcatctggcttattttagttagaataatatattcaagtttcattcatgttgtagcatgtatcagaatcttcattttttatgcctgaatact

SEQ ID NO: 311012 - DNA, 589 bp, Homo sapiens
tgaggtgccacaaattctgagtacaagccctatccttgccttattggtgaaccatgcttctatggtrcagactcaaagtaactttcaacgtgtactagaataactaaactgaaatttgagctgctactcatgagatgtaataaaatgtttgtaatctgaatctaaccaaattattgcctattaaaaatatcagcattcataagaagaatacaaccgaatgcagattttatattgtattcacaataaggaggatagaataaaaaataattgtgtacgagaaaccgtaaaaatgttactagttctttttttcaatttttattgatacaaataagtatgcatatttatagggtacatgtggttttcgtcatatgcatgtaatgtacaatgatcaagtcaggatattagggtattcgtcacctgaagtatttatcgtttctacatgttgcggacatttcaaattatttcttctagttattttgaaatataaaatgaatgtctattataatcgctctgctattgaccatagaacttattctttctttcttttttattggatggagtctcgctctatcacccaggctggagtgca

SEQ ID NO: 311013 - DNA, 589 bp, Homo sapiens
tgaggtgccacaaattctgagtacaagccctatccttgccttattggtgaaccatgcttctatggtgcagactcaaagtaactttcaacgtgtactagaataactaaactgaaatttgagctgcyactcatgagatgtaataaaatgtttgtaatctgaatctaaccaaattattgcctattaaaaatatcagcattcataagaagaatacaaccgaatgcagattttatattgtattcacaataaggaggatagaataaaaaataattgtgtacgagaaaccgtaaaaatgttactagttctttttttcaatttttattgatacaaataagtatgcatatttatagggtacatgtggttttcgtcatatgcatgtaatgtacaatgatcaagtcaggatattagggtattcgtcacctgaagtatttatcgtttctacatgttgcggacatttcaaattatttcttctagttattttgaaatataaaatgaatgtctattataatcgctctgctattgaccatagaacttattctttctttcttttttattggatggagtctcgctctatcacccaggctggagtgca

SEQ ID NO: 311014 - DNA, 605 bp, Homo sapiens
aaacaatttagagtgacaatgaagaaaatgtagtctttaatagatggcgatgaacttggtggatcatacaatatatgttgattatcaaaagataattttttttctcacaggcaacatggatgtagaaagtccaaggaaatctataagataacttgttaaaactaataattgaaccagaaaggttgtgagttaccaggccattttttttctcatgcttttaaagccaccctagtagcatgttacacaatctcctagggtctttcagaaaattaattcttgtattctagaagatactcacmaattgataacctctaatttatccaacctcctattcatgaccccttgatcaagtacacttgaaaatatatcccatacattctcttctggcttctgttcctgtgcactagatgggtcatgttaaatttttgggttatagtttctttcatttcttatcagactctccttttatttagatagaacatgttgtactttaaccccatttattggagttcaggcaaggaatagaattgaggtctattctgagggtctcacatgttgtcttaggagaggtctctgcatctcattcaaccaaaatgtagagacgg

SEQ ID NO: 311015 - DNA, 596 bp, Homo sapiens
taggcacctactccataaacagtaattaataaagcatatgaaattagtttaaggaaaaataaaatgtggaaacaaattttaaatgtgagatgatataccgaagctcaagttgcttacaaatccaaccagtcatgtaaatatctgaccttttatttataatctctgagttgggaataggaaacctcctggagcttttgggagtggccagctacatgattcatgtgacccataccctcatctctctaacatattgaatattctctcacttggggtgtatcttcaactgtatgtcctcttccctccattaacatactcaatcattttcttagagcatccctcagtcaaaaagtacccatagaggtattaaattactatgttctctctcccctttccctatcaccctccttcttaaggtctctgtaacacctcttttctgacaacacaggtacaaattaacgttttctcttcctctaggatacaggtcaatgaatatcctcaattgtcaaaggttacacaagattgagtgaatgtgtgtayttgattaattcctatttttctttgttaaatctatatattactttgtttaaattttaagt

SEQ ID NO: 311016 - DNA, 559 bp, Homo sapiens
agttttttggtgctgaaatgtaaagttgatttgatggtttcaaaactctgaatatactaaagccattgaactggacatattaaatgagtgaaatgaatggtatgtaagttatatctcaactaagttattttttaaaagtagcttaatgtatgtagcacatcatttcaatatcatttgcaaattttgataatggtacatattcatcaaattatgctttaaaagtgcaacattggaattttggacaacccccaaattacaaattgcatatctrtttcatgctatataaaagataatactgtttgtctgccccacattaatcctttcctcttttctcccaatagaactcagcttttgttaaatatctaccctcacctcaccgccctgcaccctggtgaaggtgacactatctccagtatcaggaatagatctaattgctcaaatgttatttctgttatcctcactgagaatgtaatctggatatagaaaatgagaaaagaggagaaatctgctccagagcaactgaaaaactttcttaaatcttcacagcaagccacagtaa

SEQ ID NO: 311017 - DNA, 634 bp, Homo sapiens
attatctgcataaatttggttttcattttgttctgtcaatgaatttaccaacccttttgttataccatatatctatggtggggagataaaagtarcatttaacataccatgcaacagaaaaaagagcatggtacttcctttccagcagaagttaccttcttatatgtactacaagttctcattgattggagtgttgacaagaggccctatttcagtcagttctggactccatattcttcatgatcataatcatgttttagatatcctaatacaggttttacaggtcctggcttccaggtgccattatgtaatactgcaatagtgaaaacagttttatatgatctatccaatcccagccagctgcatcatagagaagaaaggttccattttatcttgtgtacaaaagctactggagaacgactataacagccccaatatccgattacaatctgcattaatttatctgtagaacaaatcccaacttcctgtcctggttttctaggtctaataatcactgacctttatgtgagattccacaaatgatagaatactcactagttgtctctatatgagagtataatgtttttcccagtatggttaatggtaatgtatgtttttatttgagaattattat

SEQ ID NO: 311018 - DNA, 634 bp, Homo sapiens
attatctgcataaatttggttttcattttgttctgtcaatgaatttaccaacccttttgttataccatatatctatggtggggagataaaagtagcatttaacataccatgcaacagaaaaaagagcatggtacttcctttccagcagaagttaccttcttatatgtactrcaagttctcattgattggagtgttgacaagaggccctatttcagtcagttctggactccatattcttcatgatcataatcatgttttagatatcctaatacaggttttacaggtcctggcttccaggtgccattatgtaatactgcaatagtgaaaacagttttatatgatctatccaatcccagccagctgcatcatagagaagaaaggttccattttatcttgtgtacaaaagctactggagaacgactataacagccccaatatccgattacaatctgcattaatttatctgtagaacaaatcccaacttcctgtcctggttttctaggtctaataatcactgacctttatgtgagattccacaaatgatagaatactcactagttgtctctatatgagagtataatgtttttcccagtatggttaatggtaatgtatgtttttatttgagaattattat

SEQ ID NO: 311019 - DNA, 634 bp, Homo sapiens
attatctgcataaatttggttttcattttgttctgtcaatgaatttaccaacccttttgttataccatatatctatggtggggagataaaagtagcatttaacataccatgcaacagaaaaaagagcatggtacttcctttccagcagaagttaccttcttatatgtactacaagttctcattgattggagtgttgacaagaggccctatttcagtcagttctggactccatattcttcatgatcataatcatgttttagatatcctaatacaggttttacaggtcctggcttccaggtgccattatgtaatactgcaatagtgaaaacagttttatatgatctatccaatcccagccagctgcatcatagagaagaaaggttccattttatcttgtgtacaaaagctactggagaacgactataacagccccaatatccrattacaatctgcattaatttatctgtagaacaaatcccaacttcctgtcctggttttctaggtctaataatcactgacctttatgtgagattccacaaatgatagaatactcactagttgtctctatatgagagtataatgtttttcccagtatggttaatggtaatgtatgtttttatttgagaattattat

SEQ ID NO: 311020 - DNA, 588 bp, Homo sapiens
atagtgctgaattctgccaagaaactgaatgagtttagaagtgcagatccccagtgctttcacaaagaaacacagcccagcaacactttgattctgactttgtaagactctaatcagaggatcccagtaagctatgccttactgggattttttaaatccataaaacagatgtttaaaaatgagtgttgttgtatgcctcaaagtttgtggtaattttctttggcagcaatagaaaatgaaaatagacactgactctacaataattgacactctttttatcttctactctttcccactgagatgatgcaggataatatctctcatataaggtatggaacttgaaatcacatcacaaagtctcttttgctatgtaatacagyatatacacagattccaggaataaaggtgtgggcatctttgagaagtacatttttactcatttggcccaccgtgacattcattttgattaacactatactactgaccacataaaaattaggaaaaagaaacataatattatatcaatatacaacatttctattaactttaaatgtatagggatgctactcttaaaatctagaattggtt

SEQ ID NO: 311021 - DNA, 469 bp, Homo sapiens
ttttatttgcaggcttttgcctacgctgactcttctcccactgatcttctttagtccccttcttcccaagtgacttatttactcattgtaaacaaaatagagttatctcttttgagaagcctttcctaaccccgaatgaacttgattattctgttgtgtttattacccatttatcttcatccatttatttgtttacatagtsaatcatttttctgatgttctttcagtgtgccacaggctgtgcacttattagggatataccagtgagaggggaaaaaaaagtcctacctaatggaatgtctagactgctggtgagaacagattttaattaaataatcaatgagaatagaaatgcatactccaaaaaaaacagagcaatatagtgtatgagaacacttaatagaggtatccaacattatctgaggggcttgaaaacctttttgaataaaattttgaatacttatgattt

SEQ ID NO: 311022 - DNA, 539 bp, Homo sapiens
acaaaatagagttatctcttttgagaagcctttcctaaccccgaatgaacttgattattctgttgtgtttattacccatttatcttcatccatttatttgtttacatagtcaatcatttttctgatgttctttcagtgtgccacaggctgtgcacttattagggatataccagtgagaggggaaaaaaaagtcctacctaatggaatgtctagactgctggtgagaacagattttaattaaataatyaatgagaatagaaatgcatactccaaaaaaaacagagcaatatagtgtatgagaacacttaatagaggtatccaacattatctgaggggcttgaaaacctttttgaataaaattttgaatacttatgatttacaaatagacttatttcatatatactgatatgactccaggcattctttctaggattatgcacttttactattttaatttaatttatttgattccacatactatgtaatgtaattgttgctttatttggttaatgtttatttaaaataactcacacaattac

SEQ ID NO: 311023 - DNA, 595 bp, Homo sapiens
gatctgaatagcaatgcaagaatcaggcctatagtattagagataattctcacaggttaaacataattttgtatacacggcctcttcagaatatctcttctgtctgttagttcctgacaagcagattgcggtactgaaatttcgcaagtgatagttaaagccatccctgagccaacctggggatatcaataaatgtctcatttcttgaatattctctcttacatatttttcagattcttctcttaactcagttttataatctattaaggaaataagattggtgattttgggcggggttgttagggagaaggtggaaatttcttgaagaaaaataatcacaatataaaataaacaacaattgcatggtaacataaactttcaaatgtacttcatgttttgtgataatttgtttcaatgtaaagatttatgaawtcgaagtttgtcattacaacatggccaatatctagtcctaaactgtttgctttgagcacatacttgacatccaataagagaacaatttattgttttaaaggaggttagaagaaaagtaataatttctgaatgcctttctatttggcagtttgtaagcggtttt

SEQ ID NO: 311024 - DNA, 596 bp, Homo sapiens
atatttacacacataaatatgtggttaataaataccatctgcaccagaatgtaatttaggtagaggcagagatttttgtctctctataattattcatttgccagacatattacacatataatacgtatttttgaaatggattcattaatgaaggaatagctacaaaattatggtttgaatccatttcattctatctatcaagcatgtgtgtgtgtgtgtgtgtgtgtgtgcatgtatgtgtgtgtgggtaaatatctgccgacgttttctgttcagtatcattagtcttttgaggcttagggcacaggaacgcaacaataattgatttgaaaagctgcataagttacactacctgaatgttcattgctayttcattattagaaaacatacccttagttattctttccagtttccctggggtaggaggagatcaggtaaaaagaaaaaaagagcaaaccttctatttttgcatattcttgttcaatagacatgccaaagaacaaaaagtacctcctgatcactagaaaatgttgaatattcattttggagttatgtaaaatgaaactattaaaaagctgatttttgttgttattgag

SEQ ID NO: 311025 - DNA, 487 bp, Homo sapiens
ttgttgtattttagttgagatgggttttcaccatgttggctgctctctaatctcctgatctcatgacccgcccgcctcggcctcccaaagtgctggcattacaggcatgagccaccacgcccagcctagaaagctgatttttataataaaaattattagcaagtctatgaagaaaaaataaatcagacaagagtaataaaatattatgattagatacccacttttcagaaaaagagtatctaatcagtaattttaaaattagcaataaggaacaagtgaattccttaattttagttacatatcaaatagtttctattattcaaagaaaacctattttaaaaatatattttattcacttttacgttaaaagaatagtacaaattgaaaagaaactaaattttgctaaaattggaaaactatgaaaaataacattggaggkatattttcatattttcacagagaaacagttattttttctgtgaaatat

SEQ ID NO: 311026 - DNA, 487 bp, Homo sapiens
ttgttgtattttagttgagatgggttttcaccatgttggctgctctctaatctcctgatctcatgacccgcccgcctcggcctcccaaagtgctggcattacaggcatgagccaccacgcccagcctagaaagctgatttttataataaaaattattagcaagtctatgaagaaaaaataaatcagacaagagtaataaaatattatgattagatacccacttttcagaaaaagagtatctaatcagtaattttaaaattagcaataaggaacaagtgaattccttaattttagttacatatcaaatagtttctattattcaaagaaaacctattttaaaaatatattttattcacttttacgttaaaagaatagtacaaattgaaaagaaactaaattttgctaaaattggaaaactatgaaaaataacattggagggatattttcayattttcacagagaaacagttattttttctgtgaaatat

SEQ ID NO: 311027 - DNA, 339 bp, Homo sapiens
aactataaaaagaactttgaggagatatatagatgcacctttaaaacttcaggctctaaagcctgtttatctaaatcataatgtcataataacattaagcaacttgtccaaggtcatgcatttgtcatataaaataatgaaaaccatattcagcctgctcctcctccagagcctaaaatcttgccagtatgttagactgccttaagtttattgcttgtaacattatattcacaagtggcacaaaattaatggggttaagagatcttatttgaaagtactggctaccgtaccatcatcttaaagattarcatcaatagttattatattaaaatctctcag

SEQ ID NO: 311028 - DNA, 589 bp, Homo sapiens
tccaggactacatgacaataaatttgtttcattttaagccacaaaatcagtggtaatttcctgcagcagcagtagaaaactaatgccaatttttttatctatttctatttttctatcatctttttatacttattaatctagtcaagatttttactaacatttatttatatcttaatatataccttgctctgctttaaatatgtgacaaatgttaacttattttcatgttttgtaaagcattctaacagtcttatgagagaggcaacattgtaaggcccattacagagatgaaactaaggcacaaagacatacagcaatcttaccagagttaaaaaatgggtaagttctttgtttatcttgaataggctatggtccttttactcmaaggtgcttgcactagcttttctggctgcctgttataatcttttctcaggcctctaaatttctgactccttgtaattctcatgttagtttagagctaacctctgcaaaaagacctttcctggtgaaagtagtttagcagtcatgtagccacacttccattctgtccaatcattgcatttattactacctggctttggtgttactt

SEQ ID NO: 311029 - DNA, 448 bp, Homo sapiens
ttattttggttgagttataaactagttttgtgctttaaagagaaatccctaataaacggaaaaaatataacagaycatatcaccctatatcatttgctgggtgaatatatcaggacaagatgcatatcacgtaagccactttgcatgtgcctatttttaaaaggtgtctaggatgctgtctgacttgtaagtgagcattggtatattggaagcataataaataaaatggactgggaacagaaacgtaaatatattaaaatttatttttattacacatgatgcttaacagctttaagagtattatttcttgtattgcattcaatatcacaagagagttattcatattgtgtgaaagtgaaggtttctacaatggtttgactttaatgttcaatatatggtcccagaggtagttttatttagaggttgcttcttcatgcacttcattgtt

SEQ ID NO: 311030 - DNA, 604 bp, Homo sapiens
catgactactctttctatcagcaaactggaatctgtaaatttaaatgcaatgtttgccactttttaattgtgtgaccttgagcaggtcacttaatcactctctgtcccactttccttatctgtaaaatgaggttagtaatgctaattaattcatggtattgttttgataataaataagattaatatttgtaacatggcaaaaaggccaggtatataataaggttatgctattctttttttttttttttttttctgagactaagtcttgctctgtcacctaggctggagtgcagtggtgtgatcttggcttactgcaaacttagcctcccaggttcaagcgattcttctgcctcaccttcccaaggagctggaactacagtcaygcaccaccacagccggctaatttttgtatttttcatagagacgagtttcaccatgttggccaggctggtctcgaactcttgacctcatgatccaccctcctcagcctcccaaagtgctgggattacaggcgtgagccaccgtgccgggccagattatgctattcttaactgccatacattttacatttgaaatataaattagaatatatttcatgtgatta

SEQ ID NO: 311031 - DNA, 472 bp, Homo sapiens
agctggaactacagtcacgcaccaccacagccggctaatttttgtatttttcatagagacgagtttcaccatgttggccaggctggtctcgaactcttgacctcatgatccaccctcctcagcctcccaaagtgctgggattacaggcgtgagccaccgtgccgggccagattatgctattcttaactgccatacattttacatttgaaatataaattagaatatatttcatgtgattataccaaagcatatattaatatgcaattggagcattaaatagatttgtcttttctataatgaagaatactcagagaactcacataacatattttcatagcaatgtgatcatctagtaatggccctcttcatagatcctaatcacaaatrttcatcacagttgtcagcatttgacaaaaactttgaaaatcagttatccttacagatgttatctcatcaactgccttaaataatt

SEQ ID NO: 311032 - DNA, 595 bp, Homo sapiens
ggacttttgtcttgcatattggataccagctcagccatagtaggatagtgcaccactcacagttgtgaggcccctattctaggcactagctcctgaacaacatttcaagrcataccctgggccagaaggccagaagttattgtctttaatggagggtgacacagtcctgctaggatgcatcagctgtttactaatgagccctttggccctgaatagtcactggcagtccagatagtatgccatgggccttgggtgagattctgaggcatactaacttagttaagacccagagtattcccagctgttgtgtctatagtgagagactccttctgtttgagaaaagcaaagggaaaagtaaaggggactttgtctttcaccctatgtaccagatcagccacagtggggtagaacaccaagcagaccctttgggttcactattcccaactttgggccttgtgaagcattgctggacattctctggcactgaggtgagcctgctgtcctgaaggatgagtcccaggtctggtagcattcactaccagactactgctgatattcacttaatgctcaagagcacacacagtacctggtttta

SEQ ID NO: 311033 - DNA, 595 bp, Homo sapiens
ggacttttgtcttgcatattggataccagctcagccatagtaggatagtgcaccactcacagttgtgaggcccctattctaggcactagctcctgaacaacatttcaagacataccctgggccagaaggccagaagttattgtctttaatggagggtgacacagtcctgctaggatgcwtcagctgtttactaatgagccctttggccctgaatagtcactggcagtccagatagtatgccatgggccttgggtgagattctgaggcatactaacttagttaagacccagagtattcccagctgttgtgtctatagtgagagactccttctgtttgagaaaagcaaagggaaaagtaaaggggactttgtctttcaccctatgtaccagatcagccacagtggggtagaacaccaagcagaccctttgggttcactattcccaactttgggccttgtgaagcattgctggacattctctggcactgaggtgagcctgctgtcctgaaggatgagtcccaggtctggtagcattcactaccagactactgctgatattcacttaatgctcaagagcacacacagtacctggtttta

SEQ ID NO: 311034 - DNA, 579 bp, Homo sapiens
aaaaaaagagaatggaatacttccaaactcattatatgaggccagtattaccttgttaccagaaccagacaaatacagatttaaaaaaaaaaacctatggaataatatcactgattaatactgatgcaaatatcctcaaaaatactagcaaaccgaattcaacaatgcattaaaaagattattcattataaccaagtaggattaattgtaggtatacgaggatagctttacatacataaaccgatcaatgtgattatcatataagcagaatgaagaacaaaaatcatatgatgacttcaactgttactgaaaaagcatttgataagtttcagcatgcttttrtaataaaaaccctcaaaaaatgggtgcagaaggaacatacctcaacataataaaagccatatatgacagaccaacaattatggggaaaaactgaaaaccttttctctaagatttggaaggggacacgtatgcccacttttatgacttattcaacatagtacatgaagtcctatcaaagtaattaaacaagagaaaggaaaaaagggcatttgaattgggaaggaagaaatcaactta

SEQ ID NO: 311035 - DNA, 574 bp, Homo sapiens
ttcatcttcagatttgttacatagtaatattgcatgatgctgaggtttggagcatggatcccatcacctgggtagtgagcatagtacctgttaggtagctttttaacccactcctcccaccatctagtccacagtgtcgtttgttcccatatttatgttcatgtgtgttcaatgtttagttgccacttataagtgagaacatgaggtatttggttttctgttcctacattaatttgcttaggattatggccttcagcttcatccatatatttttcttaaaaaatgtatacactggtattctctgattaacccatttcatacattatctactgacttcctatattaatgaagaatattttaggtctctgctctttagttcaccttgctgcacaccacgactcttcttccaaaagagtcatagtacattttgaggctaaatctgcatttagcrattacactattatgtttattaaaatactcacaactgaacattgaagtgtaatatgagcacgttccatgtcttctttgttcttccttgagttaatgcttgtcttttgtctgcattatttgtaag

SEQ ID NO: 311036 - DNA, 500 bp, Homo sapiens
tcagaaatctgtgtgaatttttttgtggatagaaagaaaaaattgccttaaatagattattggtagaaatctggaatttgaagatgctgctggtgaatgctcaaaaggaaataaggaaattattattggaacttggagaaagggtgaccctttatctatagaaaacataaatagtaccgacaatatcacctgcagacatgtggaaattagaaaatgtgcatcgaaaactgattgagttagctaagtaaattttcagacaaagtgttaaatgtcccacctggttatatcttgccagtatattaaatacatagtgtgattatatgaaagagcttamaagtaaaagtaacgaagtatttcttcaattggaataaggaaagggaaatagatgctctgagacaattaacaaatgttaagcaagaaaataatgttttcagtattaaacaatctgaaatgtggcatgatttaaaattgatcaagtgtaaaaaatggtggtttctgca

SEQ ID NO: 311037 - DNA, 536 bp, Homo sapiens
taaaaactacaagggaagctgagtgtgattgctcactcctgtgatcccagtactttgrgaggtcaaggcttgatcccaggagtttaagaccagcctgggcaacatagcaagacttcatctctacaaaaaataaaaaataaaaaattagctgggcatggtggcatatgcctgtagtcccaactaataggaaggctgaggcaggagaatcacttgaccctaggagttgcaggctgcagtgatccgtgatcatgccactgcactccagcctgggtgacagagcaaaaccatgtctttaataaattaattaattaacaaacaaataaataaatacatataactcagtttccaggcaaaatggagaccatgagcttaaaaaaacaagagatttaaatatttctctgactgtgtgtatataaaaattatatataattacatgtacaaatatacaaattcatatatattacatatatgaattatatattagaatcaaccctgatatacatatttcatattttctaataagtattgattttagt

SEQ ID NO: 311038 - DNA, 508 bp, Homo sapiens
caagctgtgggaagtctccagcacgacacactggacagctgtgaaaggaaaacaccgtgtttttaaaatggaaatcaaccaaggagaaagacttcaggrggtgatagacttgttgatagtttaagaccaccctataagtttcccaaactaatataattccattaacagttgttcatcagtaaattctctaacaggttagttcaggacacaaaaatgtgtctctgacatgacccctgaggctatatttttggtgtgtttatttaagtaaagcaaagtgtgttcatttcctattgctactgtaacaaattgtcataaatttattaacttaacaaattatcttactcttctggagatctgaagtccaaattatgtctcattgatctaacctcaaggtttggcatagctgactgtgtagaggctctaaggggagcatatgcgtcctcgccctttttggcttctagaggccacctgcaaccttagctcatttaatcatttcagtatcttgctt

SEQ ID NO: 311039 - DNA, 562 bp, Homo sapiens
tgcctattactaaaaagtcaaaaaataacagatgctggtaaatttccagaataaaaggaatgcttatacaytgttggtaggagagtaaattagttcatccattgtggaagacagtgtggcaattcctcaaaacctaaaagaaagaaacaccatttgacccagtgattccattactgggtatatacccaaaggattaaaaatctttctattataaagacgcatgcacgtgtatgttctttgcagcactattcacaatagttaaagacatggaatcaacctacattcccatctatgacagactggataaagaaaatgtggtccaaggcacattttaaagatgcaaacttcatgaagtcctgaaatcagtgatcataatgggatgttttatacacgctatgtattgaacttttgttatgtctttctaccaaactgttcagagtaggataattgtaacaaaaaagaaattccagcaaaagttctttttattgaaatatgaattttggattaaataaccatgattagccacctcacataatttctcttactctgatctccacatgtt

SEQ ID NO: 311040 - DNA, 562 bp, Homo sapiens
tgcctattactaaaaagtcaaaaaataacagatgctggtaaatttccagaataaaaggaatgcttatacactgttggtaggagagtaaattagttcatccattgtggaagacagtgtggcaattcctcaaaacctaaaagaaagaaacaccatttgacccagtgattccattacwgggtatatacccaaaggattaaaaatctttctattataaagacgcatgcacgtgtatgttctttgcagcactattcacaatagttaaagacatggaatcaacctacattcccatctatgacagactggataaagaaaatgtggtccaaggcacattttaaagatgcaaacttcatgaagtcctgaaatcagtgatcataatgggatgttttatacacgctatgtattgaacttttgttatgtctttctaccaaactgttcagagtaggataattgtaacaaaaaagaaattccagcaaaagttctttttattgaaatatgaattttggattaaataaccatgattagccacctcacataatttctcttactctgatctccacatgtt

SEQ ID NO: 311041 - DNA, 562 bp, Homo sapiens
tgcctattactaaaaagtcaaaaaataacagatgctggtaaatttccagaataaaaggaatgcttatacactgttggtaggagagtaaattagttcatccattgtggaagacagtgtggcaattcctcaaaacctaaaagaaagaaacaccatttgacccagtgattccattactgggtatatacccaaaggattawaaatctttctattataaagacgcatgcacgtgtatgttctttgcagcactattcacaatagttaaagacatggaatcaacctacattcccatctatgacagactggataaagaaaatgtggtccaaggcacattttaaagatgcaaacttcatgaagtcctgaaatcagtgatcataatgggatgttttatacacgctatgtattgaacttttgttatgtctttctaccaaactgttcagagtaggataattgtaacaaaaaagaaattccagcaaaagttctttttattgaaatatgaattttggattaaataaccatgattagccacctcacataatttctcttactctgatctccacatgtt

SEQ ID NO: 311042 - DNA, 593 bp, Homo sapiens
aaaattgatagatctgcatactttataaagggcacattgtactgtatactatatatgtaaattatatcacaataaaattactttaaaaaaacagaaaaattagttcaaattatgycccatctctactatcattctttttgacatttttcattggctgcctattacttctagcctacttaattgcattttctggactctgctttaactctcttagctaatcttgtatcactttctccatttttctgtgtgttcctgtcaccctggttctttgtcatttcttcaaatagtctgtccttcaccacaggggctatgtatttggtacttaactcttacacatctatagtgtatcaacttaactatcacatattttaaagaagccttttctaaaatcaaagatctgggtaagtttcttctaaaaggtttcagtgactcatacatctttcctacggagcacttacttcggtgaatatttaaatattcgtaagtaggattgtatgattgataattttctccccagtgtaacctataaaattatgtactgtgaagcccatttgcttttctataccatttttctcccattacttaggacaatg

SEQ ID NO: 311043 - DNA, 575 bp, Homo sapiens
gttattggctttcaaagctatacctaaatgaggccattgtgaagctgacatccatttttggcttgtatctacatactaaattgaaccaaacataaacaaactttaggattttttttttcccagctggttgtatggggccccatacagccataggcacaacatgaggaaagattactggggcaagactggtgagtacataaggttttgggtttctacttgtatgacttatacatgaccagttgttctggtgtgttttgatctggtgcacttcctgagacatagaacaattagtgatacaactgggacagtcccagacaaagcaatacattgcaacataacaaattatctcaaaaatagcagcataaaaygaacaaaagaaaacatttattttcttacacagtttctgagagtcatgaatcaggaagtagattagctggttagttctgactcagggtcacacatgaggttgcaataaagctgtcatctggggctatagtttctggagacttgattagggatgaaagatccactgcaatctcactcacccagctgttggcaggaagcttcagttactc

SEQ ID NO: 311044 - DNA, 575 bp, Homo sapiens
gttattggctttcaaagctatacctaaatgaggccattgtgaagctgacatccatttttggcttgtatctacatactaaattgaaccaaacataaacaaactttaggattttttttttcccagctggttgtatggggccccatacagccataggcacaacatgaggaaagattactggggcaagactggtgagtacataaggttttgggtttctacttgtatgacttatacatgaccagttgttctggtgtgttttgatctggtgcacttcctgagacatagaacaattagtgatacaactgggacagtcccagacaaagcaatacattgcaacataacaaattatctcaaaaatagcagcataaaacgaacaaaagaaaacatttattttcttacacagtttctgagagtcatgaatcargaagtagattagctggttagttctgactcagggtcacacatgaggttgcaataaagctgtcatctggggctatagtttctggagacttgattagggatgaaagatccactgcaatctcactcacccagctgttggcaggaagcttcagttactc

SEQ ID NO: 311045 - DNA, 540 bp, Homo sapiens
attcttctggaaagagtcaaggaagccacagacacaatgaagcatgttaagcagcagcagaaataataaaagctatgtttcaccaaatgttgaatatgtacaaagcacagaactctgcactttacattttgttttgtcttattcaggcaactaaataacctatgaggtaaagactattatattcccatcttaggtgagtacaaaagtaattatggtttttgcattgttggaatttgcygtttgatattaggatactttcttaaatgtggttatgttatacatcatttcaatgggcatttcttgcttttgttgttgttttttttttgctaatgatttattacttgctgtttattttatgtttattttagactatggaaatgatgttagacaaaagacaaaaataaaattctagcaattttctaatttgagtccaaaatggattgtaaagcaacagagacaactcgcaacagcaatacatttggcccaggaactgcaaacaaatggtgcagtggtagttcaagaagttttacaaaggagacg

SEQ ID NO: 311046 - DNA, 617 bp, Homo sapiens
caaaaggttctgttcttgctttctaaaactaattatctaaagcataactatgattatcacaataaacattaacactttaaaaagcaatgatttgataatagtctacatttcaaagtaattttaatataaaattgtttaagctaaagaaatatgaatgatcttcagaaatgggttatgattcgtccctcctatatgctctaatagcatcgtgtattaaacaggtcacaccacttatgtgaaaatacattttttgcagttgtctctccatccaattctacctgaaaatagtggtgttcaggaattgtcattgttcttattatatttttagaatatagaatcgaaggaaacattaggcattcaataacaggttgattaaataaatatgtaattgaacgggatatcctaaccctcaaactcataactctataacctaagggtgtgacactgtcaatgtggtaaaatgtacacacacacacacttatatatatttcttggtgtatatatatatatatatatatatatatgcatatacatatatgtataaatgtgtgtgtatgtgtatgtgtgtatrtatatatacacatatacatacaagaaaacaagacatggtccctatt

SEQ ID NO: 311047 - DNA, 603 bp, Homo sapiens
attggtagcactgtaaacaggtaggttgtggagagggatctctgtaagtcttcaagttattagtaatctacaccatatttaagcaattcacaaatatcttattctcacatgaaggarcttggggttgcatctataaacagtgtagcttaaacacattcccaaccatattgctgccctaaagtcttctttaacctccaaccaataaataaataattactagagcagcttctggcagaaaatgacccacttcttatatgctcaaatttctaagacacgacaaaaccgctttttctctacccataccccaatcattttctgactcctttggaagggatatgggtcaatttcagaatgaaatatgaaagtctaagaggagctcaaaattttggctaaactgactttgttatgaaagtacactaaattaatatacaactgaaccatattaaataagttactgttttttactaaaaagatatgcaattagtgattaatattaattatcttattaattacttagtaacttattaatattgattaatattaatattgactaatattaactaataagttactttttttactaaatggatatacaattagtga

SEQ ID NO: 311048 - DNA, 512 bp, Homo sapiens
cctcttcactcctggttctcaggccttcaggctcagactggaatctacaccaacagctttgtggctgtcatgccttcaaactacactactggcttccctggttctccagtttgcagactagattgcgggacatctcagtctctataattgtgtaaaccaacatcttctaataatctcttagtatataaayatataaattctcccattggttccatttctctggagaactctgactgatatacaacgtaaggctagaaattcaaaacctgcctatgtttcatacgaaggccaaaaagttaagaaacttgtttctgagagaggcaccatcacaagtgggaaattcagcattggctgtcctctctaagctggtgatgatggtaggaggtgttgttatagactgagccccctgatagttatgaggatgacaggatccagaaaccagagaggcaagatggtggcagttaaccatcagaagaaaggtagctgagtgagaggtaaaagtgagttctaac

SEQ ID NO: 311049 - DNA, 512 bp, Homo sapiens
cctcttcactcctggttctcaggccttcaggctcagactggaatctacaccaacagctttgtggctgtcatgccttcaaactacactactggcttccctggttctccagtttgcagactagattgcgggacatctcagtctctataattgtgtaaaccaacatcttctaataatctcttagtatataaatatataaattctcccattggttccatttctctggagaactctgactgatatacaacgtaaggctagaaattcaaaacctgcctatgwttcatacgaaggccaaaaagttaagaaacttgtttctgagagaggcaccatcacaagtgggaaattcagcattggctgtcctctctaagctggtgatgatggtaggaggtgttgttatagactgagccccctgatagttatgaggatgacaggatccagaaaccagagaggcaagatggtggcagttaaccatcagaagaaaggtagctgagtgagaggtaaaagtgagttctaac

SEQ ID NO: 311050 - DNA, 512 bp, Homo sapiens
cctcttcactcctggttctcaggccttcaggctcagactggaatctacaccaacagctttgtggctgtcatgccttcaaactacactactggcttccctggttctccagtttgcagactagattgcgggacatctcagtctctataattgtgtaaaccaacatcttctaataatctcttagtatataaatatataaattctcccattggttccatttctctggagaactctgactgatatacaacgtaaggctagaaattcaaaacctgcctatgtttcatacgaaggccaaaaagttaagaaacttgtttctgagagagrcaccatcacaagtgggaaattcagcattggctgtcctctctaagctggtgatgatggtaggaggtgttgttatagactgagccccctgatagttatgaggatgacaggatccagaaaccagagaggcaagatggtggcagttaaccatcagaagaaaggtagctgagtgagaggtaaaagtgagttctaac

SEQ ID NO: 311051 - DNA, 605 bp, Homo sapiens
gtatagaagtatgcataattttttcaaaatcttgacatgccactgggcactagtaacaatggagtcttgatcatggcacacaacttaaccatgaggcccaaatattccctcatgcactgggttctgtcagatccaacaaatcataagtgaagataagactaggacaaataaattataaaaattgaaaataatgcatccaaaattatggatgaacagagccagaggtcatagcaaactacacaagaagatgactaagacatccatgtcatccaccactttggctatgattatttttttgtgaggctgctccttaatgctcacctgatggaggaaaattctcagttctgttcagagatgggtaacatggaatgttgaaacaagctgaaagaggtattaaagccccaytcgggactatcaatgagagagatagttgagagaaaatcctcccagttggaagatcttcaggaggaatttttggtcattcactttgtatgtaagggaaattgttaaaagctattactcatgtaaagcagtgaataacttagctagttaggaaactgtaggaaaattagactacaaaattggaaggaggtctgaggcggagg

SEQ ID NO: 311052 - DNA, 543 bp, Homo sapiens
ctgcttcataatccagggaattctcctggatcttacgcaagaccaccaaggtggtacttctatgagtctgcaagagtcacagcattactaggcttggggtgtcccctaatgcagatatggctgtgatgaccaaagacttagactaaaacactcaattccatttgaatacttggaaagccttatcaagaaggatggctacaaataagcccagactacaaatattaaaataaatattgaattcctcaatgcccagatatagatgaacatccacaagcattaagacgatgcaggaaaacatgacctcagcaaatgaactaagtaaaacaccaatgaccattttagggtgcaagaaataaattacctcctttcagatagagaattgaaaatagatatattgaggaagcccagtgaaattcaagataactcatggaaggaatttagaatactatcatataaatttggcaaagagattaaaacaktttttagaaaacaatcagaaattctggacctacaaaattcaattaacgacctgaagaatgcatc

SEQ ID NO: 311053 - DNA, 533 bp, Homo sapiens
tacctataagaaacaacacttcactgtaaacacgcacataggctaaaaataaagggaagaaaacaaacattccatgtcaatggaaaycaaaaaaaaaaaaaaaaaagaaaagaaaaagtagccatacttatattagataaaatagattctaagacaaaaaccattaaaagagatgagaaagtcattatataatgttaaaggagtcattttagcaagaggatgtaacaattataaatatatgtgcattcaacacttgagcacccaaatatataaaccaaatattactagagctaaagagacagatagaccccaatacaataatagttggagacttgaacaccccactttcagcattggacagaacttccagacaaaaaattagcaaagaaacatgagacttaattggcactatagatcaaattgacctaataaatatttacagaacatttcatccaatggctacagaatacacattcttgtcctcagcacatggatcattcttgaggatagaccctatattatgttaggctaca

SEQ ID NO: 311054 - DNA, 533 bp, Homo sapiens
tacctataagaaacaacacttcactgtaaacacgcacataggctaaaaataaagggaagaaaacaaacattccatgtcaatggaaatcaaaaaaaaaaaaaaaaaagaaaagaaaaagtagccatacttatattagataaaatagattctaagacaaaaaccattaaaagagatgagaaagtcattatataatgttaaaggagtcattttagcaagaggatgtaacaattataaatatatgtgcattcaacacttgagcacccaaatatataaaccaaatattactagagctaaagagacagatagaccccaatacrataatagttggagacttgaacaccccactttcagcattggacagaacttccagacaaaaaattagcaaagaaacatgagacttaattggcactatagatcaaattgacctaataaatatttacagaacatttcatccaatggctacagaatacacattcttgtcctcagcacatggatcattcttgaggatagaccctatattatgttaggctaca

SEQ ID NO: 311055 - DNA, 575 bp, Homo sapiens
gaaaaaaaaagaagcgtatagattaaaaaagtggtagaacttcaaataagcaacctaatgatgaatcataaagaattgggagagcaagagcaaatcaagagcaaaccaaacacacaattagtacaacaaagtaaatgataaacatcagagcagaaataaataaaattgaaagaaaagatcaacaaaattaaaaattgttctttgaaaaggtaaacaaaattgataaacttttagccagactaagaaaaaagagaaggcaaataaataaattagagatataaaaaggacacattacaactataattatatcacaaaaatttaaaggaacattagaggatacggtgagcaattatataccagtaacttggaaaacctagaagaaatggatgaattcctagacacatgcaagtaagattgaaccatgaytgaaccatgagtgaaccatgacagaacccaaaccctgaggagaccaacatcaaggaatgagatcaacgccataataaaaagtctctcagcaaggaaatggccaggactcgatggttttactgctgaacttaacaaacatttaaaaaact

SEQ ID NO: 311056 - DNA, 570 bp, Homo sapiens
ttttcatcagttttattgaattatcatagactattttaattttatgacatcaatgtacacattaacattgataatgatcctgttaaagaaaaactattctaaaacttattaaaaatggtaaggaagtctttattcaagactattgcaatagttgtcaatattactgtaataagaaaggaagattggggttacccccaaatacaacaaagacaagtgggaatttatagcctggagcatctttgcagggatcagggtcgagtgaattgaaatttactactaggagacatcaaaggtaggaggaattcttgctaaactgacctaatagaatgcctgctgaaggcgggccaggatggtaagatatttagcaggtagtaggggatgaggaattgccagataccaagtgatcaggtatcaaaggcagaaggattctctctaaattgtcttagcaggattcttgctaaaaccagactctagaaagttgaaaagaaaagcccaaattcaaggcctacttgaaaaaaacggcttaaagaagtctsactaaagtttggtcaaggagagtccatcctaagc

SEQ ID NO: 311057 - DNA, 595 bp, Homo sapiens
tgtatagtaatttttatgtttaactcgataattgaataaagtttcatttgtatttttaattttttattaaactacttcaaaatttataaatttttagaaactaatttatttctttagctctaaaatgattagttttagtgattcctctgtagcaaatgttttctagtgtactttgacatgagacataaagakctgtgtagtttaatgacattcccacaagcctgtctgtagccatttccacaaacctccttgtctgtctctgactcatttttttccttctaggcactaaccattaaaaaaccgtctaataatcttccagattttatgcattctttacctcaatccttttctattcatacagaggagataatcatttgtactacccaaaattctgcctgagagaatattttctcatcactatcctttataccacactgggtggggctataatataatacaatgccttgcacaaacatactgaactgacccgtttgtgaatcaggccgttttttgttttgttttctctttcatcagctaatcaaatcaggtgtgagtcctgtgaaatgaaacagtaaataagactccaaacttacca

SEQ ID NO: 311058 - DNA, 581 bp, Homo sapiens
gctctactatctccaccaatcagaactaaacaagcttgaattatttgtttgcataaatggacataattgagaaccagggctggaactttccctacttgaaccaaactcttcctttgctctttggagagcactttccttttcacttgggaagctatgcctccctaatctgcacattattttgtttatatacagaaaataaagctctccccttttcctttgcagatctcatggtattttttaaacattttttggtgatgtggatggaatctgaagtgtcccccaagcaccttcccagtgctgtctagacaaatgcatcaggcctacaagagcccctygagctcagttatcttctcatctgtgttgaggagaatcaagtaagccctcttggatcgaaggtctcccatttttgggttgaagtcttggagactttactttcttcggggagccaatccatgtcatttggctccgtgtgccccatgggtgggggtaggctcacaccttttggggtatgctcacattttgcaggatacacttgtgcttcatggggtatgctcacatttgatgttctgtggggatgccca

SEQ ID NO: 311059 - DNA, 560 bp, Homo sapiens
accgcattctgtctgtatgttgggtagttttggatgatatcctggacatatacatgttaaattgtgggaactctgaagcctactatgttcaggcaatgagtgttatttttatttattttagcatgtacttttcttcactaggcttaacctgaaaagtcatttgaggcagcaactctgcctcagttcagaacttttttttttcttcctttccagctgagttgctttgtgtctattctgcatatgcatcgtttgagagtctgtcaggatgtggaatgacagagatgaataatgcccttttcagcttttattctctgggacatctcaataattttccagcatttgtggtgaactgcctatagttttctgattctccagaccagkatatctgttggtttttccacctttatattgagactatggtgcttgctacataaactttacttaaccccagagtaaaagctgtgtagagctccatgtttaacttcctccaagccagggtgtacacttcaccacacttggcctgcttttgtccattatctagcatgttcagtatagcaatt

SEQ ID NO: 311060 - DNA, 583 bp, Homo sapiens
aaaattaaacacctttagactataccatagatgaaaatctagctgaactgggatttggttaaaagtttttagatacatgatacatgaaaaagacacagataagctaggcctattgaaattaaaatttcataagagaaagacactattaagaaaatcagaagaaaagccaaaatctgtggaaaatatttgcaagataaatatctgaaaaggttttgtttccaaactatacaaagaactcttaaccttaaaaataggaaagaaacaacccaattcataaatatgyaaaagatctgaacaagaaatctcagcaaagaagacagacagatggaaaacaaaaatatagccagatactcaacattgtttgccattaggaagttgcaaattcaaataataaggatatatgagtatacttgtattacaatggctgatatttaacagcaagtgacaatatcaactgcttgcaaaattttgaagtcacaggaactcatttttattgctagtgaattataaattgatacagccactttgatgggcagtttcagaagcttcttacaaagtgagacataatcttaccatatatttc

SEQ ID NO: 311061 - DNA, 549 bp, Homo sapiens
tgggctaaccatcctaattccactatatcacatactgaaattgaacagttatgtaaatggatgttaaatggtaggaccaagatttcatattgctagagtgggaggtacagagaaacaaaggaaggagtctagcatgacccatgttgtttaatgttacaatgtaaataaataatgattacgtatagaaatatttaaagatatgtgaatatatacaggtaagcatacacgcataaatctcctaactctgtcagctgagagagcctagcagcactgaatctactttagcaaagggcatacctagcacccagatcttgaagtctatcattctccagtaaagggaactagagttcctgggagtaatggctgattctaggactggggaaggaaatatacagatgaaccggggtatcttgtatgtgtagataattaaaayatgaaaaacaaacaaacaaacaaacaaacaaaaaacacacaaggggcacaggaacaaaccaagaaagctctaaatggccaaaggcagaacgatttgttcaacaacataaataatgt

SEQ ID NO: 311062 - DNA, 615 bp, Homo sapiens
catgaataggaatttcaaataatttatgtaaatagccctcaacgaggtagcagacatacctccccacttcttcactgtggattgtacatagagactttcttccaaagagtacatacggaaagaaaaggggatatggaataactttacattgtacaaacactacatcagacaaacgctgatcatcagcaaactcaagtcacgtgtatgtatatacccatgataggatgttatgaaaatggcagtttgcctctgtggttttcctccccaaaacacataatctcagtcagattatgtgaaaaacatcaaacagtctcataaaaagatattccacaaaatgtctttacaggactcctccaaactgtcagggtcatcaaaaacagcaagttttagaaactgccactgccagyaggagccataatttactatggtacaatgggcagcatcctggaacataaaaagaatattaggtaaaacattaagaaatctgaataaagtgtagactttagttaaaaatggtgtatcaatataaatacatgaatatatagaagctaatgtaagacattaatagcaagaaaaactttggctataactctcagtactattttcacatttttc

SEQ ID NO: 311063 - DNA, 569 bp, Homo sapiens
catgtttgagcgtctgaaagttgtaaaagaaaaataacatayagaatagaccctgtcttggcaaaactccacgaattcatgttgagtttaatggattggaaagtactataaataagtcatgactcaatattaagcaaagatctcttcctgggaactaaacaatgcatacagataaatatctgaaagagcacaagttattatgtctctataaatagaatttatttaaaaaggggctatgtcgaaagcacatgtacaaaaaaggaaaatgaattgctttttgcttttttaaacatctttaagcacattcccaattattttctatttccttaaaaaagtcacttacatacatataagaaaagcttcttatataggatcaatacattttattgatgcataataattttacatatttatggagtacatatggtattttgatacatatatacaatttgtagtaatcaagtctgagtatttaagatatccatcatatgaaaaatgtatcatttctttgtgttgggaacatttccaatattctcttctagctattttgaaatatactgtaaattatt

SEQ ID NO: 311064 - DNA, 569 bp, Homo sapiens
catgtttgagcgtctgaaagttgtaaaagaaaaataacatacagaatagamcctgtcttggcaaaactccacgaattcatgttgagtttaatggattggaaagtactataaataagtcatgactcaatattaagcaaagatctcttcctgggaactaaacaatgcatacagataaatatctgaaagagcacaagttattatgtctctataaatagaatttatttaaaaaggggctatgtcgaaagcacatgtacaaaaaaggaaaatgaattgctttttgcttttttaaacatctttaagcacattcccaattattttctatttccttaaaaaagtcacttacatacatataagaaaagcttcttatataggatcaatacattttattgatgcataataattttacatatttatggagtacatatggtattttgatacatatatacaatttgtagtaatcaagtctgagtatttaagatatccatcatatgaaaaatgtatcatttctttgtgttgggaacatttccaatattctcttctagctattttgaaatatactgtaaattatt

SEQ ID NO: 311065 - DNA, 569 bp, Homo sapiens
catgtttgagcgtctgaaagttgtaaaagaaaaataacatacagaatagaccctgtcttggcaaaactccacgaattcatgttgagtttaatggattggaaagtactataaataagtcatgactcaatattaagcaaagatctcttcctgggaactaaacaatgcatacagataaatatctgaaagagcacaagttattatgtytctataaatagaatttatttaaaaaggggctatgtcgaaagcacatgtacaaaaaaggaaaatgaattgctttttgcttttttaaacatctttaagcacattcccaattattttctatttccttaaaaaagtcacttacatacatataagaaaagcttcttatataggatcaatacattttattgatgcataataattttacatatttatggagtacatatggtattttgatacatatatacaatttgtagtaatcaagtctgagtatttaagatatccatcatatgaaaaatgtatcatttctttgtgttgggaacatttccaatattctcttctagctattttgaaatatactgtaaattatt

SEQ ID NO: 311066 - DNA, 576 bp, Homo sapiens
agatgtctcctcagcatactgatttcctatcttttggatatatatgcagtagtggaattgctggatcatgtggtagttctatttatagttttgggagaaacctccatactcttttccatagcagttatactgatttatattaccaccaatagtgtaggaatgtaggatgtcccctttctccacatccttttcagcatttgctattttttttgtgtttcttataatagscattctaattggggtgaaatgatatcttgtggtggttttgagtggcatttttctgatgattagcaatgttgaacatttttccatatacctgttggtcatttatatgtcttcttttgagaaatgtctacttatattctctgcccacttattaatagcagtatttgttttttgccgatgagttgtttgagttccttgtatattctagatattagttccttgttagatgattagtctgcaaatattttctcccattctacaggatgtattttcactctgttgattttttcctctgttatgcagaggcttttgagtttaatatagtgccatttgttcctttttggttttgtt

SEQ ID NO: 311067 - DNA, 556 bp, Homo sapiens
ctaagacagttcactactggaacatttaaattgcaacctgaaatgtagccttatgagataacagattctaagacaggaagagaaaaaaaataccacttagacaaatgtaataaaaagtaccttacaaaaaaaaaaagggtataccatagtcttctcaaaataatgaatcacgaagaagaattgtacatgcatctgtaaagacttcagaagaatacagtttaagtcaagaattatcttgtcaggaaagttgaataaaataaacaaatatttttaaattagttagaagtcttggaatatagaataatctcttattagaaatataaatcyagccaaaaagaagacaaggtaaaagaatcatcattgagtactgtgtccatttaggtttactaatgagccaaggtgtaagtgaagaacagtggaaaaaataagattgcagataaatacggtgattgactcaactttttcttaatgcaaaggtaaaataatcaaataaaaattattaaatcaaaaatggtattaagaaaagtattggtcaggtgtgatggctcactcctgt

SEQ ID NO: 311068 - DNA, 595 bp, Homo sapiens
aatttatttatttattttttgaaacagagtctcactctatcacccaggctggagtgcartggcacaacctcagctcactgcaacctccgcctcccaagttcaagcgattctcctgcctcagcttcctgagtagctgggattacaggcatgtgccaccatgcctggctaatttttgtatttttagtagagatgggatttcaccgtgttggtcaggctgggctgaaacacctgacctcatgatctgcctgcctcagcctcccaaagtgctgggattacaggcgtgagccaccacacccagcctataaatgtttttgaatgatacatgaagatacattccaggtaacaatgaaggaaacagaaaatactcaacaaggaaggtttaagacagtgattgagatagtcatagtataattgacacagctggaagagtaatgatcataaatcgcaatgaattaagggaaattagaaaatgcaagaaccacatgaaggcttcattaattatattatctagttccagctataaagaaagattttcacagaaactagaattaggaccctatatggggttactgtatattgtgactggttagagaca

SEQ ID NO: 311069 - DNA, 529 bp, Homo sapiens
ctggaaatatttgatgggcagaactaatgayttcaaaagtccttatttccttttgcctcatctgttcttgcttcaaaggtcagctcagccttgctgggaagactctcctctcccataaatgatatacattgggttattttctcctttttctacatattgttgttccaaaattattacactgtatagcattgttttatgtgctttttgttttgtgttttgagacagagtcttgctcttttgcccaggcaggagtgcagtagcatgatcttggctcacagcagcctcaaccttctgggctcaagcaatcctctcgcctctagctgagactacaggcacatgccaccatgcctggctgatttttatatttttttgtagacagggggtcttgctattttgctcaggctggtctcaaactcctggcctcaagcaatcttccctcctcagcctcccaaagtgctggcattacagatgtgagcctctgtgcctggccaaggttgtggtttttgcagtcttttgtgatagttttata

SEQ ID NO: 311070 - DNA, 529 bp, Homo sapiens
ctggaaatatttgatgggcagaactaatgatttcaaaagtccttatttccttytgcctcatctgttcttgcttcaaaggtcagctcagccttgctgggaagactctcctctcccataaatgatatacattgggttattttctcctttttctacatattgttgttccaaaattattacactgtatagcattgttttatgtgctttttgttttgtgttttgagacagagtcttgctcttttgcccaggcaggagtgcagtagcatgatcttggctcacagcagcctcaaccttctgggctcaagcaatcctctcgcctctagctgagactacaggcacatgccaccatgcctggctgatttttatatttttttgtagacagggggtcttgctattttgctcaggctggtctcaaactcctggcctcaagcaatcttccctcctcagcctcccaaagtgctggcattacagatgtgagcctctgtgcctggccaaggttgtggtttttgcagtcttttgtgatagttttata

SEQ ID NO: 311071 - DNA, 459 bp, Homo sapiens
accagcataatagttcatccatctctcctaattcagggtctccctctcctatccayccaacccagcctcgttatgccccatttcccttctctgctctaatttttcacagcactaatcactttttaacacacacacacttattatgtttactgttcatcatgacagaagcacattacaggctagtttgaagtgtatacactaatacaaccgtttcattcttttttttacttgttttctttttctttttctttttctttttttttttttttgagacagggtctcgatgtgtagcccaggctgaagtgcagtggcatgatcacagctcactgcagcctcaacctcccaggctcaagccatcctcccacctcagcctcccaagtagctgagactacaggtgcacaccactatttgcagctactttttaaattttttgtagagacggggtttcactgtgttgcc

SEQ ID NO: 311072 - DNA, 459 bp, Homo sapiens
accagcataatagttcatccatctctcctaattcagggtctccctctcctatccacccaacccagcctcgttatgccccatttcccttctctgctctaatttttcacagcactaatcactttttaacacacacacacttattatgtttactgttcatcatgrcagaagcacattacaggctagtttgaagtgtatacactaatacaaccgtttcattcttttttttacttgttttctttttctttttctttttctttttttttttttttgagacagggtctcgatgtgtagcccaggctgaagtgcagtggcatgatcacagctcactgcagcctcaacctcccaggctcaagccatcctcccacctcagcctcccaagtagctgagactacaggtgcacaccactatttgcagctactttttaaattttttgtagagacggggtttcactgtgttgcc

SEQ ID NO: 311073 - DNA, 459 bp, Homo sapiens
accagcataatagttcatccatctctcctaattcagggtctccctctcctatccacccaacccagcctcgttatgccccatttcccttctctgctctaatttttcacagcactaatcactttttaacacacacacacttattatgtttactgttcatcatgacagamgcacattacaggctagtttgaagtgtatacactaatacaaccgtttcattcttttttttacttgttttctttttctttttctttttctttttttttttttttgagacagggtctcgatgtgtagcccaggctgaagtgcagtggcatgatcacagctcactgcagcctcaacctcccaggctcaagccatcctcccacctcagcctcccaagtagctgagactacaggtgcacaccactatttgcagctactttttaaattttttgtagagacggggtttcactgtgttgcc

SEQ ID NO: 311074 - DNA, 459 bp, Homo sapiens
accagcataatagttcatccatctctcctaattcagggtctccctctcctatccacccaacccagcctcgttatgccccatttcccttctctgctctaatttttcacagcactaatcactttttaacacacacacacttattatgtttactgttcatcatgacagaagcacattacaggctagtttraagtgtatacactaatacaaccgtttcattcttttttttacttgttttctttttctttttctttttctttttttttttttttgagacagggtctcgatgtgtagcccaggctgaagtgcagtggcatgatcacagctcactgcagcctcaacctcccaggctcaagccatcctcccacctcagcctcccaagtagctgagactacaggtgcacaccactatttgcagctactttttaaattttttgtagagacggggtttcactgtgttgcc

SEQ ID NO: 311075 - DNA, 521 bp, Homo sapiens
gaacattttcaaatgcacaggaaaactgaaagacctttacaaggaacacacatatatccgccatatatccaactggattctatcattaacatcttactattcttggccaggcacagtgggtcacgcctgtaatttcagcactctgggaggccaaggtggaaggatcccttgagcctaggagtttgagaccagcctgggcaacatcgcaagtcttcgtctctacaaaaaatacaaaaattagcygggcgtagcagtgtgagcctgtagtcctagctactcaggaggctgaggtgggaggattgcttgagcccgagaagttgaggatgtagtgagctgagatcgcaccgctgtactccagcctggggaacagagcaagatcctgactttaaaaaaaaaaaaagaaaaagaaaaaaccaaacccaaaaagcctacatcttactattctttatatatgtacatatataactatacatatataaattagagatgggggtctcactatgttgcccaggctggtcttg

SEQ ID NO: 311076 - DNA, 462 bp, Homo sapiens
attttactgggctctattatttgttcaagtgtttttatagttagatagtaaggacatgaaggggttagagagattaataatgcaaggaatgcatgctgctaacagaatagcggcaattttttaatatttcaaagttcattaataaaagactacatcataattttaaaagctgtgatggtgcccatcatacaaggacaatgtgagcattarttggattttgtacatgtcttccacacagttcacaatgccactgttaacaactgtgccaacaatttacccttctcaaggttacttgattttccatgtagaagtgtctctattttttctcagaaagcaaaaatagagaggcaaaattataggctatttgtagaaagtaaacttggaataagtatttccttctaaatgtgtgttttcaatatttttatgacatcagtatttttcaaatgaaatctatacacagga

SEQ ID NO: 311077 - DNA, 530 bp, Homo sapiens
tctgtgctctccaacctggtaactactagctacacgttactatcgaggacttgaaatgcacctggcatgactgaggaattgaatttttaggcttgtttaattacaatttgtttacatttaaacttaaccacacatggctagaggctattgtattgracagtacgactatagttctcaaatgaggtgcattatttctcatttccagcccttcaaacttgtaaatgtgttgttttttttctgcctaaaacacccccttttattttaggcagctaattattacttttccatagtattacctccttagggaagtcttcccataacataaagaccaatatgagtgcccctcttatgcaccccttgtcaccctgtaaccttattaagaatggttagagtcaatatttattgcagaatcattatcttctagttcatttacttcatttaatccatgcagaaactataagataaaattgattctttaatcatatgatttgattatcattatgcttattttacaaatgagaaatggaggt

SEQ ID NO: 311078 - DNA, 530 bp, Homo sapiens
tctgtgctctccaacctggtaactactagctacacgttactatcgaggacttgaaatgcacctggcatgactgaggaattgaatttttaggcttgtttaattacaatttgtttacatttaaacttaaccacacatggctagaggctattgtattggacagtacgactatagttctcaaatgaggtgcattatttctcatttccagcccttcaaacttgtaaatgtgttgttttttttctgcctaaaacacccccttttattttaggcagctaattattacttttccatagtattacctccttagggaagtcttcccataacataaagaccaatatgagtgcccctcttatgcaccccttgtcaccctgtaaccttattaagaatggttagagtcartatttattgcagaatcattatcttctagttcatttacttcatttaatccatgcagaaactataagataaaattgattctttaatcatatgatttgattatcattatgcttattttacaaatgagaaatggaggt

SEQ ID NO: 311079 - DNA, 562 bp, Homo sapiens
acttcaaactttccaggaagtttaaaaaatccctctgccacataatgggtctcaaattggtggagggtagtttttctcctcttgggagaagagaggaaacacaaaatatttccaacaacttgatccttagagattctgtctcttatatcgaactatcttaatctatcccatctctttcttttatgtagtctagaggtagtgataggctaagactgacagaactaatttttgcctaccatacgaataagtcctgcatagatattctggcaccacatagaagacatggtmatttagcaacttaacacttttgttctgtgtgtggcactcaataggaactgtaataacaatgtcccatttttacatcctgtaatgtatgcatcttatttaaatgttagaaattccttgatcatatttttgggggcattccgagaaatcgtgtgtatctatttcaaatgaaagactcaagggttgaaaagatgtttacctttccaacaatagtttcaagccaattcatatcactgaaggtgtgtttccagttggcaagtcttgcactgaagtattc

SEQ ID NO: 311080 - DNA, 555 bp, Homo sapiens
aaacctggtctttgatatacaaagtatttattgagaaaatactgtttgaaatatctgctaggcaatgaagagaagagcaagtatggtcccccactcacctgacccctgctcctactaaagagcttatattttttgttagaagataggaggtatgaataagtctcaatcagtatacgtctgcaagagctgaatatcaaataagtgttaaacaacaaatatctactacaatgcaggtcactcagtaggcattcaataaatatttattaaataaaataaataaggaagagggtgaactgaactgtcccagggcatcaggaatatgcagaaaagatgatatgggtcaaaagggaggttcttgatgttttattttacccattaactcctaattgatgtgactataataygatgaatgaagttgtttcgcttggataagatagattgcattctttcaatgacttcaataggaaaaaaattgagtcactgccttgggaatgaaatagatggaagaaaggaaggaataaatcaggtgaagatgaaaaccctcagcttggggct

SEQ ID NO: 311081 - DNA, 563 bp, Homo sapiens
gtgaagatgaaaaccctcagcttggggctgtctttatattcagtgtaagaatcactgcagaatcttccccactgtaattttcaggttaatctgccagacacagttcataagtgggaatagaggtagagttttgctttgtttatttctaatgttgattttttaagtctgtcaatacacaggtggtagatttggccaggggctgcaattgaaactgttctttcttttaagttttgaagaggtgcagagttaacttgacttaaatttattgtgagaagtttttcctaaatgaaattcaggctttgggaaggggaatttgagccatagagaagtaggagagaggtggagggtgttttatttaaccagtgcagaagtccactgcttaagggaagtatagcttggaccttctagaaatgaggcaagaaagtatttctttcaaaatgaaaaataccatgaagaagcagactgtagctgcatcattactrttatatggtgaaggttatttaaaatcttagctagttggtttttctgtgttgtgaaccttactgttgattttctttcctaaa

SEQ ID NO: 311082 - DNA, 572 bp, Homo sapiens
atttttgtgtaaaacagtctctgtatttatcactccattttcttacactctttcttcttcctttgtttctttcttcattcctaccattcttcattgtatagttacattacttctttttgttctttatctcttatgtcttttcttcccragaaccaacttgtagctctgtcaatgtcacttttctgtttccagtattattaaatctgtcatcattaccaacctattcttcctgaatttataagatttattctttctaataataataaagagctgacttgtgaatgataaaagtttattttttattttactctttgtagattaaacatgaaagatatttgaggtagtatatatttaccttaaaagccttataaataaatgtactctcataaatgaaaattaactattaaaatttaatatgtggtattttatgtttttattataaatttctaattagtctttagttatttggatttaaaatttagtgaaggattatatagaaaagcggttacaaattttcattgttaataaatgacagtagttaatgtgatgtatttaatagcttgtaagtgaaa

SEQ ID NO: 311083 - DNA, 572 bp, Homo sapiens
atttttgtgtaaaacagtctctgtatttatcactccattttcttacactctttcttcttcctttgtttctttcttcattcctaccattcttcattgtatagttacattacttctttttgttctttatctcttatgtcttttcttcccaagaaccaacttgtagmtctgtcaatgtcacttttctgtttccagtattattaaatctgtcatcattaccaacctattcttcctgaatttataagatttattctttctaataataataaagagctgacttgtgaatgataaaagtttattttttattttactctttgtagattaaacatgaaagatatttgaggtagtatatatttaccttaaaagccttataaataaatgtactctcataaatgaaaattaactattaaaatttaatatgtggtattttatgtttttattataaatttctaattagtctttagttatttggatttaaaatttagtgaaggattatatagaaaagcggttacaaattttcattgttaataaatgacagtagttaatgtgatgtatttaatagcttgtaagtgaaa

SEQ ID NO: 311084 - DNA, 465 bp, Homo sapiens
tagaaaagcggttacaaattttcattgttaataaatgacagtagttaatgtgatgtatttaatagcttgtaagtgaaagggagagtggaattgaaggcagtgtatgggatctaagttctaaatagatgtaattaatcaggaataataatagcatagtttattagttattagaatgatgctgtttttaacagaaagaagataaatcgacagttcagaaaagatggggaatatacagaatatattttgtattagtcaggatctgatcaatacacagaaaccacacagaaaactgagcaaagtttaatataaagaattgttaattagcacacagaattagagtaacacgattagttaataagacttaaggaggattctaaagaattaaaaataagcagatttaaggaacaatcactagctcaatgacagarcacccaatgtacagttccccgcacacagtctccttgc

SEQ ID NO: 311085 - DNA, 605 bp, Homo sapiens
tggatatatgcataaagagattattttatttttatctgttgcagactatgtgaactgtatacccaattcaggttagtgaaaaccagacaaaataagtttagttaaagtccatacatagttactggatactctcaattagaattaggcacttaaatatgaaataagttacaacaaaagttgtgaaagaagagtaaaattaaaatgatcaagtgcttgtgcctgatgtaccaggttgcacgaagatgagtamgattgcaaaagaagctgagctcaatagtagcagctcagatacaattagtagatatcaactttgtatcctagaacatgatttttgatggttactcaaatctacaacctctatattagaaaaactttgctattttattattttgtcatcatttgtaatatccattttaattctactaggtttttcttttaaaatacacatatacacattcaaacatttaaacatctaatcatcagtgtaaaataacttctgccctaatatgatagtccaccccatccacccacccatttctgggttttcttttgataatctataaattttaggtcagatggttattattaattttatccctcatcaa

SEQ ID NO: 311086 - DNA, 606 bp, Homo sapiens
aagccttaactaatttcttatatgaaagtaagaacattggtcaataaaaatcagaattctaaaaattacaatggagatatagtggagtatgcagaagactcagagtagccttccatactcaacctcactatatttcctttgccagaggaagcagcccctcctccatgtctatagaggcccttttgtcttactcaaaaagaacctttgtccaggagagttgttttgcaagaggatgtcaattctcttcatacctactttcactatcccttaatatttctaaatttctaactacggtcagatcccagtatacctactagccaactacaaagtcaaacytagaagaaaaaggcttatacatcaaaataattataaaattttgctaatttatgtcaataatataatgaattttgggataattaaggataaattaactttagactgggctaaaattataatattttacacataaatatataagcatatataaatataaacatattcatatctatagataaacatataaattatcaacataaaatactgatcccgtgtgttagctagagactctgggagtgtttatgaatgtctgcttagctggttgactga

SEQ ID NO: 311087 - DNA, 571 bp, Homo sapiens
caacctacctgatatgtacaaatgaataagctctagctctgggacacagacacatgacttaagctactacaacaaaagatcataatctcgattccmatttccatacttgagtgaagttatactttctcccaaaatacctattgccatttacaagaataactatacttgtaaaggtagatactgaaatatttagagactactaagcactggctctgagacagcaataattcttagagatccagaacacaaacaaactccatggatgagaaggaaactcatggggattagttacaaaattgtcccttttcaaaattagactaggcatgttgggattccaaatccataccatggttatttccccagatcatagtgtctatttggaacatatgttcccaacaactagaataacccccacagtggattcgtgacccacagataaagtaatatgacacatgaaagaaagatatgacattaactaattagtagaactcctcagaggtgtgtctgtctaccaacatggtaaatcacagaaagtactacatcacaaagaaaatcactaagcatagtgcca

SEQ ID NO: 311088 - DNA, 583 bp, Homo sapiens
tgatacagaaaaagtttataatttttcatcattgattatgattttagctgtaggtttgttatatttggcctttatttcactgaagtacatttcttctatacctaatttgttgagagtttttatcgtgaagcaatattaaattttatcacatgctttttctggatctatccagataattatatggtttttgctctctattctgttaatgtgttgtgtcacatttatagatttgtgtatgttaaaccatccttgcatccctggaataaataatacttgatcatgctgaattatctttttaatgcgctgytgaattccatctgttagtattttgttgagaatttgtgcatttatgttcaccaggcatattggcctgtagttttctattcttctagtgtttttgtctggcttaggtaactgagtaatgctggtcttgtaaaatgaatttggaagtattacctgttctatttttcagacgtatttgagaagaattggcattcactgttctttcagtggtaaaattcaatgatgaagccaatagattctgggcttttctttgatgggagactttttattacagattcaa

SEQ ID NO: 311089 - DNA, 583 bp, Homo sapiens
tgatacagaaaaagtttataatttttcatcattgattatgattttagctgtaggtttgttatatttggcctttatttcactgaagtacatttcttctatacctaatttgttgagagtttttatcgtgaagcaatattaaattttatcacatgctttttctggatctatccagataattatatggtttttgctctctattctgttaatgtgttgtgtcacatttatagatttgtgtatgttaaaccatccttgcatccctggaataaataatacttgatcatgctgaattatctttttaatgcgctgttgaattccatctgttagtattttgttgagaatttgtgcatttatgttcaccaggcatattggcctgtagttttctattcttctagtgtttttgtctggcttaggtaactgagtaatgctggtcttgtaaaatgaatttggaagtattacctgttctatttttcagacgtatttgagaagaattggcattcactgttctttcagtggtaaaattcaatratgaagccaatagattctgggcttttctttgatgggagactttttattacagattcaa

SEQ ID NO: 311090 - DNA, 523 bp, Homo sapiens
ttggagatatttatttcttttcattccatttcccccaagagctgtatattgtcttcagcattttcttgtccctgcagtgtagctgctcttggggaagtacctctcttccctgagatgaactaaattttaagagttgctttccattttaatcattaacatgccatgcaatacagctactgctaattcagaattgataacgagcactaggawagtttctggattaaagaagcccaaagaaacaactagaaaggggcaatggaagaaatatcttatataaattcccctttaaatctgtgttgtggactatattttggagtgaggaaagaaatgagctttcaagtgcataattgcccttttagacaataaaaggctttcctgacattagttccatatgctgaagatggcatcttatttttcttttctataactagaaatcactagttaacacaggcattgaattccacatctatttctagaaaccacctttctatggctattttttaagcacaaaaataacagtttg

SEQ ID NO: 311091 - DNA, 613 bp, Homo sapiens
gcatcttatttttcttttctataactagaaatcactagttaacacaggcattgaattccacatctatttctagaaaccacctttctatggctattttttaagcacaaaaataacagtttgcagcttgcacagccttaaccagtaggctccagcctctattgttcttgctgtcttcactatatacagaagttcactttgcccatttagaaaaacaacacttaaatcttttggtgcaagaaagcatatacctgcaatattaatgcctttgccatttctccagattcaaaatggctttcctatcacagagaaacttcattaacccatacactgataaatcagaatttttagtaactcagatattttatatgcttctctgttacagatgcaggtatgttacctgcatcaaatgaattaasaaccaatggcataaagaacagtagctgaatcttatttataattttaaagttctttgccactgagttaactccattttccagattgtaaaggaaatataagtcttccatatgaacaattaatgtgttaaatagatataactcaagttttctatactgtaccatctggatgagagaaaggaggaataggggtagagtgg

SEQ ID NO: 311092 - DNA, 257 bp, Homo sapiens
aataccaaatgagtgatttagtaagtgggtaaaaagggtagggtcatggtggagggagtgatactctagaagtaagatggaagctgagatctaaagacaactgttgggcaaagactgagctgagcacattccagaagagggaagagctgctgtgcaaggagcagaaggaaagccagcatctctagagtggattgaaccaaaagcatgggagataaggtcagaaacwtagtcaggagccaaataatgtacagcttata

SEQ ID NO: 311093 - DNA, 634 bp, Homo sapiens
cagtagatattgagacaatactttataaagtacctggcatatayggaacgattttggcagctagaccccagatggccatgttctgttaaggattgtagaagtctattccttttaaaaaaacacacacacacaataaaaataaatagatagcttaagtgtaaaatagtatattcactttggaaaaagttgtgacagttcttataaagttaaatatatactcactttttggaaattgtaattctactccttgatatttaccaaaaaataaaaacatatcaaaaaataaaacctacacacatgcacaagaatgtccatagcagctttattcataagtagcataaactggacactcaaatttcattaagaagagaatggataaacaaattttagtatattctcacaaaggaatactactcaggactaaaaaatattaatacacacaacatgaacaagtctaatagatgttaccttgagctaaagaagctgaacacagaggagcatgatttcattcatatgaaggtcagtattagacaaaactaatcaacagttttaaaaatcagaaaagtggttgcctcactgtgatggggaggaataactgggaaagactatgagagtacttactgggatgtgatgg

SEQ ID NO: 311094 - DNA, 563 bp, Homo sapiens
cagaatgaacgggaatgtgtgtgtgagaaagacagacagaattaacgtgaaaatctgatgtcaatataatgctgaagagttagtgcaactaatacttgatttaagctaaatgtggatctttccacctacarataacacagctgctttccctcatgtaagatccatctccaagagactaagctcaggattccaggattactaaatcccacaaatcctcttgagatttctgggaacaacagttaacctttgtgcacacactaacgtcaataatcacagtctgggtgggcatgtggacgatattatcccaactcagggacatggatcatctctagacagacatagggagaggatagggaaataagccatcaactctcaaatctactgagaaaaaaacacctctcaatgtacatgaaaaagccattgctcccaagatagatgtcttttttttaaaaaagttgaaactctactaaaatactagaatgtttctggtgcagccccactgaaagacaaaaacagaatgaatgagctcaggcccctcaaactttcaattgtaaagaaggaag

SEQ ID NO: 311095 - DNA, 580 bp, Homo sapiens
aattctactgaaactattacaaaagattgagaagcaaggaatcctccttaattcattcacaaagccagtatcaccttgataccaaagcaaggagagaaccaaaaaagaaaactacagaccaatatccctgatgaatatagatgcaaaaatcctcaacaaattactagcaaactgaacccaaaaattcatccaaaaataattcatcatggccaagtggattttactccagggacagagggatgactcaacatatacaagtcaataaatgtgattaatcacatagacagaattaaaaacaaaaaccagatgtgatcatctcaataatatagaaaaagcatttgatgaaaatacagaatccctttatcataaaaaccttcaacgaactcggaactgaaggaacatacctcaaaataataaaagctatatgtgacaaacccacagccaatattatcatactaattggggaaamgctgaaagcatttatcttaagaactggaataaaacaaggatgcccacttttttcacttcagttcaacatagtactggaggtcctagctagagcaattaggcaagagaaaga

SEQ ID NO: 311096 - DNA, 630 bp, Homo sapiens
tattgaccataatgatctaaggaattttttaaatgacatataattaaattcaaagtatgtacaaaatctaaatatattttattagactgtatacattaaaatataaaaataagaaataaaaatgacttttcacctttttaatagttgtttccttctaacattttcttaccaattaaaattgatactaacaggtaccaaacttatacattacaattatttcatagaaatgaatatttttattttaaaaaatataataattattaaataattttaataaacctattccaaaattctaatttttagtctatctacttgccaataaaaagaatattatatttcattatgttacagctagagaataaaggtatatatgcacacaaaattaatagtgatgtacattgtttttatggaaaagtgttgccaaatgcaagggctacatcaatctgtgccagttgatgagtactgctgaaaccactaatcagaacacaaaaagaaaaagatgaaggtcaatacttctggggaacaatgtttattatgcaaaaatctttgcactcatgmtctctgtggggaaatgttttattaattttttacatattgactcaaaatcagtgtcttttctcttatctgaat

SEQ ID NO: 311097 - DNA, 509 bp, Homo sapiens
aatttctgaacttgaatagtgtttaaaaaaaagttaaagcatatacttagtggggtggggtggggggaagataatttatgtactaggaaaggaaattttttatatgcaaaacaaatttatagatttctcagtgacaagtttaatcctatagtcagtcaaggtaacatttatatgtggaggtaaaataaaaatattatcaaataagttaggattcagaagtatgccaccacattatctttctgagaagaaaacttctgaggcaatattctagccatatgaaaaatgaatcataatgagaccttggaaataataagaaacaatgataagcaatgaaattagtaaaatatttggttatatttaaatgaatgttgttaaagtgattttgaagactaaaacacattttaattaaaaattcttgaaatatatggcacattaagttgaaaatattaaaaatttatgtagaaataaaatttcagatgacttccrtaacatctgtgtggtgagagagg

SEQ ID NO: 311098 - DNA, 617 bp, Homo sapiens
caaattataaatctgctatttagtagcgttgtgaccttaggcaaattgcttaatagaacccaagcttcaatatctgggggtgtaagattaattacacataactcttacgggctgttataaaacatcataaactatccttgtgcttggcatttaataaaaacattcaggacagaaaaagaaaagtattcaccagaattctggggcctagaatgttaattcttcacaggagaaactattggcatgaataataaatatgcccaggtaacaggtgcagcaatcggggatatcctatgtaggagcttagggtacaaacagtacagaagcayagaaaaaagaaagtgaatagtgaaaggaccacttcaatatgagaggcttgtggaagcagtaatcacttgcaaattctccatcaagagagacatataatgtttcctgtgggttgtgatatgctaaatccctgaatcctcagttcaggaaaatctgcagtaaagatagatgttcctcatcaaggcttctggagttacaatgcaatttctttaaaattagatgcaatacaccagttgaaccacatgggaccttggggtttttttgggaagaggtggaggttaaagtaagttctc

SEQ ID NO: 311099 - DNA, 389 bp, Homo sapiens
tgacagccctccccaagcctcagcctgttctaactctgtttacatctgaagttaacctcccttgtaagcactgttgcrtagagctatgttgtcacaatgtctagaacttggatagaatgactctttagggtaatctgaccttccagcagcaaacctctaataggaataagagaagatagcagaaatacgtccacattaaggttgtaaaatgctaatggtataggaaattatcaaaagagtaggagataaagtattctttggtggccaggaaatagggggcaaggaatacaggggagatgatgggagaggcaaagtgtcatctacatattaaagaaaataagcaagaagtgaatgagcctataattctaccctgggggttctggtgacaa

SEQ ID NO: 311100 - DNA, 677 bp, Homo sapiens
ggctgacagttcagcaggggcttctgatctagggtggatctacttacttgtcagatagttggctggcttttagctggggtgatgstgtcactgggccacaagtctgtcgccatcaagcaggccagcccacacttgttcttgggcagtgcctggggtttcaagagagttagcagaagcatacaaggcccttgagaaactggtttggaactaacatgccatcattttcaccacattctattagccaagcaagtccaaagccaacccagaatcaaagcatggcaaaatattttctgcctcttgagaggagaaggtacaaattcacatcatgaagggcataaatgcagaaaggttggtaaattggagacatttggccttcaatccacctcacatacacttacaataagttttaaatccttattttaaatgaggaggccttacagcgcagtaggcttctctttacctccctctgtactctttttcttgttcctgtgacccagccacacctgccttcttagtcacctattacacatgctgagtttattctcatctcagagtccttgatcctgctctcttctgctatattctatgcacatgattgtcacatggctctcttcaaacattttgagtatcaactcaaaaccattatcttcaaagaggcctcccatgaccaattaacc

SEQ ID NO: 311101 - DNA, 438 bp, Homo sapiens
tcattattaatgcactccatgtattataggtcagaagttaatctgacctataataatatctatatttaatcctcaacaaaaccataaatatttatcaacattccgaaattctggctatcaacctagttttyacattaactgttattcatagatgagagctattagtagctctgattaatggagctaggatctatattggcatcaccgccacactctgaattagaaattcagcactttagcactctgcttggtggacatcagttttccatgcagtcagagtcttgttgaactatcaccttaactatctttaatagatcagcattattagtggctcaagttctacaatcaacagttattgttattacctcccataacatattgttcagtaacaaccttcaagaaggaagcaggctatatagcagcctgcatgatgcagtt

SEQ ID NO: 311102 - DNA, 555 bp, Homo sapiens
aaaaatgttactcattaggtgtctaccatgtcaagaattgtctaggcttcaaggatgctgagagaaccagaaagacaaggtttctgctttcatgaacctacagttagtagggaaattaagtgtggcttaaaaataactttgtattggatcttccaccctatgtagtaggcagagttgttctctctactcctggctactgattaggaaacccaagccctgggaagagccatttttccttcaactccattgtcatgtaaaayaacatttacatgagcaaaattcatccatctctgagtttaaaactactatatatgtctttgtagcttaacagtattaaaactagatgatttataaatgtgcttactgatcaaaaaccacatcgagttttttattgtatatatctatggggttcattgtcatatatatatatatatatagatatacacacacacacatacatacatcatggaatgattaaattgagctaattaacacgtcaatcaccttacatgcttgtcattttttttgtttgtttgtggtgagaacacttgaagg

SEQ ID NO: 311103 - DNA, 521 bp, Homo sapiens
gttaaaggtgggctaacaataccagaggctccaatattgcttctttcattgtgttttgataacataatctcagaaagaacctagaacttaagagctacgtagaaatttacttacagaacaytcctgttagtttacacagaaggaaattgatcaaatcatacaagcatttggacatcaattaggatgagaagcaggacatattagtgatctttccagggtactacattataccccaagatgtacaaagtttcatgcttccatagcaactgggagttatctaagaccaaaatatatcatcaatttcctctctggagaagaacactgcttttcattaaatagcctagaatctcctttggaaagcaggtaaacataaaattaacctgcattaattggaggtaatgtgtttctttcattaaaataataccaatgacaaaatcatttcacatgctttgagaggaataaaatatcactcaggttgcaattatctgtgaagtacagtcatttcctagccagaccttaag

SEQ ID NO: 311104 - DNA, 437 bp, Homo sapiens
tttgtcctgttttcacccagaggtaagtgaaaaatgtgtctgttttcccaagccaagaagaagaggggagaatcatggctgtgcacacctcagatttatggtccaaggaactctcacttgcctagtagttattttggtctagggaaggcccctgttcatatttccttcttcctggacctacaccaatttgagcagctatcaatccacagaatagaaggtactcaggaattttttttaatgtcacaatggttaatagcatggatatggaaacaaaacaascttagtttgaatcctagcctatgtaacttcgtgtgaagtattttactttgtgtatcccagtaacctcatctttaaaaatcgagatattaattgttcctacctcatcagcttcttgtgataattaaatcaagtaaaatttaattacaagtaaaataaat

SEQ ID NO: 311105 - DNA, 501 bp, Homo sapiens
ttttgtttttttttcactcttattctctctcaggtatgtagactcattggtaaggtttcagattctatattgcaactaacctttaggaaacttgttgagttttggtgtagtatcaaagcagtatatccagttatctgagtggtctaagttattgttaatccattcaaggtgctataatagaataccgtggctggstagcttataaacaatagaatttatttgtcacagttttggaggctggggagtagaagatcaaggtggcgcagacttggtgtctggtgaaagccctcttctggaagctgtgttctcacatggtggaaaggggtgaaggaggcctctggggtctcttttataggagaactaataccacataggggaactaattatctaccaaaagacttagctcctaataccatcatactgggggtaaggctttcaacatacacttgtacatctcaaatatgaggatctgaaattgaaaatgctccaaaatctgagatt

SEQ ID NO: 311106 - DNA, 600 bp, Homo sapiens
attaaagtggtaggtgatttyttactttttatctttttagtgccagaaggatttggctattaaattgggatatatttaaagctatttatttgttaggaacaccaagagtagataggaatacccaaagtttctctctctctctctctctctctctctctctctctctctctttgcttcataatgccatatcacatagaaaatggtccctcatcgtcctcttgaaggcagggagaaagccctccagaaaataaagacattaaagagttttctgaatatacactatagttaagggctgtttgtattaatatttttcttttcagagcataaatgtcattggaaatctgattccccttctctccaccacccactcttctgctgataatagctataactgaagggagagtgggtaaaggctaacaacatcaggtaatgataaactcctattatttattctacagtgataaactaaaagatagcaagtgctgttcacttctccatgcaaagaggattcaagtaagtagtcttggatacaaagcacaaatataatggatttcttttgctaaatagaatgttcccaagtaatatttagcaataaatagg

SEQ ID NO: 311107 - DNA, 575 bp, Homo sapiens
tgagatcatgccagtgtactccagcctgggtgacagattgagactgtgtctcaacaacaacaaaatcaatgttagctaacaaaaagacagtgcaatttctcagaaaataatcttcccttgtaaataatacaaaagttagtaaacctgtttcagaaagcacatgagccattaattattatcataactaaragtagagaacccttgagtacagtgaatttcaatacttacataatgtccatcttagagaaaatagtggactgtttcctagaaataaagtgatgattttaaacataaattgaagtagaaataaatatcttactctaatagatatgaattttttctattacccctgaaaaaaaaaagagccacctttctacttcccgtagtaggtcaactgcttcttccctgaaccctagattttctcacattctcagaagtttgcatcgctggtccgtgagcctattcttcgaaaaagcaattcacctgggaccaggaaagcttaaaaacaggaaacaaaagcttgcttattcttctaggatagagggtaaggggcaaattgttttcagtattttgag

SEQ ID NO: 311108 - DNA, 572 bp, Homo sapiens
ttcagtattttgagttacttacaataaagacaaccaaggcagcaattatttcagcggattatccttctgtaattactttcaaagacaagtcagttgcaggtatactatctatgttaaaactggataagaatatagggcaatacaaaacaataattcccaaatgctctcaagcattactaagcagacaccagatacttagtgggtcacttatttttatggggtttggttgcattgcaatagtatgattattttgccattgttttattaacttggcagaattttgcaaaattgtaccacttaaaaattttgcaaartgattttagtaagaactttaaatctgtaccaaatcaactagagtacaaaatgtactctgaagacttttagtaatgaatggaaatgaagaggaaagcacgttgttatttctgatggaattgagagtatataaaatgcattctctttcttactttggataggaatgaaaggcttagggggcaacatttagaaaccatagtgtaaaaattttattagatttgaaaattcttccaaatttaagtgtgatatcttcaagaaat

SEQ ID NO: 311109 - DNA, 580 bp, Homo sapiens
caccaccagctcttttatctatgacatttgcgtagaccaagggcagtgggacctgcacagtgacaccaaatttgtcacattcacctgcagaaggatgcttttagcagccttttcctcttgatgtgaattagaaatttgcccctttttttcttttccttctttcctttttttcccccatcttgtttgcactgatatttgttttggttactttaatgcaactaatggatttagagtcacttaatttttctctgtattgttgatatttgttactgtttcacctgaattggaatgaagtctttaaatttatttgataaaaatatagagaggtctctgtgtatagtttagctaacatccactttcaccaaaaggtatttttcacatgcttgaagctatgaaaacttttgtaggacatttgtgagaaatgtaagacaggagaactgcatcaggagcttaaaatttgttatcaagagaatttagaacwgtttgaaaacagagtgtagtaaatgactcaaaatgttcagtattcggtactcaggtcttaatatagaatctccaaagagaaggtcagttggaatttgaa

SEQ ID NO: 311110 - DNA, 480 bp, Homo sapiens
tgcagcactgaattgcttataaatctctggacattccacttcaagcctttgccaatgttctcccctttttactttttgctycccatcctcctgataaatcctttcatctatcaacctttccaagcaacaacttctctctgaagccctcctaaggctcctggaagagttaataacttcttaatctacagtgtttctattatgtatacttttaccattgcattattgctctcctttataattatttatctgcaagtttgatctcctttcaatgaactgtaagtttctcaatagcaggaaccatgtcctatttattcttttatctccagcatctagaaaaattattcctactgccttggcattgaggaactttttgtagaccaaaatgaagtaaatagatggtcctcagagtacacatcattttattttctttataaaaataatagattttacagtatagtataagcgttctagttcaagaag

SEQ ID NO: 311111 - DNA, 633 bp, Homo sapiens
gtgagaactcactcactatcatgagaacaacatcgaggaaactgctcccatgatccaataacctcccaccaggatcctctcttgacatgtggggattacaattcaatatgacatttgggtggggacacagaggcaaaccatgtcattcttcggctggctttgggattggctaggttttcattttctaattctttagttgtgatgttaggttgttaaattgagatctttctctttgatgtgggcattagtgctataaatttcctcttagtattgcctyagctgtgttccacacattctggtatgttgtacctttatttggttagtaatctcaattctatctgtaatcttaattcctctgtgccacgtaaaatgatatattggttggttctatctttgattaacaatcttagttctacctgcactcttaattcacttgtgccatgtaaaataaatatttgtaggttctagagtttaggacatagtgatagttacctctgggtgaccattatttcaccaaccacatctactgatgcaattattcaaatggactgaatgatactttgaactctttcttgcttcagacatgtagtcttctgacacaggtccaagtagtgcacgtgaattgaagactaa

SEQ ID NO: 311112 - DNA, 601 bp, Homo sapiens
gaatccactcatgtgacctctagccctggtccccatactcctgccactaggggcccccagaactacttcttttccagcaactaaagcatctccttccttcatcttatggtgaaataaatgttttctctcttggaaatgctttttggggcttgttttttctgttttttgaatgttartgtacctcaggattctaaccatggctttcctcaatttatgccctatggcatcttcatgaatgatattatccacatgtacagcagcctcaactgcaatcctcaaactaatgatgacaaataaataactctagttcagaccatcttttcaagggccagctcttcgtgtccaaatgcctactgagtgtcttaacttgggtgtctcacaagcaactcaaacttttcatgtgatcatcatctgcactggtcaccctaacctcctgctcctttcacataccctaattcagtgagtggtcctaagcacacccaattatccaagccaaggatcattcttgaacattctgtcttgcgtactctcaatttcgatcatgtcttcttcctaattatctcttaaacctgatgatcttcccatccacaccaaaatcacc

SEQ ID NO: 311113 - DNA, 601 bp, Homo sapiens
gaatccactcatgtgacctctagccctggtccccatactcctgccactaggggcccccagaactacttcttttccagcaactaaagcatctccttccttcatcttatggtgaaataaatgttttctctcttggaaatgctttttggggcttgttttttctgttttttgaatgttaatgtacctcaggattctaaccatggctttcctcaatttatgccctatggcatcttcatgaatgatattatccacatgtacagcagcctcaactgcaatcctcaaactaatgatgacaaataaataactctagttcagaccatcttttcaagggccagctcttcgtgtccaaatgcctactgagtgtcttaacttgggtgtctcacaagcaactcaaacttttcatgtgatcatcatctgcactggtcaccctaacctcctgctcctttcacataccctaattcagtgagtggtcctaagcacacccaattatccaagccaaggatcattcttgaacattctgtcttgygtactctcaatttcgatcatgtcttcttcctaattatctcttaaacctgatgatcttcccatccacaccaaaatcacc

SEQ ID NO: 311114 - DNA, 594 bp, Homo sapiens
tatcactatcagcattttggttaaaaccattcaaaaagtctctaggagtttccaaactttcccacatcttcctgtcttcttttgagccctccaaactcttccaaactctgcccattacccagttccaaagttgcttttacattttcagatatctttatagtaatgtcccacttctctggtaccaattttttgtattcgtctgttctcacactgctataaagaactacccgagactgggtaatttataaagaaaagaggtttaattgactcacagttccacaggctgtacaggaggcctcaggaaagttayaatcatgacagaagggtgaaggggaagcaagcatgtctccacatggtggcaggggagagagagtgaagggggaagtgtaacacacttttaaacaaccagatctcttgagaactcactatcatgagaacagcaagggaaaaatacaccccaatgtatccaatcacctcccaccaggtcccttcttcaacactggggattaaaatacaacatgagatttgggtggggacacagagccaaaccatgtcaatatatgtctaacctactgcttctgcttttctgttaga

SEQ ID NO: 311115 - DNA, 600 bp, Homo sapiens
aacactaacaatataacatattttcatatcaattcagagatttaactatttgctttaattgctgtgtggtgtttcactgtgtgaatggctcattacctattcatccacccaatctttcacccattcagcatatgctgtgggccaatcactggggataaagcagtgaacaaaactgactttgtatcaaccctcttggagctttttattatttatgtactatatgctaaccatggggaaaatgacatgtaggacataaaatgaactaaaatatttgtaatccttctgtattccaatttaacccgccctctctgtttttaggtcttctagtagttatcataattttmacatgtttatacctctatgtcttgagcaaacggttgtttgaggtctgaataatcaaggcaggttttcttggacagtacatacacaagtgagaagcaggtgggcaggctgggaccaccacaagcatcaaggtacagaggacattggcagtgtttcattactgggtagagctacgtttgcctctttctgcaccccctaccccatgtctactagagtggtcctagtagacatgagggagaatgagaaggacagcacagt

SEQ ID NO: 311116 - DNA, 585 bp, Homo sapiens
taattggaatcgctgagcaataatcaggctttcaaatgggcagcagagactttacaagatttaaaggccamaaccactctccaaatacaagtgcaatgagtgttttgaaggtcatagaagtgaaaacacaggcagaacatacaagaaatttcccctgccaaattattcaatcatgtctcttcacacacagtgccatgcttgccttcaaaaatcattcttcattagagaataaaaagaatttgacaggatcagtgaccttctgaactaaagacacttgctgacatagaggtttttctaatattaaaaaacacattaaacaaccaactattttatgttagaagttgttgaagaagatagactttttaattcataacactaaatctaacatagaaaaactagtgcatgcttcactctgattaatggatggcactttaaaaatgctccctactcggctgggcagggtggctcacgcctgaaatttcagcactttgggcaggtggatcacttgaggtcaggagtttgagaccagcctggccaacatggtgaaaccctgtctctactaaaaatacaaaaattagccaggtg

SEQ ID NO: 311117 - DNA, 585 bp, Homo sapiens
taattggaatcgctgagcaataatcaggctttcaaatgggcagcagagactttacaagatttaaaggccacaaccactctccaaatacaagtgcaatgagtgttttgaaggtcatagaagtgaaaacacaggcagaacatacaagaaatttcccctgccaaattattcaatcatgtctcttcacacacagtgccatgcttgccttcaaaaatcattcttcattagagaataaaaagaatttgacaggatcagtgaccttctgaactaaagacacttgctgacatagaggtttttctaatattaaaaaacacattaaacaaccaactattttatgttagaasttgttgaagaagatagactttttaattcataacactaaatctaacatagaaaaactagtgcatgcttcactctgattaatggatggcactttaaaaatgctccctactcggctgggcagggtggctcacgcctgaaatttcagcactttgggcaggtggatcacttgaggtcaggagtttgagaccagcctggccaacatggtgaaaccctgtctctactaaaaatacaaaaattagccaggtg

SEQ ID NO: 311118 - DNA, 585 bp, Homo sapiens
taattggaatcgctgagcaataatcaggctttcaaatgggcagcagagactttacaagatttaaaggccacaaccactctccaaatacaagtgcaatgagtgttttgaaggtcatagaagtgaaaacacaggcagaacatacaagaaatttcccctgccaaattattcaatcatgtctcttcacacacagtgccatgcttgccttcaaaaatcattcttcattagagaataaaaagaatttgacaggatcagtgaccttctgaactaaagacacttgctgacatagaggtttttctaatattaaaaaacacattaaacaaccaactattttatgttagaagttgttgaagaagatagactttttaattcataacactaaatctaacatagaaaaactagtgcatgcttcactctgaytaatggatggcactttaaaaatgctccctactcggctgggcagggtggctcacgcctgaaatttcagcactttgggcaggtggatcacttgaggtcaggagtttgagaccagcctggccaacatggtgaaaccctgtctctactaaaaatacaaaaattagccaggtg

SEQ ID NO: 311119 - DNA, 585 bp, Homo sapiens
taattggaatcgctgagcaataatcaggctttcaaatgggcagcagagactttacaagatttaaaggccacaaccactctccaaatacaagtgcaatgagtgttttgaaggtcatagaagtgaaaacacaggcagaacatacaagaaatttcccctgccaaattattcaatcatgtctcttcacacacagtgccatgcttgccttcaaaaatcattcttcattagagaataaaaagaatttgacaggatcagtgaccttctgaactaaagacacttgctgacatagaggtttttctaatattaaaaaacacattaaacaaccaactattttatgttagaagttgttgaagaagatagactttttaattcataacactaaatctaacatagaaaaactagtgcatgcttcactctgattaatggatggcactttaaaaatgctccctactcggctggrcagggtggctcacgcctgaaatttcagcactttgggcaggtggatcacttgaggtcaggagtttgagaccagcctggccaacatggtgaaaccctgtctctactaaaaatacaaaaattagccaggtg

SEQ ID NO: 311120 - DNA, 591 bp, Homo sapiens
agactggggccaaagtgtaaaatgactacgtttatctaatacctatgtgtaatatttgaatatcctctttctatcctcgtgatctgcttaggagtgacttttttaatgttatagatgaaagcttgacttaaggaatactttcagcctgtactttggtttttctctccttcctttacaaatgatgaaaactttyaagtgtattacttggtgaaatatttcagagtgcattatttaattctgttctgttctgaaaggaacattataaaacaattcccactggcacatgaacaaatagcttccatttgttaaacaaagcctttctggtttttaactctctgacttcctgaaagttatatccaaagaaacaaatctgaaatgctgtattctctttgttcagatggaattgctacttcctaatgaattaatgttcagaaattttggcatcttggtcagcagccaaagttccgcaaactttgcatgtaacggcagcaggaaaggagatgacaaagaggtctccacaaatcctctgtagaccactgtgtaaccttggaccatgtatcgggaaaatcttgctactaattggaagcatac

SEQ ID NO: 311121 - DNA, 574 bp, Homo sapiens
aggtttggtgagtccaaaatctgatgggggaggctgggaggctggagactcagggaagaatcacagtttgagtccaaaggtggtctgctgcagaatttcctcctcttgctggggagaggtcagccctttgttcttttcaggccttctgcagattggatgaggcccaatttggagggtaatatatgcaggatataagagagcagctgctttactcaaagcccacagatttacatgtaaattrcatccaaacacaccctcacagaaatatccagaatagtatttgaccaaagagctgggccccatgcccagccagttgacacataaaattaaccatcggagtgttaccttaccaaagagccaaaatgtctcaataattcatttatacttacatctagtcagtctcattaaacttgccctctctggtatagccagaaagcagacattctcttgtttcaatctttccaccatactgtttctaactccaactcaccctttacaactttcttgaggagaccttttccatgtactcccacagtaatagcttctatttattgagtgtgagaaaagaaaaata

SEQ ID NO: 311122 - DNA, 574 bp, Homo sapiens
aggtttggtgagtccaaaatctgatgggggaggctgggaggctggagactcagggaagaatcacagtttgagtccaaaggtggtctgctgcagaatttcctcctcttgctggggagaggtcagccctttgttcttttcaggccttctgcagattggatgaggcccaatttggagggtaatatatgcaggatataagagagcagctgctttactcaaagcccacagatttacatgtaaattacatccaaacacaccctcacagaaatatccagaatagtatttgaccaaagagctgggccccatgcccagccagttgacacataaaattaaccatcggagtgttaccttaccaaagagccaaaatgtctcaataattcatttatacttacatctagtcagtctcatyaaacttgccctctctggtatagccagaaagcagacattctcttgtttcaatctttccaccatactgtttctaactccaactcaccctttacaactttcttgaggagaccttttccatgtactcccacagtaatagcttctatttattgagtgtgagaaaagaaaaata

SEQ ID NO: 311123 - DNA, 574 bp, Homo sapiens
aggtttggtgagtccaaaatctgatgggggaggctgggaggctggagactcagggaagaatcacagtttgagtccaaaggtggtctgctgcagaatttcctcctcttgctggggagaggtcagccctttgttcttttcaggccttctgcagattggatgaggcccaatttggagggtaatatatgcaggatataagagagcagctgctttactcaaagcccacagatttacatgtaaattacatccaaacacaccctcacagaaatatccagaatagtatttgaccaaagagctgggccccatgcccagccagttgacacataaaattaaccatcggagtgttaccttaccaaagagccaaaatgtctcaataattcatttatacttacatctagtcagtctcattaaacttgccctctctggtatagccagaaagcagacattctcttgtttcaatctttccaccatactgtttctaactccaactyaccctttacaactttcttgaggagaccttttccatgtactcccacagtaatagcttctatttattgagtgtgagaaaagaaaaata

SEQ ID NO: 311124 - DNA, 574 bp, Homo sapiens
aggtttggtgagtccaaaatctgatgggggaggctgggaggctggagactcagggaagaatcacagtttgagtccaaaggtggtctgctgcagaatttcctcctcttgctggggagaggtcagccctttgttcttttcaggccttctgcagattggatgaggcccaatttggagggtaatatatgcaggatataagagagcagctgctttactcaaagcccacagatttacatgtaaattacatccaaacacaccctcacagaaatatccagaatagtatttgaccaaagagctgggccccatgcccagccagttgacacataaaattaaccatcggagtgttaccttaccaaagagccaaaatgtctcaataattcatttatacttacatctagtcagtctcattaaacttgccctctctggtatagccagaaagcagacattctcttgtttcaatctttccaccatactgtttctaactccaactcaccctttacaactttcttgaggagaccttttccrtgtactcccacagtaatagcttctatttattgagtgtgagaaaagaaaaata

SEQ ID NO: 311125 - DNA, 626 bp, Homo sapiens
attcctctctccatctgggtacaaactcctgtaagtcccatcttcttctttcagttgccaactagcacaggggtcgccagccctcaggacatggaccccagtactgattgttggcctgttaggaaaagtcccacacagcaggaggtaatcaggcattgctgcctgagtgcccccttctgtcrgatcagccgcagtattagattctcatgggagcttgaaccctattgtgaactatgagggatctaggtggctccttctgataatctaatgcccgatgatctatcactgtctcccatcacacccatatgggaacatctagttccaagaaacaagctcagggctgctactgattctacattacggtaagtacgtgataatggtagaaataaagtgcacaataaacgtaatgcgcttgaatcatcccaaaaccatgccccccgccctcatccctggaaaaaatgtctttcacaaaaccagttcctggtgccaaaaaggttggggaccgcagaactagtacagcttaatgcacatggggttttagaatggaatactgaaaaaacatgatactatcaactaaagtattccagtaagaacgatggttgatgctgactggtataaaatgtttt

SEQ ID NO: 311126 - DNA, 594 bp, Homo sapiens
tccaccaggaaaaatgttctttcctgatccatgtgatatgggagtaagtgtcaattataattataggatctttcctgacatctggccacaagagtgagcaaatgatccartccttggcttcccaattatgatattccatactgcaattgatccaaggatcaaacaagatcaaaccccgaagtagggggtcacactgtgatatcgaatatatggatcctgagtgactgtttttcttctttctgagattttgacttgggagaactttgaaacctagaacttctcagaatccttttcatttgttcccaattaagtaggagccatggtttagaggaactagcccaaaattcagctccagggatggacacaaagtttcataactatattctcatctgcctggccacagtgaccatttccatcagtgtaatgtgcaggatttctatttggtgactagggtaaaagggaacccctctcttgttctggacaatatggtgtatcactgggacacccgaggctgctacagccatttgactacctgggagaagtcagtacaagaatgtagtcaacacatgaaggacagagccaaaagaaacatag

SEQ ID NO: 311127 - DNA, 594 bp, Homo sapiens
tccaccaggaaaaatgttctttcctgatccatgtgatatgggagtaagtgtcaattataattataggatctttcctgacatctggccacaagagtgagcaaatgatccagtccttggcttcccaattatgatattccatactgcaattgatccaaggatcaaacaagatcaaaccccgaagtagggggtcacactgtgatatcgaatatatggatcctgagtgactgtttttcttctttctgagattttgacttgggagaacyttgaaacctagaacttctcagaatccttttcatttgttcccaattaagtaggagccatggtttagaggaactagcccaaaattcagctccagggatggacacaaagtttcataactatattctcatctgcctggccacagtgaccatttccatcagtgtaatgtgcaggatttctatttggtgactagggtaaaagggaacccctctcttgttctggacaatatggtgtatcactgggacacccgaggctgctacagccatttgactacctgggagaagtcagtacaagaatgtagtcaacacatgaaggacagagccaaaagaaacatag

SEQ ID NO: 311128 - DNA, 594 bp, Homo sapiens
tccaccaggaaaaatgttctttcctgatccatgtgatatgggagtaagtgtcaattataattataggatctttcctgacatctggccacaagagtgagcaaatgatccagtccttggcttcccaattatgatattccatactgcaattgatccaaggatcaaacaagatcaaaccccgaagtagggggtcacactgtgatatcgaatatatggatcctgagtgactgtttttcttctttctgagattttgacttgggagaactttgaaacctagaacttctcagaatccttttcatttgttcccaattaagtaggagccatggtttagaggaactagcccaaaattcagctccagggatggacacaaagtttcataactatattctcatctgcctggccacagtgaccatttccatcagtgtaatgtgcaggatttctrtttggtgactagggtaaaagggaacccctctcttgttctggacaatatggtgtatcactgggacacccgaggctgctacagccatttgactacctgggagaagtcagtacaagaatgtagtcaacacatgaaggacagagccaaaagaaacatag

SEQ ID NO: 311129 - DNA, 602 bp, Homo sapiens
agactgcctagttcatatcatttattacctatgaaactttgtacaagttatttagcctctctacatttctattttttcatatgtaaaatagagatgatatagtatctcataaagttgtgaagattacataagctaatsgtgtttaaacagaacagcatctggtgcataagagggtcttcataaatattattatgtccctggtacgtaagtgttgtcattcgcaagatgtctagtaagatgaagaaatattataggtttccatagcttgttatttctaggaaactgctgatcactgtcttagaattcatagacttctcctgatgacttggaactttgttggaagtttcagaattgataccctaaactatttacctgtgatatttcctaaaggtcagtttctgagaatgtctgaacaatacttgaattttacagttccatgtattaagtaaattatttttgttaaatgatttcatttttgaacacttattggcacatgacacaatacaatggctgatggccacttttcccttttgctttaacaaaactcttcttaagataggacaaggagctgcttctttaggcttaggaatttccctgcacga

SEQ ID NO: 311130 - DNA, 602 bp, Homo sapiens
agactgcctagttcatatcatttattacctatgaaactttgtacaagttatttagcctctctacatttctattttttcatatgtaaaatagagatgatatagtatctcataaagttgtgaagattacataagctaatcgtgtttaaacagaacagcatctggtgcataagagggtcttcataaatattattatgtccctggtacgtaagtgttgtcattcgcaagatgtctagtaagatgaagaaatattataggtttccatagcttgttatttctaggaaactgctgatcactgtcttagaattcatagacttctcctgatgacytggaactttgttggaagtttcagaattgataccctaaactatttacctgtgatatttcctaaaggtcagtttctgagaatgtctgaacaatacttgaattttacagttccatgtattaagtaaattatttttgttaaatgatttcatttttgaacacttattggcacatgacacaatacaatggctgatggccacttttcccttttgctttaacaaaactcttcttaagataggacaaggagctgcttctttaggcttaggaatttccctgcacga

SEQ ID NO: 311131 - DNA, 602 bp, Homo sapiens
agactgcctagttcatatcatttattacctatgaaactttgtacaagttatttagcctctctacatttctattttttcatatgtaaaatagagatgatatagtatctcataaagttgtgaagattacataagctaatcgtgtttaaacagaacagcatctggtgcataagagggtcttcataaatattattatgtccctggtacgtaagtgttgtcattcgcaagatgtctagtaagatgaagaaatattataggtttccatagcttgttatttctaggaaactgctgatcactgtcttagaattcatagacttctcctgatgacttggaactttgttggaagtttcagaattgataccctaaactatttacctgtgatatttcctaaaggtcagtttctgagaatgtctgaacaatacttgaattttacagttccatgtattaagtaaattatttttgttaaatgatttcatttttgaacacttattggcacatgacacaatacaatggctgatggccactyttcccttttgctttaacaaaactcttcttaagataggacaaggagctgcttctttaggcttaggaatttccctgcacga

SEQ ID NO: 311132 - DNA, 605 bp, Homo sapiens
tttgttctatgtattggcttcttattgatgctgtaacacattaccacatacttgtggcttgaaacaacagaaacttttacagtctgagaagtcagtactctgaaatcagttttgtggagctaaaatcaaggtacaatcagggccacatccctctggagagtctaagggagatgcaatttctrtgctttttccagcttcctacattccttgatcataattcctttccctatcttcaaagccaccagggtagcatcttcaaatttctccctctctctgacctctgattctatcttcacaattcctgctttgaacttccacctcctaccaccctcttataaggattcatgtgattacattgggctcaccctataatccaggataatctcccccatctcatgagccataatttaattacatctgcaaagtcccacattcacaggttctggggatcaggacatgggcatccttggtgggggcatcattctgtctaccactgagaagtgaacacagtcaaaaaagttgcatttttctgcagctgatgggaaagaagccatggaagaagcagagacttggtttttaccacaattgtaactctaccaaccctg

SEQ ID NO: 311133 - DNA, 542 bp, Homo sapiens
ccttagaatctaagttggataagaaagaacgagaagacacattgatgggggtgagggtgattcataatgagacagtggtaaggccaatgggctaaatgtctggatggtgtcaaagcattgctaaataagatgcctcaagtagactagtagatgctaggactcaagatttcagaagcataaaatcatgaggtgaaagatgtgaccacagaaaagcagtgctgaggtgaggtgaaaaacactgattgggttcaaaggggccactcaggaattgctgtgattaagaaagctggaaagaggtaactcactgaataaaaggagttaggttgatatttgtcgacagatgcagcccatggaaactagagtaaaacatttgtttctaaacacgcttattccagctaatcctgtagttttgccttgttaacaaaaccaaaagcaaactcataagtattactagatagaaaatttaaatcattcctgtgctgatctctttcatgarttgctaataatctgggttacttggtgttatgggctaaattgcatcc

SEQ ID NO: 311134 - DNA, 587 bp, Homo sapiens
atcattaaaaaaggaattgcaaatatttggtcaacaagtcactctgctttctgctttcacaaaatcttccgtattgttgttcatgtccatgatgcctgggagggcatgtaggtgtaatccatcctgagaaataaagtcaaattctccagtgtgaatataccatgttactgcgggaaagcagggagatagtgtggaatccagtaggcttattgggaaggctctccttcactgttctcatagtgtttttatagtcacgtggcactgtctgcagatgctggccacctgcttgcttgaacagtagatataagtaactactaacaatgccaacccattcccaaatgcctcttaaatggttaggagactagatgaactgaaaatcaattttcctggcatgctactccctggtacaaagtatcttaactttgactgcccattaarttaagcagggaagcatgttttaatactaataccaggatcccatgcctagaaattatccacagttcctacttgtcaattgcagccagggtttgagaccacccccggtgaggaccaggccaaagtccaccaagggtttatttctgaaagtg

SEQ ID NO: 311135 - DNA, 588 bp, Homo sapiens
attttgtcaaattatttttctgcatctatggagataatcatataatttttctccttatttgtattaaaatgatagawcatattagctgattttctcatgatgagctttgctttgcatggaaacaactcatttggtcataatgtattattttattaattggctattgggttctctttgacaatatttagaatattttaattgatggcgatgagtgctatgatcaaatgcaagtgttctccccaaaatcatgtgatgaaactaacccccaaagtgaggtattaagaggtggggggtctttgggaggttattaggtcatgagagtggagacttcatgaatgggattcatgccttataaaggaggcatgaggttgcctgctcgccgcttctgctatgtgaggataccgcaagaagttgccctctatgaggaattgtccctcgctatacatcaaatctgcggtgcgttgatttcatacttctcaagctccacaatggagagcaataaattctcttctttataatttacccaatctaaggtattttgttaaagcagcccaaaaggaaaaagacagtaagattgacctgtagttc

SEQ ID NO: 311136 - DNA, 554 bp, Homo sapiens
gttgcagtgttctctctactgcccctgctactgctcatttttattttttttatttttaaaattttctgtttttttttttgttttttttttttttgagatggagtctaaccctattgtcctggctggaatgcaatggcacaatcttggctcactgcatcactgcaacctccacctccctggttcaatcgattctcctgcctcagcttcccaagyagctgggattacaggtatgcaccaccatgtctagctaattttttttatttggtttggtttggttttagaaacagggtcttactacattgcccaggctggtttcaaacttctgggcttaagggatcctcctgcctcagactcccaaagtgctgagattacaggcctgagccaccgcacccagcctacccacccatttttataaatgaaaataattttaataaagtattctgtctactgatttatcttctattcttatactgttttagatataatgtttaagaaatttttttaaaccctgctgttggcttttaaatataaattgactcttgcttgacagtaga

SEQ ID NO: 311137 - DNA, 536 bp, Homo sapiens
cctccctctgggtatccatcccacagaacatcacacagtctagaagaatcttcattggagctttgtggtagtagaaaacaagcaatctggttgtccaccttaaggaagtagataagttaaaaagtaggtaagggctgtgtgtggtggctcatgcctgtaatcccagcactttgagaggccaaggggggtggatcacctgaagtcaggagtctgagactggcctgaccaacatggcaaaaccccatctctactaaaaatacaaaaaattagctgggtgtggtggcaagctcctatattcccagctactcaggaggctgagrcaggggaattgcttgaacccaggaggcagaggttgcagtgagcctagatagcaccactgcacttcagcctgggtgacagagcgagactccatcccaaaaaacaagaaataaaaaatgtaggtaagtgtggtggatgcatattactgagttctatgctagaaagccaaacaattgcatttcccagactcttttgcagctagaagttaaaatagaagt

SEQ ID NO: 311138 - DNA, 536 bp, Homo sapiens
cctccctctgggtatccatcccacagaacatcacacagtctagaagaatcttcattggagctttgtggtagtagaaaacaagcaatctggttgtccaccttaaggaagtagataagttaaaaagtaggtaagggctgtgtgtggtggctcatgcctgtaatcccagcactttgagaggccaaggggggtggatcacctgaagtcaggagtctgagactggcctgaccaacatggcaaaaccccatctctactaaaaatacaaaaaattagctgggtgtggtggcaagctcctatattcccagctactcaggaggctgaggcaggrgaattgcttgaacccaggaggcagaggttgcagtgagcctagatagcaccactgcacttcagcctgggtgacagagcgagactccatcccaaaaaacaagaaataaaaaatgtaggtaagtgtggtggatgcatattactgagttctatgctagaaagccaaacaattgcatttcccagactcttttgcagctagaagttaaaatagaagt

SEQ ID NO: 311139 - DNA, 619 bp, Homo sapiens
tttttggagtagtgaaagagtatatgtctcatgtaatccttgggaggacactttccagacagttggattgtctacatcaaaatrtaaaaagtttggcaagatttctcatttctaatgttatttgctttgggatggtaaagtcttaagaaatcttttataaaacattagcccagaaataacttcaagagcttgaagtttgcttcaaattttggaagaaaaatcaagtcagaccctgtgttttacacatgtaactagtcattactgtaattaactgaatctgaaaagtgattttttatgagtataaaaataaacattgagttcatatttcagtgttatttgagaatcttctacctttaaaatcaaacatagcagtatccctagacaaagaggaagtgaaaagaagcttctggatacatatcttacaaaattctttcccagttcgttgatgtttctatgctgctcacagacccagcaactgctatatctacgtgcattagaaggctgtgcatttactaacacagatgcaccatgctgttgaaatgactctttggaaaaaacatcagtgattctattaagacactgggtattaccatagcacccgttactgaactgctgtagt

SEQ ID NO: 311140 - DNA, 619 bp, Homo sapiens
tttttggagtagtgaaagagtatatgtctcatgtaatccttgggaggacactttccagacagttggattgtctacatcaaaatgtaaaaagtttggcaagatttctcatttctaaygttatttgctttgggatggtaaagtcttaagaaatcttttataaaacattagcccagaaataacttcaagagcttgaagtttgcttcaaattttggaagaaaaatcaagtcagaccctgtgttttacacatgtaactagtcattactgtaattaactgaatctgaaaagtgattttttatgagtataaaaataaacattgagttcatatttcagtgttatttgagaatcttctacctttaaaatcaaacatagcagtatccctagacaaagaggaagtgaaaagaagcttctggatacatatcttacaaaattctttcccagttcgttgatgtttctatgctgctcacagacccagcaactgctatatctacgtgcattagaaggctgtgcatttactaacacagatgcaccatgctgttgaaatgactctttggaaaaaacatcagtgattctattaagacactgggtattaccatagcacccgttactgaactgctgtagt

SEQ ID NO: 311141 - DNA, 619 bp, Homo sapiens
tttttggagtagtgaaagagtatatgtctcatgtaatccttgggaggacactttccagacagttggattgtctacatcaaaatgtaaaaagtttggcaagatttctcatttctaatgttatttgctttgggatggtaaagtcttaagaaatcttttataaaacattagcccagaaataacttcaagagcttgaagtttgcttcaaattttgraagaaaaatcaagtcagaccctgtgttttacacatgtaactagtcattactgtaattaactgaatctgaaaagtgattttttatgagtataaaaataaacattgagttcatatttcagtgttatttgagaatcttctacctttaaaatcaaacatagcagtatccctagacaaagaggaagtgaaaagaagcttctggatacatatcttacaaaattctttcccagttcgttgatgtttctatgctgctcacagacccagcaactgctatatctacgtgcattagaaggctgtgcatttactaacacagatgcaccatgctgttgaaatgactctttggaaaaaacatcagtgattctattaagacactgggtattaccatagcacccgttactgaactgctgtagt

SEQ ID NO: 311142 - DNA, 619 bp, Homo sapiens
tttttggagtagtgaaagagtatatgtctcatgtaatccttgggaggacactttccagacagttggattgtctacatcaaaatgtaaaaagtttggcaagatttctcatttctaatgttatttgctttgggatggtaaagtcttaagaaatcttttataaaacattagcccagaaataacttcaagagcttgaagtttgcttcaaattttggaagaaaaatcaagtcagaccctgtgttttacacatgtaactagtcattactgtaattaactgaatctgaaaagtgattttttatgagtataaaaataaamattgagttcatatttcagtgttatttgagaatcttctacctttaaaatcaaacatagcagtatccctagacaaagaggaagtgaaaagaagcttctggatacatatcttacaaaattctttcccagttcgttgatgtttctatgctgctcacagacccagcaactgctatatctacgtgcattagaaggctgtgcatttactaacacagatgcaccatgctgttgaaatgactctttggaaaaaacatcagtgattctattaagacactgggtattaccatagcacccgttactgaactgctgtagt

SEQ ID NO: 311143 - DNA, 481 bp, Homo sapiens
ccaggctccccttgaactttccctgaggcccagacaacattaaggccatgggcactgccaaactcttttttactggcattggtaaagcattgactgtgrgtgaggtccaggacccagggctgtatttttcacagatgcatcctgtgcttggtatctttactttgcacccccagattcactccgctgacatctctgcctgctttctggcctggagagccccatcatgagaaccctcaagccctctggattctggctgggtgtagccaataggaagttttggtatcacagggaggttatgaccctttgctcccttgctgcaaggttacctgcagatgacactgcctctagaaagaagatcacccctgctcaaaggcagcagtctacagccctgcctcctccctccattcctagcaaggaaagttggtactactagcactgctggtactatcgctgtggtcctccgacacaggcacatgggtcc

SEQ ID NO: 311144 - DNA, 535 bp, Homo sapiens
ttctggtggtatggtctgtaacttagagaatgtgataattctatgtgcagacctggccttcaaagtcattacataagtgccccatttgttgaggtagagaacagaacagattttattcaacaatgtggttgcttgagttataactttgaaatattctgactcggagcacatgggcctccatctgtactcttgccctgggctctgcagctgtcaggggagcaccaactactggctccagcgactgcacgagtctttgtcgctcccccacactcgcacagtgtgaacagcccctgctgtgcaaactctctcggaatcatctcagtttgagggtaccctctgttttctattggtgccgttgattgatagatatcaccaaatcctaacggtacctggcatamaggttctctattttaaagaaagtattattgactggaataaatggaaaagggggagagaaggaaaccttcatataaaactaactcaaactaaacaccgaggggcaatcaaattacctgcagcaatggggctagatcca

SEQ ID NO: 311145 - DNA, 535 bp, Homo sapiens
ttctggtggtatggtctgtaacttagagaatgtgataattctatgtgcagacctggccttcaaagtcattacataagtgccccatttgttgaggtagagaacagaacagattttattcaacaatgtggttgcttgagttataactttgaaatattctgactcggagcacatgggcctccatctgtactcttgccctgggctctgcagctgtcaggggagcaccaactactggctccagcgactgcacgagtctttgtcgctcccccacactcgcacagtgtgaacagcccctgctgtgcaaactctctcggaatcatctcagtttgagggtaccctctgttttctattggtgccgttgattgatagatatcaccaaatcctaacggtacctggcatacaggttctctattttaaagaaagtattattgactggaataaatggaaaagggggagagaaggaaaccttcatataaaactaactcaaactaaacamcgaggggcaatcaaattacctgcagcaatggggctagatcca

SEQ ID NO: 311146 - DNA, 474 bp, Homo sapiens
gcttgtccagctcccaggtcagccctcttaatcagcctgccacaagcacatacaaaggtcctgaagtgggagtaagtacagagtgtttgtggacccagaggctggaggtggtgaatggcagaagttggacaggatgagacagaaaagcctggcagggcctgatcctatgagttcttgtagactcctctgtagcrctgagtgccctgagtacagcatctgtttcttctaaatgtttctgtttgtttgcttttgaacaaattaatctgatccgtgtcctcataaatccatgccggctgctctacagggagagaccgaggagggtatcatgcaaccgggcagtcaggtcacaccctaaatcccacattcttatgtctaccacccagcaaaacctagtaacatatagaattattgaaaatgaaggaaatttaaaaatgggaatttgcatgtcttcttggccccaaattggacacattt

SEQ ID NO: 311147 - DNA, 582 bp, Homo sapiens
aagttaatctgaagcacacattgggccttcctcatcttcctttggagtttggaagtcattttattatacacatcagaggacaaacattggggatctgaatcagctctggacaaacgtctcttcctttcagggtattaactctaagaggaggattaatttggacaacatccttggagaatgcattttccagttctgcaatatcaaaaagtaaatatttacctgattgtatgctttaaattacttttttctcagctgtgaaagtgtcctaattttttgtttttactttctaactctagagagcacttaaaaagtcagggcttagggttttaaatgattgtcaagtkgtcataatactaagccacaggatgacttaattgtctctgctcttcggcttcaaccactgattgtccggaattcagaccacaaaagtggctcagactttgtcctccaaagcatataatgagtgtcatgcattctctgggccacagccttgttggtcaggtcttagagcatggacttaacatatcctatcattcttttatgtccagggatcaaccctcacataataaattgtggatgttt

SEQ ID NO: 311148 - DNA, 582 bp, Homo sapiens
aagttaatctgaagcacacattgggccttcctcatcttcctttggagtttggaagtcattttattatacacatcagaggacaaacattggggatctgaatcagctctggacaaacgtctcttcctttcagggtattaactctaagaggaggattaatttggacaacatccttggagaatgcattttccagttctgcaatatcaaaaagtaaatatttacctgattgtatgctttaaattacttttttctcagctgtgaaagtgtcctaattttttgtttttactttctaactctagagagcacttaaaaagtcagggcttagggttttaaatgattgtcaagttgtcataatactaagccacaggatgacttaattgtctctgctcttcggcttcaaccactgattgtccrgaattcagaccacaaaagtggctcagactttgtcctccaaagcatataatgagtgtcatgcattctctgggccacagccttgttggtcaggtcttagagcatggacttaacatatcctatcattcttttatgtccagggatcaaccctcacataataaattgtggatgttt

SEQ ID NO: 311149 - DNA, 608 bp, Homo sapiens
ttccttgacaatcattcaaagaaacatcatatactgagaataaatcaaacccatatatgtattaaaagccagtttctccaccaacaaagtatgagagaaatttcatttctgaaactttgctttcgccacagtgtaatagcaatagcagagtctatcttataggtgctgatcatattcatgtgctctgggaagctagtacagtacctggccctcataatgtgcttggttgcyatttattaccttccctcctttgctttgaaactcaaatcctagtacacaaatcttagtttcatacatggcaggtaatcaataatattgtcttttataaaagaaatagctaggccaggcacagtggctcacacctgtaatccaagcactttgggaggctaaggtgggcagattgcctgagcccaggagttcgaggtcagcctgggcaacatggtaatagccagtccctacgaaaagaagaaaaatacaaaaattagctgcacatggtggcatacaggttgagaggctgagatgggaggatcgtttgagtccaggaggcagaggttgctgtgagatgagctagcaccgctgcactccaggctgggtgacaaaacaagatc

SEQ ID NO: 311150 - DNA, 608 bp, Homo sapiens
ttccttgacaatcattcaaagaaacatcatatactgagaataaatcaaacccatatatgtattaaaagccagtttctccaccaacaaagtatgagagaaatttcatttctgaaactttgctttcgccacagtgtaatagcaatagcagagtctatcttataggtgctgatcatattcatgtgctctgggaagctagtacagtacctggccctcataatgtgcttggttgccatttattaccttccctcctttgctttgaaactcaaatcctagtacacaaatcttagtttcatacatggcaggtaatcaataatattgtcttttataaaagaaatagctaggccaggcacagtggctcacacctgtaatccaagcactttgggaggctaaggtgggcagattgcctgagcccaggagttcgaggtcagcctgggcaacatggtaatagccagtccctacgaaaagaagaaaaatacaaaaattagctgcacatggtggcayacaggttgagaggctgagatgggaggatcgtttgagtccaggaggcagaggttgctgtgagatgagctagcaccgctgcactccaggctgggtgacaaaacaagatc

SEQ ID NO: 311151 - DNA, 637 bp, Homo sapiens
aggtaggtaaaatgaggtatatatatatacacacacacacacacacacacacatatatattacatatatattgcttatatatggcagaagttatctcagattaatggggaaatatggacaccattcaataactggtatttgtgacatagatttatactgtacataaaaagtaaatccaaatggttaaagaattgcatgtaaaagaccaatctttaaaattttggaaggaaataggaaacagasaaaaatatttttatcaccttctcatatgaaatgtttttttaactgagacacaaaatatatgattcacaaacctaacaaatgaggaattatattggaatctaaaaattccattcattaaaggtatggcaaaatagggtacagaacttcgagagtgtactcatacatttattgtcagcaaagctataaataaggtttatactttagataaagaaagcctaaaattttataaggaaaattcacataaccaaatagaataataggcaaatggtatttaaagaaattttaaagagaaggaaataaactcatttaaaaagtttcaatcccatcagggaaatgcaattttaaaaagataggaattatctcacaactaccatactgaatacagaaaaattga

SEQ ID NO: 311152 - DNA, 598 bp, Homo sapiens
tcttctgtgtgctctaatacataaccaactctgcaattttaattttatttcaaaatcctcagtgggcaaaaacctaccaacacagccacaatttttttctagagcttgtttatctttcaatttttttgctcgtacatgccctcttatctcctccattttaaagtattatacatttaaaatattgtacctgttaaataagtgatgtgtgttttcccttttctaaatttctcaaggaagagtattctctcatatttctagtttatgttgaggctgtactgcctcaagaaccctcttgaatagagagtcccaataataatcaatgacatartaatgtctaaatttttcttattcattctaaaataagaataaacaaaaatgcatataggcaattaccctattacttcactgtcaccaaagcatagtaagccctcatttaaaatcattgataagtatgtggaaattatgactttaagcaacacacatataatgaaaccaaattttttctcatcaactaaggatgttatttgaagagctgttacacattgatttacttaaagtcacagtttccaagaatctatcaataacattaagtaaggac

SEQ ID NO: 311153 - DNA, 586 bp, Homo sapiens
ttgactacaatttgtaatttttaatgaactataaaaacataagaagtttcataaggaaatcagttgagtacaaaatacctggttcatttggttttagttcagtgatgtcttgttaacaattgaattatagaaaggaataaaaacaaaatttgtccttgggtgaaaactctttacataaagagtttattttattttcctgttaattcaaaacattgcagagaatgtgattaatatccctctactaagctttgaataatgtataggatagctcagtatcaccaggggacagaaggrgttttaaaaatgaaagcacctttagcagatgaggtcattacatacacttaaactgtataaatatattctcagttggagtcccgtctataatatgattcaacatttgcagaaagctcttacttgttttcttttttaagaagattcatttgtacttttgaaggacatctttttaaaggaagtggaactgttctaacgatccacttgatcttcactcctctttttattttctccttactgcctttccttcttgtgttgttttgctaaattggcttcctttttcttaacacggcat

SEQ ID NO: 311154 - DNA, 637 bp, Homo sapiens
gtgacctggtaggcttagaatttaaacaagaaatgtcaacaacacaaatgagtgctaaggagaataatgttgatgctttttgagaagagagcacagggatttaaaaataaataaagttggagcttttgatatttggcacaattttctcaaaaaaaattatgtgcaattacactttagacccaagcacttctccatggtgtgtaggtggatattcagctctcaaatcagcagcagcaaccaagtcaaatgggtttttccaattcttagcctgagtaggtgtcagggcttgttaaagtttcatgrtgagggaaggagatttcgtcttttggcaagagtgttggggagaggttagaaatattaataatctattgttaaaattaaaacaactgaaaccagtctgtgaacatttttatagtaatttgcatgagacataagattcctaagtaactgagttgtgttttcatccagctatctttcaagtaaggtgctgtctcagttctcattttacaaataagaaaactgagtctttagaagtttgttttttgtgtttttttttttccatgtccaggaatcgaacctatattgttcaacaccagatcctaagttcataccactataagacattgtccaaaatctg

SEQ ID NO: 311155 - DNA, 584 bp, Homo sapiens
gttctaaatatttttaatatattaacattgaactatgtttaggaaactctggattaagtaaagtgcaaaatggtttcttttttgtaaaacttttgcattgtgagtttccaagagtgtagtatatgttgtagcattactcacattggtataactagggaaatattaatttgctgtatgtattattctgttttcacgctgctaataaagacatacccaagactgggtaatttttaaaagaaagaggtttaattggctcacagttccacagggctggggaggcctcacaatcatgatggaagagcagggaacatcttacatggccrcaagcaagagagaacttgtgcaggggaatgacgccttataaaaccatcagatccggtgagacttattcactatcaggagaacagcatgggaaagacccacccagacccatgattcagttacctcccatcggatccctcccatgacaggtggggattattacaattcaaggtgagatttgagtgggtacacagagccaaaccatatcactgtgtattttcagggactgcagtttctcagaacaaatttgggaaatgacacaa

SEQ ID NO: 311156 - DNA, 632 bp, Homo sapiens
cctgaaatctgaaactctctgggctgcactctaaatagcagtcaacttagacaggctgcctcaggggatcttcaggtgctgcatgtagctgccctgaaatcctcatttctgcctctgtaatatttcctaaacgcagcctactctccagccctcatctctcctctagaagatttcagtaatggataataattataaaagcagacagtgtttttttaaagctcccttagtttttgtctgctaacagctagtaaaacttttagctggattattgatattttaaaatagctgaactaacaaaattacttaattttaagagttgtttaagataagcaaatgctaattttgaatgcttttgcactgtctctaattttctacttaattcaaattaaattttaactctctctgaagaagataacgtattsttagcttacttcaagtcccattattgtgtgttgcccaatgtgatgaattttgtatgtgatgaagtgggggttctttgcaccatagtgccatgtcttacttgtccactgattgctctcaactctagaggtcaggattcagaattactctagagtatctcgatcattaggtagcatggtatatgcaaaggaaattggcctgcaagttcgaag

SEQ ID NO: 311157 - DNA, 593 bp, Homo sapiens
tattgatattttaaaatagctgaactaacaaaattacttaattttaagagttgtttaagataagcaaatgctaattttgaatgcttttgcactgtctctaattttctacttaattcaaattaaattttaactctctctgaagaagataacgtattgttagcttacttcaagtcccattattgtgtgttgcccaatgtgatgaattttgtatgtgatgaagtgggggttctttgcaccatagtgccatgtcttacttgtccactgattgctctcaactctagaggtcaggattcagaattactctagagtatctcgatcattargtagcatggtatatgcaaaggaaattggcctgcaagttcgaagactgggctctgtttttgccagtttagtgcttttctctaggtggtaattcttcctctgccagggaggaagctgggctaaatgtctgcaaggtaccttaggtcaatttaacacctactttaatttaaaaactgaactctcccttcctttaaagccggccatgtttttaagaaagtgttataaaaatattttatcttattgagagacactttattatttcatagctaatt

SEQ ID NO: 311158 - DNA, 593 bp, Homo sapiens
tattgatattttaaaatagctgaactaacaaaattacttaattttaagagttgtttaagataagcaaatgctaattttgaatgcttttgcactgtctctaattttctacttaattcaaattaaattttaactctctctgaagaagataacgtattgttagcttacttcaagtcccattattgtgtgttgcccaatgtgatgaattttgtatgtgatgaagtgggggttctttgcaccatagtgccatgtcttacttgtccactgattgctctcaactctagaggtcaggattcagaattactctagagtatctcgatcattaggtagcatggtatatgcaaaggaaattggcctgcaagttcgaagactgggctctgtttttgccagtttagtgcttttctctaggtggtaattcttcctctgccagggaggaagctgggctaaatgtctgcaaggtaccttargtcaatttaacacctactttaatttaaaaactgaactctcccttcctttaaagccggccatgtttttaagaaagtgttataaaaatattttatcttattgagagacactttattatttcatagctaatt

SEQ ID NO: 311159 - DNA, 593 bp, Homo sapiens
tattgatattttaaaatagctgaactaacaaaattacttaattttaagagttgtttaagataagcaaatgctaattttgaatgcttttgcactgtctctaattttctacttaattcaaattaaattttaactctctctgaagaagataacgtattgttagcttacttcaagtcccattattgtgtgttgcccaatgtgatgaattttgtatgtgatgaagtgggggttctttgcaccatagtgccatgtcttacttgtccactgattgctctcaactctagaggtcaggattcagaattactctagagtatctcgatcattaggtagcatggtatatgcaaaggaaattggcctgcaagttcgaagactgggctctgtttttgccagtttagtgcttttctctaggtggtaattcttcctctgccagggaggaagctgggctaaatgtctgcaaggtaccttaggtcaatttaacacctactttaatttaaaaactgaactctcccttyctttaaagccggccatgtttttaagaaagtgttataaaaatattttatcttattgagagacactttattatttcatagctaatt

SEQ ID NO: 311160 - DNA, 593 bp, Homo sapiens
tattgatattttaaaatagctgaactaacaaaattacttaattttaagagttgtttaagataagcaaatgctaattttgaatgcttttgcactgtctctaattttctacttaattcaaattaaattttaactctctctgaagaagataacgtattgttagcttacttcaagtcccattattgtgtgttgcccaatgtgatgaattttgtatgtgatgaagtgggggttctttgcaccatagtgccatgtcttacttgtccactgattgctctcaactctagaggtcaggattcagaattactctagagtatctcgatcattaggtagcatggtatatgcaaaggaaattggcctgcaagttcgaagactgggctctgtttttgccagtttagtgcttttctctaggtggtaattcttcctctgccagggaggaagctgggctaaatgtctgcaaggtaccttaggtcaatttaacacctactttaatttaaaaactgaactctcccttcctttaaagcckgccatgtttttaagaaagtgttataaaaatattttatcttattgagagacactttattatttcatagctaatt

SEQ ID NO: 311161 - DNA, 546 bp, Homo sapiens
gttttcaaacagtgctatgggaactcagtgttccattgaggtgttagtcctaattgttaacataataatcaaaatgtttaaaacccactatcctacatgttttgtacctttgtttccatcaactagtaagctacacgcttctctttttcctgtattttcatttccatattctcattcactagttaacctacccatggaatcctgatttttctcaattttcctctttctccaacagtcacactggttgctctcaggtacctttggccatctttggtaactcatattcttacacttacacacatactcctacacatatttgtgagtctccattctcttgcataatgctgccaggtagcatyctccttttttgatatttgtgttgcaggttgcaactgaggccagtattgtatgagcagtaaaatgaatttacaaagacagttgtaggtaaagaaaggcagtttcattagagacagtatgaaaatacattgcaaggaagcaatgggcaagtcagcaagagaggagctgactgcaaggacacaaaggctt

SEQ ID NO: 311162 - DNA, 585 bp, Homo sapiens
tttttgatatttgtgttgcaggttgcaactgaggccagtattgtatgagcagtaaaatgaatttacaaagacagttgtaggtaaagaaaggcagwttcattagagacagtatgaaaatacattgcaaggaagcaatgggcaagtcagcaagagaggagctgactgcaaggacacaaaggcttgctggagattttataggatggtgcttctgctttgtgctaaagagggctctatgcagtactgataacaccaaggttgcagtgagctaacttgcatttttccatcagctgagggtcttgtgataactgggcacaagaagactatgtgttctggactatgtagaaaggcagacttaaaacttatctgctttctcattttgctttccctttgtcccaccagcccaactacttctccctaatttaggacttcacaatttgtattagtcactgagacctgcactacatatattaaagcagctaataataatcagtggtgtcagcaagatcaatgaagggcaattatgaataagacaagagaaaagtagtggtgagaaaaaattacaactagaatgttggttgactagtc

SEQ ID NO: 311163 - DNA, 606 bp, Homo sapiens
agagtttggctgcctttacaattcttactttgttgcaatatcacttaattttgtagcatttaaactgcattgagttacagcaataataaagtctccaaccatcctattcagtctgtgctttaaatgaggttaaatttctactagaccatctttgaaatattacacccatgtataaaatgaggcgtttgtattttaaaacgtaattctgttgggaaatattaagacccaatttttttcaaaaacattgtcaactgcacstaagttttatacttaaaagagtggagaaattaaaaggtcataattattgataatataagtaaggacaaatcacatattgcatatagcagatactcctaatcattggtgaagcattagcacacatatttaaatcatattacacttgaaaactcaaattattttgtaaacatatcagggaacccaaaaggtcaagtgttgtttttgccttataactattataattcaaggactgagaggaatgatatatgtcatgtgatctggatgacacacaatctcatcttgacatcttcaaaaggaccactaaccaaaagaatatccctgttacagaacattcattaatacaagtat

SEQ ID NO: 311164 - DNA, 540 bp, Homo sapiens
ttgtaacgtgctttctatatatgtagttagtatatcagtgatgatgagatttaatttctggtttatctgagacttcataataaccagtaatattttactgacattcaattatgccttaaagtgaactcagtagaactagtatttcggtgaataagtcatagaatcgggcccactttgaatctttaccgcttactagcagtattgtagagttaagaatttaagttaccacttcaatatggagagaaaatatatctgcttcacttctgtacctcawtgacatatagtaatgaatcaaattttaactttttctctaattatatcttatcctttcatttttaagtttcttttgatttccaacaattcctattctgaaagtataattgacagtttaaatttccaagtcctattaaggctgttttacccacacttttcctttttaagacgacatcttggaataagatggcatggatgtcaccatgagattggggttagtggttatctttgtctcatgctggtccttgggtggctctccactggctg

SEQ ID NO: 311165 - DNA, 540 bp, Homo sapiens
ttgtaacgtgctttctatatatgtagttagtatatcagtgatgatgagatttaatttctggtttatctgagacttcataataaccagtaatattttactgacattcaattatgccttaaagtgaactcagtagaactagtatttcggtgaataagtcatagaatcgggcccactttgaatctttaccgcttactagcagtattgtagagttaagaatttaagttaccacttcaatatggagagaaaatatatctgcttcacttctgtacctcattgacatatagtaatgaatcaaattttaactttttctctaattatatcttatcctttcatttttaagtttcttttgatttccaacaattcctattctgaaagtataattgacagtttaaatttccaagtcctattaaggctgttttacccacrcttttcctttttaagacgacatcttggaataagatggcatggatgtcaccatgagattggggttagtggttatctttgtctcatgctggtccttgggtggctctccactggctg

SEQ ID NO: 311166 - DNA, 568 bp, Homo sapiens
acttttcctgaatcatgactgcaggataaatgaaccttctcagtagcccttaatattcaagatcctttgctcccacagtgatagctactagatgttcagctacttttttatactctcttctagaaaatgtaggaatctgtgggttcctgtaagggtatatggctacagtacagcttaggaatgccttcccgtgttcatttattctttctctgctctttctctgtcatctccgtattggcacatgacagtgtgcacgaccatttcttcccaggtggccaaatggtggacaaggataaactatccttgatttcagctttctctctaaacctattcaataagctttcctactctaagaacacagtttggaaagagrcatttcagatacagagtcccatatctctgatttctttcatcttatgtgctttgatggacagaaagtgcaagcttcacattttctcttcctgtctagtgtaatatttacttctttctaaagtttcttaaagtatataatgtcttatggggcaatgaaagaaactagatctcttgggttaaatttccaaggaaccag

SEQ ID NO: 311167 - DNA, 634 bp, Homo sapiens
ggttaaaatttaaaccttttaattaaggccatgtctcctaatgggccagaattttacaagtgtaacagtttaagggattttgagacaattttgctgaatcccaagtaagtactggctccatgagttttccttcctgctcctgccatcctcgacactacaggtttactgactccccctttttaggggaaatattaatgtactaagccgctggtaatttcagtgaaataatacctttttcacaacatataatttggttaggctgattgaagtcttgaaacgcactgagtggcatatgtgctaaaagaccaggggatgatatgtagattgtgatctctaggcagcttgccttgaatagcaatgaaaggaacagtaatgagattccacgggtaccttgatctggatcttgtcttttaatgataggccacattggttcttcttactacttagcttagccaatgctaatccagtttgtggagacagtggggacagaacatttcagatcttcrtatgggctctattctcttatttgtaacattctgggtgggggaatataacatgtaaccactggaggacagcagagagccaggagcagatgcagtggtgccttgcatggacacatttggagtagcagttg

SEQ ID NO: 311168 - DNA, 609 bp, Homo sapiens
aatatcccattttttaaatgtacccaattcatttaacctgagaggagctaattctttaacagggaagaagaccaaatgctagagtgtgtttcctttgggaagggaggagagcttgcttaattataaggctaagtttttcaacaggacttctgttaaatgtgctgcttgtttgttttgttttcttttgtttaaaattttattactgtgtcaatctgctgagcatatttgataactataaaatcaggcaaggaaaatagcagaccagtcattaatgatacatgttcttatcagctctaacagaatgcctataataatcatagctatggggaaataaaccartaggaaataccaaacataattgctcccaagtccatgagcacctaatcactgaacatttaatcagtagcaaggagagttactttatgtttcactaaacttacgagatgaatgtaaaccagtgaatccaaattacagctagattatgagtgttattcagtgatgctgactttaatctagagatccccaagtcttttgagatctgttttttcacactaaaggaataactaaaatattaggtctgagtgtgttatccagatttggctgagatta

SEQ ID NO: 311169 - DNA, 605 bp, Homo sapiens
ctagtcaaggaactgtaaatacaatttgagaaaaaaagaattaacttaatggcaaagattacccatttgaaaactccaggatgctcactttactgttccctcccaattgcaacccattccacatttaggatctgtaagatataacactgctcttccttgaatcacattctattattagagagaatattttcatttataatgaaaagaaaacctactctactctttaaaataatgaaaggattatacaaattatatttaaaggtcaaatttcaggataagctttaggtaaaatttgaccagaattctgaactctgtcttgttcactgtctaattctctgctgtcttccttgtgtttccctcatgatcacaaaatggctacagctccaggcctcacactgacaggygcaccccacattgtctagaatgagaaagggagagagcacctgtctcccagaattaccagaaaataagctgaaagtaattttaaatggaatggtgtaagtcacatgttcacctctgagcatatccatctttttgaacccaggctaccttaaatatctctggaatggaatgaatctacagtagatatctgggtttactggaaa

SEQ ID NO: 311170 - DNA, 544 bp, Homo sapiens
ttaagggtatgaatcctcctcacagaatagtaagtgagtctgtgtggtatgacagaamattcagagctaagaataaaaacctgaatctatgcactgagtctgtcatgctgcaagcaagctattttatctctccatgtttgttttcctttttgaataataggactaaattatgcctgcttgtttggattaagttacggaatatgagaaaagacctaggatgatgccagacaaatgtattaattggactattattattaactaaacataaatctgatgctcccactaacactatcatactactcaaaagatttgctgtggtttgaatgtgttttctccaaaacgcaggtgttgccaatatgatggataagaggtgggatctttaagaggtgattaggtcatgaggtctcattccttgtgaatgggattaggtggccttataaaggggtttgattgaaggagttgtctccctttgttgcccttccaccttctaccatggtagaatatagcatttctcccctgcagagtttgcagcgtcctcagtacc

SEQ ID NO: 311171 - DNA, 544 bp, Homo sapiens
ttaagggtatgaatcctcctcacagaatagtaagtgagtctgtgtggtatgacagaaaattcagagctaagaataaaaacctgaatctatgcactgagtctgtcatgctgcaagcaagctattttatctctccatgtttgttttcctttttgaataataggactaaattatgcctgcttgtttggattaagttacggaatatgagaaaagacctaggatgatgccagacaaatgtattaattggactattattattaactaaacataaatctgatgctcccactaacactatcatactactcaaaagatttgctgtggtttgaatgtgttttctccaaaacgcaggtgttgccaatatgatggataagaggtgggatctttaagaggtgaytaggtcatgaggtctcattccttgtgaatgggattaggtggccttataaaggggtttgattgaaggagttgtctccctttgttgcccttccaccttctaccatggtagaatatagcatttctcccctgcagagtttgcagcgtcctcagtacc

SEQ ID NO: 311172 - DNA, 550 bp, Homo sapiens
tacatcagtcggggtacagatgtgctaattttccatgggagcagacacaaaaagtatttaaacaaaaatgcaatcaccttgtagatattttggcatggaaatcttcttttccttggtttgccattgtaactggcctctctggcaacctgggatctgttctaaatatggttgtggaaaaaactagatagtagtaataaagcaagaaggtaattggtattttattccaagttgacctgtgaggtcatttcagttctgcaataaagcagatcgctataatagtctttttgaggtttgagcatttagaatgcttgcacttataaaattatttgaataaaaaattccacctttggggatattattttttcataattaactttcacataagcaacatagtgagtctgtggatataacctgttttgtaatttagcatctcaaaaggtacgattttgtctgatctttgactrtaatagccctccagataatataagaaaataatttagacagatcatagacatttcctgattttctgattgtgtcttaagccaagagt

SEQ ID NO: 311173 - DNA, 563 bp, Homo sapiens
tggcatgtcagtttagctcctttcttgtactgtgggcaacagtcaatgtggaaggaatgagagtgaatctgtctggtaggagtaaattgagtttctacaatagctctcttcattcaccagatgctcttcccttcattttacctgctttatagtcagtcagaaatttggcttctcagatttttaaataataagactgagtcaatgccagagaaatattcacactatttcaatggattctgaatttaggaccaagaaggacaaatcattttgaaaactccctttggatgctagtggggaatatctgagttgaaatccattaaggattatctagtagtccttggaggacatagaagtgatatggagggaaaaagagaacaaaagtattgcttcatagaatgcaaaattgagcaaggttwggcttttttttttaataacttttttttaattaccaagtctgctggaattttttttatcacatagtattccatcattatataccaaaccaaaaactgtttggcatctattaacatatcctcatatggtaagtaaaattgaatttaaaa

SEQ ID NO: 311174 - DNA, 604 bp, Homo sapiens
attaaactagattatgaaactctataaagtatagactaccaacatgttgctattacataagttccttcccctgttgtctcagaagacaaaacttagattatacatagaacccattcaactaatatttcagcatctaatttttgccagacattatgctaagaactttattcctcattgaaacagacagggagagagcaatgaaacaaattttaataaagtgaaggcaagctttaaaaatagcaggatgttttccaaaaagtacattattttaattttgcttttgaataataaattttaatgagggacagtattttaaaatattaaattacaaaacaaatttataaagtacaaggattttttwaaaaaaagttaaaaataaccttgagaataaacttgggaagactgacttgtaaaatttaagtttctgaatttggttatatgagtatgaagaaatcaaaaaatatttcagaactcaattcatattaatggagacaaattagttttgtgaatgccaatttctcctttttttggtaacagctttattgagatataattcacataccctactatctacctatttaaagtgtacaattcaatggttttt

SEQ ID NO: 311175 - DNA, 624 bp, Homo sapiens
gcttgcatactgactttaagctaatgaacaagcagtggctgacctttagaaagttattcatgacaccaaagacagccaatcaccaaccagtagtgaatacaggctcaccattcctttcacagtaatgaaagctgatagttttgaatgataaatatctgcaaaatggtgctgtgaagcatatgccacatcagatttaatttccctaacaactctatcagttgtgatattatagctacttaaaaattattattgcatttcataagtgagaaaatagaagtttagaaagtttcagtaacaaattcatagttattcagttggtgagtggagggcctgtgattagaatcagatgtctctcatattaaactytctgtaaccttcacattggctctcttaagtgtgaggtgagttggaatgacaagaaatgcttctgggtgcatttcttgttagttcctccttgagtcatctgtgaagttagtcaactgtgaacagaaagtaatattagtgagaatttagaagtgcagcattgaagatagtaacaagtctatgtcaaaaattttaaatcatgaaatatatataaaaagtatttttatatgtgattataataggatataaaaagtaaccaca

SEQ ID NO: 311176 - DNA, 618 bp, Homo sapiens
gtgaggtgagttggaatgacaagaaatgcttctgggtgcatttcttgttagttcctccttgagtcatctgtgaagttagtcaactgtgaacagaaagtaatattagtgagaatttagaagtgcagcattgaagatagtaacaagtctatgtcaaaaattttaaatcatgaaatatatataaaaagtatttttatatgtgattataataggatataaaaagtaaccacatgtagtgaagttagtgctattattgctataatataaataattataatatttatatattctaaaatatcattatagaaataatttaatctcytataaggtgaatgtgacagttaattttaagtgtcaactggattgaagtagcacagatagctgataagcattatttctgggtatgcctgtgagaatgattccttagagaatgtcatttgaatcagtggccagagtaagatagctccacaatcagtgtggatgtgcaccattcaatctgctaaggtctcagatagaacacaaaggcagaggaaaggcaaatttactttatctcttctggatgtgggagacccattttctcctgcccttggacatgagaaccctagcttgcctagactttgg

SEQ ID NO: 311177 - DNA, 511 bp, Homo sapiens
ttgaacctaggaggtggaaattgcagtgaacaccactgcactccagcctgggtgacagagtgagactctatctcaaaaaaaaaaaaaaagaaaaaaagaaaaaaaaaagaaaaagaaaaaaagaaaatagtatatgggatgaaatgataatgagctagttctgagataaaggcttaagagacatcatgtgttttcactcagccctcttgtgcttgtgtcactgaataggagagaaacatggttccagaagggggagaaatgatatggaaaagatgtgaacccaagccacagactgagtcaagtctggttaaccttagacacatccaccagaagcataatctccagcaaaccagtgactgagaaataaatacttgttttaagaacccactaaatttgggggttgcttgctacacatyattattatgacaatagctggataaggaagcatcagaaagccctggtaagagataggaaatatgtgtcaaatgtacttgctgaaaaatcacaatgg

SEQ ID NO: 311178 - DNA, 576 bp, Homo sapiens
gaaactgattatatcaacaatctctttatatctgtcaaaattgatcattattctataattcccatcttaaaaaaactttaaaaaatgaaatgtaatagaagtatgaagattaaggcaataaactagactaaaattttatgtgcatttaacacaaaggaccacccaacattttaaaatactctctatatgtgatggtaatttcccgcatttgtgtttcatcctcacaaaataagagcagacaaaaaaccctcttatttccagatttacttatcctcagctgttttttagttaaacatgacctacgyaaggtggtgatcacataggggaattgattatctggcaagcatgatcataaggtatttgactggacacaagggcagtggtgaaagtcctggtgtccagtcctggatgctattaatgccatgtggaggtgacaggggtatttttactatggcagccccaatgagtggttaaaaataaaatctttgaggctggctgtttgacccacccaaatattatgtgaccccttattaattattatcctttaataaatttattttctgctttaagcaaaat

SEQ ID NO: 311179 - DNA, 455 bp, Homo sapiens
taaggtatttgactggacacaagggcagtggtgaaagtcctggtgtccagtcctggatgctattaatgccatgtggaggtgacaggggtatttttactatggcagccccaatgagtggttaaaaataaaatctttgaggctggctgtttgacccacccaaatattatgtgaccccttattaattattatcctttaataaatttattttctgctttaagcaaaataatttcaatatttgctattaagtcctgatcaactcagagataagtcacaaagttgtctaatactctttataatatttgttcttgagacctatgtctttgttaaattttgttgtttgttgttgttttataacatatatatatgtatatatatatgtgtgtgtgtatatatatatatwtttttttttttttgagaaagggtctggttttgtcacccaggctggagtgcagtgg

SEQ ID NO: 311180 - DNA, 239 bp, Homo sapiens
ttatgatttgaagtactttagatatttcatgaatggaataacatagtaaatgtccttttgtgactgatttgttttgcttagcataatatcctccaaatttatgcatgttgtagcacrtgacagtatttccttcttttttagggctataccatttatctattccaccgtcaatggacatttgggttgcttccacttcttgattattgtaaataatgcagtaacaaacatgggtatgcaaa

SEQ ID NO: 311181 - DNA, 571 bp, Homo sapiens
tgtgtggtccatcattgactgaaatgttatgcaacacactgcatatggttcttttcaaatactttgaaccacttatataatcatattccagtctcatatttttatttcacwttttattttttaaacatttctaatattcttatattctatgtaataatctcataatagattaaggcagaagtggtgctatatgacttctgagaccctctccgctttggctcctttactgtcctagcctggacaattcctatttttattattattattattattatttgagatggcatctcgctctgtcgcccaggctggagtgcagtggcatgatctcggctcactgcaacctctgcctcccaggttcaagcgattctcctgcctcaaccttctgagtagctgggattacaggcgggcaccactgcacctggctaatttttgtatttttagtagagacggggtttcaccatgttgtccaggctggtcttgaactcttgacctcaggtgatccacccacctcggcctcccaaagtgctgggattacaggtgtgagccaccgtgcctgacccccatttatttt

SEQ ID NO: 311182 - DNA, 571 bp, Homo sapiens
tgtgtggtccatcattgactgaaatgttatgcaacacactgcatatggttcttttcaaatactttgaaccacttatataatcatattccagtctcatatttttatttcactttttattttttaaacatttctaatattcttatattctatgtaataatctcataatagattaaggcagaagtggtgctatatgacttctgagaccctctccgctttggctcctttactgtcctagcctggacaattcctatttttattatwattattattattatttgagatggcatctcgctctgtcgcccaggctggagtgcagtggcatgatctcggctcactgcaacctctgcctcccaggttcaagcgattctcctgcctcaaccttctgagtagctgggattacaggcgggcaccactgcacctggctaatttttgtatttttagtagagacggggtttcaccatgttgtccaggctggtcttgaactcttgacctcaggtgatccacccacctcggcctcccaaagtgctgggattacaggtgtgagccaccgtgcctgacccccatttatttt

SEQ ID NO: 311183 - DNA, 559 bp, Homo sapiens
tgtatatgcatatatatgtaccttttttagtattgtctcatataatcagtattaaaatttataaattgtaaaaatgcaagaagcagcagaaaaaaaattacctgtcagctcaatactctttcaaacttaggtcaggttaatattataatttaaaaaggaaaggaactagtatttattgtctttagtcgctattaaaccacaaagagatattaggtctgtsaacctcagtcaatccctcaagcagtgtggaagctagatgacatcctgtttttacaggtaaggctgggagttgaactctgactttaacatccacagtcttaaccatgagaccccattgtctctttttggggtgctaagaacattggctttagagaaatctcttacctgctatggaaacttgagaaaattatttaatctctcttagcctcagctactttatcagttaattacgcataaaatctgttgccttaaaataacatcataatagatacagattaaaaaaataaaaatgttggccaattattacaagtgacattcatttggagaacagtgagtgttt

SEQ ID NO: 311184 - DNA, 589 bp, Homo sapiens
ctggagttagtgcagaccccacaggttaaggrctcagtcccacaagactgcctctcacttcagatgccaattgcaagtagtgggtccccaggttacccatacttttgcgtgacttggttacaacttgagggttccaggattccctctccaggtactccactcccagaaccttgttccaaaagctcctcgtaccccattgtttagggttttcatggaggttccgttacataaacatgattgatagaatcactggccattggtaattagctcaatcttcattccaccccaggccagatagtggggcttaaagttccaaccttctaaccacatggttggttcctctgacaaccagctcccatcttccaagagtcaccacattaataaaaactcaagttatggttgaaggggccttattaggaatcacaaaagatgttcctctcacccttatcactcaggaaatttcaagggtatgtgtaaagaatggaggaagaagaccaaataagtatttcttctatcatgatatcacagaaactttatataatataatgcacaatatacttctatggcatagaaagagaagtataggcat

SEQ ID NO: 311185 - DNA, 543 bp, Homo sapiens
agagcttctttgcaggaatgaatttggggtttttttttttcacaggaacttccagtgactgagatcaaagatacatttaatttcctctgagtggaaatggccctttctctgtatttagatgttttgtaatatagctycttcagcagtaaaatcatgacaggcagagaaaagaaaataagcaaagcatatcagagccctagtgtttgttacagagcagatctaaaatattttattatagttcattcattgctgcaacctatacatttattaaatagttattggacattcatttgcttgctaattatttattgagcaccaagaattttgctaagcattgaggataaactggatgaaacaaacatagcacctgtccttgtgaaacttacaaactggtggagagatgaacaatgaaaaacaatctctcagataagtctgtgtgcacacaaaccgtgctagctgacgtgaaggggagggctaggtaatgactgggtatggtgaggatggggagccagggaaggcttctctgcacaagtgagttttagg

SEQ ID NO: 311186 - DNA, 587 bp, Homo sapiens
gccaatctactctgtaaagcattccctcgttgtttgggggagctcctgagcttcacaagagtttatgctcacaaaccaatcctcctgtcacaatgagacgagtgacatccaatacattcttccttccctggaagccagctaaaagagtctccctattgctactgytgaggatatccctaatcatattacctgggattccaccaaaagagttcttttctttctaaagataccaattccagttatgttagataggtgtcagactctgctcagagggaatatgaaggccccctcttcggttctgtgctatgctttgacaccaagaccaccttaactctctccgagtctgccccaggccttgcacttctcctctctactcctcatctccttcaagaattttacaagagaaaggataaaataaggctagacactgtagcttatgcttgtaatcccaacactttgggaggctgaggcaggaaaatcatttgaggccaggagtttgagaccagcctgggcaacatagtgagatcctgtctcgacaaaatactttaaaaattagatgggcacactggcacatacctgtagtccca

SEQ ID NO: 311187 - DNA, 561 bp, Homo sapiens
acaccaccactgcctcaggcacctctctttctgtcaaccactgagtgttactcaaccaactgaggcctcaktttccccaaaccttcagcctagttcctgagaggcggggacctcattggtgctctccttagctggagtgtccatcctggtggaggggaaatatagcataaggagcacaggaaattgccgccttcccctctctacactcatgtgaggattctccagtagcaaaccacatcccaagaattcctcaaggccaggcacatggcatgcttaaccattgatatgcccccatcatcttctactctccctctattgcagttgacaaccagtgcatcaccaatccctgttgtttctacctccttattcatctcttctaacctccttcccacgctgctctctgcttttgctccatttcaaatatttttttctcacttctcaatgggtatccctgcctcaagtctcattcttcctaaatcagtcctccacactatagcgacaatctttctgtaacaaaggtttcaacactcagtcttcctgtgcaaaacccttcagtgtctt

SEQ ID NO: 311188 - DNA, 643 bp, Homo sapiens
ggtagcccctgtatgacagattcgccacttgtggaagatacatgccagggtgatttctaatattccacattggtgcagtcatatgttgatgtgcgtaattccagctttaatgaaagcaacagtgacaattccatatgggctgcatccagatttcatggatcttaactaaactgttaactcttctacagaatggatcagactctatttctaacaagtctggcatttctcctattaggaggctgatgctgaaagcaaaacaatatttaasaatcctctgtcaagtttgtgtgaaaacaataaagtgaaggcattggtatagttccttttatgtcatcattttgggccagaaagcaactactcttttcccttgactcttctttcacacctgctgatggggcagtgagagctagcagtgtgaaaaagctgcaaactgcagagggaggttgctcccacacacctcattaggcctttaacacatttgactttgtccttccctagcacagtgcatattacaattagaagcagttgggtacttcctatttttctctgaaaggtgtaagtgggtaaccaaggagctgtcactttctggacattgccagctttgccatctgcctttggagcatcaatttactggctatttctt

SEQ ID NO: 311189 - DNA, 595 bp, Homo sapiens
tttgacatatttttttcaataaccttgaagctctttttagctctcttcctacactctaatacattctatagtctcctgtcatatcaaacttcttaaagtgaaactttattttatcacttcatttccttgatatcgtcaatgactctgttgccaattacattaaatctggagttcaaggctctttataacctttctgtccagactcatctcccagtattatactgttatttaagtatcagtcagaccaagccactcaaattttgctgaataaatggcccatttcctcatctttgcctttgctaatgtccatgttcatgtccatttkcttaccacactcttccacacttgttcacacttgcatattgtgcctgctcacagagctgatctcaatttagaaccaagacgcacatggtacctttctcaaaccacttcagccccatcttaactcccatgcatctctgtttcccgggggatacaagtctctattggttcaatactaaacatattatagacatgaaacagctattgagttgaagcattaataattataatctaatagcaagtatttatttaggacacctatttgtcaggcact

SEQ ID NO: 311190 - DNA, 634 bp, Homo sapiens
tgctgagcttagagtcaaatggaagaggcagaaaaataaatagacaattacaactttgtggagtagaacccggtaatggaaaggtcagagtgctcttggaattggagaaagaatacaaaacagggctttgtagggcagagaaactttcatttattccagctttctctgtttgagtgctcattgaaatgctaaccttgtttttctccagatattgggaaaagggctgctgttcacactctctcaagatgtggggaattatacactttgggcaggccagctcccaaggcacctggtgatctagagcaggcctgaatctaatttggtttctagtgacaaggaaggggaactctgtccagtgctacaaggaggtgacagttctgcatagaaggtgctcaggtccttgtatttggctcctcagacactgagtttaactaattacctgattccaaagataatgagagwaattacctggctgtttaatggaagtcatctcttttcttcccaagttcaagccattgcttaaactttcacattctgttttgtctgtttggagaaactatggttttcattacacatattcaactacttctgtgccttgttctctaagggatttaacagagaaaaaatgggctcc

SEQ ID NO: 311191 - DNA, 561 bp, Homo sapiens
cttgtttttctccagatattgggaaaagggctgctgttcacactctctcaagatgtggggaattatacactttgggcaggccagctcccaaggcacctggtgatctagagcaggcctgaatctaatttggtttctagtgacaaggaaggggaactctgtccagtgctacaaggaggtgacagttctgcatagaaggtgctcaggtccttgtatttggctcctcagacactgagtttaactaattacctgattccaaagataatgagagtaattacctggctgtttaatggaagtcatctcttttcttcccaagttcaagccattgcttaaactttcacattctgtttygtctgtttggagaaactatggttttcattacacatattcaactacttctgtgccttgttctctaagggatttaacagagaaaaaatgggctccatcctataaaagcatgtagttttgttgaggaaaggattggatagattaaaaacgaaaaatttcaccaaaatcatacattttaagaaatacatttacaatataaccaataattgtaatgtt

SEQ ID NO: 311192 - DNA, 626 bp, Homo sapiens
tgtggctaatgactgtaatctcagtgactagggaggctgaggcaggaagattgcttgaagccaggagttcaagaccagcctggacaacatagtaagaccccatctctaaaagtgttaaaaagaaagaaatacctagctatgtaggcatggagaaagaaataaaagtgagtattaacaccaactaatatagaccatgggtattataatttcagagagacagcaaccaataattatgagaaggataaattaaatcttccaggagacaaaattggagccagcagttgagacacttaaaggaatgagctgggtaacaccaaagaagttaatccagactaaattcataaatgaacccaggctcaagtcataaatgatgattctaattaggtttaggtttactgccatgtaggttactactgagccagcaattacgaagttcgggaaggaacacatagataatattatacatcagtatttaaggctctctcatacctcccgkgtttctcagagacattgcctgaactgacattcagtggtttcagcatcctgcaggagggggaattctcccagattggagaagctcagtgcttcaggttctctgcattttttttttttaattctggcaaggc

SEQ ID NO: 311193 - DNA, 606 bp, Homo sapiens
gtgcacacacatgtatttttaggtggaagtacaaaaaaatgaagtgtattgaggtattttggaaaatgctatgaatagcttccttgcatcgggaggaagagggccctttgttcctctgatgataatagattatcttttgaggtgtagtttgtgtccttacatctctgggtggtctgctagtatgtgctactgagagatgtagttgccaaactcagcattctttgctaaaacatatcccctcaattcttgttggccttgcagatactggtgaatcagtggcttaatttttatatttgtttccagatagcattgccctctgtttccctgggcagacttaatgcaagcccattgtctctcagttcaacatcagtgccacatgggaagatgcattaaccttgtaaacacaaacttacctccccttttatgccaggccrtgctgttccatcatcttgaactattctggggctgcttcattttagggtatagctgcctgctgtggaggtttcctcccagagttctagatggggagccagtcaagaactcccttgacatttctgctatctagcaatgcccttttctgcctaggctctgaatcactttggtgag

SEQ ID NO: 311194 - DNA, 644 bp, Homo sapiens
ttaatttttatatttgtttccagatagcattgccctctgtttccctgggcagacttaatgcaagcccattgtctctcagttcaacatcagtgccacatgggaagatgcattaaccttgtaaacacaaacttacctccccttttatgccaggccatgctgttycatcatcttgaactattctggggctgcttcattttagggtatagctgcctgctgtggaggtttcctcccagagttctagatggggagccagtcaagaactcccttgacatttctgctatctagcaatgcccttttctgcctaggctctgaatcactttggtgaggagattaggactcacatctaattgacttctttcttttttctctccacaaaatagcagactgaaagagtaagttttctttttcttgatgtgtgactcttcttactctagtgctccagaacttctggactagctttcatgatggaaaaagtgttctcttcatactaccaagaaacatgatgagctgagattccagccatagttctttaggatccacagcacgacttgcagtaaacggcgctaggtaataaaaatacagtattaccaaaaatacaatgtaagttatataaacaacaaaatacaaatgatgatgtaatgagt

SEQ ID NO: 311195 - DNA, 644 bp, Homo sapiens
ttaatttttatatttgtttccagatagcattgccctctgtttccctgggcagacttaatgcaagcccattgtctctcagttcaacatcagtgccacatgggaagatgcattaaccttgtaaacacaaacttacctccccttttatgccaggccatgctgttccatcatcttgaactattctggggctgcttcattttagggtatagctgcctgctgtggaggtttcctcccagagttctagatggggagccagtcaagaactcccttgacatttctgctatctagcaatgcccttttctgcctaggctctgaatcactttggtgaggagattaggactcacatctaattgacttctttcttttttctctccacaaaatagcagactgaaagagtaarttttctttttcttgatgtgtgactcttcttactctagtgctccagaacttctggactagctttcatgatggaaaaagtgttctcttcatactaccaagaaacatgatgagctgagattccagccatagttctttaggatccacagcacgacttgcagtaaacggcgctaggtaataaaaatacagtattaccaaaaatacaatgtaagttatataaacaacaaaatacaaatgatgatgtaatgagt

SEQ ID NO: 311196 - DNA, 599 bp, Homo sapiens
ccaattgccacaaaacaaaaattgacaagcgacacctatttaaactaaaaagcttctgcacagtgaaagacactatcagtagtgtaaacagaaaacttacagaatgggagaaaatatttgtatactgtgcatctgataaaagtctaatatccagaayctataaggaacttaaacaaactaaacaaatttacaagcaaaaagcaaacaattccattaaaaagtaggcaatgcacatgaacagacacttttcaatagaagacatatacatggcaaatgagcatattaaaaaatgctcaaaatcactaatcattaaataaatgcacatgaaaaccataataacataccatctcaccccaatcagaaatagctatcattaattaggcaaaaaataacagatgttggcaggtcatagagaaaaggtaatgcttatacaatgcttgtgggaattagttcagtcactgtggaaagcaatttggaggtatctcaaataaaacataatgactgcgggtggctagaaagatggctgaataggaacagctctggtctgcagctcctggcaagatcaatgcagaaggtgggtgacttctgcatttccaatg

SEQ ID NO: 311197 - DNA, 599 bp, Homo sapiens
ccaattgccacaaaacaaaaattgacaagcgacacctatttaaactaaaaagcttctgcacagtgaaagacactatcagtagtgtaaacagaaaacttacagaatgggagaaaatatttgtatactgtgcatctgataaaagtctaatatccagaatctataaggaacttaaacaaactaaacaaatttacaagcaaaaagcaaacaattccattaaaaagtaggcaatgcacatgaacagacacttttcaatagaagacatatacatggcaaatgagcatattaaaaaatgctcaaaatcactaatcattaaataaatgcacatgaaaaccataataacataccatctcaccccaatcagaaatagctatcattaattaggcaaaaaataacagatgttggcaggtcatagagaaaaggtaatgcttatacaatgcttgtgggaattagttcagtcactgtggaaagcaatttggaggtatctcaaataaaacataatgactgcgggtggctagaaagatggctgaatagsaacagctctggtctgcagctcctggcaagatcaatgcagaaggtgggtgacttctgcatttccaatg

SEQ ID NO: 311198 - DNA, 574 bp, Homo sapiens
gcagtatcttttaactgatcagaattttacaatgtttaaagtgagttagtcctagagccaaataaaggcactcaaaaaacaaaacctattgagtgatttttcacttctctgtgttatcttcaactgaaatagatgcaagcaaagttatattagagcaataaagcatcactatacaaacactaaataattctaggagatattaacagcagcctttagtagcatgaactgagcaggagcaaagggaagttttgaaagttaatgatgatttctaagaacaggctaagacttggaacctctggatggatatttttccagtgagcaggctttttaaggaaaatcttagaggaaggtaagtggctgaggacagggttatcaaggagctagctttgaaggtactgtgacaataatgaaatttggctttcttgtggacacccatgcattattcaattacaaatattcctggggtggggagggctgtataattgagtgtgagacattgttytaagtgctttatgtatctatgcagtctatcctataattatacttttggggaaatggaggctttgagaaggaa

SEQ ID NO: 311199 - DNA, 475 bp, Homo sapiens
gaaacttttgctgaccaccttgttatctgtcatagatatatattatgtttatggtttatcttcttatcatcagactgaacacttcatgcaaccaatgaccttgttttattcacactgctctatactctatacaaagtttctaacacatagcatgtgctcaatacatttttttcaaataaaaaagcctttttccttgttcttttcctgatgcctgtcttgctaactgctgttygttcccccaaagtacagcttatacgtcaccttccctgtaaaatcacctctgtccaacagagagttaactatactaccatcgtatttttctactgcttctgtctatatctagctctctgttggtggcgagggtgggggtggtaggtgggtgggtggcttttgtttccctttgagactctgcaataagctgaagactcttggaggatatatactgtgttttatttgtcttttgccaaatataaag

SEQ ID NO: 311200 - DNA, 478 bp, Homo sapiens
agacaatacatgatccacaacctttgacaactgatgtaagccaatagagaaatgtagaagattgagtaccagtgtcaggatctcaatatctcaccagtgtaaaatttgattcttctcatgtaaagtaatgcatagtggcatcagcctcttccctagtacttaccctggagagtagaaagggctggggaaaattactattgtataggtttgagctgaatgaagggaaaggttaagaatgattttctcaaatttacttggctcttccaccttcttactaccttgacataaatgtggttgttactatttagttacttccaacttgaatttgaccacaaagaaattgaagaaaagacacattcaaagatccctgctgccctacattaaamctataaacctaaacaggactgagaccagacttctgactattttgtaacttctataacacacacacatgaaaatgtatatacacagagtagtt

SEQ ID NO: 311201 - DNA, 646 bp, Homo sapiens
gaattgcttttttctcagtcttcaaaactcagtaatagcagcagcatcaactctacacaagaaaggcaactcctctcccagtgctaaaaaactagcaatttggagccaggcacggtggctcatgcctgcaatcccagcactttgggaggctgaggtgggcagatcacttgaggtcagaagttcaagatcagcctggctgagatggtgaaaccccatctctactaaaaacacgaaaattagccgagcatggtggtgcatgcctgtagtgccagctactcaggaggctgaggcaggagaatcccttgaacccaggaggcggatgttgcaatgagctgagatcatgctactggactccagcctgggaaacagaataagattctgtctcaaaacaaaacaaaacaaaacaaaaacaaaaaacaaaaaaattaaacaaacaaaaaaaaaaacgagcaatttgtatctcttttctcagttcccacagctaatgctttgacaagccttgttggttgtaactctaaaatttacctraagttcactactcttcatctccaataaagtattatcattttttaccatgagatactgtgaccagatgtccttcagtcagtgattaggtacacaaattgtccttcatctataccatgaa

SEQ ID NO: 311202 - DNA, 332 bp, Homo sapiens
tgatattataatatagttttcaagatgttagcatcagatgaaactttgtaaggactacatggaatctttctgtattatttcttataactgtaagtgaaactaaagttatttcagaaccaatatagttctttataattttagtgtgtaatctttacattaaatcaattgactgtactttttttgtttctggactctactttgtatcgtttgtttatcagttttgctctaacaccacagttttaattatttttatttttaaaaaagattcactggtagtgtayggccttcaatattgttatttattaacgtggtgttatctgtctttgcccttt

SEQ ID NO: 311203 - DNA, 478 bp, Homo sapiens
ataatattacttttatttttaatttattaaacgtgttatttctttttcttgtcctattacattggctggaaattttcactgttgctatactaacaatgaacagaaggtgggtaaactacaaacagttttttctcaaacctataagatacctaaaattgcacagtaaacatataacctgaaatccaaakataaagagtctctttctctcctaccaggatagataggacaggtgtttctgtaacctgtggcagagtacaagaagtagccatcatagaagctagtaagaagcaatcagtgaaaatattaatgaatttttaaaggatgagtatggactggtatgacaaaaaatgattcacttgcaggctttttttcaaaggacctccacctggtgcgtataaggactcagggcagggaagaagattgaacagagactccctcagtggtgcaggtatgaagaagaaaattggttgccatggca

SEQ ID NO: 311204 - DNA, 578 bp, Homo sapiens
gtaacttccaaaactctcagtctccttgatcttggttctctatctgcttaactcggtaagccaacagggccttgttttggtttccttcatggtcaggaaaataggactttgttcctcttttcctgaggtgtaccatcctgcaatctagtctctacaaacaatttttttacgtattttatctggttttctgtttgtttatggtgggaggttaagtccagtttttgttattccaagatttctagaaatagaagaccatattgtattatcttatctgaagttatgtcattcaattcttaaatttcyaattggatcaaaaattatactggagataaaaagtgatagaaaaaagtcaggagtcctgagatacagtcacgacttcctgcatatggctagctccatcactttgagcaaatgtgatgccctctttacaacttagttgtcacatctataagttgagaaagttatacttgtttctaaatctctcccagctctaacattctgcatctgtggaaaagaactatttgcaaaatctctaagtggataggttggcctttttgtggtttacctgaaagttgatt

SEQ ID NO: 311205 - DNA, 533 bp, Homo sapiens
ggtgcagcaaacccctatggcacgtgtatacctatgtaacaaacctgcatgtcctgcacatgtactccagaacttaaaatataatttaaaaaagaaaagaaattatgaagaaaatttaacaatttattgaaacaaatgaaaatggaaataacataccaaacttatgggatacagcaaaagcaataagaggaaagtttatagcaatgagtgtctccatcaaaagaagtagaccatctttaawcaaataaagatgaatcttaaatatctataaagcaagaggaaacaaaataaaaaattagtagaaaaaaggtagtaaagatcaaagcataaataaaatttataagaaaaaatgtacaaaaatcaattaaataaaaagttcactttctaaaaagataaaacaaaatcagtaagcctttagtactctaaaaaaaagagagatgacccaaatacataaaatcacaaacaaaagagaagatattacaatggatactgaagaaattcaaaggatcattaaaggctactataactactat

SEQ ID NO: 311206 - DNA, 603 bp, Homo sapiens
atcaaaaagatatctgcactcccatatttatgttcagcaatattcataatagtcaagatatgaaataaacttaagtgttcaactgccaaataaagaaaatgtggtacaaatatacaatggagtattatcaatccatagaaaataatgagatcctgtaatttgcaacaacatggatggaactggaggacattatgttaagtaaaataagccaggtacagaaagataaacatttcatgttctcacctactcataggagataaaaattaaaacaattgaactcatggataaaraaagagtagaatgatggtcagcagaggctaggaggggtagcgtctgtgtggggggcatgtggtgatgattaatatgtacaaaaatacagtttgatataatgaataagatctagtattttatagcacaacatgatgactacaatcaacaataatgtactgtacatttaaaagtaacaaaaaaagtataatttgactatttgtaacacaaaagataaatgcttgagccaatggataacccatttaccctgatgtaattagtacacactgtatgactatatcatgtatcctatacatatatatacttaccatatac

SEQ ID NO: 311207 - DNA, 585 bp, Homo sapiens
ttggctaactctttgtggttatcatttaacatgtttttctaagcttcattttttcctgaaaactggcagttggatctaaagccttagcaagataaaagcttattattattattttttttactccagcaagagcaaggcagagatggtactgtatgcttcatattgcattatatcaaaagaaatgaaatmttttcttttcctacctttagtaacagtagatttcaatgatgaaagtggaattcatttttaaatgaaggtcccaattagctttcatctgaagggttaaacagccattcatgactaatacctagatccactgtttctttattttctttctatttttgttgaggtagggtctttcttttgcccaggctggtctcaaactcatagtctcaagtgatcctttcacttctgcttcccaactggctggaattacaggtgtaagccatgcctccagctattatttcattaggaaaaaaattatataacaatcttacttcatttataagctgtatttatactacaaagaataactttttattattctctttctggtttcactgaaatacaatccatgcagagtaa

SEQ ID NO: 311208 - DNA, 582 bp, Homo sapiens
tctggtggtggtggccacgaggaaaggctcctctgcctggggaaaagggagggaagagtaggaaaaatattatctcatggtttgagtgacaccttagcctcaatacaatagaacaccaggcagatttctaagatctttgattccagtccctggcttccagacagtacctgtggacccacccggggactgaggaaactcactaacctgatgaaaaagacaagcctggttggttttgttacctgctgattatagagtcctagggccttgagcaaacagaagcagtagccaggtagtggttacactgggctttgggtgagaccaagtgctgtgttggcttcagttctgacccagtgcagtctcagtggtagtggccacagaggtgtttatgtctagcttcaggcagctcagcagatagagagagactctgtttgtttgggagaaattaaaggaagagaacaagagtttctgtttctgycactttcaacttttccccactaagtataatgttgactatgagtttatcatagatggctttattaccttaaagtatgtcccttctatgccgattttacagaaggtttt

SEQ ID NO: 311209 - DNA, 559 bp, Homo sapiens
tataatgttgactatgagtttatcatagatggctttattaccttaaagtatgtcccttctatgccgattttacagaaggttttaatcataaaacgatgctggattttgtcaaatgctttttatgcagctctattgaggtaatcatatgatttttgtttttaattctgtttatgtggtgtatcacatttattgacttgcatatgttaaaccatgcctgcatttctggtatgaaacccacttgatcatggtggataatttttttgatatgytatttgaatactcacagtcaactgatcttcaaaagagcaaaaaaaaaaaaaaaaaaaaacaaaacaaacaaacaaaaaaaacataaactgggaaaaggcccccctattcaacaaatgatgctgagataactggcaagccacgtgtagaagaataaaattggatccttatgtctcaccttatacaaaaatcaactcaagatggatcaaagacttaaacctaagacctgaaaacataaaatttctagaagatatcagaaaaactcttctagacattggcttaggcaaagagt

SEQ ID NO: 311210 - DNA, 559 bp, Homo sapiens
tataatgttgactatgagtttatcatagatggctttattaccttaaagtatgtcccttctatgccgattttacagaaggttttaatcataaaacgatgctggattttgtcaaatgctttttatgcagctctattgaggtaatcatatgatttttgtttttaattctgtttatgtggtgtatcacatttattgacttgcatatgttaaaccatgcctgcatttctggtatgaaacccacttgatcatggtggataatttttttgatatgttatttgaatactcrcagtcaactgatcttcaaaagagcaaaaaaaaaaaaaaaaaaaaacaaaacaaacaaacaaaaaaaacataaactgggaaaaggcccccctattcaacaaatgatgctgagataactggcaagccacgtgtagaagaataaaattggatccttatgtctcaccttatacaaaaatcaactcaagatggatcaaagacttaaacctaagacctgaaaacataaaatttctagaagatatcagaaaaactcttctagacattggcttaggcaaagagt

SEQ ID NO: 311211 - DNA, 559 bp, Homo sapiens
tataatgttgactatgagtttatcatagatggctttattaccttaaagtatgtcccttctatgccgattttacagaaggttttaatcataaaacgatgctggattttgtcaaatgctttttatgcagctctattgaggtaatcatatgatttttgtttttaattctgtttatgtggtgtatcacatttattgacttgcatatgttaaaccatgcctgcatttctggtatgaaacccacttgatcatggtggataatttttttgatatgttatttgaatactcacagtcaactgatcttcaaaagagcaaaaaaaaaaaaaaaaaaaaacaaaacaaacaaacaaaaaaaacataaactgggaaaaggcccccctattcaacaaatgatgctgagataactggcaagccacgtgtrgaagaataaaattggatccttatgtctcaccttatacaaaaatcaactcaagatggatcaaagacttaaacctaagacctgaaaacataaaatttctagaagatatcagaaaaactcttctagacattggcttaggcaaagagt

SEQ ID NO: 311212 - DNA, 592 bp, Homo sapiens
gaaattcagaaaatcattagtggctactatgagcaactatatgacaatataatgaaaaattaagaagaaatggatgattttctagacatatgcaacctaccaagattgaaccatgaagaaacccaaaacctgaatagaccaataacaagtaatgagattgattctataataaaatctctcarcaaagaaaagcctgggatccaagagcttcaatgctgaatcttaccaaacatttaaataactaatcccaaaaactactccaaaaaccagaagagatagaaacacttccaaactcattctatgaggccagtattaatctgatatcaaaaccacagacacataaaaaaatactacaggccaatgtccctgatgaataatgatgcaaaatctccaacaaaatgcccacaaaataaatttgacaacacattaaaaagatcattcattatgaccatgtgggatttatcccagggataaagtttgggtcaacatatgcaaatcaatcaatgtgatacgtcatatcaacataatgaaagacaaaacaatatgatcattttaattgatgctgagaaaacatttgataaaattcaatatc

SEQ ID NO: 311213 - DNA, 552 bp, Homo sapiens
aactacccagagcaatctacagattcaatgcaatccctgtcaaaaaaccaatgacattcttgaagtagaaaaaaaaaatcctaaaatttacatagaaccccaaaagacccagaatagccaaagccatctggggcaagagaacaaaactgcaagcatcacattacttgagttcaaattatattacagagttatagtaaccacaacatcatggtactgacatgtaagcagacatatggagcaatgaaacagaatagagaacccagaaatgaatccatacatttacagtgaaattttttacaaatgtggcaagaacatacactggggaaaggatactctcttcagttaatggtgctaagaaaactggttactcrtatgtctaaaaataaaactagacccgtatctttcaccatatgcaaaaatcaagccaaaatttattaaagacttaaatctaagacctcaaactatgaaactactgcaagaaagagaaactttaggacattgtagtgggcaatgatttcagtaatactccacaagcctagataacaaagcaat

SEQ ID NO: 311214 - DNA, 606 bp, Homo sapiens
aatgatcaaaaaattgaagagacaacccatagagtgggagaaaatatttggaatctatccatctgacaaggkattaataaccagaatatataaggagctgaaacaagtatatagaaaaaaatctaaccatgtgatttaaaagtgtacaaaagatctgaatatatatttctcaaaagacatacaaatggcaaatacgtatatgaaaaggtgcacaacatcattcattatcagataaatgcaaatcaaaactacaaagagatgtcttctctccccagttaaaatggcttttatcaaaaaggcaggcaataaaaaatattggtgaggatgtgtataaaagagaatcctcatatgctattgatgggaatgtaaattaatactactatggagaacagtataaagtttcctcgaaaaactaaaaatagagctaccatatgatcaagccttcccacttatgggtatatacccacccccccgccccaccaaaaaaaagaaatcagtatattgaagtgatgtctgtactcccatgtttatggcagcactattcacggtaggcaagatttggaagcaacttgtgtccatcaacagatgagtggataatgaaaatgt

SEQ ID NO: 311215 - DNA, 615 bp, Homo sapiens
tacaaatggcaaatacgtatatgaaaaggtgcacaacatcattcattatcagataaatgcaaatcaaaactacaaagagatgtcttctctccccagttaaaatggcttttatcaaaaaggcaggcaataaaaaatattggtgaggatgtgtataaaagagaatcctcatatgctattgatgggaatgtaaattaatactaytatggagaacagtataaagtttcctcgaaaaactaaaaatagagctaccatatgatcaagccttcccacttatgggtatatacccacccccccgccccaccaaaaaaaagaaatcagtatattgaagtgatgtctgtactcccatgtttatggcagcactattcacggtaggcaagatttggaagcaacttgtgtccatcaacagatgagtggataatgaaaatgtacatatacataatagagtgctattaatccataaaaaataatgagaccctatgatttgcaacaacatagatggcactggatttcatcattttaagtgaaataatctcaggctcagaaagacaaactttgcatgttctcacttatttttaggagctaaaaattaaaacaattgaattcatgaaggtggag

SEQ ID NO: 311216 - DNA, 605 bp, Homo sapiens
gatggatgatgttgcaagaattcttggagatttacacataatttctgtgttttctgttttgcagaagaaagagacattatacaaatgyaagctgttgtcacaacaatgataagaaatcaggagtcgaaagatgtggagtaagggggaatttcagagaaaccacaaaacacaaaataggaaacagagacaggagaagattgctatgacaaaattgcagaaggtgaaatctttggcagcctcttatttctctggagaatatgatattgtcaggctgaggtggaagaatcacatggtcatactgtaagtgctatggttccaagtggtaatgttattgatcaattttcaacctgagatttgtaatgataatccccacaagttgcttgagatccttaacaatgaggtttttagtgagtttaaccaactgtcagtgcttgaaaactcgcctacagggggcagcacaaatacaagtaaacttaggggtaaagcatgaaatgcatccagattcacaattgtttcaggatctgcttgcaactgaagcactgtctgcacaagattcggctgagggaatatatataaaacagaatgttcctgtatgatgttagttt

SEQ ID NO: 311217 - DNA, 605 bp, Homo sapiens
gatggatgatgttgcaagaattcttggagatttacacataatttctgtgttttctgttttgcagaagaaagagacattatacaaatgtaagctgttgtcacaacaatgataagaaatcaggagtcgaaagatgtggagtaagggggaatttcagagaaaccacaaaacacaaaataggaaacagagacaggagaagattgctatgacaaaattgcagaaggtgaaatctttggcagcctcttatttctctggagaatatgatattgtcaggctgaggtggaagaatcacatggtcatactgtaagtgctatggttccaagtggtaatgttattgatcaattttcaacctgagatttgtaatgataatccccacaagttgcttgagatccttaacartgaggtttttagtgagtttaaccaactgtcagtgcttgaaaactcgcctacagggggcagcacaaatacaagtaaacttaggggtaaagcatgaaatgcatccagattcacaattgtttcaggatctgcttgcaactgaagcactgtctgcacaagattcggctgagggaatatatataaaacagaatgttcctgtatgatgttagttt

SEQ ID NO: 311218 - DNA, 577 bp, Homo sapiens
tgactaataagagtgggatcagaggaatgctrgaaaaatatttgaaactgtagaccatgggtagagaaaagacttgaaggaaaattatcttaggacttcaatactccaaaaaatcatgatcaacttcatatgtacagtacattttcagttcatccggttccctgtgacttcaaagacatccctcaagtctaagctaccatcatcaatttattacttgcttagactgacatgatactggtccctgaattcattccatcctccttcaagccatttcctaatagcagtcaggaatattactgaccccacttcccatctagattacgtcttctagtgtattcttggaagtacctatatctttcctttacctctcttatcacagtttttaattatacattcatctgagtcattatctaatatttgccaaaaactcccacactctaaaccccacaatgtagttactgggtctggcatttgctaatgtggtttcttcacctaatccagtgcctggcatttaaaggtacttagtaaatattcataaatttaaaaaatgagggcaggaatgaacaaaaacaaaaga

SEQ ID NO: 311219 - DNA, 551 bp, Homo sapiens
cagccctggctcctcctcctctgcctcttcctgctccttcattctcccccagagctctaattgtcactgagattttatgtttcgtttaacaaatgactgtctccccgcttgaacagaacctccatggggggagggaagagtgtctgttgtataaatagttgtatttcagtgcataaaacagtgcctgcctcaaagggaggactcagtcaatatctgttgaatgaatgaatgattgcctgggtcaacgaatgaatggctgaatgaatgatttctcctttccctcggcactgtctggagtccccaggacaggcatgggcagcagtcgctggtctgtggcctgtcccactggacttggggttctcatgcttggtctgggcggagatcacccaccaggctcccasgtcgatcctctgctcatgggaagctgcgtccggcccagctgccaggagctcactgcagggtggagggaagagcagggacgatctgcgagcgcctgaacaccacacaagagccgaggagccgctgcttaaaatgcaggcgttgagaggagt

SEQ ID NO: 311220 - DNA, 551 bp, Homo sapiens
cagccctggctcctcctcctctgcctcttcctgctccttcattctcccccagagctctaattgtcactgagattttatgtttcgtttaacaaatgactgtctccccgcttgaacagaacctccatggggggagggaagagtgtctgttgtataaatagttgtatttcagtgcataaaacagtgcctgcctcaaagggaggactcagtcaatatctgttgaatgaatgaatgattgcctgggtcaacgaatgaatggctgaatgaatgatttctcctttccctcggcactgtctggagtccccaggacaggcatgggcagcagtcgctggtctgtggcctgtcccactggacttggggttctcatgcttggtctgggcggagatcacccaccaggctcccaggtcgatcctctgctcatgggaagctgcgtccggcccagctgccaggagctcactgcagggtggagggaagagcagggacgatctgcgagcgcmtgaacaccacacaagagccgaggagccgctgcttaaaatgcaggcgttgagaggagt

SEQ ID NO: 311221 - DNA, 622 bp, Homo sapiens
cacgctggccatgagaatgaaagaggccaaagaaaaacatcaggaacagactgccaggaaatgcagaccctccagcggtgagcttctacttctaagtctgcatccagacaaaagtaagattttttgagtagcaaataagatcagacccttccaaaagaaaatacttgtagaagatgcagaaaagaaaatgagaaagaaatcaaagcagctcaatacaaaaaacaaaaaacaaaaacaaagaaacacaaagaaaggcagcaagagaggaaaagaggaacaaataattataagacaaacacaaaacaacaaaatagcaacagtaagtccgtcccatcagtcattaacttaaacataaatgggtgaaactccccaatcaaaagacatggagtgactgaatggataataagatgcagctatatgctatctacaagacactttatatttttttatttgtacaaattcatagggcacatgtgaaatgttgttayacatatataatgcatagtgatcaagtcagggtatagggtgttcaccacccaagtacaatatacttttgttaactatgttcaccctactctgctatcaaatattgaatttattttttctatcttactgttttttg

SEQ ID NO: 311222 - DNA, 622 bp, Homo sapiens
cacgctggccatgagaatgaaagaggccaaagaaaaacatcaggaacagactgccaggaaatgcagaccctccagcggtgagcttctacttctaagtctgcatccagacaaaagtaagattttttgagtagcaaataagatcagacccttccaaaagaaaatacttgtagaagatgcagaaaagaaaatgagaaagaaatcaaagcagctcaatacaaaaaacaaaaaacaaaaacaaagaaacacaaagaaaggcagcaagagaggaaaagaggaacaaataattataagacaaacacaaaacaacaaaatagcaacagtaagtccgtcccatcagtcattaacttaaacataaatgggtgaaactccccaatcaaaagacatggagtgactgaatggataataagatgcagctatatgctatctacaagacactttatatttttttatttgtacaaattcatagggcacatgtgaaatgttgttatacatatataatgcatagtgatcaagtcagggtatagggtgttcaccacccaagtacaatatacttttgttaactatrttcaccctactctgctatcaaatattgaatttattttttctatcttactgttttttg

SEQ ID NO: 311223 - DNA, 487 bp, Homo sapiens
tcacccaaggtctttaggatgcactcggccactcagaccctacaagggagcccagcccggaccttccaccggcaaacccagttcccctgctgcctccagccctggcctcacaggaccccaaaggcccctcccgtgtggatcaagaggccagcatctgaggctggtcatgtcatcaatcactgctgcagagacaggaggtgctgacgagggccatgtgcaaagacagaagagctgaygagggccactggggcgagccttcccttctcattagaggcctaatgagccgcacaccttcagattccatttcagtgaattatcaacacctaatctgagggaataatgggcaagaccacctgccacacagtgattagataaacacgctgagagacaggatggaaagaactctgcaccagtgcagtccccagagctgggatggcatcagaaatggtgagaacggcagtggaaatcctgcccctgccccacaggt

SEQ ID NO: 311224 - DNA, 604 bp, Homo sapiens
gggaaaactgataaactcaattaattgagatacgctatctttagattgtttgagatttactatgttgacagttttatcatccttaaatcactgcaacttttcaatcattgctttcttctacctatgcctttcatttgtcttcttcctctgcttcatcctctcccttttcttcctctacctcttctttcctcattattttttcaatcttattataatcaaggcttcactaaaatattaaatatgttaaattatraaatattttaaaatacctaatatgtctttgtttcttaatgctttctctttttatctctctcttctctctccatccttctgtctctctttcccctctgaatataatcaattgtacttagatgacatgcctttattacatttttcccctttaatttattaaaattttaacttttaaaaatatttcagaagtataaaactagagaggcgaacctatgtagataatctttgtaatattttttcttttttttttggagacagtgatcatacagtgacatgatctcagctcactgcaacctatgcccctgcattcaagcaattcttatgcctcagcctcctgagtagctgggattac

SEQ ID NO: 311225 - DNA, 551 bp, Homo sapiens
gctgtggtaatgcattttctttagtcaatctatagcttcacaacctttaaggtttttggtccctttcacatccgctcaatatcctcattatctgccaattatttaaacatggtttctatgtcttccaccaagttttatttccaattatatggcctgttctggcaatcctagtacttagaaaaattgaaccattccagtctcatttagtcttttaatagtgtgaatcattatgtgtcaaggctctttgataaatttaggaatggttctcctgttctttccttttccatcattaactgktaatactagcatctaaatagttgttatttcgaataagttgatattgggttacgttgtgatatttatacaaaatcaagctttgttattcttctacaccaagtaatgagtttaaattaattttaaagttataactgctgaatctatatgaaacgtgaagatgtgatttcatactatttaggttttttaagctaacatgatcataaagtatttaagttccatatgaaaagaaaaggtgaaaaatttctggtgttatt

SEQ ID NO: 311226 - DNA, 551 bp, Homo sapiens
gctgtggtaatgcattttctttagtcaatctatagcttcacaacctttaaggtttttggtccctttcacatccgctcaatatcctcattatctgccaattatttaaacatggtttctatgtcttccaccaagttttatttccaattatatggcctgttctggcaatcctagtacttagaaaaattgaaccattccagtctcatttagtcttttaatagtgtgaatcattatgtgtcaaggctctttgataaatttaggaatggttctcctgttctttccttttccatcattaactggtaatactagcatctaaatagttgttatttcgaataagttgatattgggttacgttgtgatatttatacaaaatcaagctttgttattcttctacaccaagtaatgagtttaaattaattttaaagttataactgctgaatctatatgaaacgtgaagatgtgatttcatactatttaggttttttaagctaacatgatcataaagtatttaagttccatatgaaaagaaaasgtgaaaaatttctggtgttatt

SEQ ID NO: 311227 - DNA, 429 bp, Homo sapiens
ggggacataatcagattatagcaggttcataactgtaacttctaagtctctaaatttatgtaactgaacaattgttccttttcaaaatagtaggtgtggtagcccttttattaataaaagttatttgtgaattatagttgaggaagttcacctgatcccaaatgtttacttcccttctcccagaaaccccaataaaaaatggtaaagaaatttataaaggtattatttcaaatggtcaaaaagttaaagagaagaaaatgatagataatgtatttgcacctggtttataataaagtcaatttgatacagtggccaggcgtggtggctcatgcctgtaatcccakcacttttggaggctgaaacagaatccaagaaaagttcaccactaggactcaagataattactaatgtatggactccagaaaaaat

SEQ ID NO: 311228 - DNA, 517 bp, Homo sapiens
  misc_feature (1)...(517): n = A,T,C or G
nnnnnnnnnnnnnnnnnnnnnntctgctgttttataaaccccggcctaagggttgggaagagtgaggttgtaaggagaaaagggagggctagaaagcactgagtatcgattcacagtgggtaaaagtgacttcaaatatgtctttcgtcacctgataaggaggcctctgcagaggtgccagaagacyctggctggaaactccagatagagacggaggaatgaagtttcctgggcaaaaatgtatatatgcttaaaagcatggctgaccaagagtgaaggctgagttttttctagagaccgtaacaaatttgctgagcacaaagtcagctatgggaagggcatataacgcccacataaacctttgtaatgcccatggctaggactgaaaatggcacataaatgtttggccagtagatggagtcctcatgtattcacacatgtatttgcttgctcttagctgagggagtctactagcagcaatatcctgcagtaatgagcatacacagtgcccagatca

SEQ ID NO: 311229 - DNA, 569 bp, Homo sapiens
ttttgaaaacataaataaaacctataaatcattagccaaactaaccaaaaacaaacaaaaataaataaataaatataagaaatgaaaaaaatgagacattacaactaatactacaaaaataaaaaaggatcattggagactattataaacacatatatcctaataaatatgacaacttagaaaaaaaatagattaattcctgaacacygaaaatctaccaaagttgaatcattcagaagaggaaaatttgtacagacctatgatgaataacaaaaagttattttttaattaaatgtcccacatttaatcagtaacaaaaagtttcccatcatacaaaagctcaagaacaaatgatttcactgttgaattctatcaaacctttaaataactaatatcaattccacataaaaattctgtagcatttctgtatgccactagcaaaccacatgtaaaagaaattgtgtaagctattccatttctaatagttacaaaaaatatacctaagaataaattaaacaaaggagttgaaagatctctacaatgaaaactataaaatactgatgagacaa

SEQ ID NO: 311230 - DNA, 592 bp, Homo sapiens
aaccttttcaagaacacatggaatattttccaaaacacacacaaaatagtttatatgaagcaccatagaacaagttttactaaatgcccaggaatttaagtcatacatcgtatactctttgaccataataaaattagactagaaagcaaagatataacttttaagtttacaaatgtgtgaaaattaagaaacacattttaaaaaatgcaatgggaattaatatattttggagtgaarataatgaaaacaaagattatcaaattttgggggctggcagctaaagcagtgtttcatgagttacaagtttagttttaaagaaaatattaaaagaaaacagcataaaataataatctgtaccttgattgtagaaaagagtttaacccaataggaaagacataataatataaaagcaaaaataaaatattaagcatacgttaaagaaaaaaatctgattaagtctaaagttggcatataacttttaagaaaattaacaaacattgaaaatcagatcaagaagagaaatcaaaactagcaacacatattacactacagatcctccagatctaactattataagatggtaacatataaa

SEQ ID NO: 311231 - DNA, 469 bp, Homo sapiens
cccaacactttaccagtgccaatgcatgcacagatgccagcaaccccaccttcacccttatgcagtcagtgcctccagtgtgaatgcatatatgtggccggcaacccagccccctctgtaccaacactgctgcctctgcaaaggcatgcatgggatctggcagccccacacccaccagcaccctgtttcccacctccaccagcagcagtgtgattacctgaagaaatgctgcagccctgctcccastggtatcccgccccagctgacgtgtgcactctgttgcactgccactgctgcaagcacacatgaacaagcacagatcccactgccactgccccaataagggctttgtcctgtcccatccaatggactgctgtggccagtggtccaggaacaccgcggcccctccagtgcaacagattcctaacctcaagtggccagagaacacgaccagaaaggcctgttacca

SEQ ID NO: 311232 - DNA, 562 bp, Homo sapiens
gggacagcttgttttgttgggaaaggtagttccgtgcatgtactcttttgacttccacctagatgcatagaatggaccttgggcctggagtatgtctttaccaagagagaaagagtccttgctacctgtgctggacttttctcctcgtgtgggaatatcattctctgttttaggctcattgagaactcctttgttctgtttaagcatatgcatcaaatgacacgtggccaatcccactactatctctgtgctctgcagggagtggttgaggtcttcctgctgcagcacaagaattgtgcatataaacaaattgccctgtgtcaactactgggaggggccactggccatccrgaactaatgcccaagactaaggctaatcatatgctgtctcctctatgtaagtaaaacctttttccatccagcatttgactgcattgtgttttccttggcaatgctagtgtgtagtgtctagaaatgctcattcagacttctattcctgatcaaacgcacttgctaaacatgtagctcagaagtaaggaagcagtaaataagaagaaaaaaa

SEQ ID NO: 311233 - DNA, 562 bp, Homo sapiens
gggacagcttgttttgttgggaaaggtagttccgtgcatgtactcttttgacttccacctagatgcatagaatggaccttgggcctggagtatgtctttaccaagagagaaagagtccttgctacctgtgctggacttttctcctcgtgtgggaatatcattctctgttttaggctcattgagaactcctttgttctgtttaagcatatgcatcaaatgacacgtggccaatcccactactatctctgtgctctgcagggagtggttgaggtcttcctgctgcagcacaagaattgtgcatataaacaaattgccctgtgtcaactactgggaggggccactggccatccagaactaatgcccaagactaaggctaatcatatgctgtctcctctatgtaagtaaaacctttttccatccagcatttgactgcattgtgttttccttggcaatgctagtgtgtagtgtctagaaatgctcattcagacttctattcctgatcaaacrcacttgctaaacatgtagctcagaagtaaggaagcagtaaataagaagaaaaaaa

SEQ ID NO: 311234 - DNA, 617 bp, Homo sapiens
atattagtctgtatcccattaatgtgtttaattattatatattattatmtgttgactaaaaattgaaggaaagaatacgatatcattagtagcgtgattgcaaattataactattatatatagttttgtcaatcagtccaaaatatctgtgtatgtgtttgtgtgtatgccacattaaatatatatgtggtataaattcaaaggtatgtgtatatgtatatatgtatgggtttacaactaatttatgtatttagtactaatttatttcccactctaaccatatgagataaaattttctacatttatggaaagttaatgcgttaagttaaaagtgactttcccaaagtcacatttttgtaaatgacagagcttggattcaaggagccatctgactcaatagcataacaaaggtaagataataagacaaaggttggataatgacaacaatcttcatctgggtgcagaaactaaggagatgcattgtctgtatatattttttaattttaacttttattttagattcaggtgctacatatgcaggtttgttacatgggtgtgctgtgtgatactgaggtccgcagtatcattgatcctgtcacacagatagtaagcatagt

SEQ ID NO: 311235 - DNA, 535 bp, Homo sapiens
acaagtcttggtaaggttgtggaacaactctaactctcatatattacttttrggaatgtgaagtggtacagctgtttaggaaatcagtttggaagttcctcaaaatgtttaccaaagagttatgatatagcctagcaatctgcagcatttccttcacaacgaaattgcatatatccacacaaaaacttgtacacacattttatagcagtatttattatactagcaagaaagtggaaacaatccaaatgtctttcaactgatgaatatgtaaacaaagtatattacagtcatataatgacaaatcattcagctataaaaatttaggtcaggaggtactgctacatgttacagtatctgtgagacttgaaaacataatgctaagtcaaagaagcaagataggacaagccaaatattgcattatttcatgtatgtaaaatctcccgtataggcaaatccatagagatctaaagtagattagtgattgcttagtggagaaagagatatgtgcactaactgttaatgtatttgatctttc

SEQ ID NO: 311236 - DNA, 535 bp, Homo sapiens
acaagtcttggtaaggttgtggaacaactctaactctcatatattacttttgggaatgtgaagtggtacagctgtttaggaaatcagtttggaagttcctcaaaatgtttaccaaagagttatgatatagcctagcaatctgcagcatttccttcacaacgaaattgcatatatccacacaaaaacttgtacacacattttatagcagtatttattatactagcaagaaagtggaaacaatccaaatgtctttcaactgatgaatatgtaaacaaagtatattacagtcrtataatgacaaatcattcagctataaaaatttaggtcaggaggtactgctacatgttacagtatctgtgagacttgaaaacataatgctaagtcaaagaagcaagataggacaagccaaatattgcattatttcatgtatgtaaaatctcccgtataggcaaatccatagagatctaaagtagattagtgattgcttagtggagaaagagatatgtgcactaactgttaatgtatttgatctttc

SEQ ID NO: 311237 - DNA, 614 bp, Homo sapiens
aaggtatatccacaagatggtatatgaattacatctcagtttaaaaatatataagaaaacaatctaataatcactgatattccttacctcatcataaagtcaaggcagagattgcatcgctagagtggcccttaacacttaattctacatcatcaaatggtgatgggaccctgagccttttgatcctatattcagtggtaactaaatagacataagaaggattgcattctgaaatgtcaagatgtgagatacaattggttttatatccctacagggctgatgatgcatatttcattgatctgagaacattcratgacagaagatatacaagagcaatatccttctcccaaaatgcacaaatacccattatgcttagattgaaatgtattagaagagtggatcttttcttttaaacctaaaagcaaatatctctcctaatgtactagagaaaaataagttttacagcttcccactacatatttttatttttttgctttacacatgtacaaatgttttgatatgattccagagacacaattaatatacacttaaagcacagaaataaatgtataaggaaataaggagttaattttaggggaacactgtggaaagcc

SEQ ID NO: 311238 - DNA, 544 bp, Homo sapiens
tgagccttttgatcctatattcagtggtaactaaatagacataagaaggattgcattctgaaatgtcaagatgtgagatacaattggttttatatccctacagggctgatgatgcatatttcattgatctgagaacattcgatgacagaagatatacaagagcaatatccttctcccaaaatgcacaaayacccattatgcttagattgaaatgtattagaagagtggatcttttcttttaaacctaaaagcaaatatctctcctaatgtactagagaaaaataagttttacagcttcccactacatatttttatttttttgctttacacatgtacaaatgttttgatatgattccagagacacaattaatatacacttaaagcacagaaataaatgtataaggaaataaggagttaattttaggggaacactgtggaaagccatgtccttatgtgatttctttttttaaagctcaatctgaatttgtttacactgctcagatttcccatgttagaagaatctgtttttaaaaacagcacttag

SEQ ID NO: 311239 - DNA, 544 bp, Homo sapiens
tgagccttttgatcctatattcagtggtaactaaatagacataagaaggattgcattctgaaatgtcaagatgtgagatacaattggttttatatccctacagggctgatgatgcatatttcattgatctgagaacattcgatgacagaagatatacaagagcaatatccttctcccaaaatgcacaaatacccattatgcttagattgaaatgtattagaagagtggatcttttcttttaaacctaaaagcaaatatctctcctaatgtactagagaaaaataagttttacagcttcccactacatatttttatttttttgctttacacatgtacaaatgttttgatatgattccagagacacaattaatatacayttaaagcacagaaataaatgtataaggaaataaggagttaattttaggggaacactgtggaaagccatgtccttatgtgatttctttttttaaagctcaatctgaatttgtttacactgctcagatttcccatgttagaagaatctgtttttaaaaacagcacttag

SEQ ID NO: 311240 - DNA, 621 bp, Homo sapiens
gcaccaagcaaagggggaaaacccccttattaaacaatcagctctcatgaaaactcactgactatcatgagaacagaacaagggtaaccgcccccatgattcaattacctcccatggggtccctcccaggacacatggagattgtcagaactacaattcaagatgagatttgggtggtggcacagccaaaccctttcaggtactatgttattttatccaggaatatgcttaactatcttgttagcagagaggctattccattcctaagaagtttttatacctcttagctggagtttattctttttcttctgcttattttattttgcaaaagattctcccccttactcatgaggaggctgcaaagatgccaggtggaatgtcaactcagcttcatgtctggagggaaagcttggaggtgccctgactttcttgtatgctataatgctaaggagatcataatgacactataataatgacacgaactatgggtaagtggacggaatgagtttattcacttagaaaaaatagtcattgtccatttgtgaagttgaggaggaayaaagccatccaaactgtgtgagctaaaagtgagaaataggcgtttcccacaaaaatgaatgt

SEQ ID NO: 311241 - DNA, 620 bp, Homo sapiens
atttaataacatacattttcctctaagtgctgctttcattatatcccacaaatacttttgttatatagtcattgttatttaattccaataatttatatttctcttgaatcttctactttgatgtctcacaggttatttacacatacgttgtttaaatatatatcattttaattataagtatatatattacatatatacacacacacgtacctttaaagaatgcttgactrtttaatatatagtgaagatagagaatataattttcaattcctcactttcttacactgcagtcactcatttcacttatccatatgataaaataacccaatacactattattacagttactttaaaaagttatattttagataaattaaaagtaagaaaaaaataatttattttccctttattattcttggacccttttcctttctttatgtagacctaagtttctgttctgtattatttcctttcttgaaaaaccttttaaattagccatagaccaaatccttaatccagataaggggtagccagtagggtcctcaaaaggactccttaaaacccagaaaactttgtaactgggtcctggaacagcttgctcgggcccattcccaccctgt

SEQ ID NO: 311242 - DNA, 620 bp, Homo sapiens
atttaataacatacattttcctctaagtgctgctttcattatatcccacaaatacttttgttatatagtcattgttatttaattccaataatttatatttctcttgaatcttctactttgatgtctcacaggttatttacacatacgttgtttaaatatatatcattttaattataagtatatatattacatatatacacacacacgtacctttaaagaatgcttgactatttaatatatagtgaagatagagaatataattttcaattcctcactttcttacactgcagtcactcatttcacttatccatatgataaaataacccaatacactattattacagttactttaaaaagttatattttagataaattaaaagtaagaaaaaaataatttattttccctttattmttcttggacccttttcctttctttatgtagacctaagtttctgttctgtattatttcctttcttgaaaaaccttttaaattagccatagaccaaatccttaatccagataaggggtagccagtagggtcctcaaaaggactccttaaaacccagaaaactttgtaactgggtcctggaacagcttgctcgggcccattcccaccctgt

SEQ ID NO: 311243 - DNA, 620 bp, Homo sapiens
atttaataacatacattttcctctaagtgctgctttcattatatcccacaaatacttttgttatatagtcattgttatttaattccaataatttatatttctcttgaatcttctactttgatgtctcacaggttatttacacatacgttgtttaaatatatatcattttaattataagtatatatattacatatatacacacacacgtacctttaaagaatgcttgactatttaatatatagtgaagatagagaatataattttcaattcctcactttcttacactgcagtcactcatttcacttatccatatgataaaataacccaatacactattattacagttactttaaaaagttatattttagataaattaaaagtaagaaaaaaataatttattttccctttattattcttggacccttttcctttctttatgtagacctaagtttctgttctgtattatttcctttcttgaaaaaccttttaaattagccatagaccaaatccttaatccagataaggggtagccagtagggtcctcaaaaggactccttaaaacccagaaaaytttgtaactgggtcctggaacagcttgctcgggcccattcccaccctgt

SEQ ID NO: 311244 - DNA, 573 bp, Homo sapiens
tgaaaaaccttttaaattagccatagaccaaatccttaatccagataaggggtagccagtagggtcctcaaaaggactccttaaaacccagaaaactttgtaactgggtcctggaacagcttgctcgggcccattcccaccctgtggagtgttctcttgctttaataaattcctgctttccctgctttgttcctgtgtttcgttctttggttaactttgtttgtgcatttcattcaattttttgttcaaaaccccaaggacctggacaactcactcatggccttccttctggtaacaaaaataaacagtgccaacttggggtgaatgctcttttcagttgggataagactatagcaaagtttgtcccatggacagtagctcattgttacagagaatattgtatttcaaaataggtaccattctatgtagaataatagccattctaygaaactatcttaatccttgtaacccagtccatacttagcctccagaattcatgggtattaccactgaagagtccttatgtctatggctctttcaacgttttctccagataaacagatctttgctgtg

SEQ ID NO: 311245 - DNA, 605 bp, Homo sapiens
aagcaattattgatattctatgtgatctagattgaaaagttttaatctagttcattcatcatttttttgctttgtcagctttttataatcatttcataatgyattcaccaaacatattttgagtatcttctttgtgccagtttatgacatagtagggcttttccacattcactccttataatttaaatagagtgtttcacatggaacttccctgttatagaaagataatttcctgtccaaagcagtaaattcaaattttaaatcatttatgagactgttctataatcactgaaaaaaaagatgacatatgtatatagacacataggtaattatagatagataaatagataaaattatattaaatttattaaagttataagacaagagatgatgattctagggccagtaatgagtgccgcctttgtttttcttctgttgtatttctttttctggtcatgttcatcatttccttttaatttgaggttcctagcatcatgaataaattggctgaaaactttaacacttttaatcaaagtttgcctgttatgtcaatttatctaacatgtgtatacgaaaaatatcaaaaccaggatgtataagtgtgt

SEQ ID NO: 311246 - DNA, 605 bp, Homo sapiens
aagcaattattgatattctatgtgatctagattgaaaagttttaatctagttcattcatcatttttttgctttgtcagctttttataatcatttcataatgtattcaccaaacatattttgagtatcttctttgtgccagtttatgacatagtagggcttttccacattcactccttataatttaaatagagtgtttcacatggaacttccctgttatagaaagataatttcctgtccaaagcagtaaattcaaattttaaatcatttatgagactgttctataatcactgaaaaaaaagatgacatatgtakatagacacataggtaattatagatagataaatagataaaattatattaaatttattaaagttataagacaagagatgatgattctagggccagtaatgagtgccgcctttgtttttcttctgttgtatttctttttctggtcatgttcatcatttccttttaatttgaggttcctagcatcatgaataaattggctgaaaactttaacacttttaatcaaagtttgcctgttatgtcaatttatctaacatgtgtatacgaaaaatatcaaaaccaggatgtataagtgtgt

SEQ ID NO: 311247 - DNA, 605 bp, Homo sapiens
aagcaattattgatattctatgtgatctagattgaaaagttttaatctagttcattcatcatttttttgctttgtcagctttttataatcatttcataatgtattcaccaaacatattttgagtatcttctttgtgccagtttatgacatagtagggcttttccacattcactccttataatttaaatagagtgtttcacatggaacttccctgttatagaaagataatttcctgtccaaagcagtaaattcaaattttaaatcatttatgagactgttctataatcactgaaaaaaaagatgacatatgtatatagacacataggtaattatagatagataaatagataaaattatrttaaatttattaaagttataagacaagagatgatgattctagggccagtaatgagtgccgcctttgtttttcttctgttgtatttctttttctggtcatgttcatcatttccttttaatttgaggttcctagcatcatgaataaattggctgaaaactttaacacttttaatcaaagtttgcctgttatgtcaatttatctaacatgtgtatacgaaaaatatcaaaaccaggatgtataagtgtgt

SEQ ID NO: 311248 - DNA, 604 bp, Homo sapiens
ttgtctatacctgtggcaaagaatatctaataagatactctcagcattttgcacacttaaactaagatgctgaatgctgtattttacggaataatcagccacattaaatttggagactcaacaagcatgctgtgaacattcaacattaggtttaaattttatttttaaaagttaataataaaaggatatatgttaagtattatgaaaccctgcatataytgtaataaaatggtggatgtgaatggacaatatatgcaataaaatttataatttgattctgatttctttgttttagaatttgtctatgtttatggatttaataattagcttaggatttttctatctgtataaagttaaattaaatacagctataacaaatgtattatgtcttaaaattacaaagagtattctcaatagacagagggaagggaaatgacttttactcaacttttactcatatgcatataaaaatggctctattttggcacaccttggtattacaattcgcattgtgaaatgtgcattgtagaatatgtcatgggtgaaattggtaacatcagcaaaatagtggactgcgagactctaattctccttaccccctaaa

SEQ ID NO: 311249 - DNA, 315 bp, Homo sapiens
gagaattatttttgacacagttcctaattgtaatgattaggaatataaggcygggcatggtggctcacgcctgtaatcccagcactttaggaggttgaggcaggtggatcacctgaggtcgagagttcgagaccagtctgaccaacatggagaaaccccatctctactaaaaatacaaaattagccaggtgtggtggtgcatgcctgcaatcgtagctacttgggaggctgaagcaggagaagcacttgaacccaggagatggacgttgtggtgagccaagatagtcccattgcactccagcctgggcaacaaga

SEQ ID NO: 311250 - DNA, 572 bp, Homo sapiens
tcaatcttgtgcatatcgctagctagttatcccagcaccatttattgaatagggagttrttttttctaatcaaaaacaactttgtcaaagatcagacagttgtaggtgtgtggctttatttctgagctctctatttcattccattggtctatgtgtctgttttggtaccggtaccttgaagtttaggttactgtagcctggtagtatagtatgaagtcaggtaatgtgatgcctccaggtttgtcattttaacttagggttgccttagctattcagtctctttttctgttccatttgaatcttaaaatgagtttttctaattctgagaaaaatattattggtagtctcataggaatagcattgaatctgtaaattgctttggacagtatgcccattttgacaatatcagtcctttctatccatgagcatgacatattttttcatttgtttgatcatctctgatttctttgagcagtgttttgtgattctcgttgtagagatctttctcatacctggttagttgtatttctaggcattttatcctttctggccactgtgaatgggattacata

SEQ ID NO: 311251 - DNA, 572 bp, Homo sapiens
tcaatcttgtgcatatcgctagctagttatcccagcaccatttattgaatagggagttgttttttctaatcaaaaacaactttgtcaaagatcagacagttgtaggtgtgtggctttatttctgagctctctatttcattccattggtctatgtgtctgttttkgtaccggtaccttgaagtttaggttactgtagcctggtagtatagtatgaagtcaggtaatgtgatgcctccaggtttgtcattttaacttagggttgccttagctattcagtctctttttctgttccatttgaatcttaaaatgagtttttctaattctgagaaaaatattattggtagtctcataggaatagcattgaatctgtaaattgctttggacagtatgcccattttgacaatatcagtcctttctatccatgagcatgacatattttttcatttgtttgatcatctctgatttctttgagcagtgttttgtgattctcgttgtagagatctttctcatacctggttagttgtatttctaggcattttatcctttctggccactgtgaatgggattacata

SEQ ID NO: 311252 - DNA, 572 bp, Homo sapiens
tcaatcttgtgcatatcgctagctagttatcccagcaccatttattgaatagggagttgttttttctaatcaaaaacaactttgtcaaagatcagacagttgtaggtgtgtggctttatttctgagctctctatttcattccattggtctatgtgtctgttttggtaccggtaccttgaagtttaggttactgtagcctggtagtatagtatgaagtcaggtaatgtgatgcctccaggtttgtcattttaacttagggttgccttagctattcagtctctttttctgttccatttgaatcttaaaatgagtttttctaattctgagaaaaatattattggtagtctcataggaatagcattgaatctgtaaattgctttggacagtatgcccattttgacaatatcagtcctttctatccatgagcatgacatattttttcatttgtttgatcatctctgatttctttgagcagtgttttgtgattctcgttgtagagmtctttctcatacctggttagttgtatttctaggcattttatcctttctggccactgtgaatgggattacata

SEQ ID NO: 311253 - DNA, 613 bp, Homo sapiens
tacggtccacattttacagcagaagtggctgttcaaggtcacatatccataaagtggcagagctaggaaatgagccaggcagtctggttccaggctctacccccttgaccactattccacactacccctcagccatatggagagcacactcctaccaaggaatgagacacacgatgcctcattttccccactatttccttaacgccctgtgttatcaaatataattaatatgggcagacggaacataaagagaataaattagttttcaaattgttaactagaaagcaaaccttagacggtaaggtccatctgaatattctgtcttatgtattgctcaatttcagggaaattatgaaaaacaaataacaaccaaaatagttcccttcctttgtagttataacaacaacaaaatgcctatgakaaatttagatgaaaagtttgatagagaaaatgttaaatattcagaaaacaaatgaatcactgagcatatgtttattgactagaatcacataataaacttttaatgatttagtaaatggtcattcggtattcaggcgttttgcttcacttcctgctctttggccaatggcatgatgtttctttctggcccttt

SEQ ID NO: 311254 - DNA, 559 bp, Homo sapiens
tcattatatgtgtcagtggtttctaataccacatctacagatacatacacatgatgaagagatacactgttaggtattcaccaaataagttttaatgtctttacccaagatcactggctgaacattcagaagcagtggttataaggatacacaatgttaaacatatttcaagttttcataaatatctctattgaatatctaatagatagctaaatgatgtcattctaactcctaaatgttcctcgaatcagtcctttcttctcaatcatcattaccttattttaacaccattatcttccccaaagcactacagtcagctgcataaaggtatttagttaaaagtaaatttgaattttcgataagtatacaagcatttgctggaaatgactacaggygaatgtttatttctgggttggatttttccagctagttcattctgcttaatgcctagaatctgtagacaatgtgttcatagaaacaaacacagccagatcaaaaccctgaggaaggaaatcatcttttaaaagactcattgagaagtcaaataaaagcaatttta

SEQ ID NO: 311255 - DNA, 619 bp, Homo sapiens
aaggtgagtcctagcgagaggtgactgggtcatgggagaggatcgctcatgaatggctttgtgccctcctcatgggaatgagtgagttatcactctattagttcccacgagatgtgattgttaaaaagaggctggcacttcctcctctttctcttgcttcctctctcaccatgtgacatccctgctcccctcttcaccttctgccstgagtaaaaccttcatggcagaaggtgatgaggcctcctcagaagctgagcagatgtgggtgccttgcttgtgtggtctacagaaccatgagccaaataaacctcttttctttgtaaaatacccagtcccaggtatttctttataacagtgcaaaactaacacaggggtcttttcaaaaagtctaatgattctggaacacataatctttaatgctggcgacgaggaaataccatggggtgtcccactgtattaggggcctgaagtatgtagttaaaggcatggcgagagtgagagtcactaaagctaaaagcttccattctgaacagtatggatggtgctagggagatgagaaaaaattccattttcaggtcacacctgaaaggaaatcacctttctaccaatagaactgaat

SEQ ID NO: 311256 - DNA, 619 bp, Homo sapiens
aaggtgagtcctagcgagaggtgactgggtcatgggagaggatcgctcatgaatggctttgtgccctcctcatgggaatgagtgagttatcactctattagttcccacgagatgtgattgttaaaaagaggctggcacttcctcctctttctcttgcttcctctctcaccatgtgacatccctgctcccctcttcaccttctgccgtgagtaaaaccttcatggcagaaggtgatgaggcctcctcagaagctgagcagatgtgggtgccttgcttgtgtggyctacagaaccatgagccaaataaacctcttttctttgtaaaatacccagtcccaggtatttctttataacagtgcaaaactaacacaggggtcttttcaaaaagtctaatgattctggaacacataatctttaatgctggcgacgaggaaataccatggggtgtcccactgtattaggggcctgaagtatgtagttaaaggcatggcgagagtgagagtcactaaagctaaaagcttccattctgaacagtatggatggtgctagggagatgagaaaaaattccattttcaggtcacacctgaaaggaaatcacctttctaccaatagaactgaat

SEQ ID NO: 311257 - DNA, 542 bp, Homo sapiens
gctgctcaattttccacaatcatgtaagtttgtaaaatatcctcaagattatatactgcttgaatctactatgttgcatgtagagtatttctagatgggtaagaatcagatcaagtggcaaggacgaagagagatgtattctatattgagcatattttctatttttcgaggctctgcctggaaaggggacagaatgctcagtgttgcctcattttctcatcaaacttgacactagttcactggggaaattgcatttccaagttgttttaaatcargaagttgttttaaaatcaggctgtgtgtttgtgtttgcactgttgccacttaatccttgatcctgttaaatgtttcttccatacagaggaacataaacaatagcggctttcttgatttcctaacattcatgtaaagataagttggaaatattatatttaataaacgtaaaatactgtaattaaatgtaaacagaaaattcaattaccattttggtggattgttggataataacattgaatatttgtcacagtagccatttggaagag

SEQ ID NO: 311258 - DNA, 594 bp, Homo sapiens
aaggtctaagtctcatgtaattctggagaaaaccacaacttttgagttattatattggtgagttaagacttctcagtaaacatgttactgtttaaactagagctttkaatcagaagagagtaataaaatttagaagtcttacaaatacaaggaatagaacgccactatttaaatttgggatcaaaagaagaatgctgttggtatatgtgccatttaactggcctttatcatggtctttagataatccagaattacttgaaatattactcacgagcgtgtgtgcagggtttcaggtgtatgttaagaatgcctggcagcacgtcttctggcaagatgcccacgtttgtgtgcatactcaaaggccccaggtttccaggtgcccaagcatcttagtggtgagatgcagaaagaatgcaagtagtatttcctttcatcttatcatcgagtgtaaaatgttccgatgaatatggtagcaagtgtcttccttcctttgaaatatgagttttcatcagctgttggatatgctcacgtaactaagccaagcaaaatccaacacaaatttaaaagttgcttggctacctctttagaaaattt

SEQ ID NO: 311259 - DNA, 421 bp, Homo sapiens
tcacgagcgtgtgtgcagggtttcaggtgtatgttaagaatgcctggcagcacgtcttctggcaagatgcccacgtttgtgtgcatactcaaaggccccaggtttccaggtgcccaagcatcttagtggtgagatgcagaaagaatgcaagtagtatttcctttcatcttatcatcgagtgtaaaatgttccgatgaatatggtagcaagtgtcttccttcctktgaaatatgagttttcatcagctgttggatatgctcacgtaactaagccaagcaaaatccaacacaaatttaaaagttgcttggctacctctttagaaaatttttgttatgtaatatacattttggaagtttttaatgtaactgcccaggtgtgcagattttcagctggagattgatgcatcagcattctattcctt

SEQ ID NO: 311260 - DNA, 510 bp, Homo sapiens
cagcctgttttagcctttcagcattcgagaaagatgtttttccaagtcttttgtgtactgggttcttctagatagagaaaggatacaacagtgaatgaagcatgaccatgtaattatggagggaagggtctgtccatattgtctcacacgtctctgtatatctacagaacgtatctcatatgatctctatttatagaaatgatgagstttagctgatttgataggttatgcctaaaccagaagccagccttcctgactagtgcactttttctttccactgaatcatgatgcttctccatgtcttttgtcaacctagagcctaataggagaataaaaacattcgaattaatgaaattaacacaaggtagagacccatagagcaacacaagttggaagctgaagtccaaggaacagagagccatgggttagcaatgtgttgtgatgggcagcccctcagatggtccctggagatccccaccttctgagactcacggccctgtgatattccct

SEQ ID NO: 311261 - DNA, 604 bp, Homo sapiens
ggttaaattgatttatatatatttttgagaaagtgattaaaactgcattgtagacctgcagggggtgggtgggggtgggaattgtaaagagtcgcagacaaggatgggtgttactcagcatcttaaagcagcaaggaggaaatgagtgtgagatatctgacctccaatctgaaatgtaatcacattaacrccttgctgaatattagagaataaagtaatctgaactaaacatttatcactgaatattcttttaaattttggatttatctgaaatctagtcttctgcttaatcatttaaatgctaataaacaagacagagtataatgaagaagcccaggtagttctgtaccaggctctcttgtttcactctaatggtttatcattcaggtaaaggttccatccctcagtagatgcagttggaatggattttttgtttttcttttttttggatacacggggaagctaaaacacaaattgaaaaaaagtcaactcgtttaaccttgggcttcatagcaaggctcacttgagcaggaaggatgttctaatagttgaatttatgtgaaaagttggcatggggaggtaacattaaccaactacatgtcag

SEQ ID NO: 311262 - DNA, 604 bp, Homo sapiens
ggttaaattgatttatatatatttttgagaaagtgattaaaactgcattgtagacctgcagggggtgggtgggggtgggaattgtaaagagtcgcagacaaggatgggtgttactcagcatcttaaagcagcaaggaggaaatgagtgtgagatatctgacctccaatctgaaatgtaatcacattaacaccttgctgaatattagagaataaagtaatctgaacwaaacatttatcactgaatattcttttaaattttggatttatctgaaatctagtcttctgcttaatcatttaaatgctaataaacaagacagagtataatgaagaagcccaggtagttctgtaccaggctctcttgtttcactctaatggtttatcattcaggtaaaggttccatccctcagtagatgcagttggaatggattttttgtttttcttttttttggatacacggggaagctaaaacacaaattgaaaaaaagtcaactcgtttaaccttgggcttcatagcaaggctcacttgagcaggaaggatgttctaatagttgaatttatgtgaaaagttggcatggggaggtaacattaaccaactacatgtcag

SEQ ID NO: 311263 - DNA, 604 bp, Homo sapiens
ggttaaattgatttatatatatttttgagaaagtgattaaaactgcattgtagacctgcagggggtgggtgggggtgggaattgtaaagagtcgcagacaaggatgggtgttactcagcatcttaaagcagcaaggaggaaatgagtgtgagatatctgacctccaatctgaaatgtaatcacattaacaccttgctgaatattagagaataaagtaatctgaactaaacatttatcactgaatattcttttaaattttggatttatctgaaatctagtcttctgcttaatcatttaaatgctaataaacaagacagagtataatgaagaagcccaggtagttctgtaccaggctctcttgtttcactctaatggtttatcattcaggtaaaggttccatccctcagtagatgcagttggaatggattttttgtttttcttttttttggatacacggggaagctaaaacacaaattgaaaaaaagtcaactcgtttaaccttgggcttcatagcaaggctcacttgagyaggaaggatgttctaatagttgaatttatgtgaaaagttggcatggggaggtaacattaaccaactacatgtcag

SEQ ID NO: 311264 - DNA, 690 bp, Homo sapiens
ggaacatatcaaacaaatgtgtggtctcatggtttgaaaaattgtgaatcaaatcatattgcatatgaggtcattcattatttttttaaatttaaataatagtactgatgtgggggctaacttgagccaagcattgttctgtgcacttcatacacacacacacacacacacacacacacacacacactcacacacacttaaaattttaaaatatgtaactgaaaaagattgaatacattcattccaggtgtatgtattgaacatattcatgctgagttgatatacacattgattaccacaatcagattaacacatccatcaccacccacacttatatataagatctctagaagttattcatcttataactgaaagtttgtaccttttgaccartatctccctattttcctacctcccacccctgggcaaccaccgttatgctttctgtttctatgagttcaagttttttagattccttatttgtctttctgtgtctagcttatttcacttagcattatgccctccaggttcatccatgatgttgcaaatggcaggattgctttcttttttatgggtgaataatattccatggtgtatatgtaccacattttctttatccattcatctgttgatggacactggttggttttatatcttgtctcttatgagtagtgctgcagtgaacatgaa

SEQ ID NO: 311265 - DNA, 511 bp, Homo sapiens
tggtgtttagtcatgctgagtactttttcttaagtttagctgcttgttatcatcttttgagaaatgtcttttattgtcctttgccactttttaatgaggttgtttccttttttcttgttgattcatttaaatcccttatagattctggatattagtcctttgtcagatgcatagtttgcaaatattttctcccattctgttggttatctgtttattcttgtcaagagtttcttctgttgtgcagaagctctctttggtttaattgtgccatttctctatttttggttttgttgcatttgtttttagggtttcakcataaatgtttgcctagaccaatgtctaaaagagtatttcctagcttttctcccagagtttttatagtttgaggtcttacttttaagtttttaatgcatcttgagttaatttttatgtgtggtaagaggtagtggtccggtttcattcttctgcatatggttagccagttttcacaacaccattgattgaacagggt

SEQ ID NO: 311266 - DNA, 569 bp, Homo sapiens
tttatttcttatcgccttctattgtctctgctgttcctcttgttggaataaactcaagtgattttacaacatcataaatataactgccggttattggattacaaaataaaacactagcacctggcatttgcaagacattttatgctttgaaaatattttatactttaccgaatttgtttatctcaagttatgggaatattgcatrtggattattaactgtattctacaggtaggaaaatttagatcttgaggccaaggagcttgtccaaagttacatggatgctaatttaggcaaagacatgtcctgaaatatggatctcctactctgatacagatcaaatcattggaaatcttgagtttgggaattgttctctttgcctttccttctattcttacatctcttgttcactttggatttactatttcatatttacttatattctcctggtcattagggtattcttgggtgcatttgatagctcttattccttgaatacattgcatacctctggatataccaccttgtgctctaatgtcgtttgagaaacaacagttttcacattctgagg

SEQ ID NO: 311267 - DNA, 569 bp, Homo sapiens
tttatttcttatcgccttctattgtctctgctgttcctcttgttggaataaactcaagtgattttacaacatcataaatataactgccggttattggattacaaaataaaacactagcacctggcatttgcaagacattttatgctttgaaaatattttatactttaccgaatttgtttatctcaagttatgggaatattgcatatggattattaactgtattctacaggtaggaaaatttagatcttgaggccaaggagcttgtccaaagttacatggatgctaatttaggcaaagacatgtcctgaaatatggatctcctactctgatacagatcaaatcattggaaatcttgagtttgggaattgttctctttgcctttccytctattcttacatctcttgttcactttggatttactatttcatatttacttatattctcctggtcattagggtattcttgggtgcatttgatagctcttattccttgaatacattgcatacctctggatataccaccttgtgctctaatgtcgtttgagaaacaacagttttcacattctgagg

SEQ ID NO: 311268 - DNA, 569 bp, Homo sapiens
tttatttcttatcgccttctattgtctctgctgttcctcttgttggaataaactcaagtgattttacaacatcataaatataactgccggttattggattacaaaataaaacactagcacctggcatttgcaagacattttatgctttgaaaatattttatactttaccgaatttgtttatctcaagttatgggaatattgcatatggattattaactgtattctacaggtaggaaaatttagatcttgaggccaaggagcttgtccaaagttacatggatgctaatttaggcaaagacatgtcctgaaatatggatctcctactctgatacagatcaaatcattggaaatcttgagtttgggaattgttctctttgcctttccttctattcttacatctcttgttcactttggatttactatttcrtatttacttatattctcctggtcattagggtattcttgggtgcatttgatagctcttattccttgaatacattgcatacctctggatataccaccttgtgctctaatgtcgtttgagaaacaacagttttcacattctgagg

SEQ ID NO: 311269 - DNA, 569 bp, Homo sapiens
tttatttcttatcgccttctattgtctctgctgttcctcttgttggaataaactcaagtgattttacaacatcataaatataactgccggttattggattacaaaataaaacactagcacctggcatttgcaagacattttatgctttgaaaatattttatactttaccgaatttgtttatctcaagttatgggaatattgcatatggattattaactgtattctacaggtaggaaaatttagatcttgaggccaaggagcttgtccaaagttacatggatgctaatttaggcaaagacatgtcctgaaatatggatctcctactctgatacagatcaaatcattggaaatcttgagtttgggaattgttctctttgcctttccttctattcttacatctcttgttcactttggatttactatttcatatttacttatattctcctggtcattagggtattcttgggtgcatttgatagctcttattccttgaatacattgcatacctctggatataccaccttgtgcyctaatgtcgtttgagaaacaacagttttcacattctgagg

SEQ ID NO: 311270 - DNA, 673 bp, Homo sapiens
ggaatgagacttgaacattcctgtccactgaatagtcagagtttgtcattttgaaaatagaaaatagaagagaaatacattatcaggggccactaaatatctgttaaaaggggastgacaggatgaaggcagtacagaatgctgggctgagagcaggactgagatcctagaggcagaatcccagtctacccgtactctctgggaggaagtgatgagaacttgcagcagggtggtggtagtgaaagagaagaatgaaagacaaggaagcatcagtggaacttgatgtgtggctggataccagaaatgcagaggaagttagtcaaaggttcccgtcctgatgactggagatcatggtatcactgactgagctctaggggttgtgaaatagagctcattaggcagaggatggtaagtgtctggtttttttatggttttccgtgcatttaccctactgcctagcacaatgcctgatgtgtagtaggggtattagttaaaatactggtttggtggtctctgttgtgacttgtaaaagatgaaaagttaattttatctttctcatggagaaatctaggcaggtaagtgcccagggaggtgcagtgcctgtgttccatcaggttgtccagagattcattccccaggccttctgttgcttcaccctcagggcatagtataa

SEQ ID NO: 311271 - DNA, 673 bp, Homo sapiens
ggaatgagacttgaacattcctgtccactgaatagtcagagtttgtcattttgaaaatagaaaatagaagagaaatacattatcaggggccactaaatatctgttaaaaggggactgacaggatgaaggcagtacagaatgctgggctgagagcaggactgagatcctagaggcagaatcccagtctacccgtactctctgggaggaagtgatgagaacttgcagcagggtggtggtagtgaaagagaagaatgaaagacaaggaagcatcagtggaacttgatgtgtggctggataccagaaatgcagaggaagttagtcaaaggttcccrtcctgatgactggagatcatggtatcactgactgagctctaggggttgtgaaatagagctcattaggcagaggatggtaagtgtctggtttttttatggttttccgtgcatttaccctactgcctagcacaatgcctgatgtgtagtaggggtattagttaaaatactggtttggtggtctctgttgtgacttgtaaaagatgaaaagttaattttatctttctcatggagaaatctaggcaggtaagtgcccagggaggtgcagtgcctgtgttccatcaggttgtccagagattcattccccaggccttctgttgcttcaccctcagggcatagtataa

SEQ ID NO: 311272 - DNA, 521 bp, Homo sapiens
acttgtattatgtgatacgcaagtgttcaaacaatttataagagctaaccatcaccacccacatataagattatacaggaatggaggaattttggctgacttactgtatataattattgagccaacgtagatggcagactctaccacttatgatttagggttttgaaacagtattttaaagtacaaataatctcaaaattggtaatctataaagcatattaattattgtattgacgaactaaaaatagatttaaccttcctccatttataaggatgcatccattatataggttctgtacaaaattgccaagcttacttttctctttttctttttttacaacaaaatgtatttmaattttttgataggaaaagccattagctttccgtaaactgttgcacaatcactggaaatgctgagtgagagtctttctgaaaactgtagaaggctaaagataatgaaaagtgtatctcttcattgtcaagtcctttgagaatctgataggctctatctagctgcaccc

SEQ ID NO: 311273 - DNA, 521 bp, Homo sapiens
acttgtattatgtgatacgcaagtgttcaaacaatttataagagctaaccatcaccacccacatataagattatacaggaatggaggaattttggctgacttactgtatataattattgagccaacgtagatggcagactctaccacttatgatttagggttttgaaacagtattttaaagtacaaataatctcaaaattggtaatctataaagcatattaattattgtattgacgaactaaaaatagatttaaccttcctccatttataaggatgcatccattatataggttctgtacaaaattgccaagcttacttttctctttttctttttttacaacaaaatgtatttaaattttttgataggaaaagccattagctttcsgtaaactgttgcacaatcactggaaatgctgagtgagagtctttctgaaaactgtagaaggctaaagataatgaaaagtgtatctcttcattgtcaagtcctttgagaatctgataggctctatctagctgcaccc

SEQ ID NO: 311274 - DNA, 448 bp, Homo sapiens
atctctcttactggttgccctaagtttcaaacacctccaaagcctacagacataggtcatttcctaagaaacacacgaaggaaactaacattgattaagtgcttaatatgggtgcrggtgtgtgtacaatcagaactcaatagccttttgaactaatgagaaaactgaggactagagatataaagtaatttgcccaggtttattcagccagccagtggcagagctgagattcaaatctgtcttggacagcttgggctgccatagcaaaatatgacaaactggggtgcttaaacagaaatatattttctcataattctgaaagctgggaagtctaagatcaaggtgccagctgactcagtcactggtgagaactctcttacaataataagcatttgtgtattgaaacatatctaaacctagaaaaagtaatgtgatacactacaaacta

SEQ ID NO: 311275 - DNA, 448 bp, Homo sapiens
atctctcttactggttgccctaagtttcaaacacctccaaagcctacagacataggtcatttcctaagaaacacacgaaggaaactaacattgattaagtgcttaatatgggtgcaggtgtgtgtacaatcagaactcaatagccttttgaactaatgagaaaactgaggactagagatataaagtaatttgcccaggtttattcagccagccagtggcagagctgagattcaaatctgtcttggacagcttgggctgccatagcaaaatatgacaaactggggtgcttaaacagaaatatattttctcataattctgaaagctgggaagtctaagatcaaggtgccagctgactcagtcactggtgagaactctcttacaataataagcatttgtgtatygaaacatatctaaacctagaaaaagtaatgtgatacactacaaacta

SEQ ID NO: 311276 - DNA, 448 bp, Homo sapiens
atctctcttactggttgccctaagtttcaaacacctccaaagcctacagacataggtcatttcctaagaaacacacgaaggaaactaacattgattaagtgcttaatatgggtgcaggtgtgtgtacaatcagaactcaatagccttttgaactaatgagaaaactgaggactagagatataaagtaatttgcccaggtttattcagccagccagtggcagagctgagattcaaatctgtcttggacagcttgggctgccatagcaaaatatgacaaactggggtgcttaaacagaaatatattttctcataattctgaaagctgggaagtctaagatcaaggtgccagctgactcagtcactggtgagaactctcttacaataataagcatttgtgtattkaaacatatctaaacctagaaaaagtaatgtgatacactacaaacta

SEQ ID NO: 311277 - DNA, 551 bp, Homo sapiens
tctacaggttagtaggaatcactgaggaagtgggatatgttagattaatagatgcaattcattaatcgcctgaattataatatacaggaaagacaagaagaaagaaaaataagatctagaaacaaagaggatttacgttgctatttgagcaagcttttgaaagctttaggaagagtggacagaataatagaattattcaatttaaatggatttactcttaattgtacttgctgatatctagaaaatgaaagttaagaaaaaaactttatttcttagcaataaaaggcatttaactattgactttaaaaagtctaccgcacagcttacattatttaatatgacaaattattgtttcctctacagtgctgtgtyaatagctaatactttatatagctaccttctgaagctgtagagaggcttataactttaacgtttcatgctgacatttagttgatcctagtttatctggtataaagtagttgctcacaattaattactcaagaactgagcttcgtgtatgtctgtggtagaaatctgtgggagtatgtgag

SEQ ID NO: 311278 - DNA, 562 bp, Homo sapiens
  misc_feature (1)...(562): n = A,T,C or G
nnnnnnnnnnnnnnnnnnnnnnnnnnnnnnnnnnnnncatatgtaactagcctgcacactgtgagcatgtaccctaaaacttaaagtataataataataaaataaaataaaaaataaaaaaaaagaaaatcacatgcctttctatgtaacaacaacaaacacatgaaggccaaaattagcaatgcaataccatgtaaaatcactgaaaaatactggatatgaaatacttaagtattactctatcaaaatatgtatagaacttttatgtggaaaattacacaatgctgatkacagaagtgaaacaatgagctaataaatgaaagacacactcttttaccaattataagactcaatacaggaaagacgtcaattctcccaaacagatacaaaggtttaacataattcctattagaatctcagaaaaatatttttacatgactattctaaaacttacatggaaaggcaaaagaactaaaatagtgaaaataattctgaaaaacaacaaagtcagaggaattagcccactcaatttcagggatattggaagtgtgatactggtgga

SEQ ID NO: 311279 - DNA, 612 bp, Homo sapiens
gattaataacttactagcctggacatgcaatgaaaacattttttctaaattgtgtacaaatctggtaaaaagctgaatttgtaaagagtccagcactaatggattggaaaagtgtaaaatagttgggatggaaaaactatgcaagaagaaactcctgtgtagatatgaagccaaacatttcccaaagcaaagatgkatgttatgtcttttattacaaggtttcctttctttgtttttcttactgctgtgtcctcaacaccttgaatagggcctgtaatataatagatgccgattatgagttcaattgtgtccctgaaaaacatacgttgaacatattccagtaattgtgagtgtgaacttatttgaaaataaagtttttgcagttgtaaccaagttcatatgagatttattattgtgggccttgaaccaagatgatgatgtcctcttaagaaaagaagacagaaacacacagagagaatgtcatgtgacagaaattgaagagatgcagcttgaagccaaggaatgcccaggattgatgaccaccactagaaataggaataggtaagaaaggattctacccagggtctaggggataaatggccctgctgatcc

SEQ ID NO: 311280 - DNA, 612 bp, Homo sapiens
gattaataacttactagcctggacatgcaatgaaaacattttttctaaattgtgtacaaatctggtaaaaagctgaatttgtaaagagtccagcactaatggattggaaaagtgtaaaatagttgggatggaaaaactatgcaagaagaaactcctgtgtagatatgaagccaaacatttcccaaagcaaagatggatgttatgtcttttattacaaggtttcctttctttgtttttcttactgctgtgtcctcaacaccttgaatagggcctgtaatataatagatgccgattatgagttcaattgtgtccctgaaaaacatacgttgaacatattccagtaattgtgagtgtgaacttatttgaaaataaagtttttgcagttgtaaccaagttcatatgagatttattattgtgggccttgaaccaagatgatgatgtcctcttaagaaaagaagacagaaacacacagagagaatgtcatgtgacagaaattgaagagatgcagcttgaagccaaggaatgcccaggattgatgrccaccactagaaataggaataggtaagaaaggattctacccagggtctaggggataaatggccctgctgatcc

SEQ ID NO: 311281 - DNA, 636 bp, Homo sapiens
ttctgctattagcccttaaagtcttttgattttcattttggttaaatgaatgatattacttccacagtgatctgtaatcttattttgaccaagagttttaaacctttgatatttttgacaagcttcctaaagtcaagttctagtttagggtttttgacttcaatctaattttggaacattccagaagaaccccagagtgtctgaaagagatatattaaactaattaggcatatttcatatattacattatatattattttatataataaattatatattaaactaattaggcttatttaacaattaaattacattgtcaaaataaataatgctaaaccttctttaagttgtattgatatagacatgttataaaggtgtttcagaaattgtatgaaattcatagaaatttaatagtctttgcataacaattttggtaataattctactcattattttaatatgttatgtccaatagaggtaaccaaattatcttgtcaattgctggttataacaaactctcatcagatttttgtcatggctattctaagcctttgtaattcacagttatagttttgatttttctctaaaagtatttgcaaccrgctatagtgtaaaaagtgtttttttcttcaagaa

SEQ ID NO: 311282 - DNA, 595 bp, Homo sapiens
cttaaccttgagttgcttctcttgtagtgaagacactaacttaccttttcctttatacttgagaggagtatctaattaaaataaagattttctccacatttggatataaatgcttaatttttgcagctgacmattttaccacttcttgcttcctcattatatattgagtaaatatcaacttcatagagtagaataaaccattacagctctgattaaagtgaccctaacaatctgctgttgattgcctccttcagggagaattcattgataaataataatataaggaaacaaaagatgctattttagttgctctactaaaaaccaattcttagaagtaaggcaatataaaaacaataaaaagtttgtttgttcctctttttattttccccacttaaaattatatggcaataaaacattctttctattccaactctctaattttacacatgaaaaaatatataactagaaaagtaaaaggtactgtcccaccttcaccaagttagttgtttccagaatgttgattcagttaaaattctacacttacagattctatctgcactttccctgactttactgacttctaaactccagacct

SEQ ID NO: 311283 - DNA, 595 bp, Homo sapiens
cttaaccttgagttgcttctcttgtagtgaagacactaacttaccttttcctttatacttgagaggagtatctaattaaaataaagattttctccacatttggatataaatgcttaatttttgcagctgaccattttaccacttcttgcttcctcattatatattgagtaaatatcaacttcatagagtagaataaaccattacagctctgattaaagtgaccctaacaatctgctgttgattgcctccttcagggagaattcaytgataaataataatataaggaaacaaaagatgctattttagttgctctactaaaaaccaattcttagaagtaaggcaatataaaaacaataaaaagtttgtttgttcctctttttattttccccacttaaaattatatggcaataaaacattctttctattccaactctctaattttacacatgaaaaaatatataactagaaaagtaaaaggtactgtcccaccttcaccaagttagttgtttccagaatgttgattcagttaaaattctacacttacagattctatctgcactttccctgactttactgacttctaaactccagacct

SEQ ID NO: 311284 - DNA, 593 bp, Homo sapiens
acatagaaataagcttgatgagaagactgcaggcccacaagaaattccacatgaagacaaaggatgaggaaacttggaaccatcagttcattaggagatgttctgttttcagttgttgctaattctatgmtggacaaagatccttctcagtggtcctcaaacttcaggagcagtctatgtgtattaaaatattggatctagctttaaaacatctaatatccattgaccgtttccatgatttacatgattttgttagtagtgaaaagctattttttgtgcctgcctatcctccagtcttttttttttccaagagctgtgcaagcttgaatatattacatgagtctttaatggattaaatataaataacaagcaaagaggcactgaagactacagctactctgaacctcttaaccttcccattccacttcttcagaggtttatgaatgaataattttaattaattaaatactcaatcagtgagcctccgaacaaacaattctgactaatttttcttccactaagctaaaatttaaaaaaatcccatcaccattataggaaagggctgcgtgaggaagtattaaagaccaaggaag

SEQ ID NO: 311285 - DNA, 593 bp, Homo sapiens
acatagaaataagcttgatgagaagactgcaggcccacaagaaattccacatgaagacaaaggatgaggaaacttggaaccatcagttcattaggagatgttctgttttcagttgttgctaattctatgctggacaaagatccttctcagtggtcctcaaacttcaggagcagtctatgtgtattaaaatattggatctagctttaaaacatctaatatccattgacygtttccatgatttacatgattttgttagtagtgaaaagctattttttgtgcctgcctatcctccagtcttttttttttccaagagctgtgcaagcttgaatatattacatgagtctttaatggattaaatataaataacaagcaaagaggcactgaagactacagctactctgaacctcttaaccttcccattccacttcttcagaggtttatgaatgaataattttaattaattaaatactcaatcagtgagcctccgaacaaacaattctgactaatttttcttccactaagctaaaatttaaaaaaatcccatcaccattataggaaagggctgcgtgaggaagtattaaagaccaaggaag

SEQ ID NO: 311286 - DNA, 593 bp, Homo sapiens
acatagaaataagcttgatgagaagactgcaggcccacaagaaattccacatgaagacaaaggatgaggaaacttggaaccatcagttcattaggagatgttctgttttcagttgttgctaattctatgctggacaaagatccttctcagtggtcctcaaacttcaggagcagtctatgtgtattaaaatattggatctagctttaaaacatctaatatccattgaccgtttccatgatttacatgattttgttagtagtgaaaagctattttttgtgcctgcctatcctccagtcttttttttttccaagagctgtgcaagcttgaatatattacatgagtctttaatggattaaatataaataacaagcaaagaggcactgaagactacagctactctgaayctcttaaccttcccattccacttcttcagaggtttatgaatgaataattttaattaattaaatactcaatcagtgagcctccgaacaaacaattctgactaatttttcttccactaagctaaaatttaaaaaaatcccatcaccattataggaaagggctgcgtgaggaagtattaaagaccaaggaag

SEQ ID NO: 311287 - DNA, 593 bp, Homo sapiens
acatagaaataagcttgatgagaagactgcaggcccacaagaaattccacatgaagacaaaggatgaggaaacttggaaccatcagttcattaggagatgttctgttttcagttgttgctaattctatgctggacaaagatccttctcagtggtcctcaaacttcaggagcagtctatgtgtattaaaatattggatctagctttaaaacatctaatatccattgaccgtttccatgatttacatgattttgttagtagtgaaaagctattttttgtgcctgcctatcctccagtcttttttttttccaagagctgtgcaagcttgaatatattacatgagtctttaatggattaaatataaataacaagcaaagaggcactgaagactacagctactctgaacctcttaaccttcccattccacttcttcagaggtttatgaatgaataattttaattaattaaatactcaatcagtgagcctccgaacaawcaattctgactaatttttcttccactaagctaaaatttaaaaaaatcccatcaccattataggaaagggctgcgtgaggaagtattaaagaccaaggaag

SEQ ID NO: 311288 - DNA, 550 bp, Homo sapiens
tggcccacctcttagaacctctcatttcctttccatcatggaaatctatcctcaaggaaatcacttctcagtgttccatctgctattctactactcctcagggattatttaggccccctcccttccctamatatcaagctcgaggatttgcccccacccaggcctggcaaattagctttactcaacacgccccgagtcagataactaaaatacctcttagtctaagtagacactttcattacataaatagaggcctttcctacagggtctgagaaggccaccacagtcatttcttcccttctgtcagacataattcctcagtttagccttcccacctctatacagtctgataacagaccagccttaattagtcaaatcagccaagcaggttttcaggctcttagtattcagtgaaacctttatataccttactgtcctccatcttcaaggaaagtagaatggactaaaatcttttaaaaacacacctcaccaagctcagccactaacttaaaaaggactggacaatacttttaccactttcccttctcag

SEQ ID NO: 311289 - DNA, 595 bp, Homo sapiens
ggcaaatacatatgcatgaaaacttctggatattttattattttttcgtatttctcattttaaaaaacagacactttatgacaaatcaattcaccacagttagtaagagtaggcaataagtgagccagaagactagaaatatgaggtttacagacactttggttacaattaaccatgttctagtttttcctattattagagctaatgaactgtttatgttattattgttcatgttaaaaacatatatttctttttaaacttactttattaactgacaaataataattgtacatattgatggggtacatagtgatattcgacatayagaatgtataatgatcagtgagggtaattaacatattcatcatctcaaacatttatttctttgtgttagaaatggtcaatatcccccttatagctatttaaaacatgtattattgttaactatagtcatcctgcagtgttatagaacactgcaacttatccctcctacctagctgtaattttgtatcctttaacacatttctgcctatccctccttttaccttacctttcctgtcctgtagtatcagttttttcctgtgttctacatttt

SEQ ID NO: 311290 - DNA, 310 bp, Homo sapiens
tcgtagtaatttttatgcagcaatataaagctaatagagatgttttatgtctgttttatttttaccctatggtggagggtgaggaaaaagctcagaataaaagaaagacattaaagatgttgaaaatccataatgggcgcataatgcaatgaacctggacttgggtctttctttgaggaaatgagggatagagaatatgtgtttctctctctctctctctctctctmtatatatatatatgtgtgtgtgtgtgtgtgtgtgtgtgtgtgtgtgtgtgcgcgtgtactactggaaattgaagggtgggagt

SEQ ID NO: 311291 - DNA, 407 bp, Homo sapiens
aaagtactattcctgggtgttctctgagggtgttgccaaaggagattaacatttgagtcagtggattaggagaggctgacccaccctcaatgtggatgggcaccatctaatcagctgtcascatggctatattaaagcaggcagaagagcatggaaggacttgacctgctgagtcttccaaacttcatctttctcctgtgctggatgcttcctgcccttgaacatcagactccaagttcttcagcttttggactcctggtcttagaccagtggtttgccaggggctctcaggcctttggccacagagtgaaggctgcactgtcagctttcctacttttgaggttttgggactcagactgatccattactggctttcttgctcctcaacttacagatgacctatcatg

SEQ ID NO: 311292 - DNA, 407 bp, Homo sapiens
aaagtactattcctgggtgttctctgagggtgttgccaaaggagattaacatttgagtcagtggattaggagaggctgacccaccctcaatgtggatgggcaccatctaatcagctgtcagcatggctatattaaagcaggcagaagagcatggaaggacttgacctgctgagtcttccaamcttcatctttctcctgtgctggatgcttcctgcccttgaacatcagactccaagttcttcagcttttggactcctggtcttagaccagtggtttgccaggggctctcaggcctttggccacagagtgaaggctgcactgtcagctttcctacttttgaggttttgggactcagactgatccattactggctttcttgctcctcaacttacagatgacctatcatg

SEQ ID NO: 311293 - DNA, 500 bp, Homo sapiens
actcccagtgctgggaaacctttgaagtgactgaaaacagacatttataattatggaaaggtgcagtgtccagcagggatagtacaaagacacgtctgaggtaggtacaggcakagattgggaggtggcagggacactgaccttgcagcctctcaacccaaaagcctttggggtcaactcagtaatcatatgtaaaacggcaagtgtggagtgagaacagtggcaagcagctagaaaccaaattattttagatctcatatttcaaaaaagaaaaaatcctcagcgcccccaaagctgatcttaatacattccgcctgtgcagggttattgtgtagctgcccgatttattaagctgttactaatactcagctttctgcaaaaagtgttctataagtgtaaaaacatctcaggatgagctttttcaggtcccttagttcccagatcaatggaactgaaatatttttaaatgtagttattatataaatcagatgatgtactaa

SEQ ID NO: 311294 - DNA, 614 bp, Homo sapiens
aggtcccttagttcccagatcaatggaactgaaatatttttaaatgtagttattatataaatcagatgatgtactaaaggatgaaaaatgattaaaatctataacttaactgctgtttaatttaaatcaaaacgattttgagccartgatttggtatctaatttccagaactcaattgaagaccttattgcatgccataatatgtaggactaacactcaattaggtatcaaaggcaaactagataaagtcaaaaaaggtcagttataatgtttattccttagactttctgtcttgttttgcctgacactcacaggggctcagtgagctaatggcatcctcttgcttcttggtgacgttcattatggagcctgatttccccaaatggttctttcatcagtcaaatatttattgatcataaaaatgttctagggtctattctgggtatttgtggtacagtactgtacacagaaactccctgatcttacagagattacaggctggggagggacacaggcattgaccaataatcaaacagaaaaatgtaaattatactatgataggggctttaagtaaaaggtacttgaaggagttggtatgttctgaagaagcaggt

SEQ ID NO: 311295 - DNA, 614 bp, Homo sapiens
aggtcccttagttcccagatcaatggaactgaaatatttttaaatgtagttattatataaatcagatgatgtactaaaggatgaaaaatgattaaaatctataacttaactgctgtttaatttaaatcaaaacgattttgagccaatgatttggtatctaatttccagaactcaattgaagaccttattgcatgccataatatgtaggactaacactcaattaggtatcaaaggcaaactagataaagtcaaaaaaggtcagttataatgtttattccttagactttctgtcttgttttgcctgacactcacaggggctcagtgagctaatggcatcctcttgcttcttggtgacgttcattatggagcctgatttccccaaatggttctttcatcagtcaaatatttattgatcataaaaatgttctagggtctattctgggtayttgtggtacagtactgtacacagaaactccctgatcttacagagattacaggctggggagggacacaggcattgaccaataatcaaacagaaaaatgtaaattatactatgataggggctttaagtaaaaggtacttgaaggagttggtatgttctgaagaagcaggt

SEQ ID NO: 311296 - DNA, 511 bp, Homo sapiens
aggggctttaagtaaaaggtacttgaaggagttggtatgttctgaagaagcaggtaggcttccctgagaaaatgacagttggactgaaagctaaaggattagtagtcattacccaggagagccagggtatggatgattgcatcaggagcattaggagagtaggtcgggtagagggagcagcaagtacaaaagtcatgtgataggacaagataaataacacttttatgaagaaggagaagggttagttatggaggggccagatgatgcagacttttatggagcagagttagggagagaccagattatgcagaccttgttaatgactttgatcctaatcccaaartcaatcaaaatcctttgaaagattttaagcatatgtctgacaaaatgagatctgcatattgaatgatcatttttgtttgagtgtggagaatgcattgagaggaaagaaaggaacaagagtgtcgcaagagtgtcggagaggaaactagttaggaggccactagaatga

SEQ ID NO: 311297 - DNA, 538 bp, Homo sapiens
caaaattatgagaagttggaactcggaagctggttttttatgggattttactaattttccctctctatttgacttttcaagtgaatcacacttttcttcctgtaaccttcctattcaggtatgatatttgaagtgggtcatgttacatacctccctgtccccctccatcgacaacttaaccttttcattattcaacatgagcctaatattacagtcatgagaaatattttccccaaaacaataggtgctacatgtcatattccttgacrttcctgcaaagtttctcttaatcctcaagtgtactttcttgaaagcccacttcaataaacatcccaccccattaaatatcttagaagtaactccacacatatgaaaatgctacagctcttgtagttatattttggttaaaattcaattgaagatcattaccaataataacaatgacaccaataaaacaagaaaaataatgcatgtcaatcacatatgtaaacagggacaaaaggtttagtttaagtggaatggcatgtatttattaaat

SEQ ID NO: 311298 - DNA, 505 bp, Homo sapiens
ctatctgcacagtagatgaaacgtgatgtaacaacaatcagtggcaaaattccaaaagtaaaatccaatgatacttcatgagctggaagttcattttgacactgaaagttgctttccctgtaatagtgacttatttagaacaaaatttcatagctattctcaagggacactaaaaatattttttacaggcctacattgatgaatttctgaattgaataattggaatgttgttagacacaaacatgatgcttatatagattttctactattgttgtkttgttaagaagccactttttgggtttcaattttgtatatgttatttctaatcctcacaaaaccatgcagactgtatattcctgttttataagtgagcaaaagggttcaaagaggttctatttctttttggttttatgggcaacaggtgctcaaactaaatcttcaaccattcagattaaaagtctttgtgtgtcttcaacaccatgttatttctctaatcttcagtata

SEQ ID NO: 311299 - DNA, 542 bp, Homo sapiens
tttctgaattgaataattggaatgttgttagacacaaacatgatgcttatatagattttctactattgttgtgttgttaagaagccactttttgggtttcaattttgtatatgttatttctaatcctcacaaaaccatgcagactgtatattcctgttttataagtgagcaaaagggttcaaagaggttctatttctttttggttttatgggcaacaggtgctcaaactaaatcttcaaccattcagattaaaagtctttgtgtgtcttcaacaccatgttatttctctaatcttcagtataagcacacaatattttagtctgtctacaaaatattaatttacaaaaatgaatacatatgctctaggtcacttttctgggaagaaatgttgtctaaagttaggattctatgttatccatggaatctggcaattgactattgctactcatttccaagaagcatagaattctccaaggttaggctcaaraaaagtctttctttttgtcaacacttgtcttctagccattctatgttgttcattt

SEQ ID NO: 311300 - DNA, 582 bp, Homo sapiens
tactaatttcatcaatcaagtaaagttattcaaagcaacatacatttataataatattgactacaraactgaaaatgaaaactatatgagtgatatgtgaaatttaagcattcttgattccaaggattatctaacaaagggtgcctcctttttctttgtccctacataggtttaaagtacctacctatcttttttatttgtgcattattatttcataatgttatatatgcttgtttgtgctatgcgagcactgaggtttgagaagtttaaggctgttagactggaaagggaataagggttacaatcttctctctatgaccttttgtaatttataagtccaaatggactgaacaacactgaataattaattcatgctgtgtttaagcccctatgcttgcatgttttacacgctaattattatgaattccttccttgtgcaaatctttgattccctaacctaaatcaggttaatacagactcatatgctccaattatggtgatatctttctcttaaccttggcagaaggaacattatagtaggtcaaaaagtatctttgagtttcattgagaaattaacccata

SEQ ID NO: 311301 - DNA, 648 bp, Homo sapiens
atcacacgaaactatgtatgaaaacgtatttctgtctggaaggacaaaaaccaaagaaacctgtctaagattgggaaagaaagcagggcaggggagargaaagtaaattactttaccttatacagcttatgtatttttaataggcacatattacttatgtaatttgagagaaaaataataaatataaagtagattaatgtaaagttactaaatgtgaaatccaaaagttcagctctgaaatgccatgattgtaaggaccattcctctattttaactccacctctccctcttccacaatggtccgccaaactattggtaacccttataagatgaggggttctccttggcagccaattcaccctgaagtgatagaggaaggtgagaaaccagaaatagaaatatactcaaaagtggctaggtgaagtggctcacacctgtaatcccagcactttgggaggccaagtcaggccaattgcttgtgctcaggagttcaatactagtctgagcaacatggtgaaaccctgtctctaaagaagataaaaaattagctgggagttgtggtgcatgcctgtagtcccagctactcaggaggctgaggaatgaggattgtttgagccctagaaagtcgaggctgcagtgagctgtaat

SEQ ID NO: 311302 - DNA, 598 bp, Homo sapiens
ggcctcaccttttactaaatgtaaagccttgggcaagtttagtttaatagaaggcttcaatcaatcacagcttttaaaatagcagcaataacaacaaacatctctcccactagattgtaaagtcctcgagggttgagagctcatttattcaactttatattctattaacatccctagtcaactggcctgcacatattaggaagataagctgcaatagcttgaagggtttatcacttgaaggtcttaaaagtctgctaaattattawaaaatgaaaaatataaaaatcaaaatagaaagaggctggacccactaacaactagagtcacagttttcaaaattttttaattaatttttttttaatttctcagcctagagacagatctatcaagtctagctctatgattcaatgatctctggcaagttactttttctgtccacacttcggtttccttagccacgtaaggaagggaacaaagttttccaaaatcccttacacctctaaaattaggtatccaaatttctacacacacttgtggcaaatctatgacaaaggcacgctgccaggcaccataagagacatgagagagaagagactag

SEQ ID NO: 311303 - DNA, 625 bp, Homo sapiens
aattctccacttcactgcacatgtaataaacacaaccataaagacaaatatgtttaaaagtaactgaaatgttattttaatttgttcccaatttcttaattcatgtctcctggcagaggaccaattttttagttctaaatcaagacgtagacgtgatattaacttccaataatgtacaataatcatctgaacttccctattcatagggaataaagaacaagatagcattcaatggttctcccttcccacctccccaaactgtaataatttatcacttaatacctgcactactgtactgaacagattctactctgagtagaggtggtatgttgattttcttcttccgggtacttcactatttctgccctgacaatacgctgtcaattccatacaacataaatgagacaaagaaaaaagaattaaaaaaaaaaagacaaaatggaaagtatgttcaatgactgaatatagaaggaaacaccaaagtagaaaaataaaattaacatataaatgtaaacatgtctcacacacacacgcacacacaaacagcagaatgtacacatacmaaaggaaagaaaaggaaaggaacaaagacccaagaaacattattctttgtaattctatttaa

SEQ ID NO: 311304 - DNA, 567 bp, Homo sapiens
attctttgtaattctatttaattactgaaatagatatgaccactgaacttcccaaattgtaagttccatttttgataacacaattatatataacatatataatgcccagaatttcagaagactgtgaagaattatgaggtttttctatgttaaagtgcaataaaaggattaattccatttccattaacaagctttactgaagatatactatgtgccagtcactctatactgtgaaagtatgggcgacttacacagaatctattcacaagttgctgaggccctaatggaaagagaaacacatatacaactaattgccatacaagttaaacacttaactagtggacttataatatgctgtgggaacacagaggaaggagtaattaattatctttgaaggtggggagaggaatgaagacatcagaggaaggcatatgccatttacaatttttatatttaatactatttattacttgtccaagacttccttatgatgctcgctccccmattcctcccgatcctaacctccatacttccaaattccatacagaaacaaacaagttcaaaatg

SEQ ID NO: 311305 - DNA, 506 bp, Homo sapiens
agaagggaactggggagaagcacgttccaggtgtgggttcagctcggcactcgccacaggcctccgcaggtggctctccttggcagcgaggcaaggcgcaaacccgctggcttgggaagcctgacgtgacccccgcccgccaagsctggcaggaagcgacgccggggttctccgcaagaagaaggcggcctccgggtgtcggccgcagccaggctactgtgctccggggcaaaccgctgcaaagtcctagtgaggcagaactcgacccccaacactcagcagcctgccgtccacccatccacacccccgtctcgccccctgccccaagctggcagatgccttgtcgcccctctaagaccgcacccggattgggtggctgcaaagacgctcgccaaagcgctcagagccccagggaagccgtggcgcctggcagctccctctcctctgggagatctgggggcgccagggctgccggggcctagcacagcgtgcgccacgaggcttaa

SEQ ID NO: 311306 - DNA, 504 bp, Homo sapiens
aagctgatttaaagattaaatgagatattgtgtgaaaagcactgtgcttgtggtcttttgcatagtaagtgcccagtaactatgaattagtttattaaccataatggccttctaaaagtactgagcatagatagcttcaacttgatttatcacaaattgcaaattagtagagctaaaattcatgttctgtgaaactttcctggagaaaatgtttattagagaatttccttattaccatcttatttctgttctcccctaccccaccccaccagagattgatagttcttatattatgtgttgggtagggccattctttcactgaacatttttgagaatctgttatgtgtattaagctagccattgtaaatttgctgaaaggttgagacaaagagagtctttaaggagtgatgggaacctgccaacctagatcttaatyttattctctgccatcttcaaattaaaaaaaaatttctttgttttgctgtgtctggttgttgagattaa

SEQ ID NO: 311307 - DNA, 616 bp, Homo sapiens
aggagctaaatttctcttggagaaactgttagtcatcatctcaatactctattgcatctgtcagtgtgttgaaaaatgctcagagttagattgagcaggaaaaacaaatgccaggaaaaaagagccaagagttaaatcaggatacaagtaagaatgaaagagaggctgagttcacaaagaaaagaacaataaaggaaaaagaatgggaatgttggtggctgccaagtatttgagaactgaatagggtatggagaaaaaaattcttgatttaagaataatgaaagaaggttaggtgtcagatgtttgtgtctggaagttcctgttagaaaaagctgttacagttttaaaataagttatttagtcaagataatgaagattaagtcagagcaccataaaaaatattaactgttatcctttgaagcagaatgataatactaattcaaaaacatggaagtgaaaaaattatcctgtcctatacaagaaaaaattttaaacagagataaaaaaccataattattcacactaaattagcaacaaagaggaaacatgtatgataggmtaaataaaaaactcagacgcaaaattatgaacaaatttcactaagtaatatatgtac

SEQ ID NO: 311308 - DNA, 624 bp, Homo sapiens
ccaactccttgggtttgaatcctggccaggccaggctatagctagtgagctattcaacatttttgttatttatatttctgtactcaaaagttgagatgtaacaatagttacctcataagtacctcagagtacacmcagaatagtagctgacacatgataagctcctagtacattttgtcaattattagctatcattgtcatttctcaaaagtgggcataggtttaaaagactgagtagtggagtagatgatctttatcataactgtgtccctaaacttctatcagtctaacaatagcatagccccgcctaacacgtaccaaataatcaggtatactttaataacaaaatcttactggtattgttgctggtaggtaaaaataagtacaggatttttattcaattcaccagtaaagtctgctgacaactagaaaaatggtttattttataaataaatggtcttggcgtaatattgaaaaggaatatacaagacatggtaaaagttgttatacagttgatgaatattataacaaattttcaattcatggctacagttaaaataatctattttttagttttatgttttataataaaaacatgtaactaaatatataacacttgttctc

SEQ ID NO: 311309 - DNA, 635 bp, Homo sapiens
ttattttagtaacatcattaagattgctctataataattaagattaatcgccattgtatttggataaagtcatttggtgatcatgatattcccagatccaagtaaattctgaatattagtatattgcccaaatccttcaggtagataaaaaattattacattaagaagcattcagctgaagttggtgctggaagcaatcttatgtcattttcctcagagtgcacattttctgctaaatttgtttttgtaaacaaaacagatgttttgatgtttttgtaaacagtcaaggtacagggaaaaatcaaatcaaagagcctgtcttgaatattgtttgatgaaagttaatcttttaggcattcagttcctgattctcaaaaatactwaaaatattattaaaaatcattgagtatggaaaaacccataaattcctgtgaagccttgtaaagttatgttcgtggtagctgaaaaaaggggtgagttatgcccaaatatgcaggtgaaaagtccatcccctatagtcatttggataaccctctctaactgaacataaaccagaataattgttcacttctctatacctatacttcttttagaaatggctttaagtagtctcacattatttaaattaatcgtga

SEQ ID NO: 311310 - DNA, 613 bp, Homo sapiens
atttttaaattgctattagtattattactatttggaagtttaagctgtttccatttaatggtagggactggaaaatagcacggatgatcaaagagcttttcctaggcatggagaatcccctgataaacagtattactgtgaagaaaacmagatatagttaacttaggtgattcaagaaaataatttaggggtatcactaggggttaaaggtaggatgcaaatagttaagcatgtatttctcttaaaagcatcatttttgtatcatattcccaggcaaagtatgaatacactgatggcatttgccatggtttccagctaccttagagaactaaggcccatcattcaattttatttgtaggtgaaatccagttctgcttggagtagcagaaataaaaaagacttcatttcaaatccttgttcttagtcattttatagatttataatctttggaaaatcacccgagctttttaaaaaaatctataaagcagtaataataataataccaatcttacagaattgttatgaggctagaatgatgtaagatggaaatggcctttgcaagctaaaatgaaatataaaaacttagctttaaaaataattttataggcaatga

SEQ ID NO: 311311 - DNA, 613 bp, Homo sapiens
atttttaaattgctattagtattattactatttggaagtttaagctgtttccatttaatggtagggactggaaaatagcacggatgatcaaagagcttttcctaggcatggagaatcccctgataaacagtattactgtgaagaaaaccagatatagttaacttaggtgattcaagaaaataatttaggggtatcactaggggttaaaggtaggatgcaaatagttaagcaygtatttctcttaaaagcatcatttttgtatcatattcccaggcaaagtatgaatacactgatggcatttgccatggtttccagctaccttagagaactaaggcccatcattcaattttatttgtaggtgaaatccagttctgcttggagtagcagaaataaaaaagacttcatttcaaatccttgttcttagtcattttatagatttataatctttggaaaatcacccgagctttttaaaaaaatctataaagcagtaataataataataccaatcttacagaattgttatgaggctagaatgatgtaagatggaaatggcctttgcaagctaaaatgaaatataaaaacttagctttaaaaataattttataggcaatga

SEQ ID NO: 311312 - DNA, 632 bp, Homo sapiens
ttaataaaaaattactttttataaaatgaaaaaattaatactrgcatttcagttgctgggcacagcacaggatattaaagcatttatcactattatgaaatataagctaaatggaaattatagatatatttgaagttgatgctgaagttcctatagtcacatgagcactagagtacctatgtcattttaactctatgtgtggttgggtgcccacactttattaagcaatctctatagcttgggtgtaaaaattctggaccagatgtgaaagaccagcatcccatcttagcttcaccaccagtcatcgctccaacctttgataaatcttatgctcttgagcttttaatttcctcatctggtttggactagctcagtgctttccaaacagttattaagagatcccttttacaaacaaaatctcaaactaaaccctaatatgataaagataaaagaaaacttttccctttcaagcagggaggggagactctggtccttcccactcagcttcctctccccatcccactgcaggcatacctcaagccaattcttgagttgtagggtgccagaatgcagttttaaaactcctggagaagatcatctttaaggttattttctctctggtttttgagacc

SEQ ID NO: 311313 - DNA, 585 bp, Homo sapiens
caagctgattaacatatgcattaccttacatatgtattctttttttgtggtgaaaatactttaaaatctactctcagcaattttcaagwatacaatacattgttattaaccatagtcaccatgacctctattcctatcccctagaaatcacatttattgtgtgcttctgtgagttctgcttttttagactctatatttgtctctttgtgaacaacttatttcacttaacatgatgttttttcaggttcatctgtgttgcaaaggacaagatttcctttgtttttaatgccgaatagtatcccactctgtgtgtgtgtgtgtgtgtgtgtgttcgtttgtgtataaagcacattttctttagctgttcatccattgaaggatatttaggttaattccataccttggctactgggaataaagtgttgatgaacatagaattacagatatctcttcaacatattgatttcatttcctttgaatttggatcatatgttagaactatttttaattttctgaggaattaccatactgttttccataatggctgtactaattcatattcccatcaatggtgtgcaagggttt

SEQ ID NO: 311314 - DNA, 585 bp, Homo sapiens
caagctgattaacatatgcattaccttacatatgtattctttttttgtggtgaaaatactttaaaatctactctcagcaattttcaagaatacaatacattgttattaaccatagtcaccatgacctctattcctatcccctagaaatcacatttattgtgtgcttctgtgagttctgcttttttagactctatatttgtctctttgtgaacaacttatttcacttaacatgatgttttttcaggttcatctgtgttgcaaaggacaagatttcctttgtttttaatgcygaatagtatcccactctgtgtgtgtgtgtgtgtgtgtgtgttcgtttgtgtataaagcacattttctttagctgttcatccattgaaggatatttaggttaattccataccttggctactgggaataaagtgttgatgaacatagaattacagatatctcttcaacatattgatttcatttcctttgaatttggatcatatgttagaactatttttaattttctgaggaattaccatactgttttccataatggctgtactaattcatattcccatcaatggtgtgcaagggttt

SEQ ID NO: 311315 - DNA, 577 bp, Homo sapiens
acatgacagttggtttgatgttatttaaaactgtctgagatactaagtgtttagtggggttttgattagtaactggcaaacttcaaaaggcctgaatatttggtttggaaaaaacttgattagtttggatggctattcagattttcaccaaaatctctgaaggcctttttccaggccttcccagtctgaatattttattcctcatccatttctcaagaaactgagtttcatgtttctaggactgtagtttccagctaaatattctggaagcccctctttatgaagactgataggtcatataaccattttttttagaaacttcatatccattatcattgcttacatggataactttttctatcatcagaatcatgagcttttagaactatayggaatgcttcaagattgtctagccaattctagttacacgttaggaaaatgaattgtttaaactcagatagttatgtaagctaagtttttaagtggagatacaagtagtttcaataagactggagtgagggataaataagataatatacgaaaaatattccaccattttagctgccgccccccgccg

SEQ ID NO: 311316 - DNA, 590 bp, Homo sapiens
ttggctatttttcttctaacctgacaatcttgccttttaatcgaaagatttagaccatttgcatttaatgtaattattagtttaataatataattgttatatatctacaattttgctatttgttctctgttgtcccatcagtttgtttctcttgtccttctttaactgctcattttttgactactcaattatgtgtatttcattttacttcctccattaccttattcgttctacatctttttttaatggttggtctagaatttgccatgtacatcttaattgatcataaacttcaaatatatttattccacttcctccatttcattatttatgctatcgttgtcatgcattttactcgtacatatatatgagccttacaatacattttcactatttttgattttcacagcagtttatctttttaaagtaattaataataacaagaaaaatcttttgtacttacccccttttttaaccatttctggcastcttcattttcctatgtaaatttaaatttctatcttgtactatgctcctaccgactgaacacattcctttaacatttcttatagtgcagatctgctggcaat

SEQ ID NO: 311317 - DNA, 558 bp, Homo sapiens
gtgggctataattgtttctctatgtaatactggttgtcttcaaatatttcttatatacggttttctctttattcttcttctgggactcaaattccatgtatattagtgcatttgatactgtctttcacctcttggttgttctatctgctttcttttgctctttctgtatwgggttggataatttatactaatctatcttcaagtttactgattttttccctcagtttggttaggtgtgttgataagaataccaaaggaattcttcacctctgacgtagtgctgtttttatttctagcatttttatttgacacttgttttatagatttgacatgcctactgaaattttctgcctgttcttgcccactttttctacaagacctggtaacatgctagttagagttattgtaaagttgttgtgtgattgagctaacatatggatcacctctgagtctgatattgattggtttatcttttgacaatgaggtttttctttgcttttttgtgtgtctcgtaatttttgactgaatgccagatattgtgtatagaacaacactaga

SEQ ID NO: 311318 - DNA, 558 bp, Homo sapiens
gtgggctataattgtttctctatgtaatactggttgtcttcaaatatttcttatatacggttttctctttattcttcttctgggactcaaattccatgtatattagtgcatttgatactgtctttcacctcttggttgttctatctgctttcttttgctctttctgtattgggttggataatttatactaatctatcttcaagtttactgattttttccctcagyttggttaggtgtgttgataagaataccaaaggaattcttcacctctgacgtagtgctgtttttatttctagcatttttatttgacacttgttttatagatttgacatgcctactgaaattttctgcctgttcttgcccactttttctacaagacctggtaacatgctagttagagttattgtaaagttgttgtgtgattgagctaacatatggatcacctctgagtctgatattgattggtttatcttttgacaatgaggtttttctttgcttttttgtgtgtctcgtaatttttgactgaatgccagatattgtgtatagaacaacactaga

SEQ ID NO: 311319 - DNA, 558 bp, Homo sapiens
gtgggctataattgtttctctatgtaatactggttgtcttcaaatatttcttatatacggttttctctttattcttcttctgggactcaaattccatgtatattagtgcatttgatactgtctttcacctcttggttgttctatctgctttcttttgctctttctgtattgggttggataatttatactaatctatcttcaagtttactgattttttccctcagtttggttaggtgtgttgataagaataccaaaggaattcttcacctctgaygtagtgctgtttttatttctagcatttttatttgacacttgttttatagatttgacatgcctactgaaattttctgcctgttcttgcccactttttctacaagacctggtaacatgctagttagagttattgtaaagttgttgtgtgattgagctaacatatggatcacctctgagtctgatattgattggtttatcttttgacaatgaggtttttctttgcttttttgtgtgtctcgtaatttttgactgaatgccagatattgtgtatagaacaacactaga

SEQ ID NO: 311320 - DNA, 557 bp, Homo sapiens
gatgtcccagtgctgtaatctgaatatgttgcctcccaaacttatgtgttgaaaacctaaccactaatgcaacagtgttaggaggtggggtcttttgggagatatttgagccatgagggactttgtcctcataacttgattaatgacattataaaaaagactgtgatgtgggtttcttctcttctgctcttctaccaaatgagtttatagcatccattcccttttttgcccttctgccttccaccatgtgaggatgcagaaagacctacaaccaaacatcagatattgtgctgcgatctttgattttccagcctctagaactgtaaaaaatatatttcaggttttttaaaaaaataaattacccagtttcaggtatgttgttacagcagcacaaatggaatgagacacttacaatgggtttttagctttttcacctgcatyttcaaatatgccacagaaattattttctcatagggaactccagtttgctttatgaatttgttcagggattggaacatagaagacaaaaaggccaggtttattacttactggtgtct

SEQ ID NO: 311321 - DNA, 561 bp, Homo sapiens
tttctttgtgtgtgtgtgaatgcagtcccccactacaacaaattatgcagttaagtttcccacatttggggaaattgcaggggtcagcacatccagagtgcaatggataagccttggcctgcgaaaaccaccttcgtgatcatggtatctcccytgccaggtaagtataggccaggttttggcagttgcaattaactagaataaattttgtttattaacttataaataaattgaagtaaatattagaatgattatctcaaagaacttgttagggtacaattctcagaatgtggtgttaaaaatgattatttgattattgtaatggtgaatgattatttttcactggaaggtgttacggtcatcagccaagttctagcagcaggaaattattgtttgtggtttgcactgtccatggtctacaatgatgattgattcagccaaacagggtgattgtactttctacactttagactctgtagctactgagtgcaatgtaaaatactggcaaaaaactcagtgtatttgatagaatttcaaaaacagttaaagaactgaccactg

SEQ ID NO: 311322 - DNA, 528 bp, Homo sapiens
aaactgtcgtaacctgcttgaaaaatagagataaggtatacctgtggtagaggccagatttgtttactgaccaggataataattgaaaaaaagtatttccctttggggaaaaggagaaccatgttagctggcatcactccttataaaattgggggtttcctaaactgagtgttcataagctgtgacaaacccactatctgcgcagcattcacctgggcccctctacattgcctcatggaacttggcaggaaaagggggaactaactcaaacatgaaactcatgttgcttgctgtgctatgtgtaaaaaacctctttgtttctgaaccaggaatcttatgtcttttgctagtatgtatgaaattgtggtgggctacaattccagcctcttcagagttcttcaaactatctcaccacatttttgtgaagtggaaagaatrcagacattacagtaacttgaaccagaattccaactcagtgctttgtgatctcagaaattaataaccccatcccagttttctcattcataa

SEQ ID NO: 311323 - DNA, 643 bp, Homo sapiens
cagtgaaacctcgtctctactaaaaatacaaaaattagctaggcatggttgcaggcacctgtaatcccagctacttgggaggctgaggcaagagaatcacttgaayccgggaggcggaggttgcagtgaaccgagatcgctcactgctaccctcctcaacttttttttattagttctaagagattgtgtgtgtgtgtgtgtatgtgtggtttttgagatttttcacaaacaagattatatcatttataagagttttatgctttttcttttccaatttggttgcctttaattgattaatattattgttattattattattatcatctacgtttagaacctcaagtgcaatgttgaatagaagcatcaagatcaggcattcttgcttgtccctaaccttaggaggaaagcattcagtctcttatcattaatgacgataccagctgtgagattttttatgtgccctctatcatgtgagaagtttcacttctgtaccaaatctgatgagagttttttaattataaatgggtgtcttattttacaaatacttttcctgcatgtattgtgatcatatgggttgtgtctttcattctactgatagaatatattacattaaggcattcttgcattactaggatgaatcctt

SEQ ID NO: 311324 - DNA, 643 bp, Homo sapiens
cagtgaaacctcgtctctactaaaaatacaaaaattagctaggcatggttgcaggcacctgtaatcccagctacttgggaggctgaggcaagagaatcacttgaacccrggaggcggaggttgcagtgaaccgagatcgctcactgctaccctcctcaacttttttttattagttctaagagattgtgtgtgtgtgtgtgtatgtgtggtttttgagatttttcacaaacaagattatatcatttataagagttttatgctttttcttttccaatttggttgcctttaattgattaatattattgttattattattattatcatctacgtttagaacctcaagtgcaatgttgaatagaagcatcaagatcaggcattcttgcttgtccctaaccttaggaggaaagcattcagtctcttatcattaatgacgataccagctgtgagattttttatgtgccctctatcatgtgagaagtttcacttctgtaccaaatctgatgagagttttttaattataaatgggtgtcttattttacaaatacttttcctgcatgtattgtgatcatatgggttgtgtctttcattctactgatagaatatattacattaaggcattcttgcattactaggatgaatcctt

SEQ ID NO: 311325 - DNA, 664 bp, Homo sapiens
cgtatattagttatttctatgtatagtgttttcccccataattttaaatctttaaggaaaagggctgtgttgtagtcatattttatctctctcaatgtttagagaaatgctttgtatataacaagtacttagtacatacctgttaaactgaatttaagtgaacaaaaagttataagcttgagtgacacatttcgaagagatataaagagcaaagcataataaaatgacataacagaattgccaaccacaaatatggtgtatcaaaacaagtgaacaaataagtaaacaatgccttaaaacgtgttcaggaaatgatagctttaaaaggatgaaactcttctaggtataaattttgtttcagtgaaagctatgcagacaatcaccacaatgtctgatgtacattgaacttgtgaataaaattccttaatttccaaaaataatttatgtttttaaaattggagcttcctagaagattggttgaactactatatctttgataagcmatttccacctcctaatcaagggaacatatagtaactttaccatattggttgcctacagttaaaataccttatgaatcatagtagaatcaaatattttgtttttttgtatgtaataattcagatgtttatatactgttatttacacagaaattgaatttata

SEQ ID NO: 311326 - DNA, 578 bp, Homo sapiens
ttaagggagtgattatttaagtttaatattatgtcattccatttaactttgtatttccatgtatgctaatttataggacagtacggagtataaattttaatactccccaaaggagagtaaaagtacttttggcattatgattttgaaaaaacctaatttattcagatttcctcactgattcatgtttagaaacattaagtataaataatccatcaagataaattttaaatggactatgcacaattaagttaaacatatttagamagaccaaaatatctcaagcactaaggcacttgctctctagtaagtaactgtttggaaatcaaatgcagacccaaattttccacctgtttcattttgaatatgagaataaggatttaacatggttggaaagaaaggtatatcacatcatctcttgcaaaagccattataactgttttattgggaaaggagcttgcataaaaatttcaggtgctaataaactatctattaccattttatatttctcttgggctgattattctggtgaaatatatgtgtatttctttccaagttcactttttaaatttctttaaaat

SEQ ID NO: 311327 - DNA, 578 bp, Homo sapiens
ttaagggagtgattatttaagtttaatattatgtcattccatttaactttgtatttccatgtatgctaatttataggacagtacggagtataaattttaatactccccaaaggagagtaaaagtacttttggcattatgattttgaaaaaacctaatttattcagatttcctcactgattcatgtttagaaacattaagtataaataatccatcaagataaattttaaatggactatgcacaattaagttaaacatatttagacagaccaaratatctcaagcactaaggcacttgctctctagtaagtaactgtttggaaatcaaatgcagacccaaattttccacctgtttcattttgaatatgagaataaggatttaacatggttggaaagaaaggtatatcacatcatctcttgcaaaagccattataactgttttattgggaaaggagcttgcataaaaatttcaggtgctaataaactatctattaccattttatatttctcttgggctgattattctggtgaaatatatgtgtatttctttccaagttcactttttaaatttctttaaaat

SEQ ID NO: 311328 - DNA, 489 bp, Homo sapiens
gttctctgtgattaagatacccacaatatgcaacacattctattctgtgtaacatggaattacccacatgtctgagaaagaatgcattttctatgaagatcaacgttggaaatatgtgcagagcttgtcccctgtggtacaagraagtcattgggacttctaaaggatgctgaagtggctttcaattttacctttaaacccggttgactgaactacaaatgaggtgccaattatttcagtatggtagaaacatcttaataaaaatggagtatgtcccagtcatctgaatcattggtttacacgacataaacttgtgacctttaaagaaataaccatgttaattgtattttttaaatctgcttgttgaatgcagtcataatgtggactgtctaaaaagaaaattttcttccattttatttttaaggtgtctgacaaattttattagataaagagatggaaataaagaaggttattataggaatgtttcta

SEQ ID NO: 311329 - DNA, 607 bp, Homo sapiens
caaaggaaaagctaccaactcatattcagtctaactctctgctttatgtcagtgtcataaaggttttcactgtcattcatgatctcttttctggtctcccttgtgtcaggaatgaacagcactccttgggaaaagagcgagtcaaacctgggggcatagatagatggtgactgaggaagagaatcatttcttctagaatggcacttggcccaagatgtctgaagactcctgamcttggcctcacttgccctatgagctcttcagtccaagttctgaataatatgagatgtgacttgcctcaggaagtaggagcaatccaagcctttattatcttactgttttttcaaaaaacctcatctggaagcctaacagcaaagtagtttgcctttctgattgaaaagttaattaatgataatggttccagggatactgtcagacacccaggaatcttaacacctacaatgtgttaaattcctcatttctcccacaggatttttcagtgctaaaaacagcatcaataccagtattcttggcaaaaccattgctaattgacaatcagaggaattcaactaatgtgtttactgagtgtgaacaagaaagattgtca

SEQ ID NO: 311330 - DNA, 594 bp, Homo sapiens
cactgtcacggtagcattgtgttcacattcatattcattaaaatgtgcctggctataattctgctgtaagtccataccatccctccctattaattttataaataattttaataaccygttttggcttttttacctgtgacaaacctagcttgttcaatgctgtgccatgatccagccacttcctcataggcctgagcttggccaagctaaagtgttacacttgtgccttcatgacagctgtaattttttttttccagaatgatctctacatgtctcttatttttaagaattaatacataggctggttattgaaggcagccaggtggttccctttgttgttgagcttgcacgtctattttttgaaaaggtacttgaccacaatatcttttatagtctccttcccactcaaaatgagtattctctaatctaaatatacaactcgtcttgtttctttttatctctttatagtattgtgatttgtgtgacatgattgtaaggtctatggagtaagggataagccctccccattctcatgtgccacctaatgcccaaggctcaataaatgtttgttggattggtaataaatttgcttca

SEQ ID NO: 311331 - DNA, 594 bp, Homo sapiens
cactgtcacggtagcattgtgttcacattcatattcattaaaatgtgcctggctataattctgctgtaagtccataccatccctccctattaattttataaataattttaataacccgttttggcttttttacctgtgacaaacctagcttgttcaatgctgtgccatgatccagccacttcctcataggcctgagcttggccaagctaaagtgttacacttgtgccttcatgacagctgtaattttttttttccagaatgatctctacatgtctcttatttttaagaattaatacataggctggttattgaaggyagccaggtggttccctttgttgttgagcttgcacgtctattttttgaaaaggtacttgaccacaatatcttttatagtctccttcccactcaaaatgagtattctctaatctaaatatacaactcgtcttgtttctttttatctctttatagtattgtgatttgtgtgacatgattgtaaggtctatggagtaagggataagccctccccattctcatgtgccacctaatgcccaaggctcaataaatgtttgttggattggtaataaatttgcttca

SEQ ID NO: 311332 - DNA, 530 bp, Homo sapiens
ggttccctttgttgttgagcttgcacgtctattttttgaaaaggtacttgaccacaatatcttttatagtctccttcccactcaaaatgagtattctctaatctaaatatacaactcgtcttgtttctttttatctctttwtagtattgtgatttgtgtgacatgattgtaaggtctatggagtaagggataagccctccccattctcatgtgccacctaatgcccaaggctcaataaatgtttgttggattggtaataaatttgcttcaggaacccaggtcctaactaaaaaaaaaaaaatcttttaacagttcaggcatatttacttttcttttacacagaattcttaaaaatacatgatatatcatttatcagcctacagaggtacaatgaaataaattatctccccctgtactatgaaggaaaagatgtcttaaggaaccagtcaattggtataagaccaaaaaaaatcaagtaacacatcctgaacctttaaaaagacaatagtattagcctattcaaaatattt

SEQ ID NO: 311333 - DNA, 561 bp, Homo sapiens
gaagacacgggtgtgcctgaagcaaagcacagcattctctagtgctgaaaaagaaaaaaaagtttggttaaatagggtaggacagcaccattgaggccttgaaagtgttgtcacagagtttgtctttgaggtaaatattataaaatgacagtgctctaaagtaaatgaaagctcttgcgaaagttctgtttaaataaaattagtctggctaattttatgtggacgtggacgtgtattcaattcaaattgtagtcagggtgttgtagcacctyaagtttacaaggattatcctggaatggtaagccacgacaatgaggaagaaggattatccttttttttttaatgagcagatactgttaatagacagtaaacaagaacaattcaaagtttactgtctactgttaataaagagtaaacaagaatagagagagtatagaaggcattgcatctaggtaacgagaagaatgaaagcaaaaggagtgtcatgaaaaatatcattgtagttaacagccactcgcgtcagatgtgaaagaattatggactgatagagaaaaaaagtca

SEQ ID NO: 311334 - DNA, 532 bp, Homo sapiens
ggcttggcctcttttgaccagtgtggaactcctctatgaatagtctttgcattgcagctcttcattgaactgattgagactttgtcaaagctgtatggcagtctgaggctctgttcataaattctttcttcctgatacctcttttacataggtttcagacttgttttgcagtctgaaacgtttacctctcatagctccttctcttattatctttcacagacatcaccctcaataaatctcttgcagtttccaactccatcttgkcatctgcttcttggagggcctgaactgacacacttctgaattgctctccttgtatcactctttctctcttccaaatttcttgatgcagccagaatatttttatgtccccttgtggttccatggttagaatttttcaatggattccatctttcataagacagtgatcaaaatcattaacacagtgtatcaatccctatcaattctgactcagcctctcactctaacctcatcttgccccaggctccatactggagtttctttagtttct

SEQ ID NO: 311335 - DNA, 582 bp, Homo sapiens
ttgacttttcagtcttatcgtttaagaaatacattttataaggctgtagctgacatagatggttattcctctgatggatctggatgaggtaaattgcaaaccttatggagagaattcaccactttatatgcctttaagagcattcacgatttatgagaggaggtcaaaatatcaacattaacaggagtttagaagttgatttcaaccctcttgggtgactttgagtggttcaagacttcttagaggatgtaactgcatatgtggtgagaatagcaggagaactaggattcaaagtggagcttkaaaatatgactcaattgatgcaaccttatgatcaaacattaatgggttaggagttgcttctcatgaatatacagagaatttcttgagatgaaacttattcctggtaaagatgctatgaacattgttgaaatgacatcaaaggattttgaatatttttaaaacttttctggtaaatcatcagccgagtttgaaagggttgattccaatttggaaggaagttctactgtgggtaaatgctatccagcagctttacatgctacagagaaatctttcatgaaa

SEQ ID NO: 311336 - DNA, 582 bp, Homo sapiens
ttgacttttcagtcttatcgtttaagaaatacattttataaggctgtagctgacatagatggttattcctctgatggatctggatgaggtaaattgcaaaccttatggagagaattcaccactttatatgcctttaagagcattcacgatttatgagaggaggtcaaaatatcaacattaacaggagtttagaagttgatttcaaccctcttgggtgactttgagtggttcaagacttcttagaggatgtaactgcatatgtggtgagaatagcaggagaactaggattcaaagtggagcttgaaaatatgactcaattgatgcaaccttatgatcaaacattaatgggttaggagttgcttctcatgaatatacagagaatttcttgagatgaaacttattcctggtaaagatgctatgaacattgttgaaatgacatcaaaggattttgartatttttaaaacttttctggtaaatcatcagccgagtttgaaagggttgattccaatttggaaggaagttctactgtgggtaaatgctatccagcagctttacatgctacagagaaatctttcatgaaa

SEQ ID NO: 311337 - DNA, 572 bp, Homo sapiens
gaaagacttggggataagggttaatcaagtggagatctgggcaaagtcaggataggccctgctgagaaggtgacatttgaatactgtcaactcatttcctcaagagcttctcttttcatactatttattaagttcaaactaactacatatttgacacaataaatatgtttgtctccatctgtcagaatataagctccatgaggtcaagggtctttgctcattgatgtatgtcaatcatctagaacactgcctggcatttattgatcctccataaacatttgataaataaattaaaagtagaaaaatgtcccatagtttattcattaytatcaaccactatggattttttttttctgtttttccaatctattacattgtagcaatctgttgggggtttttctttttcaatttatcataagcttttgtattttgcatactcggtcatttataatgactgcttctaattcattgagattgactaaacctaaccttgcctgcaacttgacttgcctctctgctatgaatagcatgtggctagatgtttatctataactaaaatcagttttagtaat

SEQ ID NO: 311338 - DNA, 579 bp, Homo sapiens
atcattaggttgatggctctcaactcttggacttttctgatgagctcagcagtgatgttaacaaatatgatttttaaaatattgtatgcgatgtgatttataaaaagatatatgcatgtacatataggtgtgtatatatgtgtgtgtttaagtgtgtatatgtgtgtgtgtgtgtgtgtgtgtgtgtgtrtatatatatatacatacctgtacgtgtgtgtgtgtatctgacactgtctccaggaaaatagtgtcagaattgagttaaattgtaggacctcggtaggttgaattcacaaagcagaacttacagatatggaaggcccgactataattaataggataagttaagcagggacgatagactagagtatgatagaatttctccctctcatcgtcacatttcctaccatttagtgactactgctaatatttatttagcatttcagtctataaaatatattcacactaatttagttttcattaagaatcttattgttatcttcatcttacaagtgaggtaataaaagttataattatctaaaaattatatagacagaagtgtacaaagccacatat

SEQ ID NO: 311339 - DNA, 579 bp, Homo sapiens
atcattaggttgatggctctcaactcttggacttttctgatgagctcagcagtgatgttaacaaatatgatttttaaaatattgtatgcgatgtgatttataaaaagatatatgcatgtacatataggtgtgtatatatgtgtgtgtttaagtgtgtatatgtgtgtgtgtgtgtgtgtgtgtgtgtgtgtatatatatatacatacctgtacgtgtgtgtgtgtatctgacactgtctccaggaaaatagtgtcagaattgagttaaattgtaggacctcggtaggttgaattcacaaagcagaacttacagatatggaaggcccgactataattaataggataagttaagcagggacgatagactagagtatgatagaatttctccctctcatcrtcacatttcctaccatttagtgactactgctaatatttatttagcatttcagtctataaaatatattcacactaatttagttttcattaagaatcttattgttatcttcatcttacaagtgaggtaataaaagttataattatctaaaaattatatagacagaagtgtacaaagccacatat

SEQ ID NO: 311340 - DNA, 579 bp, Homo sapiens
atcattaggttgatggctctcaactcttggacttttctgatgagctcagcagtgatgttaacaaatatgatttttaaaatattgtatgcgatgtgatttataaaaagatatatgcatgtacatataggtgtgtatatatgtgtgtgtttaagtgtgtatatgtgtgtgtgtgtgtgtgtgtgtgtgtgtgtatatatatatacatacctgtacgtgtgtgtgtgtatctgacactgtctccaggaaaatagtgtcagaattgagttaaattgtaggacctcggtaggttgaattcacaaagcagaacttacagatatggaaggcccgactataattaataggataagttaagcagggacgatagactagagtatgatagaatttctccctctcatcgtcacatttcctaccatttagtgactactgctaatatttatttagcatttcagtctataaaatatattcacactaatttagttttcattaagaatcttattgttatcttcatyttacaagtgaggtaataaaagttataattatctaaaaattatatagacagaagtgtacaaagccacatat

SEQ ID NO: 311341 - DNA, 523 bp, Homo sapiens
gcttcgttgcaggtttagagcaagcaaagtgtgtgttcccatcttgtataagtacttgaacagaagggcagcaaggctctttcaggattttgattytgaaactgctcataaaaaagtgaaattaaataaaagcctagaataaaataagtgggactgggttagctcaatattacttttaaattgtcaataaattatagaaattagtcatttcttcctatgagtgtataatgttgctagaaggtgactccagtggaagtgattctggaagatgaaagcatagtgactaacatgagatatgaattctttgagccctgatatttaaatgaattcttagttcatagtcaaggcatcttattactaagaccccaaactatcttacttgtacatgaccatactatgaaggcgtatactgtgaaaacacaggtagttgagtctgttttaaaatattgtaccattttattcccttaactctccatactttctatattatatacaaatttaaaaatgtatcattgtttgtgca

SEQ ID NO: 311342 - DNA, 502 bp, Homo sapiens
gattgataattctgatatctgaaacctttgtggtctacttctgctggttcttactcatagtatgttttcattattattttgtggtctgtattttsatatgtgtgtgtggatgctcaattttctggagatttaaccatgggaattccataggacctgttaaattactcagagaggattgatattttcttttctcagtagcttgctggtatgacaaatccaggaattcaaattaaattctatacttcagttttccttggaccatacaggttatttgaatttagacagcaaacctgagaactggtatatgattatgtgctctcagggaagaatttattttcttttccctttacctacaactaagtttgagaaggtatgtttccttgatttcatcttttttggcaacttttttttccttatatcctgaaaaagtcaaaattttatgcaggatctccccctaggttccccaactagataggccataggatttagttcttcatattag

SEQ ID NO: 311343 - DNA, 583 bp, Homo sapiens
ttgagagaatcttcaccttaaaatcaccttgacttgacagaatgcagaagctgaacctattaaccttgagattatgatttgcataccttgyaattttctccagctctaaacctgaactaattaagaattagtagtaactaataactattcaataacttaaagaacctatcattgtacttcattgttatataggtctaaaattaattaaaagttagtattcttcacccaataaatgatatattttgaaatgttatagtttagacttgctatgcagagctctcattcaacaatttgacatagaagaaacaagacttcatctatacattacactagcaacgtatctatagtgctgttttatagtaaaggaaagcctgatctgtgattaccagaatggagtcctgagttttcccttgtggtggctgtaactcttttacaaggtagtccttgagtttactggcaactgtctctacctctgttctactggcatcacgataatcttactccaccctgctgtgaaacactgggaaactgggaataagaacagggcaagacccatgataatagcaggatgttattgcagtta

SEQ ID NO: 311344 - DNA, 317 bp, Homo sapiens
cctatgagaatggctagaataaaaaatactgagaacaccaaatgctgataaggatttagaaaaattggaccacttatattgctggtggaaatataaataatatagacattctgcgaaacagtttggcagtttcttaaaaaaactaaacattccagcaattgcaccctgagtatttctcccatagaaatgaaaactcatgtttactcaaaattctgcacatggatatttatgccagctttattcataatagccaaaaactgaagacaattctgatattcttcaakggatgaatggttaaactgtggtacaaccatacc

SEQ ID NO: 311345 - DNA, 601 bp, Homo sapiens
ccgagcctctgccattaacttcatttacacattgttctcactcagccactcacaggaaggcatctttatgaaagcactgcaaacactatgtgtgaaaaaatccagatggtataaatagcttttcacttctaattgcaacttgcccctcacattttgtttcctgagagctctgaaaagagaccgatccaaaccactaatagcacaggagctctgggagggtgagtcagtgtctactgctgaaggagaacaaagatgaagagagaacggcaggagtcccagaaggccatttcaggcttgaaggagtacttttctgcagggtagtgcccagccagacaaacagggaatggtttcctggagtacctgataggtcagctctttgatgcatcgctcaagtctgcgggctcccctctgggcctctgcactgcgacggatttcaccctccagttcaccttccagttcacgaacctgcaaccaaaacgtgacctcagaccagaygctgccaccaagtctggcattctatttgctgattggcacaatcatttgaaagacagcaaagtgtcaagggaacatgcacacactgtttttggtgcttaaacaggac

SEQ ID NO: 311346 - DNA, 589 bp, Homo sapiens
tgtaatgggatttcaaaataggaggagatgtgacactttgtcactattatatcctatatcataatataggaaattttaacagcatacttgtaatgctgagctcatttgcaagaaccatatatcctcattgtttccacttcaagtctataatttattcacactttgactggggttgttccctctcattgtatacaaataagccctctttttctcatatgcaagagtaatactagattttattccagtgtctgcccataccacttgcaaaagactaaatgtctgtgcccccctcatgaatgggattagtacccttatgtaagagaccccagggatctctctagctctctttcagtcatgtgaagatacaatggaaactcagcaatctgcaatgrggaagaacaccctcaccagaacccaaccatgctggcaccctgatctacctccagaactatgagaaagaaatgtttgtttaagccacccaatctatgatatttttgttatagcagcccaaatggactaagatatcactgcttcaatttctgtttgtcttctatagaatgacttttgctcttctcacctacttattcaa

SEQ ID NO: 311347 - DNA, 562 bp, Homo sapiens
taatgtagtgacaatattgtactacaatagttttgcaagatgttaccattggggtatgcygggtaaagggtatatctgatctctttgtattgttcttacaactgcatgtgaatctaaaattacctcaaaattaagtttaattctataaaagaatttcactgaagagctggggaatggagtttttttgtataattatttgtctaatttgtatagttattacataaataattctgttaggggctgctatattagccaagtactgtggtatgggagaagtatggtaatgttcactttgtagtagaaagattatggctttgtcattagagaccttgtgtcaaatacatcccaccacataccagctgtgtgaccttgggcaatctgagcttcagtgtcctcatctacaaagcacgagatctcttttaaggcttaagcaaggtaatatctaaatcagatatataaaacactgtacttcgaaccttggcactacgcctcacacataataagttcttaaatgctagctgtcatgaaggagagagaatcaaaacaattacttagcaagcaa

SEQ ID NO: 311348 - DNA, 578 bp, Homo sapiens
gttgtttttatctggttataggtaaaggcataaagagttaacaacattaccagttccagagaacaaacagaaccccaggtcttatagcaaaagtttccacccaggttccaaatcaagactgtctacrcaaatgtagtgttgaaacttgaaactgacttagttctgattggtcaatatagctgagccctgattagccaactcgggtgagctttaattgactggttcaggtgaatcctgaaagcctcaaagttaaatgctgcaggctttcctggaactcagggcatgtatgtcacccctactcaacaaatggctgctttgctctattttaaatggagtcccagttagccactcaggatccatcttgaagaactggcgtaaatctgttggtggaccacattgcattgtacgacagtgcagaagtagttggctacctgcttcaggtccatctggtccctttcagggatcctagaggcagggcagtggccaattgaacaactagacccacttacttttgagaggcactaagctacctattaaatttgagccaaagtctcttgggttgttctgatttccagctg

SEQ ID NO: 311349 - DNA, 577 bp, Homo sapiens
gctacctattaaatttgagccaaagtctcttgggttgttctgatttccagctggagtgaatttaaagtctcaaagattgcatgagcaagatcccggtgggggtctcttacagacatctgttaaaacaggctagaacaattttaaagaggagctaaatgcttagctcaaatataaggggaatcattaagacttgcagggtgaaacacagaagaaatcctatactaggagaaatcctctgaaaatatctcgacattggaaattgtacccaccaggttcagctaggaggctccctgaaggtgtccctttcagagatttggctcgctgtaggccttaggtgttcccarttaaacctgactggaaatatttacccaggtacagcagcaagtgttagcaacagcacaaacaccaccctgtgcagtgaggtgatagtcgatagcaatgtggttgtctaaggaactctgctgtgtcctgatggcttgggtggtgaagtgggcaaccctattaacagtgtgggaaacgtttctgaccatgtatctgttgcaaacacaacctagtacaaaccaggaccccagaagcc

SEQ ID NO: 311350 - DNA, 577 bp, Homo sapiens
gctacctattaaatttgagccaaagtctcttgggttgttctgatttccagctggagtgaatttaaagtctcaaagattgcatgagcaagatcccggtgggggtctcttacagacatctgttaaaacaggctagaacaattttaaagaggagctaaatgcttagctcaaatataaggggaatcattaagacttgcagggtgaaacacagaagaaatcctatactaggagaaatcctctgaaaatatctcgacattggaaattgtacccaccaggttcagctaggaggctccctgaaggtgtccctttcagagatttggctcgctgtaggccttaggtgttcccagttaaacctgactggaaatatttacccaggtacagcagcaagtgttagcaacagcacaaacaccaccctgtgcagtgaggtgatagtcgatagcaatgtggttgtctaaggaactctgctgtgtcctgatggcttgggtggtgaagtgggcaaccctattaacagtgygggaaacgtttctgaccatgtatctgttgcaaacacaacctagtacaaaccaggaccccagaagcc

SEQ ID NO: 311351 - DNA, 435 bp, Homo sapiens
catgacaccgagctagtttgtaaaagacgtcttaacaaaggaaaactctttgtagcatcctggggatgttccttagcatccacttagattttaataagattgactgtttagacagaaaaagaacaaaagaacaatttcaggattaccctctctttactcaaaatatctctcctgatgtttcacagtgaaatcccaccatttaggggatttrtacatgtactgaaactttgatctctaggggtgctgtctttgccttcggttctgttttggtgtgtttttatttttgattttggaaatcaagctaagattatgtgctaacgttttgggggaggtgaggaggtgcaattgcagggcaggaagagtgagggaaaaggggaagtgaaacaaggaagaatggaaaacagatactaggtggtgcttgctttgccagccaca

SEQ ID NO: 311352 - DNA, 605 bp, Homo sapiens
gatccccttccaagctcacttgttgttggcagaattcagttccttgcagcggtagcactgaggccctcagaccctagagacacccaccatttcacatcatcccagtttctttcttcaaggccatcaggggccactgctttaagtctttgagtctctgctaaaggactcactggacttggtcagggccacccaaataatctcttttgtggttaactcaaaaatctattgctattgctaattgtatctgcaaaattcctttacctttgttatgaaaggtaaccgtattaaagcagtgactatccaatcatattcacaggtgcagcccacattaaaagggagagaattacatagtgtgtacattgggggcaagaatcttgggggccaccttagagttctgcctgcagtggtcctaccacagcctctgatkatcacttcctggtatccagactcttgtatagtcctttcccacactgtaccagggctggtctgtataaccaatagaatacagcagaaattatgatatgtcacttctgatatgaggttataaaagacactgtggcttccattttggtttctttcactctctgatcactcactcttgaaga

SEQ ID NO: 311353 - DNA, 648 bp, Homo sapiens
tatctttgctctcactcactggcattttcttctacaggactgactgtggcgaggaattctgatctacttaagaggttctgagtcagtgtctaaaagaatttttttgatgaagggcaaaaaccctgggccttgatatttgccctacttctttccacaaggaataaaaatgaatgtctccttgtgcagataaaaaaaaaaaaagcaacaaataacactgatttcaagtaatatcagacctgtgcctataaataaacccagctgaggagaaatgaatcctcagagagcctgtgtctcgtcagctacatctgaatgtcgtagagcagttcaccaattataataatcttagtgcgaaaaaaagccagagatccaaagagctagggctggaagaagaaagaactgaaggataagcatgagccatgaggagctgagaaaagaaggggwggactggaggcaggggggtgagctattcataaattttagttaatgattcataataactataataggtagatccagaaagaaaagatgagcttatcttacaaaatatcacaaataccagcccagaccctttctgctctgagcacagattgtaccaaactgccaaggtttaatctgatagtttcactttggggctagcaagggcatctt

SEQ ID NO: 311354 - DNA, 648 bp, Homo sapiens
tatctttgctctcactcactggcattttcttctacaggactgactgtggcgaggaattctgatctacttaagaggttctgagtcagtgtctaaaagaatttttttgatgaagggcaaaaaccctgggccttgatatttgccctacttctttccacaaggaataaaaatgaatgtctccttgtgcagataaaaaaaaaaaaagcaacaaataacactgatttcaagtaatatcagacctgtgcctataaataaacccagctgaggagaaatgaatcctcagagagcctgtgtctcgtcagctacatctgaatgtcgtagagcagttcaccaattataataatcttagtgcgaaaaaaagccagagatccaaagagctagggctggaagaagaaagaactgaaggataagcatgagccatgaggagctgagaaaagaaggggtggactggagrcaggggggtgagctattcataaattttagttaatgattcataataactataataggtagatccagaaagaaaagatgagcttatcttacaaaatatcacaaataccagcccagaccctttctgctctgagcacagattgtaccaaactgccaaggtttaatctgatagtttcactttggggctagcaagggcatctt

SEQ ID NO: 311355 - DNA, 585 bp, Homo sapiens
acaaggatggtctgtcttccagtttccaataggatattccccatttccatttaagacctcagcagaattgcctttactgtctgttttactaccagcrttgtaatcacagccatccaactatctctaagaagattaattctctctctacagctctcctcttcttgtgagtcctcatcagaaggattcttaatgttccattcatgggaatataggctttttctagcagtaggtgtgtatctcactacctccttactctttaatccctgccatgtgtctttgtttctcctgaagctggcacttcctctgaacatctctgtcactggcacctggtttctttttataactcacgttctaagtctcaaccacttctttcctccctatttgcttttcagtcaattatcgcagcaggtcagtttttaccatctcatagttttccattcccattcccatgtaggtctgtctactttttaagtagattactgcagtggtttcctaaattatcttttttgcttctagtcttccttttttcaaaccatcctatatttatatgcccaaattaatatttgtaaagtatttagaatattc

SEQ ID NO: 311356 - DNA, 538 bp, Homo sapiens
aaataataagaatgcaaactatagttaatttgtatgtgaaggggatacctcatcttacatttggcaactcttagtcccgtctgaggatcttgggtctcaaaaccactagcatgagttctcagagtgtggcaagagtctggcgattagactggttactttaattgggtaaaagtgcaaaggccaatgtcatatctttttctccagrcatgaaaagccaattctgagaagttgggtttggggattgaagtgttaacccaacagggtcatcttgagattgtagccatagtgatcaggagggtacagttgctttggcagctcacattttgttattaggctgttgcggcttagatccatccctttcttctatcctgcttgggcagccttctagatttccttcctcctccttccccttcttacctctcttccttccccttcgtctgcctctccacccttgcatattgctctcctatgtgccaggcactattctatacaatagggggtatatctttaaactggatctctaccctcatgagagtta

SEQ ID NO: 311357 - DNA, 538 bp, Homo sapiens
aaataataagaatgcaaactatagttaatttgtatgtgaaggggatacctcatcttacatttggcaactcttagtcccgtctgaggatcttgggtctcaaaaccactagcatgagttctcagagtgtggcaagagtctggcgattagactggttactttaattgggtaaaagtgcaaaggccaatgtcatatctttttctccaggcrtgaaaagccaattctgagaagttgggtttggggattgaagtgttaacccaacagggtcatcttgagattgtagccatagtgatcaggagggtacagttgctttggcagctcacattttgttattaggctgttgcggcttagatccatccctttcttctatcctgcttgggcagccttctagatttccttcctcctccttccccttcttacctctcttccttccccttcgtctgcctctccacccttgcatattgctctcctatgtgccaggcactattctatacaatagggggtatatctttaaactggatctctaccctcatgagagtta

SEQ ID NO: 311358 - DNA, 594 bp, Homo sapiens
ccctcatccaaccgcctatctatgataaaaaccaagtctacttattctcattcttgctttcgaaacgttctcaagctcattccagactagcctgggtgttgtcccactatgtttagaaagttccatgatgtaatacaatgtgttctcacctcttggtgtgtacatggcgtcatcagtcaggacgtctcacctattaattgggaggggttcatcccacctgcattggatggctgtaagaaatagctttcctatgaggttttcttatcttagtctttttcttttttttccattaccagttccaaagcagttcctatgtcttttgagtactatatggtacaagttggtggactttcacattttcccattaactacagattcattttcttgggtytactaagtcagttactacttgcccatttttctctagtttccaaatttttgctgacttttttgtttgtttgtttgtttgttttgacctcacctctttttctgctttatccatttcttaaaaaacaaaaacaatccttcccatagtgggggggtctgtggttggggggcagtgaggtggggatggttaatggaatagaaagaatg

SEQ ID NO: 311359 - DNA, 617 bp, Homo sapiens
aggagacagtaaaaataagtagaatgcaatgttccagatgttcagaggagttggagatcatctccttatgggttggtcaagagagccttaatggaaaatgtagcatctgagcagggcatggaaggatcatttartggatattcctctgtcccaaaattttttgtctgtccaatatcccttctgtggtgaagaaaattagtactctttggatatcttggtattgatttcattatgtttctcatgttcccttgaggtttcgtgagtgcaattgtgattgaatcctggaaagtgggaaagtgtaggaagtgatgcatcacttcttgcctgaggtacttgatagttagtgtcaatttctcagctctcctttgtcaatacctctgaagtttcaatgttgacatggcagagccacaagatgaaagcaatttaggtccctgagtcactgtgaaggaatgctacctgatttatatcagactttatatgagcaataaataagcattcattaggccactttgatttcagggttagtttttttgtggcatctaacattaattgttctgaataagtatctccactctttggtgaatggtaccctgcttttccttggatgaaattactct

SEQ ID NO: 311360 - DNA, 503 bp, Homo sapiens
atgcaatgttccagatgttcagaggagttggagatcatctccttatgggttggtcaagagagccttaatggaaaatgtagcatctgagcagggcatggaaggatcatttagtggatattcctctgtcccaaaattttttgtctgtccaatatcccttctgtggtgaagaaaattagtactctttggatatcttggtattgatttcattatgtttctcatgttcccttgaggtttcgtgagtgcarttgtgattgaatcctggaaagtgggaaagtgtaggaagtgatgcatcacttcttgcctgaggtacttgatagttagtgtcaatttctcagctctcctttgtcaatacctctgaagtttcaatgttgacatggcagagccacaagatgaaagcaatttaggtccctgagtcactgtgaaggaatgctacctgatttatatcagactttatatgagcaataaataagcattcattaggccactttgatttcagggttagt

SEQ ID NO: 311361 - DNA, 617 bp, Homo sapiens
aggagacagtaaaaataagtagaatgcaatgttccagatgttcagaggagttggagatcatctccttatgggttggtcaagagagccttaatggaaaatgtagcatctgagcagggcatggaaggatcatttagtggatattcctctgtcccaaaattttttgtctgtccaatatcccttctgtggtgaagaaaattagtactctttggatatcttggtattgatttcattatgtttctcatgttcccttgaggtttcgtgagtgcaattgtgattgaatcctggaaagtgggaaagtgtaggaagtgatgcatcacttcttgcctgaggtacttgatagttagtgtcaatttctcagctctcctttgtcaatacctctgaagtttcaatgttgayatggcagagccacaagatgaaagcaatttaggtccctgagtcactgtgaaggaatgctacctgatttatatcagactttatatgagcaataaataagcattcattaggccactttgatttcagggttagtttttttgtggcatctaacattaattgttctgaataagtatctccactctttggtgaatggtaccctgcttttccttggatgaaattactct

SEQ ID NO: 311362 - DNA, 388 bp, Homo sapiens
aaacagaaatacatatctgaagtaatcatttaaataacattatgaaaatgtayatcagtatttataaatagccattatatacaatgatacaattttgtttatcatttcttcaacttactgctagatttcagggaaaaatacaggatacaagtacttaaagaaagctcaagaaggagatatggctgattgcataatagaatattttgcagactgtcaactattgaggacgctggcatgtttggaagaataactgttattaaattttagaacataaaggtacaacatattgttatcaatcttaataaatccattcagcatttcagaataacatgaaaatatgccaacagaaattccattttactattgttactatcaagaacttggcaaa

SEQ ID NO: 311363 - DNA, 567 bp, Homo sapiens
tgcttatgtaagaacccaaactgagacactcataatgcaagaatttatattattaataccagaatcaatccttaagcatggctagtttgacactctacatagaggtaaggaaaagcacttaactggagcagaaaattcactcattcttttgaaaaatgaataakgtactcttttttgtaatagagagtgagtgtaatgggatacagacatacctaatagtagtgttacagtagatagctagtcagatatgagcagggtaggagaccccccacccccgccaccccaaccaggaatgtcaggcaaccatcaagtgatggtcagtcaggtggttattaaactgtgtctttaaaataataattggtcacagccaataccagggaaaggcagtctcccaatagataaaaacacctgaaattggtgatcagcagcttcccgataagatcgcaggagttgggcaaatgggctcccgcgtgcgcactaagaggcaaaatgtcatagtgtaactggtatacgaccttcctctggaaacacttgactggtaagggaacacctcttgaatacaactcc

SEQ ID NO: 311364 - DNA, 567 bp, Homo sapiens
tgcttatgtaagaacccaaactgagacactcataatgcaagaatttatattattaataccagaatcaatccttaagcatggctagtttgacactctacatagaggtaaggaaaagcacttaactggagcagaaaattcactcattcttttgaaaaatgaataaggtactcttttttgtaatagagagtgagtgtaatgggatacagacatacctaatagtagtgttacagtagatagctagtcagatatgagcagggtaggagaccccccacccccgccaccccaaccaggaatgtcaggcaaccatcaagtgatggtcagtcaggtggttattaaactgtgtctttaaaataataattggtcacagccaataccagggaaaggcagtctcccaatagataaaaacacctgaaattggtgatcagcagcttcccgataagatcgcaggagttgggcaaatgggctcccgcgtgcgcactaagaggcaaaaygtcatagtgtaactggtatacgaccttcctctggaaacacttgactggtaagggaacacctcttgaatacaactcc

SEQ ID NO: 311365 - DNA, 596 bp, Homo sapiens
gtatataagaccatggaagtatgccaaaatacaaaaccataaatcaaagttcaaacaggacacttaatatctcaagtcgcccacttggcccccttccagatgtactttatttcctttcatttctgctctaaagtttttaaataaactttcattcctgctctaacacttgcctcagtctcttcttctgccttatgcctccttggtcgaattctttcttctgaggaggcatgaattaaggttgctgaagacccgtatggattcactgccagtaacaggaggagagagagttattcaacgaattattatataccgactatatagtaagtgaccttactcattccggctcaccatcacaatatgagtattagggttcaaaggayaagcttttatgaaatgtaaatctcttaatataaagaattaaaataatatccaagtattagattctaaataaatacttttaaaactagttattacaagactgtatctaatcacaaacaggtttttattttgttttgtttttctcactatctcaagctgctgaaacaaatttaatggagtccttccctcatcactgaattctgtagatttttctttca

SEQ ID NO: 311366 - DNA, 598 bp, Homo sapiens
cattccggctcaccatcacaatatgagtattagggttcaaaggacaagcttttatgaaatgtaaatctcttaatataaagaattaaaataatatccaagtattagattctaaataaatacttttaaaactagttattacaagactgtatctaatcacaaacaggtttytattttgttttgtttttctcactatctcaagctgctgaaacaaatttaatggagtccttccctcatcactgaattctgtagatttttctttcagttgtaagaaaataatgctttccttttgaagatgttggcttggattagaaaaatgctttattatgagtattgcaaagctacttatttaccacagctagacagagactctttcttactttgtcatgcagctgcttgtttttaaacaaattttgccaagagacataaaccagatggtcttcttcaagggtatcctgtgagctgtgatagtcagcttatggtagttttgagcagcagacagctgggtatggaaagtcatgatgctatttggaaatccaactaccaagtgtgctgaagcacaaggagattctcaagtcagtaaataataaaattgtgactt

SEQ ID NO: 311367 - DNA, 551 bp, Homo sapiens
cattaccattattatcatcaagtcgtattgattaccaatgtgcactctactgggcattatatatacaagcaaaattcaggtggtttctgacattcaacaaccaataaaataaatcagaccaaagattgtagacatatgtaggagagcgtatagtgcacaagatactcaaatggagaaaaacttaaaggttaaaaataaatttttaaatactttcagtgtttaggtgaactggtaagtgttttggtgtgtcagtttataagaacattgcttgctatatctaagggaactacttattcattattttcttaaaaatgaattctatccaactagttacttagtaaatcatgattttcaaagaagatcttgagggtaaaaaccaraacagaacatttccccataaaccatggtttcaacaattcaaaaaagtgagacggagtggtgcaagatgtcagaatagaagcctatataactaatctccctcactgaaacatcaaattgtaacaactatgagcagacagaaaagcactgtcaccagaaccaaaaaccaggta

SEQ ID NO: 311368 - DNA, 525 bp, Homo sapiens
caagcagcccatgccactgcactgcctacggagtggccattctttattcctttactttcttaataaacttgcttttactttttttaaaaaagcataatcttcactatgacctataaatctctacatgacttggttgtatactacctaccattccaagctcatctcttcccagtctcttcatagtccacaacacttcaccctcattaggtttattgcattacttgagtataacaactacattcttgcttcaagatttctgcccttgctgttctacctgccaaaaatagttttcctaacccacatttctatcagtggttcccttacttctttctcacgttaaaggggccttctctactactctattttaaatagcaccagcaatcactctttattcctggcattactcttcccttttctttatagtacttattactaacattaaaatatatatcaagtagcckgtatataccactaatttgaaatctatgactacagggatgttgttatctgttgggcttccaaagc

SEQ ID NO: 311369 - DNA, 599 bp, Homo sapiens
acaacttaggttaaaatcatatttaaatgcaaaatatacaaagacataattaaattgcctatgcatgaggcgggacccatgtataggaagctaagaaacctgaataacacacttaaagtattttctcttagcatgttcaaacttgcttaaaaattttgtcacattcaattgactcttaatgagctaactgttgtgtagtttatgkgcaagagtttaatatacgaatacaattgacttaactagatacaaactcacaaacctagtgagtttgtatctgacttaaaataggtaaaattctaaaatgtatatctttagccttggggctcatcaacaaaactttatgtactcaaccaatatacattcatgtttttagaaatgcctacataagagtttcataggccattaatattttatgattagaaatataaagccattttagttgtcttataaactgttccaagctgtatgtgtagaagtgtcaccactgttcgtatattggtgaacataactaataaaaaattatgtgagataaatgcttctccttccaaggcttgcatagccacatttatcttactataccaaatcatgctctaaatgca

SEQ ID NO: 311370 - DNA, 599 bp, Homo sapiens
acaacttaggttaaaatcatatttaaatgcaaaatatacaaagacataattaaattgcctatgcatgaggcgggacccatgtataggaagctaagaaacctgaataacacacttaaagtattttctcttagcatgttcaaacttgcttaaaaattttgtcacattcaattgactcttaatgagctaactgttgtgtagtttatgtgmaagagtttaatatacgaatacaattgacttaactagatacaaactcacaaacctagtgagtttgtatctgacttaaaataggtaaaattctaaaatgtatatctttagccttggggctcatcaacaaaactttatgtactcaaccaatatacattcatgtttttagaaatgcctacataagagtttcataggccattaatattttatgattagaaatataaagccattttagttgtcttataaactgttccaagctgtatgtgtagaagtgtcaccactgttcgtatattggtgaacataactaataaaaaattatgtgagataaatgcttctccttccaaggcttgcatagccacatttatcttactataccaaatcatgctctaaatgca

SEQ ID NO: 311371 - DNA, 599 bp, Homo sapiens
acaacttaggttaaaatcatatttaaatgcaaaatatacaaagacataattaaattgcctatgcatgaggcgggacccatgtataggaagctaagaaacctgaataacacacttaaagtattttctcttagcatgttcaaacttgcttaaaaattttgtcacattcaattgactcttaatgagctaactgttgtgtagtttatgtgcaagagtttaatatacgaatacaattgacttaactagatacaaactcacaaacctagtgagtttgtatctgacttaaaataggtaaaattctaaratgtatatctttagccttggggctcatcaacaaaactttatgtactcaaccaatatacattcatgtttttagaaatgcctacataagagtttcataggccattaatattttatgattagaaatataaagccattttagttgtcttataaactgttccaagctgtatgtgtagaagtgtcaccactgttcgtatattggtgaacataactaataaaaaattatgtgagataaatgcttctccttccaaggcttgcatagccacatttatcttactataccaaatcatgctctaaatgca

SEQ ID NO: 311372 - DNA, 647 bp, Homo sapiens
tgagcagtgtgctggaaattgccccaacccatgctgttttatgtaagccatagtccttagaatgtaggtactcagagaagagcaggtacttttttgtgctaggaagaaacatggccaagcaatactgctatctgacgaggaagctgttgttctttaacctggaccattttcagagtaggcattttaaaagctgcctgatgagaactttttgaaactgtagcagagcttccatggatattctgattggatatatcattgcttcctgctcagcttgctaagataacttgaaaacagaaaatccttttgtctggagtaggtatttaattaaccaaatgttaagtattgtgtattttttcagttgcttaagtggaaagacattattacctgaatatagtttttttatgaacaacccagaatattaccgggttaaaggtcattggtttattacttaacctaaaaataattgctttgacatatatggaatattgtatatctcattattttttgataacttcagaagagctaatataatcggaggcagatctamagtggaatagggaattcagaatttatattctaacagaaaaggatacagtaatatgacaaggaaattcctaaaaatatagtatattttccatgtgaaaaca

SEQ ID NO: 311373 - DNA, 617 bp, Homo sapiens
agggaactccaaacattcttgcttctgtatcccctaaaaagactcttgaaaaatgagtcaacccttgcagatttaaaatccgcattcgaaatgtacttttcattcttaaatgactgaaaataatataatttgagggacattgtaaatatcgatatyttaaaactaagatatatgtttatgcctgaaaaaatcttattgatcacctagtatacttttcttaaacagtatgtatacacaatgagtgttttttttctgttactgtaagtcctaaatgtaaaaaacaaaccttttcaattgaggtattgttacaattattaacgtgcaattgaccaaaacaatatatgtatattataaaatttgataaacataaaaataaaattttattgaaaatacatctcttaataagatggatgggtatttaacaatttatacaccttcagaagaatataaattaattctacaattggaaaggcttcagcatcaattctatccctaatttttgtctgtatagatgtaaatgatgaaaaatcttattcaaataggtgagtagaaagaaacggaaggaattgtattatagtagcattgcttaatcatttgtgctcctgctatggcatatg

SEQ ID NO: 311374 - DNA, 617 bp, Homo sapiens
agggaactccaaacattcttgcttctgtatcccctaaaaagactcttgaaaaatgagtcaacccttgcagatttaaaatccgcattcgaaatgtacttttcattcttaaatgactgaaaataatataatttgagggacattgtaaatatcgatatcttaaaactaagatatatgtttatgcctgaaaaaatcttattgatcacctagtatacttttcttaaacagtatgtatacacaatgagtgttttttttctgttactgtaagtcctaaatgtaaaaaacaaaccttttcaattgaggtattgttacaattattaacgtgcaattgaccaaaacaatatatgtatattataaaatttgataaacataaaaataaaattttattgaaaatacatctcttaataagatggatgggtatttaacaatttatacaccttcagaagaatataaattawttctacaattggaaaggcttcagcatcaattctatccctaatttttgtctgtatagatgtaaatgatgaaaaatcttattcaaataggtgagtagaaagaaacggaaggaattgtattatagtagcattgcttaatcatttgtgctcctgctatggcatatg

SEQ ID NO: 311375 - DNA, 579 bp, Homo sapiens
ttccctaccatgtttgataaatgttgtccagattccattgccaagaatgtgttgtccaaaatgcctgtttagtttttaaagatggaactccaccctttgcttggttttaaggatgtatggaatgttatgctaggacatagtagtagcagtggtcagacatggaaatggtgggtagacaaaagtatacatgtaaaataaaagtattttaataaagtaaaaaaaatgataaaggtaatcacattagaagattcatctcttgggtgcaacagctagggtagcctcccaagccctgtgtggtagtmgtcagtatcactactatggtttcaatgtttttccctccaaaactgatgttgaaatttaattgccattgtgacagtattaaggggtgggagctttaggaggtgattaaggattgagggctccaccctcacgagtgggtttggttcccttataaaagtgggagttcagcccccttttgatctttcttgccctctaatcgtccatcatgtgatgacatatcaagtaggccctcgcagaggctgacaccttaatgttagacttcctagtctccagaactgt

SEQ ID NO: 311376 - DNA, 402 bp, Homo sapiens
ttttgttcattacaaattattacctagtcttaggtactttgttacagcagcacaaaacgtattaagagagttacctacttatcttttctgaacatcattacaattccatttcaaaatttctgctcttaatgatatcccaaggagactagaaaatatttcaayagttcagccactcttcaatgaaattatcttgcgtggtcatgtactcgttaaattgccctgaccattctttgaaggatagcactggttatgagattaaatttgaaagttcctatgaactatcagttgagtgaatttgcttattatagcatatatcttaatcatatgttcataagcctccattaagccaggctgcacagtttatttttttaacaattgcattgttttaaagttacagttgtt

SEQ ID NO: 311377 - DNA, 640 bp, Homo sapiens
aaagtaagtgactagagacaaattctcttagcagtaaattttccggctgattcccttatgctagtgtatgtcttctagttacagaaaccaggatagctttgtgaccacaaaacaaaatcttatgaaattttattactgctggggaaatataaaggacaagcaatggtatgaattattcttaacgttagggtcccagtgmagggcaacagatggtagaaatatttactccagtgatttttccatcaaagtttctatcagcatttgaatctcagcagtgtggctgttaagaagccgtcaaactcagcagccagctggtgaaatcacaatgtaaaaactgactatacagaaaatatacttgtgtctgatttttttacatcatatgcctttttctagattatcctttaattcaatctgtattaatataaattcacttacctcctatagagttctttgaggcagtagattgccatgttaggtgtatcctaataaaaatacgaaaactcattctctgtagcagatactgtcagtgacctatgcacatctattcagcactcatcatttttgtacaagtcaatgacctttcaacggcagtacctgttagataagggctttctgggctgcgagtgctgaaagcaaggcg

SEQ ID NO: 311378 - DNA, 640 bp, Homo sapiens
aaagtaagtgactagagacaaattctcttagcagtaaattttccggctgattcccttatgctagtgtatgtcttctagttacagaaaccaggatagctttgtgaccacaaaacaaaatcttatgaaattttattactgctggggaaatataaaggacaagcaatggtatgaattattcttaacgttagggtcccagtgaagggcaacagatggtagaaatatttactccagtgatttttccatcaaagtttctatcagcatttgaatctcagcagtgtggctgttaagaagccgtcaaactcagcagccagctggtgaaatcacaatgtaaaaactgactatacagaaaatatacttgtrtctgatttttttacatcatatgcctttttctagattatcctttaattcaatctgtattaatataaattcacttacctcctatagagttctttgaggcagtagattgccatgttaggtgtatcctaataaaaatacgaaaactcattctctgtagcagatactgtcagtgacctatgcacatctattcagcactcatcatttttgtacaagtcaatgacctttcaacggcagtacctgttagataagggctttctgggctgcgagtgctgaaagcaaggcg

SEQ ID NO: 311379 - DNA, 507 bp, Homo sapiens
ttactccagtgatttttccatcaaagtttctatcagcatttgaatctcagcagtgtggctgttaagaagccgtcaaactcagcagccagctggtgaaatcacaatgtaaaaactgactatacagaaaatatacttgtgtctgatttttttacatcatatgcctttttctagattatcctttaattcaatctgtattaatataaattcacttacctcctatagagttctttgaggcagtagattgccatgttaggtgtatcctaataaraatacgaaaactcattctctgtagcagatactgtcagtgacctatgcacatctattcagcactcatcatttttgtacaagtcaatgacctttcaacggcagtacctgttagataagggctttctgggctgcgagtgctgaaagcaaggcgagaagaatgagaaaacctgggtatttccattaagaggaggacggtcttttcatggactcgcttgtctcaaacttttgagcaggagtcac

SEQ ID NO: 311380 - DNA, 507 bp, Homo sapiens
ttactccagtgatttttccatcaaagtttctatcagcatttgaatctcagcagtgtggctgttaagaagccgtcaaactcagcagccagctggtgaaatcacaatgtaaaaactgactatacagaaaatatacttgtgtctgatttttttacatcatatgcctttttctagattatcctttaattcaatctgtattaatataaattcacttacctcctatagagttctttgaggcagtagattgccatgttaggtgtatcctaataaaaatacgaaaactcattctctgtagcagatactgtcagtgacctatgcacatctattcagcactcatcatttttgtacaagtcaatgacctttcaacggcagtacctgttagataagggctttctgggctgcgagtgctgaaagcaaggcgagaagaatgagraaacctgggtatttccattaagaggaggacggtcttttcatggactcgcttgtctcaaacttttgagcaggagtcac

SEQ ID NO: 311381 - DNA, 545 bp, Homo sapiens
attagttataataggggcttacatttaatgagtaattattttgtgcaaaatgctattccaagtggctttatacacatctcatttatatttccattttagagaagagaaatcagagacatgaaaagaattaagatattttcacaagattctacaactattaagctaaaggacctgggatttgaatccaatctttctgagtccagcatttaaccacttaaccccctttctaaacttctattagagcctcatgtggattgtcactrttttggtggatgataaaactttgtatatgcactcaattactgcttgtttagtgaatgcattaagagatgctgatatcattcaacgaatttaataaaccaatttgagtggcatataacatgatcaatatttttctcaggtaaaaaaatgggatatttttagagaggttctccatagtggcatggtatattgctctggaatatcttcaaaaagcactaattcatgtacttaattttgtcttttacttgcgacagaggaaaaaaaatagagttgcatggaaccag

SEQ ID NO: 311382 - DNA, 654 bp, Homo sapiens
cttatggcagtgaataagtctcaggagatctgatggttttataaagggcaattttcctgcacacgctcttgcctgccaccatgtaagccatgcctttgctaccccttcaccttccaccatgattgtgaggcctccctagtcatgtgagactgtgagtccattaagcctctttttacttataaattacccagtcttgggtatttcttcatagcagtaggaaaatgaactaatacataggattattgagaaatatacatcaaatataaaatgtgatttttaatgattttttctygattgatgtctgatggagactaagtgcttaatatgaaaacagaactcatggtgttttcttctgcggaaagcaagttagtgtagtccaggcttgtaacttgctggtataagaaaagatcctagactttccaaagggaaaaatggacagaaggttacatcgtagggtcagcagtttcttagatgtggtcatctggttatagtattactctgaaatattacctccttctaggtttttgataggagtgggattgcagacaatttgaagctctactttatgatgaaagcctggtgagctctaattgagaaatacagacctggtttggatactaaatgagtaggtgtttattaacacactgttaggaa

SEQ ID NO: 311383 - DNA, 637 bp, Homo sapiens
tatttcatcccatcccacatatttcrtctttgattaggtgaggaggagggacctgagctcgtgtctcatggtccaaactgtatgtgcgaataaataagttagttatctgccccaaatcatagtaccttgctacttctccccaaccctcaacttcccaagtaatacaaatatttagtaaaagataagtatactaccaattatgaagtacttacctcctaaggttaattgtgggagctcaataaatgagtatatataaatttctttttttacatcttttattttattaatgtttttaaaaaattcaaattcaatagtctttggaatacaagtgatttttggttacatgaatgaattgtatagaagtaaaatcagatattttagtgcacgtgtcacccaagtagtgtacattacaccccaaaggtaattttttatccctcactaccttcccactctgccccttctgagtcttcaaagtccattctaccactctgtctgcctttgtgtacctacagcgtagctcccacttataagtgagaacatacagtatttggttttccattcctgaattacttcacttagaataatggcatccagctccatcaaagttgctgcaaaagacattatttcattattttct

SEQ ID NO: 311384 - DNA, 554 bp, Homo sapiens
agaacccataaaatatttaagacaaattaactaatcacagtatgtggacattatttagatcattactcaatgaactataaaaataatgaaaacaaaacattttaaaagcaattatgagataactggaagttggaatactgaatcgctatttgaggataatcagaaattatagtttaaatttttacacatgattgttgtattgtggttatttaaaaaataaaagaaaataaaaacctcctaaatcttttagggtactgattctagatctggagcaggcatcagaatcaccaggaggacttattaaaacacagatgattgggccatatcccccaagagattctgattcagtaggacattgttggcacctgataatttccatttcaaacaactttccagtagattgtgatgtgcaagtctggagatcacatgctaaaaacaattgtttyagatatatattttgagatatgcatgatttaaggatacaatttctaagatgtgcttaaaaatcatatggaggaatgggcatgggtggagacagacgagattgcctgcaa

SEQ ID NO: 311385 - DNA, 547 bp, Homo sapiens
ttttattatgtttgaaatttctgttttgaaaagattttttaagataaaggaacacaaaaaccaataaagcatttgataaaattcaacagccattcctgattttaaaaatcaaccgtggatgcttggtatcaaaaaaacctctcaacaaactaaggaatggacaggaattcctcaacctgataaaaagwatctatgaaaatcctacagctaacattacaattaatgctgaaagactgaatgctttctccctaacatcagcaacaaggcaaggatgtctgccttcattattattttttttattatatccatgtaactttctgtattgtcttttaaaatttaatttaattttttattatactttaagttctgggatacatatggagaacatgcaggtttgttacatagctatacatgtgccacagtggtttgctgcacccctcaacccatcatctacattaggtatttctcctaattctatcattccccttgccccccaccccccaacgggccctggtgtgtgatgttcccctccctgtgcccatatgtt

SEQ ID NO: 311386 - DNA, 579 bp, Homo sapiens
gctgtgctgggagatccactgttctcttcagagctggcaggcaggaatgtttaagtctgctgtagctgccccagtagccacctcttcccccaggtgctctgttccagggagatgggagttttatctataagttcctgactggggctgctgcctttctttcagagatagcctgcccagagagggggaatctagagaggcagtctggctgtagcagctttgccatgctgcagtaggctctgcccagtccgaacttccyggcggctttgtttacactgtgaggaaaaaccacttactcaagcctcagtaatggtggacacccctcctcccaccaagctcaagcatcccaggttggcttcagactgctatgctagcaatgagaatttcaagccagtggatcttagcttgctagactcagtgggggtgggatccactgagcaagaacacttggctccctggcttcagcccccttttccaggggagtgaagacttctgtctcactggctttccaggggccactggagtatgaaaaagaaaaaacaaaaacaaaaaactcctgcagctagctcagtgtctgcccaa

SEQ ID NO: 311387 - DNA, 579 bp, Homo sapiens
gctgtgctgggagatccactgttctcttcagagctggcaggcaggaatgtttaagtctgctgtagctgccccagtagccacctcttcccccaggtgctctgttccagggagatgggagttttatctataagttcctgactggggctgctgcctttctttcagagatagcctgcccagagagggggaatctagagaggcagtctggctgtagcagctttgccatgctgcagtaggctctgcccagtccgaacttcctggcggctttgtttacactgtgaggaaaaaccacttactcaagcctcagtaatggtggacacccctcctcccaccaagctcaagcatcccaggttggcttcagactgctatgctrgcaatgagaatttcaagccagtggatcttagcttgctagactcagtgggggtgggatccactgagcaagaacacttggctccctggcttcagcccccttttccaggggagtgaagacttctgtctcactggctttccaggggccactggagtatgaaaaagaaaaaacaaaaacaaaaaactcctgcagctagctcagtgtctgcccaa

SEQ ID NO: 311388 - DNA, 579 bp, Homo sapiens
gctgtgctgggagatccactgttctcttcagagctggcaggcaggaatgtttaagtctgctgtagctgccccagtagccacctcttcccccaggtgctctgttccagggagatgggagttttatctataagttcctgactggggctgctgcctttctttcagagatagcctgcccagagagggggaatctagagaggcagtctggctgtagcagctttgccatgctgcagtaggctctgcccagtccgaacttcctggcggctttgtttacactgtgaggaaaaaccacttactcaagcctcagtaatggtggacacccctcctcccaccaagctcaagcatcccaggttggcttcagactgctatgctagcaatgagaatttcaagccagtggatcttagcttgctagwctcagtgggggtgggatccactgagcaagaacacttggctccctggcttcagcccccttttccaggggagtgaagacttctgtctcactggctttccaggggccactggagtatgaaaaagaaaaaacaaaaacaaaaaactcctgcagctagctcagtgtctgcccaa

SEQ ID NO: 311389 - DNA, 600 bp, Homo sapiens
tgttgatggcacatccgaacacatggtttattgtatggagtatgatttcatttggtttacaaagcaaacacctctaccaatgatgttaggccaaatctgaagaagttgaaagggaaggacatcagactcaagaaactcagatgccttcttgtgtagtgattgtttgaaagtgctagttacttggcagcagtcagacactagcagagaccacttaagacccaacagaaggccaagtctcacaactttcattcgacacagtgcttgtttggggtagggtaaggtggagaattattcatcacaattccagtaaatagctcctggccacagagcgttacattagtcaaaaatgagtctgagcacaagagaatatgaggacactcactgacagtaggattttataaaacagaattagccatttctatgtcaygtgcccttattcatttggcaaaatctattgatttgttgttgttaactatttttctcattcgtgaaatatcttgtgcttttctgagtcttaattttcaagattttataacttaccaagttaacagtgtgattaagttatcttataagtcaagctagaggctagtctcagaaaag

SEQ ID NO: 311390 - DNA, 516 bp, Homo sapiens
ttctaataaactggaatagctatttgtttgccatgaagcaagtagagactaggagatgtcaccgttttcttggcagcataagcatttttcttagcatgaaaagtcttgtggcacttgtaggtaagtaaaaggagatcctggaccttttattattccctagcccttggattttgcttttcttctcttttagatttttagcacagtcaacatctgtgcccctgtcatccttcaacaagcttatcctttgtgctgtttttagggtaagcttcaagggaaaaattaaatgtgtctttcttttactcattaatttttattgcatgaaatttaaatttataataatttgaaataccttagctagacaatgtaaaaggacaaaaatacctacatatagatagagagatgatagatagaggtatagataaattatctctatatttatatctttatttgtwttccacaatttaaagaagtgatagaagtataaaggataattacattgaattttacctgtattgc

SEQ ID NO: 311391 - DNA, 556 bp, Homo sapiens
tccaagtgcaggattgcctggcccaaccctgcctgggtcacttctgccccctcctcagaggcagagcacagaaccaggaccactgagcattccattgtccaacccatcacctgggacacccaagtaactcccctagttaaactctagtgaacaaaggctaagaataaaccctactgccaccactgcagctggctctcacttgtaagtgccacctactggtctggaggttgatttgcatagctcattacaatgactgctgacacaaatgcacagcacttgcagagaagcttctcacaatctctgctaccactatcayccatgccaccccagtttctcaagaggtcatgagcctgcttactgacccagcatactgctacaactgacatttgagaaagccaccacactaaggctatttatgaccaatggaatcatacagtctttgccactgaatgcacccagaagcaaagccaaacggtcctactcaatatacatcataatcacattctaaagcaaaaaaattcctgccccaaggaaagtaaattcaaaagtaaaaaac

SEQ ID NO: 311392 - DNA, 602 bp, Homo sapiens
atgatgcggaacaatctttaaagcaacaaaagtaagataaaaaatttaaattttgaaatgaatgaagatcaaaacacgacatacaaaaacctttttttgatacagcaaaaacaatgctggggggaggttwacattgttaaatgcccacataaaaaaaggaatattacaaattaacaacttcacatcacaattcaaagaacgaggaaaaactaaacccaaagctggctaaagaaaagatataacaaagatcagggcagaactaaatgaaatagagacacacacacacacacacacacacacacacacactacaatggatagagaaaataatacgttggtttttagaaagataaagaaaattgattaattgccagttggactaatgaagaagaagatccaaataaacataatcagaaatgaaaaagaagacagtacaactgataacaaagaaatacaaaagattatcagaggctactgtgaaatgctgtgaactgtatgctcacaaactagaaaatcatgaggaaatgagtcaattcctggaaaacaacctctcaaaatcgaaccagaaagaaagaaaaattctgagtagagcattaatgaata

SEQ ID NO: 311393 - DNA, 499 bp, Homo sapiens
atatgtttgctaataaaataatcttatacttggaaaaccctaaagacttctccagaaaattcttaaatttgcgaaatgcattcaatttcaggatacaaaaaacaatgtacacaaatcagtagcatttccatacattaatagtgatmaaagtgagaattaaatcaagaaatcaattccatttacaatagctacaaaaaaaaaaatcctaacaaggaagtgaaagatctgtataagaaaaaactagaatatggacaaaataaattttagttaactcaaacaaatggaaaaacatcccatgctcatggatcagaagacttaatatagttaaatgaccagacagctcaatgtataccaggttttcagttggaagaaaagataaacagttgaaacaaatgaaaatgtcgggggttgtgaattattatctatgatactgaaagtgtggatacatgacacaatgtatttattaaaattcatagaattggagcataaagagtgaaac

SEQ ID NO: 311394 - DNA, 567 bp, Homo sapiens
ttggaaaagaggaagtcaaattatatgtttgctaataaaataatcttatacttggaaaaccctaaagacttctccagaaaattcttaaatttgcgaaatgcattcaatttcaggatacaaaaaacaatgtacacaaatcagtagcatttccatacattaatagtgataaaagtgagaattaaatcaagaaatcaattccatttacaatagctacaaaaaaaaaartcctaacaaggaagtgaaagatctgtataagaaaaaactagaatatggacaaaataaattttagttaactcaaacaaatggaaaaacatcccatgctcatggatcagaagacttaatatagttaaatgaccagacagctcaatgtataccaggttttcagttggaagaaaagataaacagttgaaacaaatgaaaatgtcgggggttgtgaattattatctatgatactgaaagtgtggatacatgacacaatgtatttattaaaattcatagaattggagcataaagagtgaaactctggtttgaatttcaacatataaaatatttttaaaaaggaaaaac

SEQ ID NO: 311395 - DNA, 634 bp, Homo sapiens
aaagagtgaaactctggtttgaatttcaacatataaaatatttttaaaaaggaaaaacatttgcaataagaggatccaggataaaatgaagaatgtgaaaaaactatctaattgyattaaaatttcatgaaataaccttaatgaagtggtgtgggtcagggtgttggcctgagtaacttgggaaatgagtgaagactacaacatttagaaaaaaaaattagacatgacctctgtattctagctgatatttttttctatggcagtgtgcatgaacagtcataacactactatatgtattgaacaaatcagtaaatggatggtaaatggagagagccagatttttctcttttggagttgaagattgcaaataaacaagaggagaaagatagaatgttccttgtggtaatagatcagaatttaggtcatcaatatgaacttatgtgtagcttaatataaatacagatacatgtaaaaatatgtgtagtttttgtatatactgagtttagtattcctttctctgtcacacataatattcctttctctgtcagctgacaatgcttagaagcaaggatatcccagtagctgtaagcacagatggcagtcagatattgtctcttaatatcattgtataata

SEQ ID NO: 311396 - DNA, 634 bp, Homo sapiens
aaagagtgaaactctggtttgaatttcaacatataaaatatttttaaaaaggaaaaacatttgcaataagaggatccaggataaaatgaagaatgtgaaaaaactatctaattgcattaaaatttcatgaaataaccttaatgaagtggtgtgggtcagggtgttggcctgagtaacttgggaaatgagtgaagactacaacatttagaaaaaaaaattagacatgacctctgtattctagctgatatttttttctatggcagtgtgcatgaacagtcataacactactatatgtattgaacaaatcagtaaatggatggtaaatggagagagccagatttttctcttttggagttgaagattgcaaataaacaagaggagaaagatagaatgttccttgtggtawtagatcagaatttaggtcatcaatatgaacttatgtgtagcttaatataaatacagatacatgtaaaaatatgtgtagtttttgtatatactgagtttagtattcctttctctgtcacacataatattcctttctctgtcagctgacaatgcttagaagcaaggatatcccagtagctgtaagcacagatggcagtcagatattgtctcttaatatcattgtataata

SEQ ID NO: 311397 - DNA, 567 bp, Homo sapiens
ccaaaaggaaggacaggctatgttgtgtgcccgcagaatagaggcctcatccacagtgctgaagagtggatggactacagtctttgcccccattgcaccttgccagaaaaaaaccactggtctgggactccagcacagtttccccacccccttttagcacycaagctggtcacagttccgcatttctctaggatggagctcccagaggtaattgacatgcacacagcttctgctgctgccataacccctgcccctactgccctcaggctggggagggagcaaagagctgaaggactgttgcagacctccagcattccgcagctgccttatagaaaagcagccagacaatttcccgtgtgaatccctgcccctgctacttctcactgggcaggggcctcctgacctgggcccctggtatagccaccctactgacacctgaacactttggttgatggtggctctgcatttctctggggtggagttcccagagacagtcaacagaccctctgtcatttctgctccagcagtactgtccttgttactcttggcctggggaaagaacaaaga

SEQ ID NO: 311398 - DNA, 514 bp, Homo sapiens
acactgtcttccctgcaagcccctctcctcactattcaccaggcagtgccccctggcttggcccttctggcagctacctcaccccaagctgatcattctgattggcagtgctctgcattactatggatggagctcccagagataagtgacaagcccttagccattgttactgtcaggtccccagccctgctacccccaagctgaggagggaacaaaatgcctgarcttatgctagggctgtggtgcaaaagctggagtgacaggctgagatctttggctagcatttgattaaaagaggaattcacattctcagagcactgagacgcacagctgcaaacaggaagaaatataaaggagccatgcagctgagtgagagcctacttactgctgagtaagagcctacttactggccattatgcttaagcagtgtctactagattgcaagcccaaactacaacaccaaaaataccttgctagtttactcctaagtgaaaacaagggcaagaattcagct

SEQ ID NO: 311399 - DNA, 554 bp, Homo sapiens
acattaataatgtcaaagctggcagccaaatcaagaatgtaatcccgtccacaatagtcacaaaaggaataaaatacctaggaatactgctaaccagggaggtgaaagatctagacaattagaattacaaagaactgctgaaataaatcagagctgttgcaaacamatttttaaaaagacattttttatgaaattggaaaaaaaatctaaaatttatatggaacctaaacagagcccaaatagacaaagcaatcccaaacaaaaagaacaaaactgtaggcatcacactacttaaattcaaactatacttacaaggctacagtaaccaaatcagcatggtactggtataaaaacagatatatataccaacgggacagattagagaatcaaaaataaaaccacacacccaccaccatcttatttcaacagagctgacaataaaaagcaacaaagaaaggattccctgatcgataaatgatgctgggataactggctatgcagaagattgaaactggaccccttcctttcaccatatacaataatcaactcaagac

SEQ ID NO: 311400 - DNA, 554 bp, Homo sapiens
acattaataatgtcaaagctggcagccaaatcaagaatgtaatcccgtccacaatagtcacaaaaggaataaaatacctaggaatactgctaaccagggaggtgaaagatctagacaattagaattacaaagaactgctgaaataaatcagagctgttgcaaacaaatttttaaaaagacattttttatgaaattggaaaaaaaatctaaaatttatatggaacctaaacagagcccaaatagacaaagcaatcccaaacaaaaagaacaaaactgtaggcatcacactacttaaattcaaactatacttacaaggctacagtaaccaaatcagcatggtactggtataaaaacagatatatataccaacgggacagattagagaatcaaaaataaaaccacacacccaccaccatcttatttcaacagagctgacaataaaaagcaacaaagaaaggattccctratcgataaatgatgctgggataactggctatgcagaagattgaaactggaccccttcctttcaccatatacaataatcaactcaagac

SEQ ID NO: 311401 - DNA, 613 bp, Homo sapiens
ggggagtgggggagccccaataaatggcaaatttacataaataaaacccagaaaggaatcaacccaggccaccattgtcaaaaggcaaagcctcagctactgagttacagcattgagcagtttctattgctctccccagagggaacccagagaagccaatttcaagcttgcacaggcttttaactgctcaataaaatgttgaggtccaactatgacatgaagccacaaattcctgtctctacatgatggaaaccaagagaaagtattcccacatggtcacaaggttaagctcttaaggacacaaaacaagacacagaaatgtcatctggtattgctttcagggccccgcagcaaagtttgtaactgaycagcctgcagggctggcttgaaaagtgggcttataggggtcctaaacccacattctatcctatgatactcctttctccactacagaacacaggaagacaaattcttagcacaaagcacaccagatttgctacaacttaagagtagtctcacaaatccatttttctattcatcagacccttgcagagcagaccgatagtttactgttttacccagacaaagagacagacacacagagagagagaga

SEQ ID NO: 311402 - DNA, 579 bp, Homo sapiens
aaagaagctcattgaagataaagcagaaataaaaaaaaaaaaacaagggggaaaggttggttaggcaatcattaattctagggcagaaagaagtacaagataggaartaagagtataacacgctgtttttctcaacaatgagtaatatgtacatcatcataatgatgtggtgactgcttagctcctaaatctggtaactactttgggacaatatgggaggaaaagtgaagatagtgatggtataagagctaaatcctcaactgtcatatcaagaaatcactatataatgtataaaataatcaagaaacgactagttacataaggaaaaaaatagaagacattgctaaaagagttaaaagtcatttagaattaggagggatggggcagggtactgttaggatgcattataaactgaagaggcttttaaaaattacatgtattcatgtatgcattcacttgaaaaaccaaaaaaaataataatctggaaaaaatccatgaaggtaactaccagcaggaaaaactaagagaatgaaaagtgcttgcctctggaaagaacaactggcaggactgttgttttca

SEQ ID NO: 311403 - DNA, 579 bp, Homo sapiens
aaagaagctcattgaagataaagcagaaataaaaaaaaaaaaacaagggggaaaggttggttaggcaatcattaattctagggcagaaagaagtacaagataggaaataagagtataacacgctgtttttctcaacaatgagtaatatgtacatcatcataatgatgtggtgactgcttagctcctaaatctggtaactactttgggacaatatgggaggaaaagtgaagatagtgatggtataagagctaaatcctcaactgtcatatcaagaaatcactatataatgtataaaataatcaagaaacgactagttacataaggaaaaaaatagaagacattgctaaaagagttaaaagtcatttagaattaggagggatggggcagggtactgttaggatgcattataaactgaagaggcttttaaaaattacatgtattcatgtatgcattcacttgaaaaaccaaaaaaaataataatctggaaaaaatccatgaaggyaactaccagcaggaaaaactaagagaatgaaaagtgcttgcctctggaaagaacaactggcaggactgttgttttca

SEQ ID NO: 311404 - DNA, 616 bp, Homo sapiens
taggacctggaaatcagccatggtggaaatatttacaaaatagaaatggacaaatccgagctctttccctcaccctgccagagagccagttttccagctcctcactgttttgcagatgatgttagtatagcacatatcctattcccatttatgttacagttaaaatatcagtctctcctataaagttgtgagctcactgaggtcagagtcactatctttactcacttttctacctcccagaacttagaaaaactgtttgataaatggcaggtgatcaatgaacaactttttaaataaaaaataaatataagtattaaaactaaactgttattctaactctttcttaatgagaaattaggcacatggcataaccactctgagtatgtttcccattcttcaacaggcagagatatatctctgtaacccagttattgtaagaattaaacaagataaaacttagaaaaattatttgtaaataatgagaaatgaaaaattcgtaaataatgraaaaagttcatgagctattgttattttcattgaggcatttcctcaagttctagcaatgtcctcggagtataaaatcctcaaaaggtattcataaaattaattcaataat

SEQ ID NO: 311405 - DNA, 565 bp, Homo sapiens
ttttgtaccagattagcagattaggctttctttcagcggataggtctgtctctccaaatttcagggtggcagtttgccttgtgacctcagttctctaacggtagaagaaaaatcattgatgatctgtttatctaacactttcattgcttgttttaaagatgagaataatgwctcccaagctcttttaccttttgaagcttaaaatagcaaaacaattatactttgcatataaaatcctactaagcttattgtgggtcattccatatatattggagaaagcaaaaatacaagactacgatacttcctgactaagtaaaaatataacatataaaagtataaattcaattttaaaaacctcatattaatacagaatataaagtgagtatttctgtgaaaaacatcaaatttttagtacttgctttaaaaaacagaacactttcttaaatcattgatatatttatttcaaaagcatgtaaatatatatgtgttcacctaacatcaacctatagaattccccaaacctagggaatattgagtctgataatttctacactaattattagat

SEQ ID NO: 311406 - DNA, 418 bp, Homo sapiens
atagttttttgtatgttttcattgctgtatgtttataaacatgcatcagcagtcaaaatttgatttcagaagccagcaaatcaattacatttgattggagtaatgaacagaaagaaaaagcttagggctcctggactgctagtaagtgaggttctgtatctagatctatgcattggttatgcaggtgttttcagtttctgacaatttaccaaactgtataagagctgtgcacttagctatttgcatagtatacttccataagaagcttgctaaaagaaaaaatttttaaaaagcttcctttttccccctaaaaaatktactggcccaggagtttcagtagtgagttggacctagcatttaatgatttaaaaaataaatgaatgaaggaattcaccatatttattcccccaaaattaaa

SEQ ID NO: 311407 - DNA, 621 bp, Homo sapiens
tggagtaatgaacagaaagaaaaagcttagggctcctggactgctagtaagtgaggttctgtatctagatctatgcattggttatgcaggtgttttcagtttctgacaatttaccaaactgtataagagctgtgcacttagctatttgcatagtatacttccataagaagcttgctaaaagaaaaaatttttaaaaagcttcctttttccccctaaaaaatttactggcccaggagtttcagtagtgagttgkacctagcatttaatgatttaaaaaataaatgaatgaaggaattcaccatatttattcccccaaaattaaatctcaatcctacaatcacggggtttattaagccccttatttgtgattcgcatgattatgtactgtgaaggtgaatgcaaaatagcacttaagtattaatatatctcaccctttctctaatgtcatctttcctacccttagaagataggcaggaaaccacacctggaaaccaaaaagagaaacccataaaaatactccctacaacttcagagcaaaaatccccaaatatagaaatagaaatttgtaaatatgtttattgttaactaaaaagatcaagaaataaaaagtttgggcatgaa

SEQ ID NO: 311408 - DNA, 491 bp, Homo sapiens
aaggacccttgtaattacattgggccaatgtgagtaatccaggttaatttccccatctcaaaattatcttattagacaccttactttcctctacaaccttaattcctccttgccatgtattaataacagaatgcattcacaggtttctgggattaagatttagacattttagagaagccattattctgcttaccataacttccaataaaatttactttatgataacwtagcaattgttatgtgtactttttagtactgaaaaatacacagaataacctatgtcaatgctgtctaaattcaggcataatcatggcaataattatgctcctttgcaaaacaaagttgatgttctatttctgatatagacattgaataatttatattttttattggaagaaggatttaaagaaagttagcccatcttaaataaatgaggacaaattcaaatattaatggaaataaaaacatacaattcatatacttatattcta

SEQ ID NO: 311409 - DNA, 558 bp, Homo sapiens
tggacctaagataaaagatctcttgactgagattaaaaaaaagaaaaaagccttgattattatatctttaatgtgaaatgttaaatgtgcccttcccaagagagacatctataacaaatcaaaatgctgtaactatgcactaatcttctttggaaaatgttgaaatcctgttaagctttcccagaccttgccaaaataaatgaccctgaaaccattacggagcactgggcccatgtttttggagtctgtgtccttccaggtggccattctcaaactttgcacttgaatcaacataatatttaatcatattgcctgaatctcattattaaggttaacattttggtgacccagataagacctcaagtaaacctccagtgatccttgtcactgacaacagatagtgccttgcwatcagtaaaaacaacttttgttcttccacccccagcatagttagcagggatccctggtgaggcctctcttgggtttgaatcctcccagcttgcttaaggattcagactttattcaagctatacattcctaacttaacaggactgaaat

SEQ ID NO: 311410 - DNA, 585 bp, Homo sapiens
ttgatatagggcgattaccctgagaccttaaaacaataaaatgttgagaagaaagaagaataatatagtgagaccttttatgtasgaaaacattgcttaacctgaatatattttaaagatcactaaatagaaatttgcatttctcaaaaacttaatagagtgaagagtaaagtcagtgcatgaaagaagatatttacaatacatataatcagtaaagggcccaaagttggggtatttaaagtagtctcacaaatcaatgagaaaaaggaagaaaatataaaaatggaaaaacttgttcaatcactatatacacttaaatataaaaatatcaatgtgctttattactcaaagtaataaatgctacaatgtaatactgctgtacacctgccagactggctaaaaagagaaaaatagacactaaaaggtaggagcctgcatggggagctgaaactctgatctcccctggagattgtgaaaattcgtaacatcagtttagaaaactatgtagaggtaccaaagctaaataaatgctttttctgagttagcaatttcaataggagaaatgtacttaaaaataagtacaga

SEQ ID NO: 311411 - DNA, 585 bp, Homo sapiens
ttgatatagggcgattaccctgagaccttaaaacaataaaatgttgagaagaaagaagaataatatagtgagaccttttatgtacgaaaacattgcttaacctgaatatattttaaagatcactaaatagaaatttgcatttctcaaaaacttaatagagtgaagagtaaagtcagtgcatgaaagaagatatttacaatacatataatcagtaaagggcccaaagttggrgtatttaaagtagtctcacaaatcaatgagaaaaaggaagaaaatataaaaatggaaaaacttgttcaatcactatatacacttaaatataaaaatatcaatgtgctttattactcaaagtaataaatgctacaatgtaatactgctgtacacctgccagactggctaaaaagagaaaaatagacactaaaaggtaggagcctgcatggggagctgaaactctgatctcccctggagattgtgaaaattcgtaacatcagtttagaaaactatgtagaggtaccaaagctaaataaatgctttttctgagttagcaatttcaataggagaaatgtacttaaaaataagtacaga

SEQ ID NO: 311412 - DNA, 585 bp, Homo sapiens
ttgatatagggcgattaccctgagaccttaaaacaataaaatgttgagaagaaagaagaataatatagtgagaccttttatgtacgaaaacattgcttaacctgaatatattttaaagatcactaaatagaaatttgcatttctcaaaaacttaatagagtgaagagtaaagtcagtgcatgaaagaagatatttacaatacatataatcagtaaagggcccaaagttggggtatttaaagtagtctyacaaatcaatgagaaaaaggaagaaaatataaaaatggaaaaacttgttcaatcactatatacacttaaatataaaaatatcaatgtgctttattactcaaagtaataaatgctacaatgtaatactgctgtacacctgccagactggctaaaaagagaaaaatagacactaaaaggtaggagcctgcatggggagctgaaactctgatctcccctggagattgtgaaaattcgtaacatcagtttagaaaactatgtagaggtaccaaagctaaataaatgctttttctgagttagcaatttcaataggagaaatgtacttaaaaataagtacaga

SEQ ID NO: 311413 - DNA, 585 bp, Homo sapiens
ttgatatagggcgattaccctgagaccttaaaacaataaaatgttgagaagaaagaagaataatatagtgagaccttttatgtacgaaaacattgcttaacctgaatatattttaaagatcactaaatagaaatttgcatttctcaaaaacttaatagagtgaagagtaaagtcagtgcatgaaagaagatatttacaatacatataatcagtaaagggcccaaagttggggtatttaaagtagtctcasaaatcaatgagaaaaaggaagaaaatataaaaatggaaaaacttgttcaatcactatatacacttaaatataaaaatatcaatgtgctttattactcaaagtaataaatgctacaatgtaatactgctgtacacctgccagactggctaaaaagagaaaaatagacactaaaaggtaggagcctgcatggggagctgaaactctgatctcccctggagattgtgaaaattcgtaacatcagtttagaaaactatgtagaggtaccaaagctaaataaatgctttttctgagttagcaatttcaataggagaaatgtacttaaaaataagtacaga

SEQ ID NO: 311414 - DNA, 283 bp, Homo sapiens
agaagtaaggtcacagagcaaaccactgccatcaaaattggagagatagaacagcagacacagagaaaccacaamttactggagcagaaacccatgagcagagaagagacctactggggaaccaatactaggggagaaaaacttatactttgacaaacttctggaaggccagccttacacttctttgggttttaccattagaggatctaccagatcctcacactgaatattggagaaaaatctccttgtgtttctagcagagagaggaagaaaaaagaaccat

SEQ ID NO: 311415 - DNA, 470 bp, Homo sapiens
tttcactgggtgaaataaaagctctcaataatgagatgggacctgaagtgggtagctgtctgtgaggcttaatctggggtttttatgggcttagaatgtgggagtatatgctgattggtccatgggtggtcttggaaagaacacaattcaactggttagaaggcatcatttggaagaaaacaatagagagggagtgggtaagatgggatggaagttgttactccagccrtggactctatctggaactggcagctctgttttcaggctttagaatgtccttggcttgaaggttgggtttcatcaggaacctgtttccatctgcttaggaatgtgtctgtctccagtcgctatcagaatgaatattattttaaaaaacaaacatatagcaaatgctggcaaggatgcagagaaagaacacttacagaccattggtgggaaagtaaaatagtacagccattatggaaaacagt

SEQ ID NO: 311416 - DNA, 603 bp, Homo sapiens
ggcttatgaagtcataaaacttaacactcttcagtttaaaaagaggaaatagggattcatggtaagctcttttgccggtgacaaaaactagtattacacattggcctgggatctaagttttcaaagtccagtttactagtttttcatatatatttttgacaattaattttrtattttaccgtaaaattggaatgcagctttacttagtgataaagatacaaatctatagaaattttaaataatgtatttagcatgcatttacttaaggaaaatctttatatacttcaatcttccttgaaatacattgtgtttttttctttattctacaaattctgaagtaaacgtgactttttaatatgcttttgtatataacagttttgaatgtacttaggtaatcaactgttttccatattataagctttttctattttatttgtattaaaatgttagttaagtaaaaaaaatagtttatttccaaagcaaattgtagatatgaagacagtggttaacattctatattttggtataagctttggtataagtttgaatttgctatatatgttattagctttctactactgaggcacttattttatctatatc

SEQ ID NO: 311417 - DNA, 603 bp, Homo sapiens
ggcttatgaagtcataaaacttaacactcttcagtttaaaaagaggaaatagggattcatggtaagctcttttgccggtgacaaaaactagtattacacattggcctgggatctaagttttcaaagtccagtttactagtttttcatatatatttttgacaattaattttatattttaccgtaaaattggaatgcagctttacttagtgataaagatacaaatctatagaaattttaaataatgtatttagcatgcatttacttaaggaaaatctttatatacttcaatcttccttgaaatacattgtgtttttttctttattctacaaattctgaagtaaacgtgactttttaatatgcttttgtatataacagttttgaatgtacttagrtaatcaactgttttccatattataagctttttctattttatttgtattaaaatgttagttaagtaaaaaaaatagtttatttccaaagcaaattgtagatatgaagacagtggttaacattctatattttggtataagctttggtataagtttgaatttgctatatatgttattagctttctactactgaggcacttattttatctatatc

SEQ ID NO: 311418 - DNA, 571 bp, Homo sapiens
atttcatatttcaatgtttggttgagtttgaaaacattgatgtgaaatgttttaggaaacccaagaaactgggtcctctgagagacatctgatagaacaatcagtgccattccagcaaatatgggttttgtcctgttttttaaaaatgttctatactcctttcttccaactctgcttacttttttttaaccacattcctcaattcctgatcctttcctccccttttcatttctctgcttcacttttgtctgcttaaacttcacataattgacattttccttattttaaatttttcttactttttaaataaatacagtataaatatagttgatatatctcagtggcatattgttaatctctttggtgccgccaaagagtcatcatagaattargcaaaataactgttgaatttctgcttgatgaattatacaattctgcattcccaaactcctttttgctcatagtttccacatcttctgcatatctacattgccagcattttttatttgtagttgatacgtaatgtttgtacatatgtatagggtacatgtaatattttgttacatgcata

SEQ ID NO: 311419 - DNA, 595 bp, Homo sapiens
taaacctattgcctcgaaatgtcagggaattaagaaatgcctgccatgcctatctgacgtgctgaagccatgaaaccttccaagtttatacttgtctatattagcagttcctttcgtgattcagatctaatttgaatggttataagcagccctgattgtgctaccttctatacccaactagtgggtgactattgcttctcacccacctgtcgctgctgagagtaaattaagtactcaacctaggaagattttgctctattaagacaaaaagtgacgtgttggttcaatttaaactgtcagataatatttattacaatgatcacttggagggtatacatagtcaccctccaagaattaacatctaaagaattaaaactcattagatgtttttgtttagatgtaatgtgttatggcacttcttcccagtagatttatgtaggaaaagttgtcacttttctaggctgttttaaatgtatgtaattaattatttggcaaagtagttttctttaatttcctacaaaggtgaaaatggaacaaagttatttttccaaaagatttatgcygtattgtaggcaaatttgtaaaggctgatcac

SEQ ID NO: 311420 - DNA, 562 bp, Homo sapiens
gggactccctctcaaaaaaaaaagataagaataaatgataagaattgtttataaaaattttcagggctgctacattgcaaaaagccagcaggcaccactctcaacatagyctataaatcatttctgagtacatgtccaaaatctcttagctgaaatgtattgggccaattgtgtttcaaaattcaaaattgtttgtattttagaaagataaaatagagcaacacttaataaaacattatatttatgcagcaaaatgtacgaatatttacatagactacaagatttcctcatgtgatttcagatcagattttgctgccaaacaaattcacgtcaggttaggtattgttgacaagtgactacaacaaaatttttgtttgcagtgctttttgaatattgagattgtgtgtgaggaattgtgggcctgtgtccattcttggctccatctagtcaggaaggattccttaattcatgatacagagtaacctcaagcttttgcttcaatattcttcaagtttcattctttgttagtctctttcaacattctagggtacctgaaggtgaa

SEQ ID NO: 311421 - DNA, 542 bp, Homo sapiens
gaattactacatatttatttttagggtaatgtgaaagctgctatagagcagactctattggagattaaatgaatataaataagattattggcaaaatatcttctcagagcccaaatattattcaaattcaaatagattatagtagaagagattgctggatgatctgtgcactacaaaagatggagaaagcattacagagctctaaatatagaacaaataaatcacagaagttgctgatgaaaaaytggatgttcaatctttctctttctgatgctgtatcaaggagaactatgctaccaaaccagttttcattactagcctatgacaccaagtatacccaacttttgaaagaaacactttattcataaaagtatttcatttctgtctagtttcctctgcagtctatttattgtgatgtctaggtctgaaaaactttccccattatctgacagaggggtcaattctctagttgtccaaacattgcataaacgaatcacttaccacatgtgcaattagtcatgtgtacacaaataggtaaaatg

SEQ ID NO: 311422 - DNA, 597 bp, Homo sapiens
taactttttctattaattcagaagttttaatttgcttttccagtttcctagtgtttgtattcccatcctgaacaatctctgtatttttcttttattatatcagaagtctctctgtagttcaggtgaatttatagacagtcatccttacactacctatataaaattatggaaggatgtctagaggcatgcttctacttcagattaccaaaatgataatgaccactgcgcagtgctgggatcagtccactggcactacactttaacaatcctttatagcactgatagtgcttgccttccatttttcaggattcacctccaatttccagatcaaaacasagtgtgcctttgtatatacttcaaagaaaacaaagatgctagacaacaggaaatataaagtgaaatcaggtattttccaaaaaccaaaactatactagaattgatttttttaaatgtatatgtcttaatcattcaaataaagtcaactacaatggaggagatatttgaacccctcaattctaactttttactgagtctagaaaataataaatgcttgtagatactactgaaaagttctagttggcaaaccataaaagacat

SEQ ID NO: 311423 - DNA, 624 bp, Homo sapiens
taaaataactaaggtaaaaatccataaattacgcaacaaaattgaaattgaggggggaaactgctatgcaatatttatattcatttaaccaaataatatatacatttagctttgacaaattttcaagttctggtacaagtgtttgttttgttgatttaagaaaggataattatcactaagaatttctaaaaaaaaaatagaaaacaataaaaacctggttgataacaggttatagtatactggtaaaaatggaggtaatcagtgaacaagaacayagatacctgtgaacctaaacagagatggcctatgtgccaatttcagatacttgttaacagcatgcaaataaatacctacagtaaaacaaactgcagaacttcacccagagttttaaaagataggtttgtcactgttttgaaaagtaatccactgtgattttagtaatctatctttaattctgagcctctgcatcattatctaacaagcagagataaatattttaataaagagctttgcatttaaatgcaatagtgcctataaaattccttcacagacaagaaaaccttatacaaatatgacttttactaagaaataggtaaatacattgctaaacacccttaacagata

SEQ ID NO: 311424 - DNA, 624 bp, Homo sapiens
taaaataactaaggtaaaaatccataaattacgcaacaaaattgaaattgaggggggaaactgctatgcaatatttatattcatttaaccaaataatatatacatttagctttgacaaattttcaagttctggtacaagtgtttgttttgttgatttaagaaaggataattatcactaagaatttctaaaaaaaaaatagaaaacaataaaaacctggttgataacaggttatagtatactggtaaaaatggaggtaatcagtgaacaagaacacagatacctgtgaacctaaacagagatggcctatgtgccaatttcagatacttgttaacagcatgcaaataaatacctayagtaaaacaaactgcagaacttcacccagagttttaaaagataggtttgtcactgttttgaaaagtaatccactgtgattttagtaatctatctttaattctgagcctctgcatcattatctaacaagcagagataaatattttaataaagagctttgcatttaaatgcaatagtgcctataaaattccttcacagacaagaaaaccttatacaaatatgacttttactaagaaataggtaaatacattgctaaacacccttaacagata

SEQ ID NO: 311425 - DNA, 573 bp, Homo sapiens
cgctttgtgtgggagtgcctctggagaatggcatttcargcccacatggaccttcaacctgtgtagctgaagaggtggctgtcaatgtagacccatgccccacaatgggagatagatgaggagctgcttcttagaaaacatgtcaaaaaatgattgtttgcacataccctgaatttttataatttccaaccttcaaatagagaatgatattcataactattatgtaagaggtcttcagttttaaactaattttgtgaagagaaaaatattttatattcaaaggtcatgcaaaatttaagaaaatcatctttactggtagctcagttaatagaatgttttctgaacaataaataagcatatgtcatgaggaaactgacttaagtagaggtgatccagggacaggaagggattattgtttgttcccaagttatctgaattggctatctaaactgggctgaattcacttttgctgtgtaactacaaagtgtgtttcattcaagaaatcaaaaaatgctgaacttatattccaaggctattcacacttcacatcatttttatatttttaaaaacttt

SEQ ID NO: 311426 - DNA, 608 bp, Homo sapiens
ttttctcagcataagactgaaggcccccagatctcgatcaaagagtattttaaataatcttaggtctgatctccctggcatgaccttctgcctctattccccattgcttctagagttaatgttctcaaaaacaaagccaaccatttcacctctcagctttgtatctggctcccctctgagccaagcagaactttaagaaacaaccaaacagctagctgaaatgccatttctgggtccctttcttagatattttgacttggcttacctggggcgaggtgcagaaatcatctcaaaccagtacccaggtgattctgaggcagatagcttgaggaccaaaagaacactggcttaccagagaaaacccwaagtagatcaggagccaactttgggatgtgttggtttgagatattcagtctggagttcaggggaaaggtctgggctggagatagaaatttggaagtgattggattttgggtggtttatccacagtttggagactggattagataaccaaggaagtaagtatataaacagaagggaagaggaccaaatactcagaatactcagcactggaccctctcatattaaaagctaaaggagaagaacag

SEQ ID NO: 311427 - DNA, 608 bp, Homo sapiens
ttttctcagcataagactgaaggcccccagatctcgatcaaagagtattttaaataatcttaggtctgatctccctggcatgaccttctgcctctattccccattgcttctagagttaatgttctcaaaaacaaagccaaccatttcacctctcagctttgtatctggctcccctctgagccaagcagaactttaagaaacaaccaaacagctagctgaaatgccatttctgggtccctttcttagatattttgacttggcttacctggggcgaggtgcagaaatcatctcaaaccagtacccaggtgattctgaggcagatagcttgaggaccaaaagaacactggcttaccagagaaaaccctaagtagatcaggagccaactttgggatgtgttggtttgagatattcagtctggagttcaggggaaaggtctgggctggagatagaaatttggaagtgattggattttgggtggtttatccacagtttkgagactggattagataaccaaggaagtaagtatataaacagaagggaagaggaccaaatactcagaatactcagcactggaccctctcatattaaaagctaaaggagaagaacag

SEQ ID NO: 311428 - DNA, 662 bp, Homo sapiens
tatgacttgccttagtcattcttgactaacagaatgtagtgaaaatgcgttagctcttgtcctagtctttaagagttttgaagtttggagaagccattctccatgctgtaaagatgcttagactggtctaatcaataatgagaagccatgcaagggaaggagagaggccacatggtagagcaccaaagtgtcagacatgtgaatgacaccatcttgaatcttccaatccagcccagaagtcagctgaaggcatgactccatacaactcacatgggacagaactgcttagctgagccttctcaaattcctaacacataaaattatggccaacatggtgaaaaaccrtctctactaaaaatacaaagaaaaaattagctgggcatggtggcgtgcacctgtaatcccagctactcgtgaggctgaggcaggagaatcatttgaacctgggaggtggaggttgcagtgagctgagataacgccattgcgctcgagcctgggcaacaagaacaaaactccgtctcaaataaaaaataaataaataagttgttttaagccaccaaattttagcatggtttgttacatagcaacaaataactgaaacagtaattgtggggggccacagcattggaagttcctaagctcttctgctctgtagctgggtg

SEQ ID NO: 311429 - DNA, 404 bp, Homo sapiens
caagtgtgtagtaggtagcctgagctgggggaggctagtacagcctggtgcagactgagttcattgggactctacagatgtgaagatgtcctaaggaaggatggcagagaactaagagcagttagcgttgcaaaagataaatstccactttcacaactctctctggaatcactcctgagtctttggatgccacttacaaatgtatttttttaatgctttgcaatagtgtgaaactggctaggtttcaattgtatttgtagtatcaacctaaaaagcccagctaagccagagttacctcctttgcctaagttcacagcgcacttttggtacaaacatacaaagattcatgggaatgttcattgaccttcagagctagaaaacagaggagttttaaaagaagctgt

SEQ ID NO: 311430 - DNA, 669 bp, Homo sapiens
aagttcagtagttttgtagagggtctggctaatattatgtatttaggagtcatcgaaatatagtggtagttgaagacaagactatgaatgagcttatgcagactgtgtagagtgagaaatgactggaaaagatagaacccagaacacaaacaaatttatagtgtgggtggaagaacaaatccacacaggagtcgggaaatgtacatagggagagaaacatatctacctggaagggragtgacaaatacctaagcaagagtcttagcaagaaatagttactttgccaatagtcccagaggtaggtgaaacacattaagggctggaaatattcatctaatttgacaagtaaaaatttttgttgccactggcaatcataatttcagtggaatagggtgtgagaaaaaccatggtttagtctttatcaacacatttattaaggcctttactctcagtatgctactctcatttctctctcatcatttttttctggagagcaataatttaatttagtcttctgattcgggaaggaagagaaaaaatcctctgtcaagatgcaatgactcactgactcaaaagttgttttggcacgcttcaaaagcagaaaaatgaggcaaaatactgttctaatattctgatactgataattgcaagtagtctggtgaaatgaca

SEQ ID NO: 311431 - DNA, 669 bp, Homo sapiens
aagttcagtagttttgtagagggtctggctaatattatgtatttaggagtcatcgaaatatagtggtagttgaagacaagactatgaatgagcttatgcagactgtgtagagtgagaaatgactggaaaagatagaacccagaacacaaacaaatttatagtgtgggtggaagaacaaatccacacaggagtcgggaaatgtacatagggagagaaacatatctacctggaagggaagtgacaaatacctaagcaagagtcttagcaagaaatagttacttygccaatagtcccagaggtaggtgaaacacattaagggctggaaatattcatctaatttgacaagtaaaaatttttgttgccactggcaatcataatttcagtggaatagggtgtgagaaaaaccatggtttagtctttatcaacacatttattaaggcctttactctcagtatgctactctcatttctctctcatcatttttttctggagagcaataatttaatttagtcttctgattcgggaaggaagagaaaaaatcctctgtcaagatgcaatgactcactgactcaaaagttgttttggcacgcttcaaaagcagaaaaatgaggcaaaatactgttctaatattctgatactgataattgcaagtagtctggtgaaatgaca

SEQ ID NO: 311432 - DNA, 593 bp, Homo sapiens
aagaagtcaaactatctctcttgcatattacatgattttataactagaaaaccctaaagactccaccaaaaggctcctaaaactgataaatgacttcagtaaagtttcaggacacaaaatgaacatgtaaaaattagtaccatttctatacaactatagcattcaaggtgagagycaaatcaagaaagtaatcccatttaaaatagccacacacacacacaaaatacctaggtatacatataactaagcagatgaaagatttctacatggataactacataacattgctaaaagaaatcacagatgacactaacacatgtaaaaacattccatgttcatggattagaagaatcagtattgttaaaatggccatactgtccaaagcaatttacagattcaatgttattcctatcaaactaccaacgacattttttccagaactagaaaaagctattctaaaatttatataaaatcaaaagagcccaaataactacagcagtcctaaacaaaaagaaaagtcagaggcatcacattacccaattccaaactatactgtaaggctacagtaaccaaaacagcatgatactggcacg

SEQ ID NO: 311433 - DNA, 639 bp, Homo sapiens
ttaattttggtccagcacatttgcaaaaacaaatgaggtgacagttgtatacgctttaaacttgacaagcattggtctaaatatagcatttcccaaaggaaaatacacacaacgtccatggaacacaagctgtttatagttagtgcactgaaaaaacatttttagctttaacaattatgtaatatttttattatgtttttaaaaagttatatctagatgtaaaagctacgattcccagacagtgttgtgcaggatgtggctaagtgaaaaaattcaagggagtasgggtgtcttgcataactgtggctcgcttgatctccctcactctgctatgttttcattcaaactatctgtcactatctgacattaattttttaaatgtgtgctatattactgaaagttttagagattctaataaaaatatgggaaaagggaattattaatataactcttcatcaaatggattcctaccccagttacagtaatcttgctttaatcaatcacttggagaagctagtaagcaatgtacctgaccaatttgcagagtcaattttttgagctgaaaggaatgttaatgctctcgttttacagataagtagactgatgcccaggaagagctgtggtcacacaggagatggg

SEQ ID NO: 311434 - DNA, 617 bp, Homo sapiens
acaacattttcctggaaatctagaaaaagatgaaaatctaacataacatcagttgctaccattttcttcagacaacagcccacagtttatattctggttttgagaaacacatccctgtctagatccactcactcactcataaaccgtaggttgatggctcaaattgcgtattatttcttctcctcrgtccaacataacattgtgattctacaacaagtgtaaaacacgtcactatattaaaccactcagagcattccatttgctgccatctttgctgtttacctacattatcaccaccaggagttataagacatttaggaacacttataagctataagccaccacaaacaggttacatggcataatgataaataggggagttcaccccactaggagccactatctagctctctcccttaatatatgcatcatctgcccctgttgaaacctggggagcttaatagagcactatgcttctttctccttgcaaaactgatctattttagggtggggaaagcagggggtgagttcaaactgttatgtcttttctttctaatcacatactctttcccatgttctttatgctccagagtactaacatccttggattaccccca

SEQ ID NO: 311435 - DNA, 529 bp, Homo sapiens
agattacctctaaattctgataacctttaaggtcccctctgattcaaaatctattattcttagataaggcccaggagcatttttctgagactgccccagaaaaaaatttaataactccaggcacacaatgactcttgttcatcatttacctgttactgccacctgcctcccttgctttccattaagtttgcaaagagtagaagatctggcttctgggctgcaatttaatacgtgtgcaaaagtaatatcagaatcctgccattaatagggctgtactccaaggaacagggcatgctttattagttcctcatcaattaagcaagggaaaccttcaggcttcaaaacgaactgtgtctcagtggcgacagagagagatgattttgtctacaagacggaaatccacaggggacaatgaatgcctctgttccacatggggaaagggtgggggtcatatccrccctcagcagctattttcagtgacagagaaaaatcccctcctgagggagggcgtgacaaacaaggtgactgg

SEQ ID NO: 311436 - DNA, 660 bp, Homo sapiens
tcatttttttttgagtaagaacattagttttaccaaaatacggtgttctgccagattttgtttttattatcactgtaaaaactataattttatcttcaatgtggaactttataactacatttacaatagtattcacaacaatgttcagatgctgaatttgaggaaacttccagaagctttactttgatgaattggacaaaaaaaaaaatctattattgcaagcaactgatttttctacttggagcatctgattacactttataaagctggcatcacctaactgcatgatgagtttttctgctaatgacacacatcagtagctatgattttattttttgtttgtacccaggaaaacttggaaytgaaaatgagtgaaattaatttagaagatatagatgatataaataaatacataggtataaatgaaaagtcatacttctcagagtaatcttaaaacatactttctgccactgcctacaatcttcttaaaataactaccatagtaacttttgaaatacatgtggctgttcctttatcagatttgagacagctggtactgatacctctgtggtcctcatagtgcacagcaaatgttaacaaacattatcattttgtacatattatatgtctatcatcaatgttcttacaaaacagaaattt

SEQ ID NO: 311437 - DNA, 476 bp, Homo sapiens
aaagccatacactctctatttgcatttgtctgtatctttatgtatgtatatatgtgtgcatatgcatgttacgtatatgtgatattttcctatctgcagatgctattggcaaattgatttataaatcccatgatatagctctattctaattcacttagaggaaaataagcacttatataaataaaatattcctaaaacacccagaagtatagaaastaattcaaatgcttttcaagttcatgtaattttgacaacgaagaatagcctgatattctaagtttactaaaaactggtatatattcagggttgtcagccttaaatataatgcagtcatatatttttcttctacctgtatttgcaaatcaaatatgctaatattatatatagtagatgtttaacataataaaacttatagatttgaatttaaacaaatggagtcattattgtaacaaattatatttaaacaattttaatca

SEQ ID NO: 311438 - DNA, 587 bp, Homo sapiens
agttggatatcagtaaaattaaaaacttctgttcaggggaaagatactgttccaagaaagaaaygataagtcacagcctagaagaaaatatttacaaaacatgtgtctcttaaagggcttatatccaaaatacacaaatacctcttaaaactcagcaataagaaaaataacccaactaaaaaatgagcaaaatatctgaacaaacatctcaccaaataagatatacagatggcaaataagcatataaaaagatgctcaatgtcatatgtcattagggattttaaaattaaaacagcaatgagacaccactacgtacctattagaatggctaaaatccaaaacactgacaacactaaatgctgtcaagcatgtggagcaataggagctctccttcatcactggtgggaatgcaaaatggtgcagctgagaagtgaagccagctggacttctgggtcggagaacccagacttctgggacttggagaacttttaggtcttacaagaggattgtaaaatgcaccaatcagcactctgtagctagctagaggtttgtaaaatgcaccaatcagtgctctgtaaaaacgcatc

SEQ ID NO: 311439 - DNA, 478 bp, Homo sapiens
tattttgccaattggtccttctctcccgaggcataaaaattggatgatattaaataatcttgatttcaatctagtgcaaccagggctcttgtcacaacaccccaagacttgtcctacgacatgagtatctgttgcctctgaccttggccatgggtctccacgtactttccttgttatataattctagggttgtaaacaacctgcagggcttctaatggtgagaaagagaaagaacaaaggaacayaacccttaaacaatttactaacagcttaaaagatactaatattttaacttaaaagccacatagtcaatctagtatatgtgaactgcacgccaacaatcacataaaaatacagagcagacagaatgtgctattgtaaagtatatttttgttctttgacccccgtttcctggcatacaacttctaaaatccttagaatctccagagtgatgtcttcttgtatgccaatgaactgg

SEQ ID NO: 311440 - DNA, 569 bp, Homo sapiens
ctaagtactttagactaatgaaagagaaggccagtctaaattaaaaactattttataatacaagtattccactttttaaaaactacattcagtaactaaaactggactccaggactgtatgttgaaaattgctttaagaaatagataaaataatgtattggcagacatattgataaaatacaaatatttttaaatcctgtagagttctaaaaaagagtttattactgatattgatagaaatattcaatccacaatttgtattattagttcttcctacagtaaaatttttcttcataatttatggtaagatcggtgttaactcagacatttactgaatcatctgaaattattacaaagtaatgagatttcttctttgtattcttaccatggtgttataaatcctkggtattactctaggagttccacaatgtttagtatattaaaaaatgaaaaaaatagcagtttttaatgcatgtacaattctcaccaaatctagtaaataaaggtcaacagtagttagcaattttcttgttttgcttaactcttctgcaaacatgtagattatttga

SEQ ID NO: 311441 - DNA, 569 bp, Homo sapiens
ctaagtactttagactaatgaaagagaaggccagtctaaattaaaaactattttataatacaagtattccactttttaaaaactacattcagtaactaaaactggactccaggactgtatgttgaaaattgctttaagaaatagataaaataatgtattggcagacatattgataaaatacaaatatttttaaatcctgtagagttctaaaaaagagtttattactgatattgatagaaatattcaatccacaatttgtattattagttcttcctacagtaaaatttttcttcataatttatggtaagatcggtgttaactcagacatttactgaatcatctgaaattattacaaagtaatgagatttcttctttgtattcttaccatggtgttataaatcctgggtattrctctaggagttccacaatgtttagtatattaaaaaatgaaaaaaatagcagtttttaatgcatgtacaattctcaccaaatctagtaaataaaggtcaacagtagttagcaattttcttgttttgcttaactcttctgcaaacatgtagattatttga

SEQ ID NO: 311442 - DNA, 402 bp, Homo sapiens
atcttgactcgttgcaaactccgcctcctgggttcaagcaattctgtctcagcctcctgagtagctggggtaacaggcacccaccaccatgcctggctaatttttgtagtttttgtagagatggggtttcgccatgttggtcaggctgttcttgaactcctgacttcaggtgatctacccacctcggcctcccaaagtgctgggattacaggaatgcagggattacaggaatgcagggattactggccctgcwttatttaatcagtacacagggggataaaaaagattaaatgagtcaagattgtcgctttaaaggattccttacagatggcaaattttaaaaatccataaatataagtcaaaagttttagccatctgggaagaaaatctagttgtattggc

SEQ ID NO: 311443 - DNA, 608 bp, Homo sapiens
atgaatataaagacatatgaaagtaattttaataggtatactagcaatgagctatgaaaaaagaagtaatgattcacagtgacattcatcaattaaaggaataatttctcatcaaataaattttcatctctttttatgaactaataaaataagaaaaaatgtgtttgtgtgaggcagggaaggggacagaaaagaatgatgagaagaaatatattatttttgctgctccagattcttaatgtcttaacatgagataatagacttcataagaccatgmaaacatctcagccatttgctacattcatagaaggtgttcaagctgttgaaagaataaatcaatgactaaatgagtgttttaagtcaatcaccactgactttgtcagtctccctaagcctgatcaataattatttgcctagaaatctctggtagtttatggatcttacagactgttgaattgatttgacagaatatggagattagttctagaaataaccttgtaaaataatgttctcaaaatggaaacatttatgaagatatatttttgagacattaagcaaaataaaaaggataagtataccttccatagagatgacaacaaaatttacac

SEQ ID NO: 311444 - DNA, 508 bp, Homo sapiens
ttaatgaaaataacataaagccaatgagagaaagctccttacaggaaggaaaacaaactcaagatctggtataatcactatctttttataaaagtatgcatatcatcagatattataagtasagatatgttctagttataaatataaaatgattaatttggtctttcaaagtctcttcccatcttatctttgcttttatgtgtaattagattttcatattttgcttttgccttcagtatcaaacagttataatctaatacattgctgttaaaagagtaaaacagagtaaagtgttgtgcaaatactttcaacttcttacctactgaaaagtataatcttgcctttgtactctaaaaacagagaattttcacaattaatgttgttgagaaattagccagcctattgtaaccatcttttattgtttatgaagtatcttagatgagcagatgtgtttatgtaagtcggtttgataatttatactaaatacaaaattcttcatgagtgccaa

SEQ ID NO: 311445 - DNA, 508 bp, Homo sapiens
ttaatgaaaataacataaagccaatgagagaaagctccttacaggaaggaaaacaaactcaagatctggtataatcactatctttttataaaagtatgcatatcatcagatattataagtagagatatgttctagttataaatataaaatgattaatttggtctttcaaagtctcttcccatcttatctttgcttttatgtgtaattagattttcatattttgcttttgccttcagtatcaaacagttataatctaatacattgctgttaaaagagtaaaacagagtaaagtgttgtgcaaatactttcaacttcttacctactgaaaagtataatcttgcctttgtactctaaaaacagagaattttcacaattaatgttgttgagaaattagccagcctattgtaaccatcttttattgtttatgaagtatcttagatgagcagatgtgttyatgtaagtcggtttgataatttatactaaatacaaaattcttcatgagtgccaa

SEQ ID NO: 311446 - DNA, 569 bp, Homo sapiens
cagaaacaggaagcaaaaattttaccacagggtcatgaggggtgatggtgagtggtgccacttccactctaagtaaaagctaatttgtgatcatttaaacactggcagtggaatagagtggaaaatctgtattcaagaacaggatctgtagtagatttgaagaaatgactatagaaatgtytatgaatttgagctatggtgagaaagaaaaatagagatgagagtaagtgataatggaatgcattgacaggagaatttacatattttgaataatatcttgggagggtaagtcatgaatcttataatagcttgagttgaagtaattctgcatgggaattctatatgaaaatatttgtatgacctttcacaaatgtaattgatagttcccagcttataaaaaaactaaaattatcagttaatagtattctgttaaaatttgtcaagtaaggctttaactaagcatataaattaatcaagttgaacatggctaggaagtccagcatttaatgtgtgggtaagggagcatgacctacaaagggaagaattgtcagaaatgttgtaagagagtc

SEQ ID NO: 311447 - DNA, 569 bp, Homo sapiens
cagaaacaggaagcaaaaattttaccacagggtcatgaggggtgatggtgagtggtgccacttccactctaagtaaaagctaatttgtgatcatttaaacactggcagtggaatagagtggaaaatctgtattcaagaacaggatctgtagtagatttgaagaaatgactatagaaatgtctatgaatttgagctatggtgagaaagaaaaatagagatgagagtaagtgataatggaatgcattgacaggagaatttacatatwttgaataatatcttgggagggtaagtcatgaatcttataatagcttgagttgaagtaattctgcatgggaattctatatgaaaatatttgtatgacctttcacaaatgtaattgatagttcccagcttataaaaaaactaaaattatcagttaatagtattctgttaaaatttgtcaagtaaggctttaactaagcatataaattaatcaagttgaacatggctaggaagtccagcatttaatgtgtgggtaagggagcatgacctacaaagggaagaattgtcagaaatgttgtaagagagtc

SEQ ID NO: 311448 - DNA, 617 bp, Homo sapiens
cttcgccattgtacctcacttggtattatgtgtaggttgcctccatcgagaaggtgtaaccttgggtgttttccctccaaggacaattctctgagagggatacatctgtgagctgtccgcagccaaaattcatggctaccatgggaataattgctttagtttgaaagggggaacagatagcccaacstaggatccactgttttacttttttttatagttccaacttcctacaatccttaaaaaggcaaaactaatccatagcaatagaaatcagtatagaagttaacttttagaggatgatgattaggatagggcatgaaaggggtttctgtgttgttggtaatgttctatttatgatatgaggatttgattatatgaataagttcaatttatggaaattcttcatgctacaaaattataaattgttcatttttgtatgtaagtgatatttcataaaagtttactttaaaaagtaatgtgaaacacagacatacaaaactttccaaaataagaataaaaaggctgattttataatttaatctttggttttactttcatacaagttcgtgttttagaataacttttatactcttttatctataatttattactcaatt

SEQ ID NO: 311449 - DNA, 251 bp, Homo sapiens
ttatacaggcaaaataaactaagagtgtctgacaatgcctgcgactttcaagtcttaaaaaaaatcctgactctaacagattctatccaggacatactcttctttgttcacataagatatgatcacgaatgataacaaataaaaaaggccctaagaatggttgagccaagacccagacagaggaatggawaggaaaacaacaatatttttccaagaggtaaaaatcagtcttatcaaggagttttttcatc

SEQ ID NO: 311450 - DNA, 538 bp, Homo sapiens
ttattatagatggcagtttatatattatattgcccaatctagacaagatatcacattcatccaaagttcataataacagtagtaatgatggcaataatatgaaaaaaagtattttaaaaagtagactttatatatttggtaattcacttgagctctccttgtttgtgtgtttgtttttcattgattaattaatgagttgtattgaataaccaaggttctttccagcactgatagtccatgactttatgacatccactctgtgaaaaaatggtggcataaaatccmtttttagactttaataattctataaagctgcatgggtcagccaaggtgaaatttgaaatttagaattcatgccaaaacccacgtaattcacttactgtaagtcctgtgcttcatcactggcgaagattcagacctagacactacatgctcatgattaatgtgcttctttttagagggtttaaggccttttctgccagcaatctaacattgctattgattgaagtatcaacatctctctatcaagactgtaggt

SEQ ID NO: 311451 - DNA, 538 bp, Homo sapiens
ttattatagatggcagtttatatattatattgcccaatctagacaagatatcacattcatccaaagttcataataacagtagtaatgatggcaataatatgaaaaaaagtattttaaaaagtagactttatatatttggtaattcacttgagctctccttgtttgtgtgtttgtttttcattgattaattaatgagttgtattgaataaccaaggttctttccagcactgatagtccatgactttatgacatccactctgtgaaaaaatggtggcataaaatccatttttagactttrataattctataaagctgcatgggtcagccaaggtgaaatttgaaatttagaattcatgccaaaacccacgtaattcacttactgtaagtcctgtgcttcatcactggcgaagattcagacctagacactacatgctcatgattaatgtgcttctttttagagggtttaaggccttttctgccagcaatctaacattgctattgattgaagtatcaacatctctctatcaagactgtaggt

SEQ ID NO: 311452 - DNA, 586 bp, Homo sapiens
tttccatagacaaaagagggaactaaagtgtctaaaatgttgaatatgtgtcatcgtcttatataacatgaatagagagcaaaataatcaaaattaagaagttgggaaattgggttatcagctatttcccaaaatcatatgtggagctgcattttgatatttcgctcaggtcagttttaacatttcagtgtgaagttctggtatatacataattgatgaactgaagtagagttcacaatgattttttgttcattgatattttctttgcaaagacagacgccaaatgggaaggctaatttataatgttccwccccttttagaaatttatcttagatgggaagaaaatagttacaagttttaaaaaatatattttgaatagtagcattggtataggaccttagtacctgtacagtattttaaccatgatgctgacttgagtctcttgtgttacaatactgacttttttttgtactgttgctcaatggctaaatatgtgtaatgaatacctgctgttcttaaaacctggaatttagataggataccttgctttaattgaatctcctttgcaactgtggaaatgaaaaat

SEQ ID NO: 311453 - DNA, 330 bp, Homo sapiens
tattccctgaactactgtggctgaaagctgaaaccctggattaaatgtccctagttcaaatttctggtctgtcaattagtagttgttgacttttggtaacttacttaatttatttgcatcctattttctgtatttataaaaaggagataacaatggcatctaataggttggttatgagcactaaawaagttaatatttgcaaagcatgtagaacagtgccaagcatatactaagcactcgttaaatgccatcattattatttcattctgctccatttccacctgtttgatgtgatggattttcttggtctgtgtaattgctgtcatgtag

SEQ ID NO: 311454 - DNA, 445 bp, Homo sapiens
gctcttatagattaaatgtattaattgagttaatgtacaaaaatcttctgacacagttcytgacatatttagtaaacatgtatttaataaattggggaagcattgtgagtgtagacacacaggtataccagaattaggatctggctcacattaagctctacaatcaatagttcgagatctatgaatagagccatgtgatgcttagacgctgatattccactgtgtgtgtgtgtgtgtgtgtgtgtgtgtgtgtgtgtgtgtgtgtgtgttggggaatggtgacaggacttacatatgtatgttttctgaactaaattgattgtacataaggaaagaactccagtgccatcatgtacattaaatttcacatttttctataatattgttgaatattaaagatcataaaaaccacaaagaggcgatggtggtggtggggtcttaaaaa

SEQ ID NO: 311455 - DNA, 594 bp, Homo sapiens
caaagtctgaactcatttcagcattaattcaaaagtcccaaatcccaagtccaaaatccaaagtctcatctggaggtgagtttcttccatctatgagcccatgagatcaaaaccaagtttttattgtcaagatgcaatggcagtacagacattggatagacattcctgttacaaaagggagaaaggggtcatagattccacacaagtctgaaacctgttaggccagtaataaaatcttaaagctccaaaataatttcctttgactccatgtctgtattcaaggcacactggtgcaaggagtgagctcccaaggttttggtcagctctgccccatggctatactgggtgcctctcctggggctgctcttgtgggttgaagtttagtgtctkcagattctctatgttgaagctgcaatctgtcagtggctctactgtccccttgacagtgtcctctactgtcagtggcaacagtcccatttctacagattcaccagacagttcatctggggagactttgtatgggggctccaatgccacattttcccttggcaatgccttagtagtgtttctctgtgggggatttagccctgtggc

SEQ ID NO: 311456 - DNA, 640 bp, Homo sapiens
gaatatttatttaaaagatgactgataagacatagaaaaattattgtaaaggagtcatatttcaaacttaatctgttaaagctaaaagaaataaaaaacatatatggttacatactccccgagcccaacaaaactttgaaaatgagaactgaaaaactaacagttaaagaaaattaagataaatcttatgaatgtgaagaagtaaarattgtataaaataactctcagccaagtgaagattgaagataaaatgtctagttttcccataaaaaaagcagttgaaattttgagtacaattaattaaacatgacattttatcataagcacatttctaaattttatactccaaaggaagaacaaaatatggagaaatctctagagtcacacagcaattacattatagtaattatataaaattctagagtattccatatttcatatgaagaaatatgtcaatatcattgatagtgtaatgaaaatctgtgctgtatcacgtagaaactcatttaagagtgcttacaatagtataatatagagttaaaaacaaagatatttggtatttaaatatacatcttgaaaatttaaaatgaaacattctgcatatataatattttcttcatctttgggtttactgaaatat

SEQ ID NO: 311457 - DNA, 511 bp, Homo sapiens
atgctttctacagatactgatgaagtcagttcatcttgttttcttgcaagaggcaggtcataaataaaaaggcattccagtgtaacaaatgaattcaaactagtttgacagaaaccaatcagagttcaaatctrtcaaaacagtagattaaaagcaaaagtgggggggggcggatggcatgtcttcaatactaagttttttcacaaattgaagtagttctcattcttttcactgtttatattagataatgattacactggggtggagggtggagtgggggagccttattatttagaggaatgttattaatacatctcactaactctatatgtatttaaattaaagaaaataaaaattttttatataacatatttctggagaaaaattataaattatgctggagtaacagagaggcttatctctgaacatgaaagaaataatgaaattaaatatttagagttctgccttccaattaaaaaaaaaacaggaaaagatatgtcacactaatgac

SEQ ID NO: 311458 - DNA, 511 bp, Homo sapiens
atgctttctacagatactgatgaagtcagttcatcttgttttcttgcaagaggcaggtcataaataaaaaggcattccagtgtaacaaatgaattcaaactagtttgacagaaaccaatcagagttcaaatctgtcaaaacagtagattaaaagcaaaagtgggggggggsggatggcatgtcttcaatactaagttttttcacaaattgaagtagttctcattcttttcactgtttatattagataatgattacactggggtggagggtggagtgggggagccttattatttagaggaatgttattaatacatctcactaactctatatgtatttaaattaaagaaaataaaaattttttatataacatatttctggagaaaaattataaattatgctggagtaacagagaggcttatctctgaacatgaaagaaataatgaaattaaatatttagagttctgccttccaattaaaaaaaaaacaggaaaagatatgtcacactaatgac

SEQ ID NO: 311459 - DNA, 511 bp, Homo sapiens
atgctttctacagatactgatgaagtcagttcatcttgttttcttgcaagaggcaggtcataaataaaaaggcattccagtgtaacaaatgaattcaaactagtttgacagaaaccaatcagagttcaaatctgtcaaaacagtagattaaaagcaaaagtgggggggggcgratggcatgtcttcaatactaagttttttcacaaattgaagtagttctcattcttttcactgtttatattagataatgattacactggggtggagggtggagtgggggagccttattatttagaggaatgttattaatacatctcactaactctatatgtatttaaattaaagaaaataaaaattttttatataacatatttctggagaaaaattataaattatgctggagtaacagagaggcttatctctgaacatgaaagaaataatgaaattaaatatttagagttctgccttccaattaaaaaaaaaacaggaaaagatatgtcacactaatgac

SEQ ID NO: 311460 - DNA, 511 bp, Homo sapiens
atgctttctacagatactgatgaagtcagttcatcttgttttcttgcaagaggcaggtcataaataaaaaggcattccagtgtaacaaatgaattcaaactagtttgacagaaaccaatcagagttcaaatctgtcaaaacagtagattaaaagcaaaagtgggggggggcggatggcatgtcttcaatactaagttttttcacaaattgaagtagttctcattcttttcactgtttatattagataatgattacactggggtggagggtggagtgggggagccttattatttagaggaatgttattaatacatctcactaactctatatgtatttaaattaaagaaaataaaaattttttatataacatatttctggagaaaaattataaatyatgctggagtaacagagaggcttatctctgaacatgaaagaaataatgaaattaaatatttagagttctgccttccaattaaaaaaaaaacaggaaaagatatgtcacactaatgac

SEQ ID NO: 311461 - DNA, 453 bp, Homo sapiens
gtgagttccgtatgtattttaaataagaacccattaccagatataagatttgcaaatattttcttccatttcataggttgtcttttcatttagttgattgtttccttttctgtgcagaagcttttttgcttgatgtagtttgacttattttcgcttttgtttcctgtgcttttaytgtcacataaaaaaaaaaaaaacatcgataagaccaatgtcagggatatttgccctatgttttcttcccaaagttttgcagtttcacatctcatttttaagttttcaattcattttgaattgatttttatgtataatgcaaaatgaaagcccaatttcatcctttttcatgaggatattcagatttctcaacataatttattgaagagactatcctttccctattgctttcttaatactctagtcaaataactgactgcacttgtatgggtttatttc

SEQ ID NO: 311462 - DNA, 453 bp, Homo sapiens
gtgagttccgtatgtattttaaataagaacccattaccagatataagatttgcaaatattttcttccatttcataggttgtcttttcatttagttgattgtttccttttctgtgcagaagcttttttgcttgatgtagtttgacttattttcgcttttgtttcctgtgcttttattgtcacataaaaaaaaaaaaaacatcgmtaagaccaatgtcagggatatttgccctatgttttcttcccaaagttttgcagtttcacatctcatttttaagttttcaattcattttgaattgatttttatgtataatgcaaaatgaaagcccaatttcatcctttttcatgaggatattcagatttctcaacataatttattgaagagactatcctttccctattgctttcttaatactctagtcaaataactgactgcacttgtatgggtttatttc

SEQ ID NO: 311463 - DNA, 551 bp, Homo sapiens
cctgtgcttttattgtcacataaaaaaaaaaaaaacatcgataagaccaatgtcagggatatttgccctatgttttcttcycaaagttttgcagtttcacatctcatttttaagttttcaattcattttgaattgatttttatgtataatgcaaaatgaaagcccaatttcatcctttttcatgaggatattcagatttctcaacataatttattgaagagactatcctttccctattgctttcttaatactctagtcaaataactgactgcacttgtatgggtttatttctaggatctctattttttcccattggtctacatgtctggatgtcaacatcatattgttttgatttctgtagttttgcagtcgaatttgaaatcaaggaatgtattgcctctagctttgttcttctttctcaacattgacttggctattaggggtcttttgcagttccacatatattaggattgtattttctacttttttgaaaaatgacactagaattttgataggaatctcattgaatctgtaggtcattttagctaata

SEQ ID NO: 311464 - DNA, 486 bp, Homo sapiens
ttctctgttttgtagtttctgtacacctagaagggtatctctcaaaaaagtcctagggtcattggaagcatgtttaattgctagcaataacaggtaaaaccatagatgagctgctgtcttttacagaacatatggcaagaaaagcaagcaaggatggtagatgagttaaaatttaaatgaaatagatagtcttggaatataatatatcctaattatcatatatttatacattttctaaatatgttktattggttgatatgtagaaagaggatgaaatggaaaagtgagatatgccattctggaaattagagaaaacattactagacttacataatttgttttaatgaactgtaagcttggagtggcataagaatgtttctgttgagaaattggaaaattgtcaaccctagaaaagttcttcaatcttagtctgcctcaatttttctatttgtaaaatgtcagtctctcatgtaaatgaaaaattct

SEQ ID NO: 311465 - DNA, 625 bp, Homo sapiens
ggcatttgagagacaagtgaatgtcaataaatttcctgtaaaaaaaattccacatttgaaaactttactgaaatatgaacaatttatcatgtttctccatgtttgccttggtttatctgtaatattattttacttgcataaacattatttttgtttgaaaattatrcatctatgtttgatagcatgcttttgaaaacaagacatttaatgtcaaaaaagaagcatgaacaatataccactattcaaattattttttaatcctttgatgttggtttgtttgtagctgttaaaatagtcaattatgtaaaaaatgtcctttgagaaatgttttcatataaaatctgtagtgcagagtgtaactgacaagtcctatatacagacacactatcagccactttatgattgattttgtatttttagtgaaaatgacagttggttatgatttaaaactggaagcattggcagaagatatgctaatactttgacaacacttaccaagctagcaggaaaagtgacaagataaatagcactaggcaaaaacccactcaataaatatatgactagtttggggctaattaaccctgttatagaagctgggtcttatggacaacaagtagtgccaagg

SEQ ID NO: 311466 - DNA, 533 bp, Homo sapiens
attctacaaaatgtctgacaaggactcctgaaacctgtcatggtcattaaaaagaagaaaagtttgagaaattctcacagataggaggagctgaaagagacaggacaattaagtgtaatgtggtatcctggatggatcctgaaacagaaaaggactagataaaaaataagaaaatatgaatactatgggctttagttatcaataatgtatgactattagttcataaattataacacatgtttcataccaacgtaagaagctaatagaggaacttggatgtggcatatttgggaactttgtatactatctttgttttttgttttgttttgtttttgtttgtttttcagtttgtaaatctaacctgtgttaaaatttaagaktttatttttaaaatcctgggaactatagtataataccatttgatcattgctttcttcagatctttttaatgattttaaatgtagtcaaaactatatttcacatataaggaagattacaaaagaaagcaaacatcgaagaactgtgtgatgcct

SEQ ID NO: 311467 - DNA, 587 bp, Homo sapiens
taggatgcctcaaaatcatggcagaatgcraatgaaaagcaaaatcatatcttacgtggcatctgacaagagggcatgtgcaggggagctccactttataaaaccatcagatctcatgaggcttattcactatgacaagaagagcacgagaaagaccaaaccccatgattcaattacctcccaccaggttcctcccccaacacatggggattattacaattcaaggtgagatttgggtgaggacacatagccaaaccatatcaatcttaaacatcttcttaatattaaataaaagaaagaaaagaaaagaaaaaaaaatcaggattattaatgaaaatatataggcacaaaatcttaatatcaacattttaaaaatttgaattttacctatacagaattgtatctacatgcataaattagcatgcaaatgaaaaaagccttaatcatgttgaaaatatgtcatatggtagcctttgaaatggattcttcagttacttttagaaactattaattttttgcttcaattactttcaaatataatgtataaagcaaatagaaaataatcaaatagagaatcctaattaaaa

SEQ ID NO: 311468 - DNA, 587 bp, Homo sapiens
taggatgcctcaaaatcatggcagaatgcgaatgaaaagcaaaatcatatcttacgtggcatctgacaagagggcatgtgcaggggagctccactttataaaaccatcagatctcatgaggcttattcactatgacaagaagagcacgagaaagaccaaaccccatgattcaattacctcccaccaggttcctcccccaacacatggggattattacaattcaaggtgagatttgggtgaggacacatagccaaaccatatcaatcttaaacatcttcttaatattaaataaaagaaagaaaagaaaagaaaaaaaaatcaggattattaatgaaaatatataggcacaaaatcttaatatcaacattttaaaaatttgaattttasctatacagaattgtatctacatgcataaattagcatgcaaatgaaaaaagccttaatcatgttgaaaatatgtcatatggtagcctttgaaatggattcttcagttacttttagaaactattaattttttgcttcaattactttcaaatataatgtataaagcaaatagaaaataatcaaatagagaatcctaattaaaa

SEQ ID NO: 311469 - DNA, 420 bp, Homo sapiens
tcatgttgaaaatatgtcatatggtagcctttgaaatggattcttcagttacttttagaaactattaattttttgcttcaattactttcaaatataatgtataaagcaaatagaaaataatcaaatagagaatcctaattaaaacayggaaatgtaaagcagaaaaaagagggagtattgcataatttactgacccttctttccctgaatttgaatttgcctatgtcttaccaaatatttcattacattgtataggagaactaattttagtatagagaatttcaggaaggccactgtccactatttagatttcacatgctttttcagtgttgaaatgtagataagcatttgtatgaggagcaatcactgaaatttcatttaaattgagattgtggtaggtttgtatgctataaacctcat

SEQ ID NO: 311470 - DNA, 420 bp, Homo sapiens
tcatgttgaaaatatgtcatatggtagcctttgaaatggattcttcagttacttttagaaactattaattttttgcttcaattactttcaaatataatgtataaagcaaatagaaaataatcaaatagagaatcctaattaaaacacggaaatgtaaagcagaaaaaagagggagtattgcataatttactgacccttctttccctgaatttgaatttgcctatgtcttaccaaatatttcattacattgtataggagaactaattttagtatagagaatttcaggaaggccactgtccactatttagatttcacatgctttttcagtgttgaaakgtagataagcatttgtatgaggagcaatcactgaaatttcatttaaattgagattgtggtaggtttgtatgctataaacctcat

SEQ ID NO: 311471 - DNA, 407 bp, Homo sapiens
tatgctataaacctcatttgttatcacatttgacactcatgaaactctctaaattagatacctcaatttatattttcagggaacataaataatgagccagytcaatgtcactcaataaggacctttagaacaatcctttaaagacaggttgggacattcctctccactctaccaatgaactttctatgaaggtattttactttaaggatctaatgcaacataagtgatgaggatagactgctgtaagaaaattcaaaatctacagttaactaataatatgacatttggtgggctaaactgcagaatttgagttttaggacatatgaggggtgagttgggtccagtctcttctcctttctagcaattcctggtcaaagttactgtctcacatacaaataaaaatgttg

SEQ ID NO: 311472 - DNA, 407 bp, Homo sapiens
tatgctataaacctcatttgttatcacatttgacactcatgaaactctctaaattagatacctcaatttatattttcagggaacataaataatgagccagttcaatgtcactcaataaggacctttagaacaatcctttaaagacaggttgggacattcctctccactctaccaatgaactttctatgaaggtattttactttaaggatctaatgcaacataagtgatgaggatagactgctgtaagaaaattcaaaatctacagttaactaataatatgacatttggtgggctaaactgcagaatttragttttaggacatatgaggggtgagttgggtccagtctcttctcctttctagcaattcctggtcaaagttactgtctcacatacaaataaaaatgttg

SEQ ID NO: 311473 - DNA, 510 bp, Homo sapiens
ggtctgtttctatcttaaatttctaccatgatgcttctttgttatgtattatataatctaagagtgaggtaaaagccctatgtctgggtcaaagasagtgttaagaataaaatagtgacatccaggtccaggagaatcaaagtagatataagaaagaggtactaacagaagtaataaatagcaagctggtgtgatggtacagataaagataaagaagtttgaaaaatgtagaggtcaagaaggaaatgttgttcagaaacagtctagtagtcagacatcgggaagtatgctcatgctggggatcaatttagtcaaactcagataaggttttggacaagaaaatcagatacagcacataagagattagaggacctttggtttaagtcaaatctgacctcagagaggtacagaattttcactgtatcttgctggaataagattcactgaatttgactaatcagggtaaggaaagtcctgactgctgaattgaagcaattctcttttccaaac

SEQ ID NO: 311474 - DNA, 177 bp, Homo sapiens
tattaagggatttcatgagaaataactttattctcactatgagactaaatgtaagcagcagcacagcattgttcargataaaatgactgtttgataggatgattataccaggagggataaccttctctgtggtgtacataacttctcagtctcagaaatccagccaaatacaagtag

SEQ ID NO: 311475 - DNA, 436 bp, Homo sapiens
tttatcatttaaagtcttccaaatttaaagctccatgaacacattttgtgcatttcagcattactcaagttctgagacttttagtcatgtcatgctgtccatgaaatatctgatagatctgttctttccttgggcatcgtattgcttctacaaacatagctcaaagtgtaaggaatttgtaattttcatcataactgacaggactggcagacacatttttctcagttgacttggtgcatgcttttgacgtgcataacttatgaaagcagtgtttatttgtttacaatttaaattytcagagccacaaaatagattacaacatagtcttgttcaaaattaaatgaaaatgatatttgaattattttagaatgaaatactttgtattttttttgtagaaagtatttggagtacaaaattatgcaggttagaataaatg

SEQ ID NO: 311476 - DNA, 589 bp, Homo sapiens
tagtaatcagtatgctgttggcaaatagratatactcattgaatagagcaatttgcttcaaagctaaaagtggaaattggtatagtgatgcaactacagagaaagagcgagagagagatagaaatgggaggaagtcaggagaaagagaaagtggtgaaggtggggagaagggggaatatgcagcattatgtgaaataatgtcttgtcccctcatttcagagtgtatttgtttccaagttatgacaaataatttgttttcatgatttgttatctaggccatatctacctagtcggccataaatactctgtggctttaagtaaagtccatgtgtgagtgattcccaaatctgtatctttggctctaatttctccctggaacttgattcttatatctaattacctaatagaacacatcacattattacctaatatttatctcaaatttggcatgttataaagaggactctttatctcttcttgtgttctcccaaatgtatacctttctcaggctgtaaataactttaatgctttattcaaccaaaaatatgggcattctctttaattagtctgctttcctaaccctatcctg

SEQ ID NO: 311477 - DNA, 570 bp, Homo sapiens
atctggccacatgaagtaacaaagggaatcacatcatgggccttcaaaagcagcagcgtctcaccagaatcagyacactgtttcatgcacccaggtggtttcaatcgtaccccacagagaaataaaacaatttaatattgtttttcagcaaaactatcctatgaaagccaatagagtctaaagaatattatagcaaaatggtttgattataccttaccaaaagtcagtgcatgcttgtctgcaaagctgctgctgagcaggaaagaaactaaaagatgaatcagggtggatatggaaactgattagactgctgttcaaataaatgcactttttgtgtcaaatatgtttcttttttcttttccatgttctttaacattgcctaatctactagaaaccagtgataacatatgagaaagccagtgcaatagtttccatgtctgtgtccccacaaatttatatgtggaaatgtttaaccccaagcatggtagtattaagaagtgatgtctttgagagataattacatcataagagtggagcactaatcccatgaatgggatcccagaaacttct

SEQ ID NO: 311478 - DNA, 570 bp, Homo sapiens
atctggccacatgaagtaacaaagggaatcacatcatgggccttcaaaagcagcagcgtctcaccagaatcagtacactgtttcatgcacccaggtgrtttcaatcgtaccccacagagaaataaaacaatttaatattgtttttcagcaaaactatcctatgaaagccaatagagtctaaagaatattatagcaaaatggtttgattataccttaccaaaagtcagtgcatgcttgtctgcaaagctgctgctgagcaggaaagaaactaaaagatgaatcagggtggatatggaaactgattagactgctgttcaaataaatgcactttttgtgtcaaatatgtttcttttttcttttccatgttctttaacattgcctaatctactagaaaccagtgataacatatgagaaagccagtgcaatagtttccatgtctgtgtccccacaaatttatatgtggaaatgtttaaccccaagcatggtagtattaagaagtgatgtctttgagagataattacatcataagagtggagcactaatcccatgaatgggatcccagaaacttct

SEQ ID NO: 311479 - DNA, 522 bp, Homo sapiens
atgaaaaaacttgtatgctgaggttgctaagattgatggtaagaatgaatattctatctatgcaattgtgaagaaggaaaaataaattcatgcargtttttctgtagcacttcaaactacaaaagctatggccacaatgtatgataagtgcttagttaagatgaaaaaggcattacatttgtgggtggaagatataaacagaaatgtgtttcaattgacagtaatcggcttcagtactatctgtgctttcaggtttccactggttttggaatgtatcctccttggatagaggggactactgtatagtgagagaagtttgcggattttacaatagtatgatgagagttttttctgatggtttcaattttcttattcatatctaagtaaaggccatcagtgttgtggaggtgggtgtgctggtgtaggaggtttgaagaaaaggaaaaaatgtatgaaattgttgattcaaagggtagaaaaacaaacttttctgagaaatggaataagactgatgaacagtat

SEQ ID NO: 311480 - DNA, 378 bp, Homo sapiens
ccataaaaaagtgaaaagacaatccacaggatgtgaaacaatttgacaatcatatatctgataagggacttgtatccagaatccataaggaactattgcttgatgtcattgttatttgacaatgctattatcaaaaaacccataacccaatttaaaatgggcaaaggatttgaataaacattgctcccaagaagatgttaaaatggatattaagcacaagagaagattctcaacatggttaaccgtcagagaaatggaaatcaaaactatagtgagataacacttttcacatgctaggataactaaaataaaagatttttaaaagcagacaataactaattttcatgcagatgtwgagaaattggaaccctaatatgt

SEQ ID NO: 311481 - DNA, 539 bp, Homo sapiens
tgtccttcagttacagcttatctgagttactaccaagggtggaaacaactttttctttatattttatatggagagggagcarctgggacaatttctttaccagccactctttgttcctcaccaaaaaatgtagatgggtaggctgtgttggcttttgtgtctttgagtaattaaagggtcaaatgtcttacttcttaaggttcttgacctgagtccaatccccaacactatttgccttccaagaagccctgtagagccttttgggacccatacaaatcaaggctgtgttttttttttttttttctatgcttttaaagaatatatagccaccatttgaacaaaaatggttttctggggttgtcagtcattggcattctatcaacaagaatagtgaaggggaaaatgtctttgaatattcgtacagacttagcaaatgtgggtggagaatacaactcttctgtttacccttagagagagagatgaatgattgcacattatgacttcctatataatttaaaatatttattctctatcaacta

SEQ ID NO: 311482 - DNA, 539 bp, Homo sapiens
tgtccttcagttacagcttatctgagttactaccaagggtggaaacaactttttctttatattttatatggagagggagcagctgggacaatttctttaccagccactctttgttcctcaccaaaaaatgtagatgggtaggctgtgttggcttttgtgtctttgagtaattaaagggtcaaatgtcttacttcttaaggttcttgacctgagtccaatccccaacactatttgccttccaagaagccctgtagagccttttgggacccatacaaatcaaggctgtgttttttttttttttttctatgcttttaaagaatatatagccaccatttgaacaaaaatggttttctggggttgtcagtcattggcattctatcaacaagaatagtgaaggggaaaatgtctttgaatattcrtacagacttagcaaatgtgggtggagaatacaactcttctgtttacccttagagagagagatgaatgattgcacattatgacttcctatataatttaaaatatttattctctatcaacta

SEQ ID NO: 311483 - DNA, 432 bp, Homo sapiens
gcagcagggaatgagaatcagagctaacatgaaagattagtgcaagagtggaggaaagtcatctttctactctaagaagaaagaagacagaaaatataargatcaatgtgtaggtttgaccagggggtttgacagactgacagataatttcagcctatggtctttctcttctctctgatggagcaaatagagtcatctgctgagaatgaaaggcaggttatagggtacagggcttgagaaaagtggatgaaagtttgaaatagccactctgggggatgggaaataaataattatcaccagccagcattgagggcttagttgaaattggacacaaaggataataatctttacaattgtgttattttctctaacagcaattaagcataccagacaaaatacagggtaattacagttactggagttttggtagat

SEQ ID NO: 311484 - DNA, 510 bp, Homo sapiens
atttgaactcattatattctgtcttctctcagttgtgttagaacattaattcaaccagttatgttgaattacattgattgatgttgatgaacaatcatcaaacaagtgtcaggtaccagggatatcaaaataagtaagacatagccgctatttttcagcgtctataaatggaatgaggcacagaaataataatgctggatgctgtgtgctgtacaaaaagggcaagcaataataacagttaacatgtattgggtacttcctgtctgctaggtgctatactagatattttataagtattaattcacttaaattttacaatatgcctctgtgttaggtatggttgttattctgattttataaaagaagaaactgaggtttagatgggaagtgagggattaggtctcttggcccaaggtcacacaataagttaattatgggggtacaaggtacaggcgcttsgaaaacatagaggaaagaacaattgtctaatgaaatcaaagaaaactttgc

SEQ ID NO: 311485 - DNA, 451 bp, Homo sapiens
ttcacatccagccaaactaagcttcctaagtgaaggagaaacaatgtccttttcagacaagcaaatcttgagggaatttattacctctagacctgtcttacaagagatcttgaaaggagcactaaatatagaaaggaaagactgatacaagctaatacaaaaacacactcaaacacacagagcagtgttaatgtatagcaactgcacaaacaaggcaacataataaccagctaacaacacaatgrcgggatcaaatccacacatatcaatgctaatctttcatgtaaatggtcaaaatgcctcacttaaaaggcacagagtggcaagctggataaagaagcaagactcaatggtatgctgtcttcaagagatccatctaacacgtgaggacactcataggctcaaaataaagggatggaggaaaatataccaagcaagtggaaaaaaaaaa

SEQ ID NO: 311486 - DNA, 496 bp, Homo sapiens
cattggaccaaatggatctgatagacctttacagaaccctccatcccaagcaacagaatatacattcttctcatcaccacatggcacatactctaaaatcaaccacaaaattagacataaagcaattatcagcaaatataaaaaaaatcaaattcataccaaacacagtctcaaaccacaacacaataacaatagaagtcaacactatgaaagtttctcaaaaccatgaaattaaatggaaattaaacaacaggctcctgaatgattttggggtacataatgaaataaaggcagaaatcaagaagatcttytaaaataatgagataaaacataccacaatcactgagacacagctaaggcagtgttaagagggaaattcagagcattaaatatccacaccaaaagttagatctcaagaatgtaacttcaaaactgcacaagcaagaacaaatcaaccccaaagctagcagaagatgagaaacaataacaaaaaatt

SEQ ID NO: 311487 - DNA, 581 bp, Homo sapiens
gttctcattatttttaggatctacaaagcaaaacaattgaactcttggacatagagagtaggatgattaccagaggccaagaagggtagggagcagggagatagatacagttaacgggtaaaaaaaaaaaatagtttaaaatgcataaacctatttaatagccaaacaaggtgactatagtcaataataatataactgtacatttaaaaataactgaaagagcataaatatattgtttgtaatacaaaacatacattcttgaggagatggataccccatcctctacratgtgattattacacattaaatgcatgcatcaaaaccactcatgtactccataaatatacacacttactatgtacccatgaaagctaaaaattaaaaattcccacaatgatatgttacctcaactattatagtagtcttctgcttaattttctcacattctctctagctccatccaatttattcttcacatagaaaagtaatattttgcaaataaattaggcttctattttggacaaaatgtcatagacttgtctctcctttaagatgaaaagacactggaaattgtgagagag

SEQ ID NO: 311488 - DNA, 391 bp, Homo sapiens
gtgagctgttggtggatctaccattctggggtctcgaggatggtggtcctcttcttgcagctttactaggcagtgccacagtggggactctgtgtgggggytccaaccccacatttcccttttctactatcctagcagaggttcttcatcagggctctggccctgcagcagacttttgcctgtacatctaggcatttccatacatcctctgaaatccaggcagatgttctcaaacctcaattcttgacttctgtgcatccacactcccaatgccacatggaagctgccaaagtttggggcttgcaccctctgaagcaaagcctggagctgcacctggacctcttttacccacagctggaactagagtggctaaaatgcagggcagcaagtc

SEQ ID NO: 311489 - DNA, 555 bp, Homo sapiens
aatttataaagaaaagaagtttaattgactcacagttccacatggctgaggaagcctaggaaacttacaatcatggtggaagggaaagcaggcacaacttacacagtggcaggcaagagtcagcatgtttaagaggagctgtcaaacacttataaaatcgtcagatcttataaaaactgtgataactcactatcacaagaacaacatgggaaaaacttccacattatctartaacctcccaccagatcctgccttcaacatatggagattatgaggattacatttcaagatgagatttgggcgagaatacagagccaaaccatataaaatgaaaaatataaaatctcaacaaagcaacagacattagaaaaagaaaacaagtgaaaaaacagatctggaaactataactgaaatttaaaaaacttactagatggatgggctgaacagtagaatggagatagcagaagataggattagcgaacttgagaccaagtcaacaaaatttacgaaatccaaacagcagagaaaatagactgaatgaacagtgtcccaggg

SEQ ID NO: 311490 - DNA, 555 bp, Homo sapiens
aatttataaagaaaagaagtttaattgactcacagttccacatggctgaggaagcctaggaaacttacaatcatggtggaagggaaagcaggcacaacttacacagtggcaggcaagagtcagcatgtttaagaggagctgtcaaacacttataaaatcgtcagatcttataaaaactgtgataactcactatcacaagaacaacatgggaaaaacttccacattatctaataacctcccaccagatcctgccttcaacatatggagattatgaggattacatttcaagaygagatttgggcgagaatacagagccaaaccatataaaatgaaaaatataaaatctcaacaaagcaacagacattagaaaaagaaaacaagtgaaaaaacagatctggaaactataactgaaatttaaaaaacttactagatggatgggctgaacagtagaatggagatagcagaagataggattagcgaacttgagaccaagtcaacaaaatttacgaaatccaaacagcagagaaaatagactgaatgaacagtgtcccaggg

SEQ ID NO: 311491 - DNA, 555 bp, Homo sapiens
aatttataaagaaaagaagtttaattgactcacagttccacatggctgaggaagcctaggaaacttacaatcatggtggaagggaaagcaggcacaacttacacagtggcaggcaagagtcagcatgtttaagaggagctgtcaaacacttataaaatcgtcagatcttataaaaactgtgataactcactatcacaagaacaacatgggaaaaacttccacattatctaataacctcccaccagatcctgccttcaacatatggagattatgaggattacatttcaagatgagatttgggygagaatacagagccaaaccatataaaatgaaaaatataaaatctcaacaaagcaacagacattagaaaaagaaaacaagtgaaaaaacagatctggaaactataactgaaatttaaaaaacttactagatggatgggctgaacagtagaatggagatagcagaagataggattagcgaacttgagaccaagtcaacaaaatttacgaaatccaaacagcagagaaaatagactgaatgaacagtgtcccaggg

SEQ ID NO: 311492 - DNA, 555 bp, Homo sapiens
aatttataaagaaaagaagtttaattgactcacagttccacatggctgaggaagcctaggaaacttacaatcatggtggaagggaaagcaggcacaacttacacagtggcaggcaagagtcagcatgtttaagaggagctgtcaaacacttataaaatcgtcagatcttataaaaactgtgataactcactatcacaagaacaacatgggaaaaacttccacattatctaataacctcccaccagatcctgccttcaacatatggagattatgaggattacatttcaagatgagatttgggcgagaatacagagccaaaccatataaaatgaaaaatataaaatctcaacaaagcaacagacattagaaaaagaaaacaagtgaaaaaacagatctggaaactataactgaaatttaaaaaacttactagatggatgggctgaacagtagaatggagatarcagaagataggattagcgaacttgagaccaagtcaacaaaatttacgaaatccaaacagcagagaaaatagactgaatgaacagtgtcccaggg

SEQ ID NO: 311493 - DNA, 533 bp, Homo sapiens
cttttattctaagatcaggaacaaaaaaatggtgctccagtttacctcattaattcaatataatctagaattcctaggtagagctatgtagagcatttagaagagaaaaagaataggcatccaaatgaaaaagaggaattaagatcatgtttgttcacagacggcagaaacatatgtagaaacctctcatgactcaacaaaaagatgtgtaaaagctaataaattaaacaaattacaacatacaaaattaacacactaattcaattgtttttatatccagcaacagtgaacaatctgaaaagaaaattaacaaaacaatgccacttataatagcttcaaaaaattaagatacaaacaaaattcaataagaagttaaaacagaactacatgaagaatgcagaaycctcaggagctgatgcgatcaactggaagaaagggtatcagtgatggaagatgaaatgaatgaaatgaagtgagaagggaagtttagagaaaaaagaataaaataaatgaacaaagcttccaagaaatat

SEQ ID NO: 311494 - DNA, 570 bp, Homo sapiens
gggaaaacaccctttaaccatcatttgcctctacactcacacaaaaacaatcatcaacatagaagacttctgtgatcaaatgtgtgtggggttttccccacacagcaagtagtgaaaacaacctgggtgttttataatttagttccatcactatctacacagtaatagtgtcaaatctcacaagttgagagctcagtccccaagactgacacttctacacagtagtcaaaagtctgggcttccagaaattctgaccaactggctttgaattargatttccatgaccccctctttaggttcctttaatttgttggggtgccccacagaactcaggggaacacttactttgctggtttattataaagaatatttcaaaagatacggatgaagagatgcattgggtgaggtattggagaaggggcatagaacttccatttcttctctggttgtactaccctccaggaacctgcctgttttcagctacatggaagctccctgaaccctgttctcttgaatttttatggaagcttcatgacatcagcatttcttcttctccagggtatggggtga

SEQ ID NO: 311495 - DNA, 569 bp, Homo sapiens
ttttccccacacagcaagtagtgaaaacaacctgggtgttttataatttagttccatcactatctacacagtaatagtgtcaaatctcacaagttgagagctcagtccccaagactgacacttctacacagtagtcaaaagtctgggcttccagaaattctgaccaactggctttgaattaggatttccatgaccccctctttaggttcctttaatttgttggggtgccccacagaactcaggggaacacttactttgctggtttattataaagaatatttcaaaagatacggatgaagagatgcattgggtgaggtatkggagaaggggcatagaacttccatttcttctctggttgtactaccctccaggaacctgcctgttttcagctacatggaagctccctgaaccctgttctcttgaatttttatggaagcttcatgacatcagcatttcttcttctccagggtatggggtgagaccctctcatggaagggtcttaagattcataatcagaaagtcagagaaacattggagttaaagaagggcaggagaagggcagaggagtg

SEQ ID NO: 311496 - DNA, 569 bp, Homo sapiens
ttttccccacacagcaagtagtgaaaacaacctgggtgttttataatttagttccatcactatctacacagtaatagtgtcaaatctcacaagttgagagctcagtccccaagactgacacttctacacagtagtcaaaagtctgggcttccagaaattctgaccaactggctttgaattaggatttccatgaccccctctttaggttcctttaatttgttggggtgccccacagaactcaggggaacacttactttgctggtttattataaagaatatttcaaaagatacggatgaagagatgcattgggtgaggtattggagaaggggcatagaacttccatttcttctctggttgtactaccctccaggaacctgcctgttttcagctacatggaagctccctgaaccytgttctcttgaatttttatggaagcttcatgacatcagcatttcttcttctccagggtatggggtgagaccctctcatggaagggtcttaagattcataatcagaaagtcagagaaacattggagttaaagaagggcaggagaagggcagaggagtg

SEQ ID NO: 311497 - DNA, 598 bp, Homo sapiens
ataggtcccctctggagcttctgtttytctgccttgcagggttcctgaaggcaggtagaatagagactgccatccagccaatgagcttgcccacacttgtcagcactctgctgtttttggatgagattcatggcaatctcataatctatgaaagattctgaagcataatggaaagaatattggaacttcagttagccagacttagtctctggccctgatttgcctctgctatttattagctatatgtccttgagtaactctcttgaccttcctggaattctattctttcactgaactaaaacttaatgagacttagggtgcatgaagggaaaattaatatgaagtggaagtgaggacagaagttactaaaattgattgagtacttattatatgccaggtactatgtttgtagtttatgtaaatttatcttatttaattctccataagagttggtgatataggagacattatttttatgtgacatataaagaaactgatgctcaaagagatgaaacacttggcttaaatatcacatgacaggtgagtagcagagatacaatttgaatggagaactatctaaaaccaaactccatattct

SEQ ID NO: 311498 - DNA, 586 bp, Homo sapiens
gatacactactgaatctgcactagaccgtaatcctgagcagcctggtgaggtcaacctcttcaccaatctgaggagcatggatcccatgtcattccgtcattcccatcttcagaccattaaactttgggggaaaagtggcttactggtgatgttttccctttttcaacatctctagcttttggcattaaatgctgcagaatcacttmgactgtggtgtaaattctgtgtccctgttctactggagaccatccagagcctcttctactggatattgatcctaataatcaccccagttgccatcattatcacaccagtggtatttcagccccctcaacaagctgagatcagttgataaattcaaaagtgcacgtgccttatacaatgttaatatgggagttatatggaacactgtcttagaagcttaaaaatccttcacagatccagaaaattacatatgttctcatcatttctgatagcttacagtcaagttccaaataggtcagatgtcttctctccccatcaccctgtaattttgatccagaagattatcttttaagccaatagctgtcacactagattgaatgt

SEQ ID NO: 311499 - DNA, 586 bp, Homo sapiens
gatacactactgaatctgcactagaccgtaatcctgagcagcctggtgaggtcaacctcttcaccaatctgaggagcatggatcccatgtcattccgtcattcccatcttcagaccattaaactttgggggaaaagtggcttactggtgatgttttccctttttcaacatctctagcttttggcattaaatgctgcagaatcacttagactgtggtgtaaattctgtgtccctgttctactggagaccayccagagcctcttctactggatattgatcctaataatcaccccagttgccatcattatcacaccagtggtatttcagccccctcaacaagctgagatcagttgataaattcaaaagtgcacgtgccttatacaatgttaatatgggagttatatggaacactgtcttagaagcttaaaaatccttcacagatccagaaaattacatatgttctcatcatttctgatagcttacagtcaagttccaaataggtcagatgtcttctctccccatcaccctgtaattttgatccagaagattatcttttaagccaatagctgtcacactagattgaatgt

SEQ ID NO: 311500 - DNA, 586 bp, Homo sapiens
gatacactactgaatctgcactagaccgtaatcctgagcagcctggtgaggtcaacctcttcaccaatctgaggagcatggatcccatgtcattccgtcattcccatcttcagaccattaaactttgggggaaaagtggcttactggtgatgttttccctttttcaacatctctagcttttggcattaaatgctgcagaatcacttagactgtggtgtaaattctgtgtccctgttctactggagaccatccagagcctcttctactggatattgatcctaataatcaccccagttgccatcattatcacaccagtggtatttcagccccctcaacaagctgagatcagttgataaattcaaaagtgcacgtgccttatacaatgttaatatgggagttmtatggaacactgtcttagaagcttaaaaatccttcacagatccagaaaattacatatgttctcatcatttctgatagcttacagtcaagttccaaataggtcagatgtcttctctccccatcaccctgtaattttgatccagaagattatcttttaagccaatagctgtcacactagattgaatgt

SEQ ID NO: 311501 - DNA, 542 bp, Homo sapiens
caactaggatgtggtcccctttaagaaaactgcctcctaagtgcccagccaataaggtggcaaattttagatgagacagatttcatcttctctcagtgccccctttggctgctccaagcatagggtttggaacaacaagaggggataacccaaagctatttgcataggtsactaaaggataaaactaaatgggccaggcatgaggatcttgaagtatttatccaattctgccttgagagctctgttcaggtttagaagctttcctgagcatatacatatctgtacctgtgcttaggactaggacaaggggaggacaccataacactgttatttcttcaacagcttcattgtgttacattagcttccttttgttggagggatggtgtggttgaatactcagagtaagagggaaagtgaatagaatcagctgatatgcatttttagctctctatcttccaggtccacttcttgtcatcttctttccataaacctgagcatatcatacctggcctcattcataccaggacagcatcagctcactc

SEQ ID NO: 311502 - DNA, 609 bp, Homo sapiens
tctggtttgaccctgagttcataaaataggttaggactgtgtcatttgatgggtgacactagacawgtgccttaccctctctgagccccagacaccttatctgtaataccagggaaaggatgtggatgggctagaagggcctttctggatggtacatatataaaaaagaagacacgtagggctgtccaacttaaaaacaggaggtaaagtgagatcttcgtggattaaatgataataatagtattaatgaataatataatgaacaaaggtgtacttatttattcaaccaatatttgaatgcctactatgcattgtcatggagctaggcattggggatacatgggtggataaaatggacaaaatcttttattcttatgatttatactctgattgggacagagaaagacaaaaatagtaaagcaaaatatttagtttattagatggtgctaagtgctatggaaaaactaagcaaggtaaaggatatggcccatcataattttaagtaggttctcactgacaagatatcttaagcacttactatgtgccaggcactgttccaatcattggacatacatgaactcatggaagctacttattataacaattatt

SEQ ID NO: 311503 - DNA, 609 bp, Homo sapiens
tctggtttgaccctgagttcataaaataggttaggactgtgtcatttgatgggtgacactagacaagtgccttaccctctctgagccccagacaccttatctgtaataccagggaaaggatgtggatgggctagaagggcctttctggatggtacatatataaaaaagaagacacgtagggctgtccaacttaaaaacaggaggtaaagtgagatcttcgtggattaaatgataataatagtattaatgaataatataatgaacaaaggtgtacttatttattcaaccaatatttgaatgcctactatgcattgtcatggagctaggcattggggatacatgggtggataaaatggacaaaatcttttatycttatgatttatactctgattgggacagagaaagacaaaaatagtaaagcaaaatatttagtttattagatggtgctaagtgctatggaaaaactaagcaaggtaaaggatatggcccatcataattttaagtaggttctcactgacaagatatcttaagcacttactatgtgccaggcactgttccaatcattggacatacatgaactcatggaagctacttattataacaattatt

SEQ ID NO: 311504 - DNA, 592 bp, Homo sapiens
tccaggtgcagaaatgtatcactgaacaaaacagtttaaaactcctacctatgtggagcttataccctggcccatgagacatgttctacactacaggcatgccctgttttactgcattttattttattgtgcttaccagatatcacattttttacaaattgaaggtttctggcaaccctcatcaagcaagtctrtttgtgccatttttccaacagtatatgcttacttcatatgtctgtgtcacattttggtaattcttacattttgaactttctaaattattatatctgttatggcaatctctgaacagtgatctttgattttacgattgcaatttttgggagtgccatcagccacatccatgtaaaacaggacacttactcaataaatgttgtacgtgttcagactatttcactgaccagcagttcccctgtctctcttcctcttttaggtcctccttattccttgaaagacaataataataaaatctggcaaattaataaccctacaatgtcctctaagtgttcacgtgaaaagaggagtttcatgtctctcactttagatcaaatctagtaattattaaacttagtga

SEQ ID NO: 311505 - DNA, 585 bp, Homo sapiens
gtgtagtcttttatccctcacctccctcccaccctttcccctgaatccccaaagttcattgtatcattcttatgcatttgcatcctcatagctcagctctcacttatgagtgagaatatacgatrtttggttttccattcctgagttacttcacttagaataacagtttccaattccatccaggttgctgcaaatgctactatttcattactttttctgtctgagtagtattccatggcacatatatatctacatctatatctatatatctatatctatgtctatgtctatatctatgtctatgtctatatctatatctatctcacattttatttttccactctgattgatgggcatttaagctggttccatatttttgcaattgcaaatcgtgctgctataaacatgcatgtgcaagtatcttttttcgtataatgacttcttttcactgggtagatacgcaggagtggaattgctggatcaaatggtagttctacttctagttctttaaggaatcttcacactgttttccatagaggctgtactagtttacatttccgccaacagtttaaaagtgtgcccttt

SEQ ID NO: 311506 - DNA, 570 bp, Homo sapiens
tctgtagattacagacactgtatagaaaagcactgtaaaaatccctgtcctgttctgttccattctaattaccagtgaatgcagcccccagtcacataccccctgctttctcaatagatcacaaccctctcacacagacccccttaaagttgtgagcccttaaaagggacaggaattgctcactcagggagctcagttgttggagacatgagtcttgccgaagctcccggccgaataaaacccttccttctttaactcagtgtctgaggggttttatctgtggcttttcctgctacatttcttggttccttgaccaggaagcaaggtgattaacagayagtcgaggcagccccttaggcggcttaggcctgccctgtggagcatcctgcgggggactctggccagcttgagtgacacagatcctgagagtgctcccaagtaggcaattgccccagtggaatgccttgccagagcagcgcatggcaggcccctgtggaggatcaatgcagtggctgaacactgggaaggaaatggcacctggagtccagacatctgaaagttggtaagact

SEQ ID NO: 311507 - DNA, 570 bp, Homo sapiens
tctgtagattacagacactgtatagaaaagcactgtaaaaatccctgtcctgttctgttccattctaattaccagtgaatgcagcccccagtcacataccccctgctttctcaatagatcacaaccctctcacacagacccccttaaagttgtgagcccttaaaagggacaggaattgctcactcagggagctcagttgttggagacatgagtcttgccgaagctcccggccgaataaaacccttccttctttaactcagtgtctgaggggttttatctgtggcttttcctgctacatttcttggttccttgaccaggaagcaaggtgattaacagacagtcgaggcagccccttaggcggcttaggcctgccctgtggagcatcctgcgggggactctggccagcttgagtgacacagatcctgagagtgctcccaagtaggcaattgccccagtggaatgccttgccagagcagcgcatggcaggcccctgtggaggatcaatgcagtggctgaacacygggaaggaaatggcacctggagtccagacatctgaaagttggtaagact

SEQ ID NO: 311508 - DNA, 587 bp, Homo sapiens
atattgtcttatgcccaacttctgcctccaaagaaagaggaagtaaaaactaaaaggcagaaatgaaatccacaaacagacagcccggtgccacaccctaggcctggtagttaaagattgacccctgacctaatcagttgttatctatagattacagacattgtatagaaaagcactgtaaaaatccctgtcctgttctgttccattctaattaccrgtgcatgcagcccccagtcacgtaccccctgcttgctcaatcgatcacgaccctctcatgtggacccccttaaagttgtgagcccttaaaagggacaggaattgctcactcagggagctcggttgttggaaacatgagtcttgctgaagctctcagtcgaataaagcccttacttctttaactcagtgtctaaagggttttgtctgtagcttgtcctgctacatttgcaccactattgtatcccagaggtttcgataggttgtgtcactattattgctcatgtcaaaaggttttttaaatttctatcttgatgtcattgttgatccaatgatcattcaagagcaggttatttaatatctaggtatttgag

SEQ ID NO: 311509 - DNA, 573 bp, Homo sapiens
gttgctataatcaatggtaatagctcctctttactctgcacctcgctgtgctttgagtttggttctggaccacagaaaaacaggagctggttcgttggagagtgaatatgagtgcyccaagcaatacaactgtgctctggagaatttcagcttggatatggtggtatggagagacaagagacatgaatgtttttttaaaatgtcagattagctgtttatgaaaagtgcttcaaataattcctacagccctatggaactaggattaaaagtagatctattgagggtctattctttaacaaatgttagcacagtatacaggacctgaaatagtgaagtcttgagagagatttgttcagtatataagcagataatatattaatgcctaacacaatggaaacatttccactactgaaagacagacaattgagtgatgaatatatgaagtcagaaattcaccattactagaggtatgtgagccaaggctgtgtgtataattgccacagtgttgcagggcagatgcaaatattggatgggagttggactagagagcctttaaggctcctttcaattgtg

SEQ ID NO: 311510 - DNA, 551 bp, Homo sapiens
tgcacttaaaactacatttattttttacacatcttattgacaggtgctaaaatgaatgagaatcctctttatgtactgaagtggagcaatctccaagctatataaatggaaaaaaggttataggatatcctgtatagtgagtgtactgtcatttatattaggaaaaaggggggagaggcataaagatataagtacatatacatgtataaatgtttgcttgtatatttgaggtagcagataaacaagactcgttttcatgatcctgctgatcaaaacaggttgtagcaaataaattggctaaaaccagctaggactaggaattataatacattttcataagacactcccactggcactatgacagtttacaaatgccatgrcaacaacccagaatttaccttatattgttccaggaaattcccgtcctttttctagaaaatttgtcaatagccttctccttatttaatatataattaggagtaggtatgaatatagctaaccggcactccacaccgtgacgctccctactgcatagccctgctctgagtatg

SEQ ID NO: 311511 - DNA, 564 bp, Homo sapiens
acaaaccagagttagcagctcagggaataccaagcgtgatcaatagcttaaaatctcccctagtcatgtcataccaaaactacagaaaactaaagagaaagggaaaaatgaaagaaactaagtttaattaggtatattagtccattttcatgctgctgataaagacatactcaagactgggcaatttacaaaagaaagaggtttattggacttacagttctacatggctggggagacctcacaattatggcggaaggcaaggaggagagcatcacatcttacatggatggcagcaaggaaaaaaaaaagcatgtgcagggaaattcctgttataaaaaccatcagatcttatgagactcattcactatcacaagaacagcgcaggaaaaacctgttgcmgtaatacaatctccctccactgggtccctcccacaacacatgggaatggtgggagttacaagtcaagatgagatttgggtggcgacacagccgagctatatcagtagggctctttacatataagaatgttagaaattacagcagtcttatcatctgaaataattc

SEQ ID NO: 311512 - DNA, 639 bp, Homo sapiens
tttatatttctagactactccattcaacaaaaacagactatacaatctcaacgttaaatggaacattcaccaagatagactacattctgtgtcttaagacataaattcaaaattatgtaaatcttacaaagtataatctgaccaaattaaaattaaggtacaaattaataaaagatggataagtgtaaaattccaaatatttggggagtaaagtatttttcaaaaacatatgagtctgaaaatgtctcaatagaaactggaaaaaacagtattttggagtaaataaaataaaaatgaaacttatcaaaatgtgcacaatatagtgaaaatgatatgtagtaggaaatgaatattgataaatggatatattagaaaaaaattgcaagatcaataaaagcttgtaccttaagaaagtagagaaaggatgcattttaaacytaaagcaaatagaagaaaagaaataatgataagaaatagagtacaataataaaattgagaacaggaagatgaaagaaaaaaaattaacccctcaaccagatttgttgaaaagacacatttattttaaaaagtataaaaattctttaggcatcttaaagaaaaatgtgagaagccacaatttactaagaattaagagggaag

SEQ ID NO: 311513 - DNA, 552 bp, Homo sapiens
ctaataatataggtcagttccttcaagctaacattagttttgaattctccttctcctcattgaagaatatttgatgtatattttttctgtattttagttttaaagtttcatcaaatttactttcatttcttactattcctctttgaaaactttgtcatagtctttgcctagtaccagactcatggctcaggcactgttacataatacatactttgtaaatattgcttattgaattaattattatccctttattaccctagagggagaagcacacacattgataataaarttttatctctaagatagaattaaatagatattaaatatctttaaatgtattttcataaaatgactatttttatataatgcaaagcatatagttttgcgttttaatctagactgcaaataaaagtggacatgcttttaattcatttgtttgaaatcataatttgtcttattaaataaatcatctgcataatcagaagagaaatcacattatttgatcaacatattagtttgacattattctttggaggtgtttacattttgtta

SEQ ID NO: 311514 - DNA, 456 bp, Homo sapiens
gaagagaaatcacattatttgatcaacatattagtttgacattattctttggaggtgtttacattttgttatttataacacatatacgtagttcattttggagaggggagaatgagattgttgtgcttctgtatttaatataaaagaaggtagataaagggaaaaaaggtacaaggagaaattcaaatgtataaaaggatataaatgtgtaaaggtagataaaaggaaaaaaggtacaaggagaaattcaaactcaaatcaaattcagtatgtatgctgatactcaattctgatattgatcctgggtttactatcagtaattaggtttattcttcattctgatcaartcaattaactctttgcagaagtaaaaatatttctaatcagaggatgcaatttctactgaagctaatctgtgacatgggaaagtttattcatctaaaactgtgtaacaca

SEQ ID NO: 311515 - DNA, 256 bp, Homo sapiens
tatttggctgggtctttcatttttttccctgccataacaacaaataatcataccacacgtttgcattgtacmaaaatactgatggatgggcatgttttcttttttattgttcattgaagtaacctctagttactggtgtgttagcattaaaagataagtttggttaggatgggaggaagttaaatcataagttccctttttcttatatcactagtcatttcaacaacctgaaagagtttataccaacataccaaat

SEQ ID NO: 311516 - DNA, 256 bp, Homo sapiens
tatttggctgggtctttcatttttttccctgccataacaacaaataatcataccacacgtttgcattgtacaaaaatactgatggatgggcatgttttcttttttattgttcattgaagtaacctctagttactggtgtsttagcattaaaagataagtttggttaggatgggaggaagttaaatcataagttccctttttcttatatcactagtcatttcaacaacctgaaagagtttataccaacataccaaat

SEQ ID NO: 311517 - DNA, 570 bp, Homo sapiens
caagttgcctctcactgacatccagctgcttcttcgcttctactggaagagtctggggtcttgataggcacagaatgaggggtggtggagggcaagccataggtagtttttgaaaaggcaacatttgattggtaaaaatacattattcagaaagaaccaatagggagagaatggataaacagggatggaagtactcactttggaccacgggtttgaggctwttagcttgaaggtggggttttgccatggacccacccctgtctgcctacagtttctctgcctccttcccctatcagaagtatttttgagtcacatgagtggctaagacttggtgtactataagaattatgaaaattaattttattataatggtaaaaaagagagaaatcagtgaaaatatgttatatgtattgatatcatgaagaatttaaatacctgagataggtacttggagacatatctagtgatttggtaataattatgattttctctgtcttaattatacttcatttaccattgcaaatattttagttaactattggtatgaacaaaccatctcacatcttaaat

SEQ ID NO: 311518 - DNA, 570 bp, Homo sapiens
caagttgcctctcactgacatccagctgcttcttcgcttctactggaagagtctggggtcttgataggcacagaatgaggggtggtggagggcaagccataggtagtttttgaaaaggcaacatttgattggtaaaaatacattattcagaaagaaccaatagggagagaatggataaacagggatggaagtactcactttggaccacgggtttgaggcttttagcttgaaggtggggttttgccatggacccacccctgtctgcctacagtttctctgcctccttcccctatcagaagtatttttgagtcacatgagtggctaagacttggtgtactrtaagaattatgaaaattaattttattataatggtaaaaaagagagaaatcagtgaaaatatgttatatgtattgatatcatgaagaatttaaatacctgagataggtacttggagacatatctagtgatttggtaataattatgattttctctgtcttaattatacttcatttaccattgcaaatattttagttaactattggtatgaacaaaccatctcacatcttaaat

SEQ ID NO: 311519 - DNA, 515 bp, Homo sapiens
gtatgaatacactaaacaaagtaattacttacttattgcatttttataattttaactatattattattagacttcagtgtaatatactccaattactggggttacatcaaggaaaaacaacacaaaactaacatccatttcatgaagtttacatatcagtgatgaaaataaacaaggaacatgtaaataggcagtataccctgaagaacaagtaaaatgtcrgaaaataaggttgatttgtttctgttgggtgaaggtgtctattttatagtgggtggtcaggtaaggtctcactcattaggtgacttcaattagaaatctgaaagaactaaaaaagtagatcttataaacatctggggaaatatgttccagaaagatgaaaaagcaggttgtagaaaattatatcagcaaattacagcagctttagatggtgtagaacatcataggtcctaataagacctatgacttttttaatacattgataataaaagacattatatagttgtaaacagaaa

SEQ ID NO: 311520 - DNA, 476 bp, Homo sapiens
aaagaaatgtacattatgagtagagttctggctttccagagcctcagctttgaaaaggctagttcagaaaaatgattaccaattgatgactatatctcacaatttaaaaaatttcctaaattctttctcagtggcggattggaaaaagttctcagtgacccatcaacagtcagttcagagctacctgctttgcagatgtcacgcagcagatgatatatgggcaattagcaaattttcaatttatcttttgagatayagtgactcttcagtaagtttcttaagaagataaggagattattctactacaacttccttagaagatgaacaaagtacttaatcacccacattttgaagaagaatagtatgtccctcaaatgaaagatagtctatacagacactgagagaagcataaaggtccatccctgtgacatgactgtccaagtatgttgctgattttctcaactgaaggcaaacag

SEQ ID NO: 311521 - DNA, 545 bp, Homo sapiens
tcttgccagcatttggtgtcattttaaattttatatttgaatgagtgtgctgggatgtatcatcatggttttaattcatacttctctaatgtttaatgatattgaagatcttttcatacgttattcatttaccatctatatgtcctcttcaaagaagtgtcactttatttcttttactcattttctaactagatttgtttgtatatttgtctttactgctgagttttgagagcttgttttatgttctagattctaaaacgttgtcaaatatgtgatttgttagtatttcctcccaccctgtagcttttactttctacytcataagggtctattacagaacaaaagtgttatattttagtaaaatttacttaccagttttcccttttatgagttgtgttttggtattaaatgtaagtactattttccttgccctatatccgaaagatttttttctttttttcctgaaaattttatagttctaccttctaaattaaaatctgtcattataacttttgagtgaattttttgtataaggaacaagattt

SEQ ID NO: 311522 - DNA, 611 bp, Homo sapiens
tattctacattcatttgtcagcaaaatctttcagttctaatttttatacatactatgtcatcacttaaacattctatttgatactttagaaaagagaccttacatacatgtgtgtgtgtatatgtatatacgtatgtgtatatatatgtatgtatatatatttgtatacccactaattcttagactttgtctgttacaacattcccctgtaattactctctgtaaagttttatttcttgcatcacctggccagtcacattcctgcctcaaatgttgttgatttatctacctaaaataattctttcttataccttcaatccacagctcaaagaacatactagtaraggtgtttttacatgacttgtataaaatagtaatccccatcctctgcttttctaaaactgctttgcctaatttaatttttgctcatagcacttataatattattattatccgacatattacttacctagatttattaaatttaagacatcattaaatataagacataccattagttcatatattactaagagtgacaaaaagagcttacagttaaactataatgtataagtttgccatcacttaaacattctatgttatactgttgg

SEQ ID NO: 311523 - DNA, 552 bp, Homo sapiens
cttgctttgcattagtcctcagctaggcacagggaagggatatggacatgaatgagacaccaatgcctctcctacaagtaatttggtgtataataatgaaagtgtattctgtctttgtgtcaggctttagggatacaaaaaatattttttctttcacactttttatcagctatgagtacctccaagatgacaggtgactttctgattttccctattaaatcttttcttcatgaatacagacataactcaatctcagatcaattggaattatgctcatcatttacctggcccatagtattaaggccagatgtctgtgatgatgtccagcttcaagatttctatatttttacaatttttgcatgattactatatgccctggactatcttcggcatatgatattttatttaattstataatcttatgaggtcaatatgtcttccccattttatagagaggaaacaacatttcaaagaagcaagttacctgccaaaatttacaagtaaaatctgttgttaccatccaagaagggaaatgctgatcttacctgttag

SEQ ID NO: 311524 - DNA, 625 bp, Homo sapiens
cctctacttacaatgaggttatgtctagataaaactatcatattttaaaatgtagtatgttttaaaagcagtcttgacttatgatatattcaacttggataggtttatcagaatgcgaccccatcataatttraagagcatctatatttagttttgtttcattctccataggtggtcattttgtagtaaatataaaattatgttttaaaaaattaatgagctgaaaagcctattactatttggaaattaaatatagcatgctactttacttttttcccaagtataaaggaataaacaagtccaaatgaacttttagagttttaaacatttttgctaataattcatactttgaattctatctgtttaaatcatgtgatcttttattttatttctataatctgttacattaaatcatttcattttgagcatagaattctcaaatatgcataatctcctgcaatgcagcataaaaagctaaggctgtaatgcatttattttgaaattaagtaacctagaaaatatcaaggtattcttgaataaaagctttacacacaacaatcttatcaattcaataacttcaaaaattatttaatgttaatgacttcttaagcattaaattgtctag

SEQ ID NO: 311525 - DNA, 619 bp, Homo sapiens
actattttttcactttctcccttgcctgttattatgaccttctgctctgccagagacacctaatattttctaagctatcacctcttaaaactggcattatctatctcttactattgatatgctacttgatctttttgagactattttgtgacaatggttataactacaattagctttgtacattccaaatgtgttgaaataatttatctgctaattttccctctacatttctgtttgccagtgttggcttttatcattagttttgtttgaagttcttttcagtgtttcagaagaatgtaggtggtacaatacacagatgtgtgtatataattattatttataacatgatacaatggatattttatagcatctattgagtttcatggataacaaatttaattatatggatttttatattattttactttaatttgttatcacaatagctaaagcctctaaggtaatattaaagatatttgaggtattcaacattmtttcttcttcaatttaaacaacttattatcatttagtttgatgttttcagagttttctgatggtctttactacgctaaattatcttatataatcatttggttatcagtgtttatatatatatttt

SEQ ID NO: 311526 - DNA, 600 bp, Homo sapiens
tgaataagctacacttttgtttgagccgcttgatttgggaatctcattattaagtaagtgtagcatataccttaaaaatatattaatttatacttagaagtagagtgccgtcatcaagaaaactaaacaaaatggcatgattttgcattcaagctatagcaagcaaaaaacaaacattccaggctggaaagcaggtgcttccctgttattctatagtaaatcatttagtaatattctataacaacttgaaagacatatcatatagctattaagtctataattccaaagcaaatggtagaaagattcaaattattggtgcgcatatgtgtgttctgatgttttcatttttagcaagtaccagattagggaagagaaacaagcacacaagaaataattggaaaatagagttctcccaacaacaaacatttttgctaggtctgtaatgtaaattaacagagtaaggcagccaatgaaattagtttccaaattaagacaagaaaatatttttactraggatctccttaaatagctttctattaaatagtcttggttagacagtggggcagcccaatagcaaaattttgatttgagattaatgct

SEQ ID NO: 311527 - DNA, 609 bp, Homo sapiens
tcaatcttgatactatttaccattggagctggaaaattctttgttgcaggaggctatcctatgcattgcacgatacttaactcttggcttctacatactaaattctaagaacacctacctcagttgtgacaaccaaacatgcctctacacattgccaaatatctcctgggggacaagatttcttctgtgaaaagccactcttttttttttttttttttttttttttttgagacagaatttcattctttttgctcaggctggagtgcaatggcacaatctcggctcactgacacttctgcctcctgggttcaagggattctcctgcctcatccttctctcaggctcatgccaccacgcccggctaatttttgtatctttagtagagaaggagagttcatcatgttgggcaggctgggcttgaactcctgacctccrgtaatccatccgccttggcctcccaaagtgctgggattacaggcgtgagccactgcacccagccaaagccactcttttttaacatttaaccttttcccaggagttcttgcagatagccttccagaagtaagaatactgttcatattcttttcactaaagggttttctaacaata

SEQ ID NO: 311528 - DNA, 480 bp, Homo sapiens
gcatgtagcagacagtgaaagaaacaattaagaaaaaaacctaaaaatcatgaaatatgttcaatgctacatagaaaattacaattattactcactgacaaaaaaagtaaataaaagataaatctaaatattgccaaaacaatattttaagtacttttttatgtagtgtaactcttagtaatatttaaagtggcttttaaaataccataagttgattctggagattatgatgaagtatcaatagtgaaaatgttagagatttatagctatgaatttatatarttcaatatttaaaacttttaaatttattttcaacatttttgtttgtttctttgttggctggatatatttgctttctttaatttttcccatatctgattcctcattatctttgaaagtgagaaacagagcatgaatctgaagaagtcatacaaacgtgagaaagaagttgagaaagagattttcctgcgtaagaaaatg

SEQ ID NO: 311529 - DNA, 567 bp, Homo sapiens
ttaattaaagtatttaaaatatttgtgggtttatttcatagaaataaatatataggtaatatttaaaactaataaagatttttatggctatattatgaacttccacaaggcaataaatcatgctattattggacttttaagtctgtcctcaatattaagctctaaaatagcaaaaaaaaaaaaaaawaaaatagaaaagaaaaaaattccaaaaataagcaaaaaaatccccaaaactaagcaagattctcccataagatttcactattaatttacctatttttataacatgattcttaataaagcactgataatacaatattttattaataaaatttcataaaatatgttgtttaaacttaataagaatgatgagctttttttattggcattcttatttaactgcatatctcttttctttttaaccatagcgaagtttgcagaacagatgccaatattagaaatattagattactaaatgtcagaattattaaaagtgaatttctttttcattttaatgcatcttcataaggaaacttcagaataatttaattattttattaaaat

SEQ ID NO: 311530 - DNA, 567 bp, Homo sapiens
ttaattaaagtatttaaaatatttgtgggtttatttcatagaaataaatatataggtaatatttaaaactaataaagatttttatggctatattatgaacttccacaaggcaataaatcatgctattattggacttttaagtctgtcctcaatattaagctctaaaatagcaaaaaaaaaaaaaaaaaaaatagaaaagaaaaaaattccaaaaataagcaaaaaaatccccaaaactaagcaagattctcccataagatttcactattaatttacctatttttataacatgattcttaataaagcactgataatacaatattttattaataaaatttcataaaatatgttgtttaaacttaataagaatgatgarctttttttattggcattcttatttaactgcatatctcttttctttttaaccatagcgaagtttgcagaacagatgccaatattagaaatattagattactaaatgtcagaattattaaaagtgaatttctttttcattttaatgcatcttcataaggaaacttcagaataatttaattattttattaaaat

SEQ ID NO: 311531 - DNA, 581 bp, Homo sapiens
cattttaaataccaattgtaatacctagttaaactgaactaagaagttttctaatttcctatgttgtttaacagtttaaaaaacatgacactattccgcctttgaagatatgaaggaaaattgctgaaaaccatattactcagcaaacaaaagtggtatggcatatcaatcttatttcacctgtaatatgtcatcaaatattctaaaaaatatggttgttacgtgatttcctttcctgtatttcagttttgatacaagtgctcaaatttttcatttctttaataaatagaaggaaaagcatttgttcagatgcagttgcaattgtttgacactgmtaatttcttattagaacaataaacagattttatacataaatcccttaattgtataaccttctaaagtagatcattctcattttttaagatgtttttaaacaacaaaaaagttgccctttaggtaatgcaactttctcaaacaattgtcaaatatatttatgaaaaaaattattttattgtctttaatcatctaagggcaatgtttttgtagaatataacaagtcacaatgaatcaatacaccaaga

SEQ ID NO: 311532 - DNA, 581 bp, Homo sapiens
cattttaaataccaattgtaatacctagttaaactgaactaagaagttttctaatttcctatgttgtttaacagtttaaaaaacatgacactattccgcctttgaagatatgaaggaaaattgctgaaaaccatattactcagcaaacaaaagtggtatggcatatcaatcttatttcacctgtaatatgtcatcaaatattctaaaaaatatggttgttacgtgatttcctttcctgtatttcagttttgatacaagtgctcaaatttttcatttctttaataaatagaaggaaaagcatttgttcagatgcagttgcaattgtttgacactgctaatttcttattagaacaataaacagattttatacataaatcccttaattgtataacmttctaaagtagatcattctcattttttaagatgtttttaaacaacaaaaaagttgccctttaggtaatgcaactttctcaaacaattgtcaaatatatttatgaaaaaaattattttattgtctttaatcatctaagggcaatgtttttgtagaatataacaagtcacaatgaatcaatacaccaaga

SEQ ID NO: 311533 - DNA, 567 bp, Homo sapiens
ctactctctttacaatggcatggtaagttagagtaatggcctccaacactattatatcatttgtttaaacgaccctagacagacaattaatacagttctccataggtcaaaatctacagttcataatgaagcatagaaatctataaygccacccaagggcacgtctcaggagttcaaatctgttcactcaggcaactaaaaaggtctcataatcttttattgcactacttttaatatctgcactgaagcacaaaaggcttcctgcttccgtgcatttgattctcatactgtcaaatcatatgttgcttcactataatttatactttggaacatacatccatgtcacttatatatactaaagtgaatgtattaacaaatactattttaatgcttttctttataaacatttaaagttttagaaagtattaatatattctatgattataactcaaatgatataaaaataaaggataatttacttaaagaggcttataaacaaaatactatcaaatttaaacttaggaatttcatgttacaaaaatatcttcagcttagtactaaatactc

SEQ ID NO: 311534 - DNA, 617 bp, Homo sapiens
tctttttgacaatattattcattatggttacttctaattacttcatacatgctggaaattaagactgaaatcacacccaggagctgttgtagagtttttctatactctgagctcccctcagaactggccacattctgggtcatctgattcagaggaatgccaagtttacaagagtggtatattctatcttcagaatgcaaaaaagtccattgaatactgtgtctatttttaatttggagggttggaaactgcarcaattcttccttaattttagagaatatgtctaccatgctttcagtcaatgggctgctaaacagtttatctgtatagcataaccaaaatgtctgtggggttcatttcacactttcagcatgcacatgtcttactagggtaaccaggtcacctgctacttcctcctcatgtggttcatttagcataatgtgattaataaaattgaaccatcatgatgtctatgaaatatcaagaatatcaagatcctttaggcctataatttaacaaaaaaaagtgcaattaaaagctttgggaaaatatagtaaatatgtattgctgtctttcatacataaaatatttttattgtctttaatgacagatatgga

SEQ ID NO: 311535 - DNA, 673 bp, Homo sapiens
aatgtgattaataaaattgaaccatcatgatgtctatgaaatatcaagaatatcaagatcctttaggcctataatttaacaaaaaaaagtgcaattaaaagctttgggaaaatatagtaaatatgtattgctgtctttcatacataaaatatttttattgtctttaatgacagatatggagaaaaatgcatttccatgatgtatagccacataacgaatcccagaagctcttttaataatgtccatgaagatactactccttacataayggctggcattggaaatggttaatttcatagtacttatccattattccccaagacccatctgcttattttgaaaaccacaatggtgaatactatggagagcaccatcacataatgtttttgatgctagtgctaatctctgcaggtacattttggtacaatattgatattattttctatcttagatagtgtgtgtgtgtgtgtgttggggtgggaacgttatacttggttcttcctaccatatataccatttagtgatagcagctaactctatcgtttctaattatgcattgtaagacaatgaaggaaacagagagtgggtccacagaccattgtaaccacttgagatggataagggtcataattccatatatcgcttgaactccataaattcatatctagatgga

SEQ ID NO: 311536 - DNA, 673 bp, Homo sapiens
aatgtgattaataaaattgaaccatcatgatgtctatgaaatatcaagaatatcaagatcctttaggcctataatttaacaaaaaaaagtgcaattaaaagctttgggaaaatatagtaaatatgtattgctgtctttcatacataaaatatttttattgtctttaatgacagatatggagaaaaatgcatttccatgatgtatagccacataacgaatcccagaagctcttttaataatgtccatgaagatactactccttacataacggctggcattggaaatgrttaatttcatagtacttatccattattccccaagacccatctgcttattttgaaaaccacaatggtgaatactatggagagcaccatcacataatgtttttgatgctagtgctaatctctgcaggtacattttggtacaatattgatattattttctatcttagatagtgtgtgtgtgtgtgtgttggggtgggaacgttatacttggttcttcctaccatatataccatttagtgatagcagctaactctatcgtttctaattatgcattgtaagacaatgaaggaaacagagagtgggtccacagaccattgtaaccacttgagatggataagggtcataattccatatatcgcttgaactccataaattcatatctagatgga

SEQ ID NO: 311537 - DNA, 502 bp, Homo sapiens
tgctgtacgtgactctaccaaatatttcctacactttatttttcctcatggaaatggattacatattcacagtctatttcaggaaaatacactaccttaacttaaatatacctttgaattagatgcctgtattttgctttgactgaagttgcttacttttcaaacacttagttctccataaatattaaaattgataggccatattgaagcatgctgccacctgcacatcacaattcagaccaagtccatagataggtctastttattttaattgttaattaagcatgaaccaatttgaacaaattatacacaaacttctccacataattctatactggtaatacaaaacatgagaagagagaaaaatatattatttaatgtgggcttaatatatgtaggcatttctatttactttatgtaaaaccctgtatcttattcacacagtaatcacttgatattacaagtgctcttcttatgttcatgaagaaaatatggtgttaac

SEQ ID NO: 311538 - DNA, 522 bp, Homo sapiens
tgagaactcaatgactgtgacaagaacagcagcatgggggtaactgctcccatgattaaattacttcctgctggatccctcccatgtcacatggggattttgggaactacaactcaaggtgggatttgtgtggggccacagccaaaccatacatttggcaagttttatttgcagttaagtcctgctgtacgtgactctaccaaatatttcctacactttatttttcctcatggaaatggattacatattcacagtctatttcaggaaaatacactaccttaacttaaatatacctttgaattagatgcctgtattttgctttgactgaagttgcttacttttcaaacacttagttctccataaatattaaaattgataggccatattgaagcatgctgccacctgcacatcacaattcagaccaagtccatagataggtctactttattttaattgttaattaagcatgaaccaatttgaacaaattatacacaaacttcyccacataattctatactggta

SEQ ID NO: 311539 - DNA, 583 bp, Homo sapiens
gtatggataccaaaggaaaggaaattgtaatagtctaagtgaaagatgatggtacaaaaattcaaaaaaattacagaggccaaattgacaagacaaaatagaatacatgatttaggagtaaggaagaaggaggaatcacaaaatgatttattttctggctcaagcaagtagagcatgttacctttgctgagataaattatactctttaactatgagaagatttctgtggaaggtcaaaagttcacttctagatgtcttagtgttgaggactaggtgagacatttaagtgatgatgctgtgtagccaagtaaatatataattctgaacttcttaaaatgtcagctctaagkaaatataatttttatagtaaccagcaacatgtaatgcctttagaatgcacaaaacaggaagttaatagttcataacaggggcaaatgttatgcaaacactgtgcactgtctgtatcacttagtacaccagtacccatgagtctcctctcatcttcctgtggatgagctgtgcttaatcctgtgaatttggaaaaatgagcctgatctaaatgacagaaactagtccttcaagg

SEQ ID NO: 311540 - DNA, 532 bp, Homo sapiens
ttagaatgcacaaaacaggaagttaatagttcataacaggggcaaatgttatgcaaacactgtgcactgtctgtatcacttagtacaccagtacccatgagtctcctctcatcttcctgtggatgagctgtgcttaatcctgtgaatttggaaaaatgagcctgatctaaatgacagaaactagtccttcaaggactatatayttataagataattttaaatgtggcattgagtggtggaaagaatctcagtttagaccccgaaaccgaaaccacctatgtagggtattccacctattccaactatctacaactggtagatttgccgaaccatacgtgcagcagcctttcccattcagggaagtttgagacacttagcccagaggctcattgacaggcagaacagagagagggtatcatgaatcttcttggctggcagagaggagatgatgaaaaaaatgtccaccagtaagaaaacttccggcatatactatctgtgataaaattaatatatggcagcagatttttagagc

SEQ ID NO: 311541 - DNA, 596 bp, Homo sapiens
atgagaagtatgcatcacattctacaaaatgtgatcagttatgttgagaatgatcagttatgttgagcactttatttctgtgcaattaaaaggttatgcaaatatttctcaaagacccaaggatagtttttccatagtagggcactttgatatacatatatatagacagagagatatataggatatatatatatatatataaaatatatatatatataaaatatatatatagtttttccataatggggcactttgagatacatatatgtgtgtgtgtatatatctatatcatatgatatatatgttgatatatattatatatatgttgatatatatgatatatatrttttccataaggcactttgatagatatatgatatacatatttattaaagttatatatagatatataactttataatctacctaatttttgataaattactttagaaatttggaatacatttgtattctgcccacctcccagaaatcattgaagataactttttggagatctactattttaactttgatatgcccatataacttgaccttataacttaccattttctgacactggtcttgattacattgga

SEQ ID NO: 311542 - DNA, 540 bp, Homo sapiens
ttctactgtaatagaccaagccaacattctatcttacctcaactactacaagaactttctaatagctctctttgcttctacacttactatgtaaaatcatttctcattagcagccagcaatactttkgaaaatgtacattttattatattgtatcactaattaaaactatacaatggtttctcctttcactgagactaaaatttaaatttctaatctagctcaaagaaaactctaattaaaccagaattcttttggcaaggttctctgggaaacgaagttcctacaccaggctttcagcattctgggatttcatcctatacagtttagaggagaatattaaaaaaaagtaatgatacaagttaattaaaatatatgtgtatacacacacacacacacacacacatattgtgaagtatagtacagtaaagacaaaattataattactttaatctataataaaaagtataataagtaaccaataaatgcataaagaatgaatattggacaaatacatgacctacagctgtatttattttgtc

SEQ ID NO: 311543 - DNA, 540 bp, Homo sapiens
ttctactgtaatagaccaagccaacattctatcttacctcaactactacaagaactttctaatagctctctttgcttctacacttactatgtaaaatcatttctcattagcagccagcaatactttggaaaatgtacattttattatattgtatcactaattaaaactatacaatggtttctcctttcactgagactaaaatttaaatttctaatctagctcaaagaaaactctaattaaaccagaattcttttggcaaggttctctgggaaacgaagttcctacaccaggctttcagsattctgggatttcatcctatacagtttagaggagaatattaaaaaaaagtaatgatacaagttaattaaaatatatgtgtatacacacacacacacacacacacatattgtgaagtatagtacagtaaagacaaaattataattactttaatctataataaaaagtataataagtaaccaataaatgcataaagaatgaatattggacaaatacatgacctacagctgtatttattttgtc

SEQ ID NO: 311544 - DNA, 582 bp, Homo sapiens
tcataattacgacctggtaggcccagggaagcagtcatgtgcatctcagaactggaactaactggatctatgtttttgctctgttactctattctttcccatatatgtagtttctgatatggccatgaggacaacaaagaaggggtgtgtgtgtgtgtgtgtgtgtgtgtgtgtgtatttttaattttcaatagattgaatagaaaccaaagtaaaaacaaattagagtctgattatttataatagcaatgatcattttgtgcctatagattttgaatctcctgtatttgttaatatctcttcttactcagacacaagctgcccttgtgtttgacaacmagctatgtggttaatttatgaagtagaagttataatatttatcattttcatagatttttttcacatatgaaagttgataacaagcagctccaagaaagcagagctggcctgtgataggactcagtgtgagcaatgcagtctccattcagacagcaacacggttgctgctgacaagctgtaaataggtgttaaggtaatgaaaaagacaacatttccacttacacttttattggattctagccc

SEQ ID NO: 311545 - DNA, 515 bp, Homo sapiens
catttctaacacactcccttatgctgtctatagttaaatgctagcacagctaccttcgyattgcagtgctatggaaacagaaaaccagaagttctgccaaatatccaccagtgttttcttcagtcccttaaagtgtgaaggtatgcttttttttcattgtcacataaataaagaacagccactgttatagaaagaaatgatcaaaaaatctagtgaggtttaacaacatgaatctgatatataaatcgctgaaatctaacaaaattgaaaaattaattgctatttatttgaataagaattaagatgaaaatagaaatacacttaattgatttaactaaacatattagtcattaaaatcaccagaagcaaatattatttatattaactaattagcttagtattaaatgtgtcaatgatttctgaatctgtatgtgcaaaatgaaatgaagcactaatatatatcaaatgatttttcctagattttaaatcatcattttatattgcccacatgtgat

SEQ ID NO: 311546 - DNA, 515 bp, Homo sapiens
catttctaacacactcccttatgctgtctatagttaaatgctagcacagctaccttcgcattgcagtgctatggaaacagaaaaccagaagttctgccaaatatccaccagtgttttcttcagtcccttaaagtgtgraggtatgcttttttttcattgtcacataaataaagaacagccactgttatagaaagaaatgatcaaaaaatctagtgaggtttaacaacatgaatctgatatataaatcgctgaaatctaacaaaattgaaaaattaattgctatttatttgaataagaattaagatgaaaatagaaatacacttaattgatttaactaaacatattagtcattaaaatcaccagaagcaaatattatttatattaactaattagcttagtattaaatgtgtcaatgatttctgaatctgtatgtgcaaaatgaaatgaagcactaatatatatcaaatgatttttcctagattttaaatcatcattttatattgcccacatgtgat

SEQ ID NO: 311547 - DNA, 529 bp, Homo sapiens
aatattttacatattaaaaatatcaaatataatttttatgactcacaacataaattaaaattcaagtgttaaataatcaatggcagaaatatatttttctgttacgtatacaacaaaatctttatattgtctaaaaatacggagatagggtttttaactaagtatcctgtatctttgaagcatgattgaatctcaactgtttcctaaaaatatgtggtgtgatacaagatagattatgtaaaatttacaaattcagtattgttaatgattaaatgtttataaattaaggtgttggatcagaagcataaagttattgttcaaatttacttttaggcatcctaaatgaaaaagataaacttatcaactccacgtcagataaagccaaataagagcaaaccaaggtcagtcacttgacaaataatccaagagagaaaaaaggttaccatataaaatcgtactgattaataaactgataagcrgcacattgaattccttgcagaatggggcttgattcttacttagagcccac

SEQ ID NO: 311548 - DNA, 436 bp, Homo sapiens
taatttcagcaccctttcaaggaagaggcaagttataagttgctttgggccattctcttgtatgaagttgctgaaaaatccctagcaaatattgcttctccctcaatattctagagtaatatgaattatttttcatcaacttttatttttagttccagggtacatgttcaggatgcgcaggtttgttacacaggtacatgtgtgccatggtggtttgctgcacagatcaacccattgyctaggtagtaagcccaatatccattagctcttattcctgatgctctccttccctccatccccaccccaccgctgctgataggccccagtgtttgttgttccccacaacgtgtccatgtgttctaattgttcagctcccacttataaatgagaacatgctgtgtttggttttctgttccttgcgtaatttgctgaggat

SEQ ID NO: 311549 - DNA, 541 bp, Homo sapiens
gcaataaactttaagaactcataggaatatcaagtggtaattacaattatttttattattatttcacctctcccaccttcctgtagaacagaatgctttatgtaattattttattcatgtctcaaaaatgtcttactccattaaagatcaaaaatgtattacctttcccagtcaagttctaaacatagtattttacttgaaacatcaaattttgaagagcttaacaaatgtatattacccttgagataggtctttttctaacatgcaaaataaagagttaaagatagtgttctatattcaggctgttgcaaatcaatggggtgtaaagagagtaaaaggtgatttgacatattaagggatattatctgtaggttgctattggaacacagaaattgtttcaaatagcttgaaaatcayttcccttgtcttacataacaagatatacttattttcaatcttttaatattggatatattgatattagagacatgatataataaacgaagcagtgtttcatattatatcatattagagttttaac

SEQ ID NO: 311550 - DNA, 599 bp, Homo sapiens
aatacattttatcactttgtataaaccatccaatatgaacagtgggtggttatagaataatttctgactgggtcttttgtgataattcaatgggaaaagcaggtgatatgtgaggaatcacaagttcacattactggatggtaaaatatgagccttcaagsatccaaagtggagaaggaaaacataggcagaagccagttactagagctcctcatacagtttagaaattcagttttttctgtaagtgatagaaatattcagtacatactaaattgaattatatgattagtttgaatattagaaagttttctcttctggaagagggaagaatggatttaggcatagaaattgtttgggtattaatacctagaaactatgataaggatctacttgtgattgttcaaaaggtagatgcagagacatgtgactggggtggttatatttccaacaaagatatttgcttctcctttttacagtgtagacttgctctttagtcagaatggttagccagggactatatttcttgaactcccttagatcccagtaggactttggcatagtacaatgtaaattaatgttattttggccctgttgctgac

SEQ ID NO: 311551 - DNA, 657 bp, Homo sapiens
tggacaagcaaggtgtttttattgggaaagtttatgttttcttatattacataaattattttatcctaaataatacaggatttaaaatcagcagaacttaggggctgattcaatgtgaacatgtgttcttgtcatgggggagggagttactgtattagatattatttgcaggtgaaactgagggaaaaaaggtcctgattaatttttttaaagccctgagcttacttttctatcctgattcayttttaatttttgttgactggcctaggaataaaacattagtactacaattaataacggcattgactttcatctttattttttagaaatacttttttaaaatataatgtcaagtttctttttctagttgattatacagcttgaagcatactgatgttaagtccaaaactatgaaaggtctgtttgagatttttaccttacttaaaagccagcaagttagcttgcctcggtatcatatgaatacacttacaaagacacaagaactcatgtcagagacaaagatggtttattacttattgtaaaagcagaaactggatccagtcattgccagttccccattcgccaaactccatgacagatgagggtcacctgtttacgtgtatatatagtggattcgcatcactgaaaaagaacccc

SEQ ID NO: 311552 - DNA, 657 bp, Homo sapiens
tggacaagcaaggtgtttttattgggaaagtttatgttttcttatattacataaattattttatcctaaataatacaggatttaaaatcagcagaacttaggggctgattcaatgtgaacatgtgttcttgtcatgggggagggagttactgtattagatattatttgcaggtgaaactgagggaaaaaaggtcctgattaatttttttaaagccctgagcttacttttctatcctgattcatttttaatttttgttgactggcctaggaataaaamattagtactacaattaataacggcattgactttcatctttattttttagaaatacttttttaaaatataatgtcaagtttctttttctagttgattatacagcttgaagcatactgatgttaagtccaaaactatgaaaggtctgtttgagatttttaccttacttaaaagccagcaagttagcttgcctcggtatcatatgaatacacttacaaagacacaagaactcatgtcagagacaaagatggtttattacttattgtaaaagcagaaactggatccagtcattgccagttccccattcgccaaactccatgacagatgagggtcacctgtttacgtgtatatatagtggattcgcatcactgaaaaagaacccc

SEQ ID NO: 311553 - DNA, 657 bp, Homo sapiens
tggacaagcaaggtgtttttattgggaaagtttatgttttcttatattacataaattattttatcctaaataatacaggatttaaaatcagcagaacttaggggctgattcaatgtgaacatgtgttcttgtcatgggggagggagttactgtattagatattatttgcaggtgaaactgagggaaaaaaggtcctgattaatttttttaaagccctgagcttacttttctatcctgattcatttttaatttttgttgactggcctaggaataaaacattagtactacaattaataacggcattgwctttcatctttattttttagaaatacttttttaaaatataatgtcaagtttctttttctagttgattatacagcttgaagcatactgatgttaagtccaaaactatgaaaggtctgtttgagatttttaccttacttaaaagccagcaagttagcttgcctcggtatcatatgaatacacttacaaagacacaagaactcatgtcagagacaaagatggtttattacttattgtaaaagcagaaactggatccagtcattgccagttccccattcgccaaactccatgacagatgagggtcacctgtttacgtgtatatatagtggattcgcatcactgaaaaagaacccc

SEQ ID NO: 311554 - DNA, 657 bp, Homo sapiens
tggacaagcaaggtgtttttattgggaaagtttatgttttcttatattacataaattattttatcctaaataatacaggatttaaaatcagcagaacttaggggctgattcaatgtgaacatgtgttcttgtcatgggggagggagttactgtattagatattatttgcaggtgaaactgagggaaaaaaggtcctgattaatttttttaaagccctgagcttacttttctatcctgattcatttttaatttttgttgactggcctaggaataaaacattagtactacaattaataacggcattgactttcatctttattttttagaaatacttttttaaaatataatgtcaagtttctttttctagttgattatacagcttgaagcatactgatgttaagtccaaaactatgaaaggtctgtttgagatttttaccttacttaaaagccagcaagttagcttgcctcggtatcatatgaatacacttacaaagacacaagaactcatgtcagagacaaagatggtttattacttattgtaawagcagaaactggatccagtcattgccagttccccattcgccaaactccatgacagatgagggtcacctgtttacgtgtatatatagtggattcgcatcactgaaaaagaacccc

SEQ ID NO: 311555 - DNA, 574 bp, Homo sapiens
gcactataaataatttccaaaataaaatctttaaaatttccaaaacaaaaacaaaaacttaaaaactctgaattgattatgtgttagacttaaatcttaatggccctatggcaagtacctttattttccctcaatatttcagccatatgtacaaactgtagacttgtagcatttcttactcactgacaagattctatatagcattgcttctgaaaaaaaatcttattttacaaaaaatgaactgcagctattgacttatgatcacagaattagcagtggtagcaagttcatcatcatgctgaagtagactctctgatagaataatagatgatgttttaaagatttattgaattgrcagttaaattactctaaagtgtccacaaaattagcaccacaattccatcattgacatggggattgtgatatttatttgaatatataaatgaccagtgtacccaaaatgatgagaaagaaccaagctgaaagactattcccacacataaagacttttaaagctacatcaattaaaacaacaggatgctggttagaccattggaacagaagcaaatacaca

SEQ ID NO: 311556 - DNA, 631 bp, Homo sapiens
gacaagccctacattcaatcagattccttggctcctaaaattcaatcagatacaagggacaaaagaaaatgtaccaaataataacaaaactttaggtataattgagctcagtacttcactttacatatgagaaagctacaacccccaaaaaaataaatcagttctctcagggtcacatcttgagttaatcatggagttatgattaaaagtcagggccatctctccaaagtttatcaagactttctttgaaatagatctttctattacttctgccaaatctgtatctcaggccttaacttcgtagtaggcagctttataatggacccattggttcatgattgcattctattcctcttcagactgagcagarcttactaatttctaacaagtagaatatggcagatgtgatgggatttcacctccaagattagataacaaaaatactaaggcttccatcttagacatcttcttttttgtatggtttactctgggagaggccagctgccatgtcatgatgtatccctataaagaggcctgcatgaataagcttggaagtggattctccacaaattgtgccttcagatgagactgccgccctggccaacagttttactgcaacctcataagaaac

SEQ ID NO: 311557 - DNA, 624 bp, Homo sapiens
taaataataatatttatatttatggacatataaaatgatttattcctacttcctaagaaataagtacaaattaaataacagtggaataaaatcataaggcaaaataccttacatattaaaacaaggaaagaacacttttatatacaatctatttttaggtagttgctatctgcaaacatactaactccaaaaagtgtcctggtatctttgaagcaaaaaggcatttcacaatatctaaatatctccaataagactgaattatagatttsgaagaaactttaaaaatcaatggttgtttcttcacttttcaagattaggaacaccaggccaaacggctgcatctatctatctatctatctatctatctatctatctatctatctatctatctgtcatctgtgattttatacaaaaacacaaggccttcgggaataactgatcaaaaaaattcaattgtacccaatccaatcattttacatgtcagtaaaataagagttgttaaataattttcctaaagctcaagcacatagtagcaaactttaagacagaaggcatgaatcctaactgctggttcaggtctcattgtagaataatatactgaatttgatcagacagaaagaacaa

SEQ ID NO: 311558 - DNA, 629 bp, Homo sapiens
atgtcctcaaaaggcagagtaaaatacccacacatacacgaatcctttgaacttcatcaagggggttaacttttgcttctctgtaatgccagtattacctaaccttattatgactagcttgaatcatgtatgagtaaaacttcagttatctaggatcttgtttgggtgggtgtggggtgaattctttgggtagaaaaaaatttctgaaaagttggggcaaatatccctcctattcaagtgtccactgcagatgtttgcatttgaatagtakaactatttccaaagttctttctgttttcctcagagctttaggtatttcttctggatgtcagtttgtcaatactctgcttttgcttcttctgatttctctttgttagaactctgtataggaaagaaagaataagtaggtcttgattgagggcctctccatgaagttgagttgaattttagtgcagtgtgcctttttttttcacaaacatgttttctgattcaggcttgtaagttacattggtttgatttccagatgttggagtctcagataagggactattactgtggaacatgaagcacatttttaagacctcagtactgaagattttctgcttgaaatcttagacaaagtgagaaat

SEQ ID NO: 311559 - DNA, 629 bp, Homo sapiens
atgtcctcaaaaggcagagtaaaatacccacacatacacgaatcctttgaacttcatcaagggggttaacttttgcttctctgtaatgccagtattacctaaccttattatgactagcttgaatcatgtatgagtaaaacttcagttatctaggatcttgtttgggtgggtgtggggtgaattctttgggtagaaaaaaatttctgaaaagttggggcaaatatccctcctattcaagtgtccactgcagatgtttgcatttgaatagtataactatttccaaagttctttctgttttcctcagagctttaggtatttcttctggatgtcagtttgtcaatactctgcttttgcttcttctgatttctctttgttagaactctgtataggaaaraaagaataagtaggtcttgattgagggcctctccatgaagttgagttgaattttagtgcagtgtgcctttttttttcacaaacatgttttctgattcaggcttgtaagttacattggtttgatttccagatgttggagtctcagataagggactattactgtggaacatgaagcacatttttaagacctcagtactgaagattttctgcttgaaatcttagacaaagtgagaaat

SEQ ID NO: 311560 - DNA, 580 bp, Homo sapiens
tgaatgtcatttttattttattttgcattttggagatcttatatatgtgattgctttacaaagtttgatttaaagcaaaaattaatttaacttttaatttttaattaaagcaatctagtactcaaactcaaaacawttccatctaattctcaagacctagagtgagttgcaataatttctggtgcattgctttttatgtcgctttcgaacgatatggaactataaagtaatgaagctatgaacatatatttgccggcatttatttttatccaaaataaattacactttttgtctttccttagtgctttgctcctaaataatcacattgctcaaaacaatatttctagtagctccttttaaaagatcccttttagatcaagtttcttaattacaaaagaaattcagtcgtattactttttactgatagaacagtatcatttgatataataccttttcctgcccttcttgcagttttcttttctattttcttcaccctcctgctcgcctttttctttctggtgttttccctcacacctggttgccttctcattagcaggctaagtggctctatgtaagcctg

SEQ ID NO: 311561 - DNA, 605 bp, Homo sapiens
aaaaggcagatttatcagattgtcaggtcttccagtttatgaaacagtgtctaataaagtggtatagtcatgatttactaaggtatttaaattcattattatatcaactatattttacacctttgactagtccttttctcacattcaggcttgctgtattgtagaaatctattttcaccaattaaataaccttaattctgtcttgtaaaaatttaatttgagaattatgcttccaccttccaaagaatgtaagtttggttaatgtatgttaagattatacatttattctggcactactactaggatactcatttgaatatgccatgttttttcccacaactctgctttgcaataataaagaatatttattacgtgatctcattgaagtattcagggaagaataattacagaatgttaaaaaagcacactgtgatttttttcttaaataaagacaaagattaacaaatgtctcaatatacattcaaaaattatgctccttattatttcaatatatgtgccttaaacayaatcaaaataatgcatcaactacaaaggaaaataatcatattatgatcgttttgattaaaacatttttatgtgcacat

SEQ ID NO: 311562 - DNA, 602 bp, Homo sapiens
aaatcattgaacaatgtctcactgaaactgcaatcctgaaagtgttaatgttctttgtgatatgttcaagaattaagaataagaaatagttgaaagaaatatgattaaagagtattttactagaaagcagattttgaaactttaaaaagaaaaaaatgatgatttttactttgaatttgggtgaattgaaaaaaaaatcaattttagtagacccttcattaaatatcatggagtgagaatgatgagccttcgtaaatgtattgacaataaatgacaccacattccaacctgaagattgattattcttttttcactgagatcagttatctttttttttttcttatgtctattaatatttaagacctggcaagaattttgtatttaaaatcttcagccagacctgattagcaagtttaattcatgttggtcctatctagcaaacttaacctgatgtattacttggtaaagtaattacttcttttttgcctttcctgtcttccctaggttttgctgaccattccatccttttggcttcttctstttttttatcctcccacttcacttatggaacctctggtttacaatgtctttcactctctctc

SEQ ID NO: 311563 - DNA, 622 bp, Homo sapiens
atgcatatctatagtaattctataatttgagatttatggcaataaaaattttgttaagagttactgaaacattcctatatcataagaactgtccattaagcctaatggaataccaaactgtcttctggcaaacatcacttatttcagtttattcaaaccccctgtagtcctcagataaaaatacaaaatgtaaaattatatgctaartattagtacagactatgagatacagtattttttaaaatatttagagataaaatagaatttggaatcacagattttttaccctaactttgccaaattcttatgttgagaagctttttttgtattaaatgcaaaacatgttttccacgtggcctaatggtaagctttctaaataattaacattactctgcgtagtggtcagccacaatcagaaaaagaacgcattttcttctgtataattcaacatctggttgtcactatactgctaaacctaccagaaatactctttgccagatgtgacttatagttacattatactttattcagttcagcaaaatatatttgaaaagaagtcaaagatatcaccaggaataaacaaacttcaaacattttatacattcactcactgaagtgataa

SEQ ID NO: 311564 - DNA, 622 bp, Homo sapiens
atgcatatctatagtaattctataatttgagatttatggcaataaaaattttgttaagagttactgaaacattcctatatcataagaactgtccattaagcctaatggaataccaaactgtcttctggcaaacatcacttatttcagtttattcaaaccccctgtagtcctcagataaaaatacaaaatgtaaaattatatgctaaatattagtacagactatgagatacagtattttttwaaatatttagagataaaatagaatttggaatcacagattttttaccctaactttgccaaattcttatgttgagaagctttttttgtattaaatgcaaaacatgttttccacgtggcctaatggtaagctttctaaataattaacattactctgcgtagtggtcagccacaatcagaaaaagaacgcattttcttctgtataattcaacatctggttgtcactatactgctaaacctaccagaaatactctttgccagatgtgacttatagttacattatactttattcagttcagcaaaatatatttgaaaagaagtcaaagatatcaccaggaataaacaaacttcaaacattttatacattcactcactgaagtgataa

SEQ ID NO: 311565 - DNA, 622 bp, Homo sapiens
atgcatatctatagtaattctataatttgagatttatggcaataaaaattttgttaagagttactgaaacattcctatatcataagaactgtccattaagcctaatggaataccaaactgtcttctggcaaacatcacttatttcagtttattcaaaccccctgtagtcctcagataaaaatacaaaatgtaaaattatatgctaaatattagtacagactatgagatacagtattttttaaaatatttagagataaaatagaatttggaatcacagattttttaccctaactttgccaaattcttatgttgagaagctttttttgtattaaatgcaaaacatgttttccacgtggcctaatggtaagctttctaaataattaacattactctgcgtagtggtcagccacaatcagaaaaagaacgcattttcttctgtataattcaacatctggttgtcactrtactgctaaacctaccagaaatactctttgccagatgtgacttatagttacattatactttattcagttcagcaaaatatatttgaaaagaagtcaaagatatcaccaggaataaacaaacttcaaacattttatacattcactcactgaagtgataa

SEQ ID NO: 311566 - DNA, 580 bp, Homo sapiens
ctcgctccttttcagtgctctgtgcttcaaagtgcttcagcgccttctccatggtcatgggagacccgtccaccatcacccgtgttttcaccggggcccatctgagcaggaaggctgccacaaggtamcacaacccatgctgagaccacatagctgacccaggaccatcaggggctgaggactcactcacctcggaatcctgttgactacgccaattatcaggttccaacctgagctggggtccaaggggagtgggtgaatggatggcaggtagttgaaacaacactcggggggccgtaggcaggtgggacatggctttattatgcaccacccctcacagtgtcagtgatacatttatgcacttcatagacaatagtggctcagagccaggtggtgagcccactcataacatggttacataactgtggttatataatgcaagggattgtgcacctgtgctccaaccctgctgtgtcatgctatgccagatgtttaccttggcctactcttgactgctgcacagccattttccttacagcgacagaagataacattaaagggaatgttaaggaaagaccat

SEQ ID NO: 311567 - DNA, 580 bp, Homo sapiens
ctcgctccttttcagtgctctgtgcttcaaagtgcttcagcgccttctccatggtcatgggagacccgtccaccatcacccgtgttttcaccggggcccatctgagcaggaaggctgccacaaggtaacacaacccatgctgagaccacatagctgacccaggaccatcaggggctgaggactcactcacctcrgaatcctgttgactacgccaattatcaggttccaacctgagctggggtccaaggggagtgggtgaatggatggcaggtagttgaaacaacactcggggggccgtaggcaggtgggacatggctttattatgcaccacccctcacagtgtcagtgatacatttatgcacttcatagacaatagtggctcagagccaggtggtgagcccactcataacatggttacataactgtggttatataatgcaagggattgtgcacctgtgctccaaccctgctgtgtcatgctatgccagatgtttaccttggcctactcttgactgctgcacagccattttccttacagcgacagaagataacattaaagggaatgttaaggaaagaccat

SEQ ID NO: 311568 - DNA, 560 bp, Homo sapiens
tatcctaactgaatgctttatcttctaaaacatagcaaaatctgtactgcatttcaaactctacatygacaatgagatacaaagataatcaaaatattaacctgtgctttggaaacaaacaggtaatgttgcctttcatcataactgaagcactttataaattaatagaaaaatatcctatatggctacatatttctaaatgtaaatgggattggaagagaatcaaccaaccttgtcaaatttatgagcatgagtgcaatagtctagctgatgagatggctttgcaggtatgaaggatatgtcattcagaaggacacattgattcaagttagttcttttctgtttgtttgcatttaattatgtcctaaaaggattggtatagagaataaaatatacatgaactagcacttctgatttataaaagtatatcaatgacatttcaatttaaagtaccaccactgtacagagagtaagacactgtacatgcaacttgcattaacaatattgaattcaaatgaaaatttatttctatttttcattcttcttttagccaatatatt

SEQ ID NO: 311569 - DNA, 560 bp, Homo sapiens
tatcctaactgaatgctttatcttctaaaacatagcaaaatctgtactgcatttcaaactctacatcgacaatgagatacaaagataatcaaaatattaacctgtgctttggaaacaaacaggtaatgttgcctttcatcataactgaagcactttataaattaatagaaaaatatcctatatggctacatatttctaaatgtaaatgggattggaagagaatcaaccaaccttgtcaaatttatgagcatgagtgcaatagtctagctgatgagatggctttgcaggtatgaaggatatgtcattcagaaggacacattgattcaagttagttcttttctgtttgtttgcatttaattatgtcctaaaaggattggtatagagaataaaatatacatgaactagcacttctgatttataaaagtatatcaatgacatttcaatttaaagtacmaccactgtacagagagtaagacactgtacatgcaacttgcattaacaatattgaattcaaatgaaaatttatttctatttttcattcttcttttagccaatatatt

SEQ ID NO: 311570 - DNA, 560 bp, Homo sapiens
tatcctaactgaatgctttatcttctaaaacatagcaaaatctgtactgcatttcaaactctacatcgacaatgagatacaaagataatcaaaatattaacctgtgctttggaaacaaacaggtaatgttgcctttcatcataactgaagcactttataaattaatagaaaaatatcctatatggctacatatttctaaatgtaaatgggattggaagagaatcaaccaaccttgtcaaatttatgagcatgagtgcaatagtctagctgatgagatggctttgcaggtatgaaggatatgtcattcagaaggacacattgattcaagttagttcttttctgtttgtttgcatttaattatgtcctaaaaggattggtatagagaataaaatatacatgaactagcacttctgatttataaaagtatatcaatgacatttcaatttaaagtaccaccactgtacagagagtaagacactgtacatgcaacttgcattaacaatattgaatkcaaatgaaaatttatttctatttttcattcttcttttagccaatatatt

SEQ ID NO: 311571 - DNA, 579 bp, Homo sapiens
tatttccaagtataatgggaattcaaattaaaaaccttttgaatgcagatttaatatccctatccatgtttacaaaaccatttaaaaacagtgtttgcctatgtaatacagagttccttttgcaggctatttttgtgaataaactatagtcttgcagatgtttgttagcattacatttattgtaaaacattaagagtctcttgttgrgcaagttatttctaaagaggttataaaacattgttcatatagaatacaggaagtatctcaactagatccaaaaaaatcagtgttaggcaaatattaggaaaaaactgaagatttatttcacaagcttcttaacttacattttggacattcacatttgcatatgaaaaatatacatttatgtcagctgaaaacatgcatatggatttataccagctggtaattattattctattctcaaggagctcatagtctagtagggaaaggtcatagttgttttgcgaagactgacttgtaaataaattgttacagaaatgtgatagttccttaagagatatgtgaacaaggagcattgctgacatatacgtgagcaat

SEQ ID NO: 311572 - DNA, 579 bp, Homo sapiens
tatttccaagtataatgggaattcaaattaaaaaccttttgaatgcagatttaatatccctatccatgtttacaaaaccatttaaaaacagtgtttgcctatgtaatacagagttccttttgcaggctatttttgtgaataaactatagtcttgcagatgtttgttagcattacatttattgtaaaacattaagagtctcttgttgggcaagttatttctaaagaggttataaaacattgttcatatagaatacaggaagtatctcaactagatccaaaaaaatcagtgttaggcaaatattaggaaaaaactgaagatttatttcacaagcttcttaacttacattttggacattcacatttgcatatgaaaaatatacatttatgtcagctgaaaacatgcatatggatttataccagctggtaattattattctattctcaagragctcatagtctagtagggaaaggtcatagttgttttgcgaagactgacttgtaaataaattgttacagaaatgtgatagttccttaagagatatgtgaacaaggagcattgctgacatatacgtgagcaat

SEQ ID NO: 311573 - DNA, 635 bp, Homo sapiens
ttctactaggtattttggtcttataatttcagggatttttaaaactatagtgaaattaacagttttctttaatgtagaggttgattaaacaaytaaaggaagttaaaaaataattttctaaaattactttatagcctattaaaatcataaatgtagtctcttcagagccacctttggttgagtgactgtataccacaccgtccctgagcaagcctgcagacaaatccatttgggttttcagcccttactattctaacgtggcttcaataaattggttactgatcaactgtaaaacaaaactcaaaataagtcaatcattattatttcaaattagtagaatatcacattatagtttccaatagacatcatgcctagaaaaacaccattatatcattttctttgtaaggctctttgcattttctaatatgcttgttaaaggtggtggagaaactcaggttgccattgactaatattaagtgtgtccagtgaaggtggtgaatatgaacacgttacctgtcatttctagagtccttggttaactaaaaaacagggaaccaaaacaactttacctaaagaatgagatgttcctattatctaaataatagcttcctgtgtggaaatactttaagtaacta

SEQ ID NO: 311574 - DNA, 442 bp, Homo sapiens
gctagaagaatagaaaaggctagaagtggattagacaagtctgaagtggaaatgaaggggagaatacattattgctcctaactatacactttagaattacacacatttagttgcttttccacwtacaaaagaaagtgaaagagggagaaggagagcaagtgagagatatatacacacatatgtccagggcagagctcatatttacagtcatgcttaatgatgaagatacactctcagaaataatgtcattatatgattttgtcattgtgccgacaccacatacctggtatggcctactaaacatctaggctgtatgctatatacagcctattgctcccaggctataaacctgtacagcatgttactgtgctgaatactgtgggcaactatggcacactgctaagtatttgtgtatctaaacatgtaaacatagagaagttaa

SEQ ID NO: 311575 - DNA, 442 bp, Homo sapiens
gctagaagaatagaaaaggctagaagtggattagacaagtctgaagtggaaatgaaggggagaatacattattgctcctaactatacactttagaattacacacatttagttgcttttccacttacaaaagaaagtgaaagagggagaaggagagcaagtgagagatatatacacacatatgtccagggcagagctcatatttacagtcatgcttaatgatgaagatacactctcagaaataatgtcattakatgattttgtcattgtgccgacaccacatacctggtatggcctactaaacatctaggctgtatgctatatacagcctattgctcccaggctataaacctgtacagcatgttactgtgctgaatactgtgggcaactatggcacactgctaagtatttgtgtatctaaacatgtaaacatagagaagttaa

SEQ ID NO: 311576 - DNA, 442 bp, Homo sapiens
gctagaagaatagaaaaggctagaagtggattagacaagtctgaagtggaaatgaaggggagaatacattattgctcctaactatacactttagaattacacacatttagttgcttttccacttacaaaagaaagtgaaagagggagaaggagagcaagtgagagatatatacacacatatgtccagggcagagctcatatttacagtcatgcttaatgatgaagatacactctcagaaataatgtcattatatgattttgtcattgtgcygacaccacatacctggtatggcctactaaacatctaggctgtatgctatatacagcctattgctcccaggctataaacctgtacagcatgttactgtgctgaatactgtgggcaactatggcacactgctaagtatttgtgtatctaaacatgtaaacatagagaagttaa

SEQ ID NO: 311577 - DNA, 442 bp, Homo sapiens
gctagaagaatagaaaaggctagaagtggattagacaagtctgaagtggaaatgaaggggagaatacattattgctcctaactatacactttagaattacacacatttagttgcttttccacttacaaaagaaagtgaaagagggagaaggagagcaagtgagagatatatacacacatatgtccagggcagagctcatatttacagtcatgcttaatgatgaagatacactctcagaaataatgtcattatatgattttgtcattgtgccgacaccacatacctggtatggcctactaaacatctaggctgtatgctatatacagcctattgctcccaggctataaacctgtacagcatgttactgtgctgaatactgtgggcaactatggcayactgctaagtatttgtgtatctaaacatgtaaacatagagaagttaa

SEQ ID NO: 311578 - DNA, 543 bp, Homo sapiens
atgtgactcaactgagagctcaatgaaagtctctctgagaaagtaatgctgaaattaagatctaaaggatctacaatgaaggagagacgatgatttatgtacaaatacagcaaccacactttggtattactataatagcaactgcctctttaactaacctgctccattacctcattgccattacccacttatctctaagtcaacactatytctctcaaggcctatgacactcctattacatctttttctttgcactttagaacccaagttaaacagtgaacacaccttcctgtgacttccttttgttaaaaattatgtattttgtctaattccatgaaataatctgagttctaacatcataaatggaatgttcagttgacttttattttagctagccctcaggttgatatagcagagtgtgggtttcttttatattaggcaagcttgagatcaagtcctggctctgttgctaacttcacaattctttgcggatctatcatcctcctcctagtaccagtgccatcattcgtaaatgaagataag

SEQ ID NO: 311579 - DNA, 564 bp, Homo sapiens
aaagtataaattattaaggtgcataatcatatcttaactttgaataacccagatattaccctaagtatttatcagrcattaagaccaactcattatacttgctctctctcccaaatcctcctgctttctattctgaattggtagcactatcacccaacccagatgttcaaggaaaacatctaagtcatctttaaattttgcttaacagtactattttcttctactcctcataactgccttcttcctcttattacctctcccagtccaagcatgaccttctcttctagatgatcagaaatagttcctaaatgatctccctgatcagcttttcaccctccccaatctaacaattacagtgtgtcacaatatgattgtcacctctttacttgcaataatcgaatggctcccttttacatattccagcctattttcaaactaacgtctagtcattttctcctacgtatctgattctctagccacattggctgcactcaccttcctccagcaaaccatagtcattcctccaaaagttaacattatctcctttacttgtcacagatttct

SEQ ID NO: 311580 - DNA, 564 bp, Homo sapiens
aaagtataaattattaaggtgcataatcatatcttaactttgaataacccagatattaccctaagtatttatcaggcattaagaccaactcattatacttgctctctctcccaaatcctcctgctttctattctgaattggtagcactatcacccaacccagatgttcaaggaaaacatctaagtcatctttaaattttgcttaacagtactattttcttctactcctcataactgccttcttcctcttattacctctcccagtccaagcatgaccttctcttctagatgatcagaaatagttcctaaatgatctccctgatcagcttttcaccctccccaatctaacaattacagtgtgtcacaatatgattgtcacctctttacttgcaataatcgaatggctcccttttacatattccagcctattttcaaactaacgtctagtcattttctcctacgtatctgattctctagccacattggctgcactcaccttcctccagcaaaccatagtcattcctccaaaagttaacawtatctcctttacttgtcacagatttct

SEQ ID NO: 311581 - DNA, 589 bp, Homo sapiens
taaccaagaataatatgaagtacatattagtagaaagaaatattcccagagtgttttcaggcagaggaactggtcaggcttttggagatacagatcagagatcagaagaaagaaaaagataataaataccaataatttaggaattatctaagaggagattaaaattgatgccatgagaatgggtcagtttgacaagagtaagaaaggataaatagraataacaggaaaaaaggaattttggagagtaagtctataatctctcagagacctgtattcagctattggttctgccacttcatagttacaaaatgttgggcaaataatttaacctctaagtcctagaaatcaaatggcatatttaaaccaaagggtacatgacttcatatatattccaatatcaaacagttaattgtaattctgttattattgttggtgtcatggtcgttatcatcattaccaccattactactaggaaaaatgaaaaggaagagaactagaagaattgggataagatagtacaatacaattcatgacaggataaatgaatagaacatcatggaccaacaacactgtgatgtatcatgtgcat

SEQ ID NO: 311582 - DNA, 589 bp, Homo sapiens
taaccaagaataatatgaagtacatattagtagaaagaaatattcccagagtgttttcaggcagaggaactggtcaggcttttggagatacagatcagagatcagaagaaagaaaaagataataaataccaataatttaggaattatctaagaggagattaaaattgatgccatgagaatgggtcagtttgacaagagtaagaaaggataaataggaataacaggaaaaaaggaattttggagagtaagtctataatctctcagagacctgtattcagctattggttctgccacttcrtagttacaaaatgttgggcaaataatttaacctctaagtcctagaaatcaaatggcatatttaaaccaaagggtacatgacttcatatatattccaatatcaaacagttaattgtaattctgttattattgttggtgtcatggtcgttatcatcattaccaccattactactaggaaaaatgaaaaggaagagaactagaagaattgggataagatagtacaatacaattcatgacaggataaatgaatagaacatcatggaccaacaacactgtgatgtatcatgtgcat

SEQ ID NO: 311583 - DNA, 528 bp, Homo sapiens
tacaattaataaccagtaaggaaatatttattgagttaatactatgagccacagactatattaagaactctggcaaatatatgataaatagagcacaggtccttacctcaaggattttataaccaaataaggaagaaacatacacataaccataattaaagagaatgtgataagttctctagtacttttaagcaccaggtgttgccatctacatttatactaatttccrtaaactgccaaaaatacacagatgaatatgtttccaatattcttgcttctccatatacctataagagtgaggaagttttcatcagctcaagtcacttaatcacctatcaaatctcttgatattttcaaaattaatgcagcactatagagagctggtagtatcatatttgtagtagaatcagatcatctaagctggggtgcagggaaacttaaataatgaattaacatattatcccaccccctcagaactggaataacaacaaaagtataaaattccaaaaggcaaaaatctttctccac

SEQ ID NO: 311584 - DNA, 528 bp, Homo sapiens
tacaattaataaccagtaaggaaatatttattgagttaatactatgagccacagactatattaagaactctggcaaatatatgataaatagagcacaggtccttacctcaaggattttataaccaaataaggaagaaacatacacataaccataattaaagagaatgtgataagttctctagtacttttaagcaccaggtgttgccatctacatttatactaatttccgtaaactgccaaaaatacacagatgaatatgtttccaatattcttgcttctccatatacctataagagtgaggaagttttcatcagctcaagtcacttaatcacctatcaaatctcttgatattttcaaaattaatgcrgcactatagagagctggtagtatcatatttgtagtagaatcagatcatctaagctggggtgcagggaaacttaaataatgaattaacatattatcccaccccctcagaactggaataacaacaaaagtataaaattccaaaaggcaaaaatctttctccac

SEQ ID NO: 311585 - DNA, 590 bp, Homo sapiens
gttagaatgacaacaaaagagaggaaagggcatggtggtgagagaacgaaaccaagaaaartggagtttgaacacagtggaggcaccaggaactgtatgatatgatgctgttaaagtgggaaggcccagtcaatgagagggttttaagttatgcttagttttaaagctcttaccttattgtctcctcgctatattgctctataactcaaagtctacgccacaatcttgttaatggaaaaaaagtgaatacatttcatagcattaaaaacaaaaaccaaaagcaagacttgaaattttcaattaaaaataatattcttttaatttacatcaacatcttacaaaaattcccaatggaggattctctgaactacaacaaaaacctaaggggcattcacagttaatctaaagtagacttctatccatgagtcacctaaacatttctaacttgtttaaattgcatatatgcaacaattatatataaatttatggatatgtacatatgtgtatatatgtcaattaaagatgggagaaatacaataataggtttcacacaagtaccttttcagtaatactatgttgctatagctgtt

SEQ ID NO: 311586 - DNA, 607 bp, Homo sapiens
gaccaacttgtttcataaagtactggtatgcctgatgtgggcaagaaattacacttcagactaggttcctcattaattttctccaaaacataactgttacaataaaataaatagtaagataaacttttgtagtcattcaaataagaaaagaagtmatcaaataatctctctttgctaacaacatgattctatatctagaaaaccctaaaggcaggagaaagttcctagacatgataaacaacttcagtaaagtttcagggtatacaatcagcatacaaaaatcagtagcattttttgtttgttttttgacaagagtctcactctgtcaccaggctggagagtgcagtggcacgtgatctcggctcactgtaacctccgcttcctgggttcaagtgattctcctactgcaacgtcccgagtagttgagataaggtgatgaggtggcacccgccaccatgtccggctaatttttttgtatctttagtagagagagggtttcaccaagttggcaagggtggtcttgaactccctacctcaagtgatcagcccaccttgccctcccacagtgttgggattacaggcatgagctacctatatataccaataa

SEQ ID NO: 311587 - DNA, 607 bp, Homo sapiens
gaccaacttgtttcataaagtactggtatgcctgatgtgggcaagaaattacacttcagactaggttcctcattaattttctccaaaacataactgttacaataaaataaatagtaagataaacttttgtagtcattcaaataagaaaagaagtaatcaaataatctctctttgctaacaacatgattctatatctagaaaaccctaaaggcaggagaaagttcctagacatgataaacaacttcagtaaagtttcagggtatacaatcagcatacaaaaatcagtagcattttttgtttgttttttgacaagagtctcactctgtcaccaggctggagagtgcagtggcacgtgatctcggctcactktaacctccgcttcctgggttcaagtgattctcctactgcaacgtcccgagtagttgagataaggtgatgaggtggcacccgccaccatgtccggctaatttttttgtatctttagtagagagagggtttcaccaagttggcaagggtggtcttgaactccctacctcaagtgatcagcccaccttgccctcccacagtgttgggattacaggcatgagctacctatatataccaataa

SEQ ID NO: 311588 - DNA, 593 bp, Homo sapiens
aacgttaaaatccctaatgctaatgaactgagtatgtgcgggcagaatttaaaattaatgacactttaatggacttgttgagtcatttcacacacacaatttgaccaatattttactgaaaaaaaaaataaagcactgtattttgtcagtaaattatatcagcaagttggcaaacaccaatgagtacattgagaaaacagcctgaaagtgttcagggaggaaaaagtgcctgatgttttgactagttgtgtcaaacaaaaagaaacagaacctttaaggccaggactttgcagtcatggttattttagtgggttgtttttttaacacttatctttgtcctttctatgataaatgataaactgtatttccaagccattttgtttatgataagtaactgcaasgaaaatttttatgtttgtttttaatttaaatcaaaccaagcaaataaaattaagaagcaaaaattcaagaagctatttgatgcaatgaccttgtcaaatactccatggaatgacatgtgtttgcttcactgcagtattacaaagtgcttacaaaaatgaaaaaatgcttacaaaaatgaaataaaaactaca

SEQ ID NO: 311589 - DNA, 582 bp, Homo sapiens
tcatctggtttctcaggaagaagtgaggagcagtagacagtaataggaagaatctattagggtggaataggaaatattttgaaggctataccaaggaatataaattcattttgattggttgcaaatcatgaaatttataatagttaaaggcacaaaatatatcaacacatataaattactccaagtattgtcttttaagagtgggggtaaatatttacagcaaatatatccccaaaactgttataatcctctatattgctcctaaatattcaaacattttgttgyaaattcaattttttaaatatctttggtttgatatgaggagcctgaatcaatagaggtgttaaatgaatcagtatattaataaactattatttagatagtgacatcacagaaaaaaatgcagcttttgcattttttagtataatatttttgtcagagttccagatttgcataacacagcttagcagtcattatgctatttgagatcaaatattgattccagataattacagcacttttagatagaatggtattgttctgcatctggcagtaatgacttatctggatagatgtatattt

SEQ ID NO: 311590 - DNA, 582 bp, Homo sapiens
tcatctggtttctcaggaagaagtgaggagcagtagacagtaataggaagaatctattagggtggaataggaaatattttgaaggctataccaaggaatataaattcattttgattggttgcaaatcatgaaatttataatagttaaaggcacaaaatatatcaacacatataaattactccaagtattgtcttttaagagtgggggtaaatatttacagcaaatatatccccaaaactgttataatcctctatattgctcctaaatattcaaacattttgttgcraattcaattttttaaatatctttggtttgatatgaggagcctgaatcaatagaggtgttaaatgaatcagtatattaataaactattatttagatagtgacatcacagaaaaaaatgcagcttttgcattttttagtataatatttttgtcagagttccagatttgcataacacagcttagcagtcattatgctatttgagatcaaatattgattccagataattacagcacttttagatagaatggtattgttctgcatctggcagtaatgacttatctggatagatgtatattt

SEQ ID NO: 311591 - DNA, 574 bp, Homo sapiens
tgcataacacagcttagcagtcattatgctatttgagatcaaatattgattccagataattacagcacttttagatagaatggtattgttctgcatctggcagtaatgacttatctggatagatgtatattttataacacattcaagtcaaacacaacttggaagaaatttcgtctataataaatatgtatttaccttgacctagaactgaatgtagccatattttcctagtcctttatatctgcatagatttttttttttaaactaagctactgttttcaagtataaaacatcaaaaagtctgggtcatgagaagcagcatgaatacaggacataataggagctttagagtgtgaaaaggacagttttaagtcctttctctttgagttgtgagctgtatgacataagcagattacttaaattttctataccctaatgttcacatctgaatttaatacttattttaccaggtggtttaaggcttaaataaaggtaatatatataagaagctataaagcttcctggcaagagtaggcattcgatyaatgagaaaaattcttgttctcatttagtg

SEQ ID NO: 311592 - DNA, 602 bp, Homo sapiens
gttgccctgtgttgagcaacgcattctgctgcccaggccttgccagtcctcccactgtggagggtggggccggggtggtcagagcaggaagaggagacttcaggaggggtggagagatgcacctcctagggccaatccgacaaagccatctcaagaggacgaagcatctccctgtcctttatcccctggatgtagaagtgcaaggcatttgccttggggctacaagcaaagaactacagcaggaactcggggggctctttagtaagcaggtcctccagctgtgaggggctcccctcatctcccagctgcagcgtcctctgaatgaagggtgtgcctgggcagtattcccatgcaggttccagagagtaccttgtactttaccttttctcaaatgactccttggacctggatggcaactgtctttggaaagccatcaaatgtaatggttaaaatgataaaccctagagtctctcatttcaaatcctagtktcaccatttacttatctgtgtaacctttttatggctcagtgtcttcatctgtaaaacgaggataaaaatagtaccttgccatagggtcattcctacaactaaatgagttggtc

SEQ ID NO: 311593 - DNA, 566 bp, Homo sapiens
acacattgagaaaaagtcaatgttgcgcacccaccctgggaaaagaaaataatcttttagtcgcttctcacagctacacaatagttcttctagggtggaaattttagcacagtaatcactttggtaggctcagaaatcatgctctttggaggagagacaccaagggagaaaagatccctttgaaaagtgacctgcacagagaaccccttggcagrgttgttggatttgttcactctagacaaccaagcatttcatcactggggaggacggaacacaagaacacagtcttaatctgagacttgagggagtgaagttagatctaaatgcgaagtgttttataatgcacattacaaggtctaaaaagttcttctctggatatcatcagaaacaaaacacaagcaggcttcaaggcaggtgaggcttatacctcccatgcacctaggaagtggatctcattctggctatgacccttgttgacagcgtgaccttgcgcaagtcactgatccctctgtgattccattcccttatctcacctagaaaatcagagcgatcaccagggccctggc

SEQ ID NO: 311594 - DNA, 566 bp, Homo sapiens
acacattgagaaaaagtcaatgttgcgcacccaccctgggaaaagaaaataatcttttagtcgcttctcacagctacacaatagttcttctagggtggaaattttagcacagtaatcactttggtaggctcagaaatcatgctctttggaggagagacaccaagggagaaaagatccctttgaaaagtgacctgcacagagaaccccttggcagggttgttggatttgttcactctagacaaccaagcatttcatcactggggaggacggaacacaagaacacagtcttaatctgagacttgagggagtgaagttagatctaaatgcgaagtgttttataatgcacattacaaggtctaaaaagttcttytctggatatcatcagaaacaaaacacaagcaggcttcaaggcaggtgaggcttatacctcccatgcacctaggaagtggatctcattctggctatgacccttgttgacagcgtgaccttgcgcaagtcactgatccctctgtgattccattcccttatctcacctagaaaatcagagcgatcaccagggccctggc

SEQ ID NO: 311595 - DNA, 540 bp, Homo sapiens
aggatcagtgaaactgatcccagaggccttggcctttggaaacttggaactgatagctcaaaacatctcaccagaacagctttcggctgacgaccactccaaccatggaagccccttgggccagggacctcctgcctctgattgaggggcaaasagatttgagatccagccccaaccagctcactgtgggatagaccctagttaagagccacatccatccacaacaagggtgctttttctaattcacacgaaagcactgtgtggaccactagcaaccatgcttgagcccagaaagaaacttcttgagccccagcaatggctctctctggaagctacctcctccttcctactgcctgcacacccaagtttgccaccatcccctagaagctggatgccacccaaacagccacagcattgcaatccatggggtggcccatgcccttcatcaattagagaaaccttccaaagtggcctattccaatatcccaatgttgagatgaaccaacatcttagactttacacggactcgtttggtttttg

SEQ ID NO: 311596 - DNA, 540 bp, Homo sapiens
aggatcagtgaaactgatcccagaggccttggcctttggaaacttggaactgatagctcaaaacatctcaccagaacagctttcggctgacgaccactccaaccatggaagccccttgggccagggacctcctgcctctgattgaggggcaaacagrtttgagatccagccccaaccagctcactgtgggatagaccctagttaagagccacatccatccacaacaagggtgctttttctaattcacacgaaagcactgtgtggaccactagcaaccatgcttgagcccagaaagaaacttcttgagccccagcaatggctctctctggaagctacctcctccttcctactgcctgcacacccaagtttgccaccatcccctagaagctggatgccacccaaacagccacagcattgcaatccatggggtggcccatgcccttcatcaattagagaaaccttccaaagtggcctattccaatatcccaatgttgagatgaaccaacatcttagactttacacggactcgtttggtttttg

SEQ ID NO: 311597 - DNA, 530 bp, Homo sapiens
aggctcaggtatctggactcccaatccactgctacttctgctctattttgttgcctcagaggggcagcaggctggagggtgctgctctcatgtccatgactgcaggtcatggaccaggaaatacacctacagaagtggcttccttcaccaaggtaaattaggcagtaggctggcagactagttcactagctcttgatgagatggccttagatgagccaaaaatctcatgtaaagggcctggccctagtcaggaggaaggacaaaggggagtggagtggagaggagtggttagaaagagaagcttagagtcagatgggcctgggttctaccaattcctggctctgtgatttaggacaagcaaattctctatagctctgcttccttattggaaaaatgagaatgagaatcctcttgggttgtcatgagtattacatgtgatyatgtagacaaagtgctttgcacacgcctggcacaaaatgttcagtgaataaaccaaccaactaaccaccaccaactacaacaaatggtag

SEQ ID NO: 311598 - DNA, 591 bp, Homo sapiens
agcgtgcccagtggccccaacccgtcactgccctgggctgggcaaagcttggctcccaggatcgccagtcctgcrggaccaggcaggcttggtgaaagagcaggatcttgtgttccatcctgactctggcttctctttgcttcccacccctggaagtcctttgaaatgaaaataatcatctctggatgaaaaggagctagagaaatggataagaattggggaaagccagaaaagccccacaagacctcattccactctctcagctgatgtcaaagtggtaggccctcttgagtgaccactgtggcatggagtaggctgagccctcagccttctgtgagttcatgctgagagatgagaagtcaagactaaggccacttcactgttgaaactggagagccagcagaaactgggatttcccagagccctccagcctgagctatgtagaggatggtgtgtggtccaggtcaactacccccttggaaaaatgtcagtggcaccccctggagttggacaatgctgtgggtatggggtagaggatggctgatcccacctgtcaccttcccttttcctccgtctccccagccatcttcc

SEQ ID NO: 311599 - DNA, 594 bp, Homo sapiens
catgaccccaagtgcacaatttctaagcccaagggtctgcatcagggttttcctcagccaaggtcaaacctcagcatctgcacacaacatctcctttttgagtatgaaacaggtaaagaaagaaggaagtgtgggcatctggtgaaaactgacatttcctctacatcctgcaaaagccaccccaagaggatcctcgcaccctgccccaggcacacacaagctatgggtggagggctggcccagtccacctcctagggttgctgtatgggcaaacatgatgggcttagawaggtggttggggcgaggtgtggagggagtgagaagaaatcaaacgacttccggggtaggtggcctatggggacaaaccagtaatgagacagcccagctcctggaccctggtgctgttctatgaagatttcatgcacagctcagttttcacactggaagcagcaggagcacttccagaagggtggcctgacatgcaaaagtgaaaattcatgggacggtgaagggagtacaacctagagggccagcatacgggcagcaaaggggagatggagctggcaggtagccagggtctttcactaaccaggt

SEQ ID NO: 311600 - DNA, 594 bp, Homo sapiens
catgaccccaagtgcacaatttctaagcccaagggtctgcatcagggttttcctcagccaaggtcaaacctcagcatctgcacacaacatctcctttttgagtatgaaacaggtaaagaaagaaggaagtgtgggcatctggtgaaaactgacatttcctctacatcctgcaaaagccaccccaagaggatcctcgcaccctgccccaggcacacacaagctatgggtggagggctggcccagtccacctcctagggttgctgtatgggcaaacatgatgggcttagataggtggttggggcgaggtgtggagggagtgagaagaaatcaaacgacttccggggtaggtggcctatggggacaaaccagtaatgagacagcccagctcctggaccctggtgctgttctatgaagatttcatgcacagctcagttttcacactggaagcagcaggagcacttccagaagggtggcctgacatgcaaaagtgaaaattcatgggacggtgaagggagtacaacctagagggccagcatacgggcagcaaargggagatggagctggcaggtagccagggtctttcactaaccaggt

SEQ ID NO: 311601 - DNA, 523 bp, Homo sapiens
tgcaaatggtgttgggacctaatgttgtcaactcagatagcaaatctgagttgttattagtgcaaagatgccctaagggggtaggcactgaggrtgagatctgcaacgaatgttatggggaagtgtgtttataattataatgggatttaatgtacactgggaccagatgatggcagccatttaaaaaagagatgcttaataagagaggtcccttaatgacaggcagcagggctcaggatattatggaagaagcacggtgtttcactgggtgtcacaaaccatgtgccaggttttatggggttcctaacaaagctttgggatgaagcatagcaaccattgaccgctgtcagctatcgggcatgatatttgaatattgtctttgagaggggcatacgcacttagaggaaggcattttctccctttcagatacacatactcacctaagcacggacacacaggctctaggccaacattgaatagtttttggtgtttctgggaatctgctttgttctgcaaaagctag

SEQ ID NO: 311602 - DNA, 537 bp, Homo sapiens
cccattcagccagggggcttggcccatgtttccccaaggagtaacttaggtggggacaggggctgcagaagcccatgagacaagggtgcagcctgacccctgggaggtgcaccacgctgctgctttcattgatgtcccttggcaagtatgtttctgtggcactgggctggggcaggatagggtgagtcaggcaggagcaggaagaccattctyttactccccagggtgacataaccaagcaggtgactgggcacctctgtagttacgggaagggtaactggagtcaccacaggtctgcccttttgtcctcatctaattagttatacttaaatagtaaaatatatattaaaaataataaaatatataatataaatacacttttactatacatatttatttcatgcattcttgccatacataataaatacatatagtaaaaataataataatacatgcactttgtagaaaaatatgaagaaaaattaaaatcatctgtaaacttatgactcagagacagccactcttaacgttttggta

SEQ ID NO: 311603 - DNA, 600 bp, Homo sapiens
ttaccatatgacccagcaagtctgcttctcggtatctgcccagaagaatggatctgaaagagatatttgtatgtccatgtttatagcagcattattcacaatarcatccaccaaaaggtggatgtttccatctataaatgaatggataaacaaactgtggtaaatgcacaatacggaatattactcaaccttaaacaagaaggaatttctgacacatgctatgacatgaatgtaccctaaggacattataccaactgaaataagccagtcattaatgaataagtgctgtttgattgctcttatataaggtctctagagtagtctaatttatagagaaagtagaatggtggttaccaggagatagggggagatggaaatgaggactaaatgtttaatgaattcaaagtttctgtttaggaagatgaaaaagttctggaaatcatagagaaagtagaatggtggttaccgggagatagcgggaggtgggaatgaggattaaatgtttaataaatacagagtttccatttaggaagataaaaatgttctggaaatggctggtggtgatggttgcatgacagtgtcaatgtactcaatgccaca

SEQ ID NO: 311604 - DNA, 550 bp, Homo sapiens
tatccacacactggcatcgggaggtgtccacacattggcatcaggaggaggtgtccatacgctggtattgggaggcaggtgtcagcactctggcatcaggaggaggtaccctcacactggcatcgggaggaggtacctacatgcttgaatagggaggaggtgctcacacgctggcatcgggaggcaggtgtccacaygctggtatcgggaggcaggtgtcagcatgctggcattgggaagaggcaccctcacactggcatcgggaggaggtgtccatatgttggcatcaggaggaggtgtccacacgctggtatcgggaagcaggtgtccccacgctggtatcgggaagcaggtgtccccacgctggcattgggagacaggtgtcagcacgtgtgctctgggctctgctgactgcgaatgcttctagcacccccagtgggggaagggtcacttcccaggcttagggaagctgagacccgggccagtgaggcaacttgctgtcaccaaggtagaatcctatggcccctgcagaacctgcctgccctatacc

SEQ ID NO: 311605 - DNA, 550 bp, Homo sapiens
tatccacacactggcatcgggaggtgtccacacattggcatcaggaggaggtgtccatacgctggtattgggaggcaggtgtcagcactctggcatcaggaggaggtaccctcacactggcatcgggaggaggtacctacatgcttgaatagggaggaggtgctcacacgctggcatcgggaggcaggtgtccacacgctggtatcgggaggcaggtgtcagcatgctggcattgggaagaggcaccctcacactggcatcgggaggaggtgtccatatgttggcatcaggaggaggtgtccacacgctggtatcgggaagcaggtgtccccacgctggtatcgggaagcaggtgtccccacgctggcattgggagacaggtgtcagcacgtgtgctctgggctctgctgactgcgaatgcttctagyacccccagtgggggaagggtcacttcccaggcttagggaagctgagacccgggccagtgaggcaacttgctgtcaccaaggtagaatcctatggcccctgcagaacctgcctgccctatacc

SEQ ID NO: 311606 - DNA, 691 bp, Homo sapiens
ttacctcataaaatatacaaatattaactcaaaatggatcaacaacctaaatgtaagaattaaaacaataaaactcttagaagaaaacatgtgagtggctcttcagggccttggatttggcaaaggtttcttagacatgacaccaaaagcacaggtgacataaataaatcgatacattggagttagtsaaaataaaaaactttgtccatcaaaagacataatcaagagagtgagaaaacaactcagagaatggaagaagatatttccaaatcatacacctgacatgggtctaacacccagaatatataaaaagcttttaaaactcaataaagaaaagcaaaccaatttttaaatgtgcaaaggacttgaatggacattcttccaaagacaatatacaaatggccaacgagcacatgaaaagatgctcaacatgattagtcattaagtaaattcaaatcaaaacaacgagatatcacttcatacccactagaataatcaaaattttaaaaatggaaaataacatgcgtgggtgaggatatggagaaaatggaacccttacatgctgttggcaggaatgtcaaatggtatagctgctgtggaaaataattgactgttcatcaacaatttaaacatagaattaccatatgacctagcaattccactcctaagtgtatacccataagaattcaaa

SEQ ID NO: 311607 - DNA, 691 bp, Homo sapiens
ttacctcataaaatatacaaatattaactcaaaatggatcaacaacctaaatgtaagaattaaaacaataaaactcttagaagaaaacatgtgagtggctcttcagggccttggatttggcaaaggtttcttagacatgacaccaaaagcacaggtgacataaataaatcgatacattggagttagtcaaaataaaaaactttgtccatcaaaagacataatcaagagagtgagaaaacaactcagagaatggaagaagatatttccaaatcatacacctgacatgggtctaacacccagaatatataaaaagcttttaaaactcaataaagaaaagcaaaccaatttttaaatgtgcaaaggacttgaatggacattcttccaaagacaatatacaaatggccaacgagcacatgaaaagatgctcaacatgattagtcattaagtaaattcaaatcaaaacaacgagatatcacttcatacccaytagaataatcaaaattttaaaaatggaaaataacatgcgtgggtgaggatatggagaaaatggaacccttacatgctgttggcaggaatgtcaaatggtatagctgctgtggaaaataattgactgttcatcaacaatttaaacatagaattaccatatgacctagcaattccactcctaagtgtatacccataagaattcaaa

SEQ ID NO: 311608 - DNA, 590 bp, Homo sapiens
ttttttacataagagaggcttaatgaagatattcttggaaaaatttaatcatccagagatcagctgggtgcaaaaatggtaatatgtatagaaaactgagaggtcaatatttagaccctagcctataaaggacccaggatggaaagaaacaaattaccttgctttggagaactatccagaggcaagggaaagaaagatcattggttaatttaggcaaggctctattcttgccagggcttgttatttcttgccagggctagtctgttaattttataatgtgtttccctgtctccaaaccatttttaatgcatctttttagggaaaccccattacgagtggatgattgggtattttgaagaccaggctgctcatcagagctcaaacacagctctcctccattaaataaataagatatctaataggatgacatgtgcctctgaccatgacatgtcacggaagagaaraattcaggaatcaaatttacctagaagctagtcatggcataaaataactaaacctgcaattatagtaacccaccaccagctggcagtagtgttaaatcatgttctgacagtggtttttacaaatcg

SEQ ID NO: 311609 - DNA, 544 bp, Homo sapiens
aaagttttacaagccgaagaaaccaaggacaatgaaacctcttctcccaaggaatttgggagcagagcatgccacgctttctctgttctggaaggccctatccttggggacttcagaggtgcacaagacggaagctcagagtaaactgtatcttctactgcagcttccaggagtagtctgggaactgccagccctgcccctaagcagatgtgcacgtcygctgctgtcctcgggagggggaggccggagtggcaaactcccagagtgctgaagaaaagacgtgtcccacgcagaattttcccacaatcagcacacgggacaaggagaaaccaagaggccaagcttgagcctggcggaaatcacaagatctgggctgcagctgtgggagggtggctggtgctcttgcccgtctgcgtttcttacatctggaatattccaagtgctcaagccagttagcagaggagtttcagacaggcttgaggggaaggggagaagaaaggtctgttctaaggaaaataattctcttgcttccacttcacagata

SEQ ID NO: 311610 - DNA, 475 bp, Homo sapiens
ttattactctgtaatgcacttggcaacacacacgatgcccatagctgtccataccagggagctcacactgcttcaatcagacctgtctcatcccctcagcagccccattaagtcaaagagtaaattattaataatgctgactaaaatcaaagctccaaatgatgcaaataaaattaaccaacatgaactggagaaacagaagtatataagagagcagagagaagcctgttaccctcccctcccagaatgtgtcttaaaagttatcattaggtattgcaatgtggtatccaatgaggagtgaattactaaaaaagcgtacttatttaagaagggagcccaggaaatttgttaaattactatgtagtaaatagcatgagcagaccatgatattcaggcaaagtagagtattctgtaaagaatactgctttcttggtcttcctactgytgttataataacaaaggaaagctcgatcca

SEQ ID NO: 311611 - DNA, 580 bp, Homo sapiens
accaaacaagtataatatacctaatagaaataaaattcaaaaaaaaccaaacagaaatggtttaagtatgacagaaaattaataggtattctcactgaaaaatggyaagaaaaaaaccagcactccaatagaaagttgatcataattaatgaacagagagttcacacaaattgattaaacatattaagtttgaaagctaaaaaacaaaacaaaatgcaggtacaaattaataccaccttttaaccaaataatacaagaggagtgataatggtagatttatgctgctgttggtaaattcatagttttttttttgtttgtttttttggtggcaggatatattgacattactcttttggaaaacaattaaaaattctcagcaaggttgctaaaaatctgaatatccctggtccagttagtcctattctttgcagcatatcataaaatataaattaaaagatattataagaacttaagaaatatgttgggaggcttttggtcaccaagaatggaaattgaatttaaataaacttaggcgaaaaaggactctaattttccaaataactgtgaaggccagggtaca

SEQ ID NO: 311612 - DNA, 580 bp, Homo sapiens
accaaacaagtataatatacctaatagaaataaaattcaaaaaaaaccaaacagaaatggtttaagtatgacagaaaattaataggtattctcactgaaaaatggcaagaaaaaaaccagcactccaatagaaagttgatcataattaatgaacagagagttcacacaaattgattaaacatattaagtttgaaagctaaaaaacaaaacaaaatgcaggtacaaattaataccaccttttaaccaaataatacaagaggagtgataatggtagatttatgctgctgttggtaaattcatagttttttttttgtttgtttttttggtggcaggatatattgacattactcttttggaaaacaattaaaaattctcagcaaggttgctaaaaatctgaatatccctggtccagttagtcctattctttgcagcatatcataaaatataaattaaaagatattataagaacttaagaamtatgttgggaggcttttggtcaccaagaatggaaattgaatttaaataaacttaggcgaaaaaggactctaattttccaaataactgtgaaggccagggtaca

SEQ ID NO: 311613 - DNA, 491 bp, Homo sapiens
ttcacttccttatttccaggcataaattattgcagatgcaaaattgcgaccttgttttwgacacaagtgttaaaaatatagctcttagatattcaacaatactttttatcctctcctttgagcaggaggtggcctgaactcaacttgttggccaatgaggcccttggcttagcagagcatgaattttgagagagaggtggaaggaggtcagtctctggagcacgtcatgaaggtggcattttgctgctgttcctcctttcatcctattccttaagaataactacaatctaagatactaggccctatggggcactggaagggccaattgcccaccatccatcttgcaaggtagtggacacatagggttacctggcacacctctgccagacagggctgctacataatttgtagggcccagtgcaaactgaaattagggggtcccttgctcaaatggcaggaaaaacatttcttccttctttctgggtctctct

SEQ ID NO: 311614 - DNA, 491 bp, Homo sapiens
ttcacttccttatttccaggcataaattattgcagatgcaaaattgcgaccttgttttagacacaagtgttaaaaatatagctcttagatattcaacaatactttttatcctctcctttgagcaggaggtggcctgaactcaacttgttggccaatgaggcccttggcttagcagagcatgaattttgagagagaggtggaaggaggtcagtctctggagcacrtcatgaaggtggcattttgctgctgttcctcctttcatcctattccttaagaataactacaatctaagatactaggccctatggggcactggaagggccaattgcccaccatccatcttgcaaggtagtggacacatagggttacctggcacacctctgccagacagggctgctacataatttgtagggcccagtgcaaactgaaattagggggtcccttgctcaaatggcaggaaaaacatttcttccttctttctgggtctctct

SEQ ID NO: 311615 - DNA, 595 bp, Homo sapiens
gaaattccacaatggtatgaaagaaaatagttttgctcttataagaaagaggtttcaagccacaaatgagtcatgggctacctctatctcctactgctctttttcataaaaccgaaaacttccccttccccccaagccaaaccctcacctctccttgtcacctcttagtcctagagaatcacaagtctgaaatcaccctgaagttcttccttacccccatgttcaaagacacacagaacctacaacagaacctatcttcctagtgtgtctttcattcatgtttttcttccctcattcaatatgaaccctgcatcrtcagacctctgtcctctctgcagactttccctgagccaggctccctccccactctgctgcctggtctttctggtcctggggcttgttctgccctcctgaggccttccctgtccactcaacctcgcacatcaccagcccctctatctgactcttcaccccactatcctgatgattcttcatgatgctgttcctctctaacaatattcattttttttcctcttaactgtctctcttccccactagaaagtaggtgccattagaaaaagcattgcacctgccc

SEQ ID NO: 311616 - DNA, 577 bp, Homo sapiens
gtatttgtacatgtcttttatgtctcattttcctcctttttttcccatcctgccccagcgtcttccagaaagaaatggcagttgacctcttccgtcaccaggctcccctgtctcgactggtcacaactgtgagaccctacaaccctttcaacaagaaggacaaagaaaccatagactactagaggaggcggccctgcgcgggctgtccaggcctccgcctggggaaggcttgtgcggcggtgggaaataaaggctgcttctccgcgctgcgcagtgtggtgggttcggtgctgttctccgctggcctgcgcgtccctgcccagcccgcctctctcccccggcaggcggcgctcagctggacactgggcgcccgccagccgcgscgcagactcccaagccgccggcagcagggtagcagggcctgtgttgcagaagattcctctttagggttggaatattgggtctacctagaggtttcacatggcaccacttcagtgcagggattctagagcagagagcagaccatagattttagaatctcaaaggcagtctagtcaaaaatccgtatgctgtcagt

SEQ ID NO: 311617 - DNA, 562 bp, Homo sapiens
tgctcctaataaaatcccatgcttcatttgctgtctctggatctcttcttcggcctcttgaacctagtgtcttccctattgagatgcaaagttcgatacaacatgcccatcgaaagaaaatgtgataggccgggcgcggtggctcacacctgtaatcccagcactttgggaggccaaggtgggcagatcacctgaggtcaggagtttgaggccagcctgrccaacatggtgaaactccatctctgccaaaaatacaaaagttagccaggaatggtggtgggcacctgtaatcccagctactcaggaggctgaggcaggagaatcacatgaatccaggaggcggaggttgcagtgagccaagattgggccactgtactccagcctgggcaacgagagtgaaactccatttcaagaaaaaaaaaagagagagaaaatgtgataaattgttgtacattaatgtactgaaatatatgcattaaaaagataatagagcttcgtattgattatcatgaaaagatatatatgcaatattgttaaatgcaaaagcaggtattacaacagc

SEQ ID NO: 311618 - DNA, 586 bp, Homo sapiens
aacgagcatgggagacttgaggacttgagagaagctcagcagagaaaggacagagtacactgtggggtgatgtttgggcaataaagaggaacagtaagaagacragaacggggcagggatgaagctaaggagggaaccatgggcaaataatggagaattgggtctgtgtcacgtcaaggagtgtggattttatttttaaataaaaaaggatgggtttaatcagtggagtaatacaaacagattcacacattacgaaaagttatctggctatggcatagatatgataattcctgtgataaattcttcttgacactcggaaataaaaagaatgagtgtcactactgaaaagttggtatgctttgttttatcacataataagtgacaacatcagatagcaatctatggatcttctctttttgccatgaaaagtacagagctaagatctagatcctgtgtgaagaaccatcttcagcataggttatctggtaaaattatttctgtcttcttcattatttactcattctcttgcaattccaaaaataaacacagtcattgcaaataacttttgagaaagaggtagtcttta

SEQ ID NO: 311619 - DNA, 568 bp, Homo sapiens
aattctcccatttaaactttctctgtcttggctttctaggatgctgtactcttatccccccactccctctttgaccatttactttctgttwtggttttattcttccatcaagcataggtgtgccttaagactcttccttcaatgtttattttagcaatcaatatcagtaaatgtctgcgtttgatgtcctctgtgtcactcataagatccaggatattatagacataaagaggatgtgtcataaaggaaaaagaaatatattccaaaatcaaaattccactgggaaaactgcttacttttgtgtagaggacttgtaaaatgagtcctttgcattacatttcttgtttgtttgaacaagtggttcaccttcatcctagaaggcatgaaaaataagttaaaagagaccaaatataaatggaaattgttattgttttctagtcatcatgttttcttttggattcctttttcttcatatttcttctttcacgcacctcttggattgaccagatttaatgcttccctacttttcctctcctgtttaaggaatttgcattgttttattgtcata

SEQ ID NO: 311620 - DNA, 568 bp, Homo sapiens
aattctcccatttaaactttctctgtcttggctttctaggatgctgtactcttatccccccactccctctttgaccatttactttctgttatggttttattcttccatcaagcataggtgtgccttaagactcttccttcaatgtttattttagcaatcaatatcagtaaatgtctgygtttgatgtcctctgtgtcactcataagatccaggatattatagacataaagaggatgtgtcataaaggaaaaagaaatatattccaaaatcaaaattccactgggaaaactgcttacttttgtgtagaggacttgtaaaatgagtcctttgcattacatttcttgtttgtttgaacaagtggttcaccttcatcctagaaggcatgaaaaataagttaaaagagaccaaatataaatggaaattgttattgttttctagtcatcatgttttcttttggattcctttttcttcatatttcttctttcacgcacctcttggattgaccagatttaatgcttccctacttttcctctcctgtttaaggaatttgcattgttttattgtcata

SEQ ID NO: 311621 - DNA, 600 bp, Homo sapiens
catttctgctgattctcactcatagtgtactttctccttatgtatttggatatgttaattatgtgatgaacattacactttaaaagtktttaatgaaaatactttgaggtttaataagataatatcttccttcaaagaaaaatgttatttacttctgcctgatttctggaaatgagagcagtctaggatcaccttcatcctagttcaggacttgaagttttcttatttacttggattaagctaggctgcagtctgttcaagtgctttttactattgacctatccttacttggagggttcaggcctccaggtattcagcccacagtcataggtggcttgtatggatcaactccaacttctgatcttttacttctatgagaccaccaaaagttcaaatcaaacttttggttgcctcttcaaaaattgcaaattctttcagtgtcacagtggccctaagtgctaggcttaaattttagagagtctatcctcttgttggcccagtaatttctctctaccttattagaaaaaaggaacattaatccagttgttttgccattggaaatattggtccatattacttagcttccactactggaaataa

SEQ ID NO: 311622 - DNA, 598 bp, Homo sapiens
acctgcaggaccaatggatctcttgttaaggatttcaagatagaataaataaaattaataaataaaaattttcattacccttgcaatcacattatgcattttgtctaaattcagaatagcctagaacaggcaaaattgccactatttctaataccataattttcttataaaagaaaaatgcacaggacamagaaaaacataaagtcctaccatgtgtgtgacatcttgagtaaaggaggcattgaggacatatactttaaatgacctttctgtttcatgccctttgtttcatggccaggtaccatagtacagctgttaatatgtgagaggtatgccccatttccctttgtagtaaactagaaagagttattgtgaaggaaaaggtgagaaaaaaagaaatcaacatggcactatacaggtaaattctcaggcagatcaactttagaagaaatatatataggagttacagaaatgaaaattgattctttacaatgtattcatacctttactgctaatgaatatgggttttcttgaggtaataaaaatctaaaattagattgtggtgatggttgcacaactctgtgaatattcgaagaac

SEQ ID NO: 311623 - DNA, 598 bp, Homo sapiens
acctgcaggaccaatggatctcttgttaaggatttcaagatagaataaataaaattaataaataaaaattttcattacccttgcaatcacattatgcattttgtctaaattcagaatagcctagaacaggcaaaattgccactatttctaataccataattttcttataaaagaaaaatgcacaggacaaagaaaaacataaagtcctaccatgtgtgtgacatcttgagtaaaggaggcattgaggacatatactttaaatgacctttctgtttcatgccctttgtttcatggccaggtaccatagtacagctgttaatatgtgagaggtatgccccatttccctttgtagtaaactagaaagagttattgtgaaggaaaaggtgagaaaaaaagaaatcaacatggcactatacaggtaaattctcaggcagatcractttagaagaaatatatataggagttacagaaatgaaaattgattctttacaatgtattcatacctttactgctaatgaatatgggttttcttgaggtaataaaaatctaaaattagattgtggtgatggttgcacaactctgtgaatattcgaagaac

SEQ ID NO: 311624 - DNA, 598 bp, Homo sapiens
acctgcaggaccaatggatctcttgttaaggatttcaagatagaataaataaaattaataaataaaaattttcattacccttgcaatcacattatgcattttgtctaaattcagaatagcctagaacaggcaaaattgccactatttctaataccataattttcttataaaagaaaaatgcacaggacaaagaaaaacataaagtcctaccatgtgtgtgacatcttgagtaaaggaggcattgaggacatatactttaaatgacctttctgtttcatgccctttgtttcatggccaggtaccatagtacagctgttaatatgtgagaggtatgccccatttccctttgtagtaaactagaaagagttattgtgaaggaaaaggtgagaaaaaaagaaatcaacatggcactatacaggtaaattctcaggcagatcaactttagaagaaatayatataggagttacagaaatgaaaattgattctttacaatgtattcatacctttactgctaatgaatatgggttttcttgaggtaataaaaatctaaaattagattgtggtgatggttgcacaactctgtgaatattcgaagaac

SEQ ID NO: 311625 - DNA, 598 bp, Homo sapiens
acctgcaggaccaatggatctcttgttaaggatttcaagatagaataaataaaattaataaataaaaattttcattacccttgcaatcacattatgcattttgtctaaattcagaatagcctagaacaggcaaaattgccactatttctaataccataattttcttataaaagaaaaatgcacaggacaaagaaaaacataaagtcctaccatgtgtgtgacatcttgagtaaaggaggcattgaggacatatactttaaatgacctttctgtttcatgccctttgtttcatggccaggtaccatagtacagctgttaatatgtgagaggtatgccccatttccctttgtagtaaactagaaagagttattgtgaaggaaaaggtgagaaaaaaagaaatcaacatggcactatacaggtaaattctcaggcagatcaactttagaagaaatatatatagkagttacagaaatgaaaattgattctttacaatgtattcatacctttactgctaatgaatatgggttttcttgaggtaataaaaatctaaaattagattgtggtgatggttgcacaactctgtgaatattcgaagaac

SEQ ID NO: 311626 - DNA, 628 bp, Homo sapiens
gcttaagtcaaccatttattctctcccaggattcagaagatagttgggggtggttctttcacatggtgtcagtttcaatagctgcaaaggttcaaaaaaggcctcacttacatggctggcaagttggtgttgaccattagctgggggcttaggtgggcacactggcaagtgtcttgtatttgtttctgtgggcataggttggtctttcacaggatagtgactgagatcccagataagactctgaagaggactaatcccaacgtgcaagtgcttatcaagtctccatttgcaygatgcttactaacatataattggcccaagccagtcaaatgtccaggcccaatgtcaacatgggaagtaaacagagtttatcagtaagagtggcaggcacacacaggaacagggtgaattgctgaggatcacttttggaccagctaccattcatcacttcttcataaatttaaaaaggttaaaatcatacagtgtcttttccagtaaaaatgaaaagaaactaaaaatcaacaaaagaagggacactggaaaataaacagatatatagaaattaaacatgatgccacaaaacaaaggatcagataagaaatcataaaggaaatgggaaattatcttg

SEQ ID NO: 311627 - DNA, 628 bp, Homo sapiens
gcttaagtcaaccatttattctctcccaggattcagaagatagttgggggtggttctttcacatggtgtcagtttcaatagctgcaaaggttcaaaaaaggcctcacttacatggctggcaagttggtgttgaccattagctgggggcttaggtgggcacactggcaagtgtcttgtatttgtttctgtgggcataggttggtctttcacaggatagtgactgagatcccagataagactctgaagaggactaatcccaacgtgcaagtgcttatcaagtctccatttgcatgatgcttactaacatataattggcccaagccagtcaaatgtccaggcccartgtcaacatgggaagtaaacagagtttatcagtaagagtggcaggcacacacaggaacagggtgaattgctgaggatcacttttggaccagctaccattcatcacttcttcataaatttaaaaaggttaaaatcatacagtgtcttttccagtaaaaatgaaaagaaactaaaaatcaacaaaagaagggacactggaaaataaacagatatatagaaattaaacatgatgccacaaaacaaaggatcagataagaaatcataaaggaaatgggaaattatcttg

SEQ ID NO: 311628 - DNA, 628 bp, Homo sapiens
gcttaagtcaaccatttattctctcccaggattcagaagatagttgggggtggttctttcacatggtgtcagtttcaatagctgcaaaggttcaaaaaaggcctcacttacatggctggcaagttggtgttgaccattagctgggggcttaggtgggcacactggcaagtgtcttgtatttgtttctgtgggcataggttggtctttcacaggatagtgactgagatcccagataagactctgaagaggactaatcccaacgtgcaagtgcttatcaagtctccatttgcatgatgcttactaacatataattggcccaagccagtcaaatgtccaggcccaatgtcaacrtgggaagtaaacagagtttatcagtaagagtggcaggcacacacaggaacagggtgaattgctgaggatcacttttggaccagctaccattcatcacttcttcataaatttaaaaaggttaaaatcatacagtgtcttttccagtaaaaatgaaaagaaactaaaaatcaacaaaagaagggacactggaaaataaacagatatatagaaattaaacatgatgccacaaaacaaaggatcagataagaaatcataaaggaaatgggaaattatcttg

SEQ ID NO: 311629 - DNA, 512 bp, Homo sapiens
gccattgacctccttttaaaatgtttctcatcaaatggcctggagagatgctagaaaattaccaatccagaaagtgagacgtgttgataaagcctcctattggcaggcaccttagaaaaggccasgcacacagggcttgtgggatgcttagaattgtctgtatgcagtggcctacaacaggctagtcggggcctgagagccaccccctagggtgcctttactgtgccatgaggaatgcttgctgccctcaattacgtgggaccaagccccactccttcaagtcactgcctgagccactcctctgtgaagtcttctctagtgccccctcccagagccccaggcagcttgtgtgtgcctcagtttccttatctgtaaaatggtgatagtaacattcccttcctcacagggttcctgggaccgtgacatgagttagtacccacaaagcactcagccaacagaagtgattattagtgttaagacattttttgtcatcctctgctgcaattgtttat

SEQ ID NO: 311630 - DNA, 512 bp, Homo sapiens
gccattgacctccttttaaaatgtttctcatcaaatggcctggagagatgctagaaaattaccaatccagaaagtgagacgtgttgataaagcctcctattggcaggcaccttagaaaaggccaggcacacagggcttgtgggatgcttagaattgtctgtatgcagtggcctacaacaggctagtcggggcctgagagccaccccctagggtgcctttactgtgccatgaggaatgcttgctgccctcaattacgtgggaccaagccccactccttcaagtcactgcctgagccactcctctgtgaagtcttctctagtgccccctcccagagccccaggcagcttgtgtgtgcctcagtttccttatctgtaaaatggkgatagtaacattcccttcctcacagggttcctgggaccgtgacatgagttagtacccacaaagcactcagccaacagaagtgattattagtgttaagacattttttgtcatcctctgctgcaattgtttat

SEQ ID NO: 311631 - DNA, 512 bp, Homo sapiens
gccattgacctccttttaaaatgtttctcatcaaatggcctggagagatgctagaaaattaccaatccagaaagtgagacgtgttgataaagcctcctattggcaggcaccttagaaaaggccaggcacacagggcttgtgggatgcttagaattgtctgtatgcagtggcctacaacaggctagtcggggcctgagagccaccccctagggtgcctttactgtgccatgaggaatgcttgctgccctcaattacgtgggaccaagccccactccttcaagtcactgcctgagccactcctctgtgaagtcttctctagtgccccctcccagagccccaggcagcttgtgtgtgcctcagtttccttatctgtaaaatggtgatagtaacattcccttcctcacagggttcctgggacsgtgacatgagttagtacccacaaagcactcagccaacagaagtgattattagtgttaagacattttttgtcatcctctgctgcaattgtttat

SEQ ID NO: 311632 - DNA, 561 bp, Homo sapiens
gcaccttcatttctggcctcatcacactatttgaaaaacaaatgagggagtgtgtgaaagtagtctgaaaaggcagaagtattgggctgatctaaggaactactattcatagagttattctttaacctgggttgtggtaaaattttgttaagctgcaacacagtccagcgactgacagggaagcccccttttccatgggagacatgtgccaggggctgcctgggggtccatgttggacaattcctctttatttgcaaatgcttcctcagagcaatcattgaggtcaaaaagcacagtaaatatgaaaccttgtaacgtcctkagataaaagattataacttagtggaggatggtacctcataggcagctgcctagtttggaaaaacaagcaaatggtgactgcaagtgctgggtttgggttcagaaggcatgggctgtgctgctctgttagctgggcctgcacctcacctttgctgagcctgtttattctttggaaatacaagtgtgagatgcatatatgttagatctcagggctctctcccatatatgtaagatgtatat

SEQ ID NO: 311633 - DNA, 441 bp, Homo sapiens
ctgttagtgatctgccgcgtctcagatactttacaaacattattgatccccccacgatcacctygcttggtggcattttttttctcacaagtttcagatgaagaaactgaagtcacagagataaagtgacttgctcaagggccccaagtgagtcaatccccaaaatctcctttgtgacaaaccacatttcttttaggaagcaggtatctttcttcttcagcaatgttcaataaaagccacgtttaaattccttcatttatggtaaagtccatcatcatgtttcatccttagtaataaaacaagtgaaataatcatgaatggaactcaccgacttgtgtttgtataaagaggcttagagtaccgctgcttggctagcgatgcgatgtctcccaaggggttgtcaacatcatcagcatttgtagactgcacatgaccactgtt

SEQ ID NO: 311634 - DNA, 441 bp, Homo sapiens
ctgttagtgatctgccgcgtctcagatactttacaaacattattgatccccccacgatcaccttgcttggtggcattttttttctcacaagtttcagatgaagaaactgaagtcacagagataaagtgacttgctcaagggccccaagtgagtcaatccccaaaatctcctttgtgacaaaccacatttcttttaggaagcaggtatctttcttcttcagcaatgttcaataaaagccacgtttaaattccttcatttatggtaaagtccatcatcatgtttcatccttagtaataaaacaagtgaaataatcatgaatggaactcaccgacttgtgtttrtataaagaggcttagagtaccgctgcttggctagcgatgcgatgtctcccaaggggttgtcaacatcatcagcatttgtagactgcacatgaccactgtt

SEQ ID NO: 311635 - DNA, 593 bp, Homo sapiens
atcacagtagtgacaagatatggagctgggcgtggaatcagcctccctcgaccacagatccccaaatagaaatgaacggctgttggaaagaggggaggggagcagacgcagacgcgggggcgagagccgacaatgtgcacagcacactatttcccacagtgaatgacagaaaataaaacaaagtatgtttttgaaascaggaatactcacacatgtgtgacacatacacatacagagagagagaaagagattttacatcccaaatacctttgtagcgatgacaaagtgaacaaagtacagagacaaaagaattgaacatcactgaagtgctttgatcaagactaattattattatttttaaattagggtcactttgaagagttcagactcctcaggagtatatcttgttggttccatctgtccaatgtttcaagaaaacagtctgttttggcagttaactttgtctacaattcttacataaaatatgttaaacatctgtccctgatcaacttaaatatcactgcctttattgcatctactgctggcccatcagaatataactatatataagagaagggtttttttttccaccc

SEQ ID NO: 311636 - DNA, 531 bp, Homo sapiens
taactttgggggaatgacacacaatggggaccagtggtttctggcaaccccggtgtgatctgggagggtcaggatcagaggatgcatgttgcagctggagcccaggataaggttagtatatcacactgtgggacccacagagctgcctggtcacaaaacagaaggagtctgaatttccccaagaagagggaggcgcctgcagaatcattagtaggaacagaaagccagtgccccttctgggaggagtgagcggggaagaaaaatgtcctcatgtattcatgaaaagacaaagatgcacacaaggcttcacctttayaccccactttatggaaatgggcaaagtggtttgtacatagagcacaaaaaattgcgcacgggtagctttgactttctgtcacaaactctcagttttcctttaaactaaaatgtgtcaagtcaggggctgtgctgcatttgttcaccttatctccaggtcttaacacagtatctgatccacagaaagtgtttagtgaatcattgtggaatgaaggt

SEQ ID NO: 311637 - DNA, 596 bp, Homo sapiens
atctaatttaaaaatcctcacaacaaatttaagggagaacaacatcatgttctccatcgtattgattaaggggaagagaagatgaataacaatagtaatgattataaataatgctaataactgggctaagcaagttaggtacattatcgctagcagtgatatattatcaccattataatggtgacagtcctttcctaaggggctatttagggagtgtcaatgacgrctgggtggaaatcccgcattggttggcatattagtactgatggaagttaattatttcatgcaagataggttgaattatgtcctggctgacaaaaagaaatatctccaagataggataatgtacattattactaggggttaatgtcacatggctggattgacagaaccaagattcaaacccaggtcttctgacgggaatatctgtgttcattctgttataccaggctacctccatccttcaggagttttgtctacatggtagaagtcaagtttaaatttaattctaaatcaattctaaaaccccactataaattggccagtggattatgaaaacctttgtttttgtcaagtgaacaaatcagtaagtttgt

SEQ ID NO: 311638 - DNA, 596 bp, Homo sapiens
atctaatttaaaaatcctcacaacaaatttaagggagaacaacatcatgttctccatcgtattgattaaggggaagagaagatgaataacaatagtaatgattataaataatgctaataactgggctaagcaagttaggtacattatcgctagcagtgatatattatcaccattataatggtgacagtcctttcctaaggggctatttagggagtgtcaatgacggctgggtggaaatcccrcattggttggcatattagtactgatggaagttaattatttcatgcaagataggttgaattatgtcctggctgacaaaaagaaatatctccaagataggataatgtacattattactaggggttaatgtcacatggctggattgacagaaccaagattcaaacccaggtcttctgacgggaatatctgtgttcattctgttataccaggctacctccatccttcaggagttttgtctacatggtagaagtcaagtttaaatttaattctaaatcaattctaaaaccccactataaattggccagtggattatgaaaacctttgtttttgtcaagtgaacaaatcagtaagtttgt

SEQ ID NO: 311639 - DNA, 596 bp, Homo sapiens
atctaatttaaaaatcctcacaacaaatttaagggagaacaacatcatgttctccatcgtattgattaaggggaagagaagatgaataacaatagtaatgattataaataatgctaataactgggctaagcaagttaggtacattatcgctagcagtgatatattatcaccattataatggtgacagtcctttcctaaggggctatttagggagtgtcaatgacggctgggtggaaatcccgcattggttggcatattagtactgatggaagttaattatttcatgcaagataggttgaattatgtcctggctgacaaaaagaaatatctccaagataggataatgtacattattactaggggttaatgtcacatggctggattgacagaaccaagattcaaacccaggtcttctgamgggaatatctgtgttcattctgttataccaggctacctccatccttcaggagttttgtctacatggtagaagtcaagtttaaatttaattctaaatcaattctaaaaccccactataaattggccagtggattatgaaaacctttgtttttgtcaagtgaacaaatcagtaagtttgt

SEQ ID NO: 311640 - DNA, 596 bp, Homo sapiens
atctaatttaaaaatcctcacaacaaatttaagggagaacaacatcatgttctccatcgtattgattaaggggaagagaagatgaataacaatagtaatgattataaataatgctaataactgggctaagcaagttaggtacattatcgctagcagtgatatattatcaccattataatggtgacagtcctttcctaaggggctatttagggagtgtcaatgacggctgggtggaaatcccgcattggttggcatattagtactgatggaagttaattatttcatgcaagataggttgaattatgtcctggctgacaaaaagaaatatctccaagataggataatgtacattattactaggggttaatgtcacatggctggattgacagaaccaagattcaaacccaggtcttctgacgggaatatctgtgttcattctgttataccaggctacctccatccttcaggagttttgtctacatggtagaagtcaagtttaaatttaattctaaatcaattctaaaaccccactataaattggcyagtggattatgaaaacctttgtttttgtcaagtgaacaaatcagtaagtttgt

SEQ ID NO: 311641 - DNA, 575 bp, Homo sapiens
attttttatctgaagacagctattcctttctgttctgctctgtgctacacagatctaattttctttgttcctttctgaaagagggcagtccacaaagttcaaagggtggcttgagtaacctggcctagttctgtttaattcttaggttggttttcagcatttggatttgattttctccttattaacaatcctagcttagatcactttgtaatttatctagtagtataaataattatttacacatatgtcttattcatttttagcaacttgagagaagtaaccttgccttatcaacttggttttcctcttgtttaatgcattcattcaacatgtgtttatgaagcacctacagtatcccagggacacgccagccacaaaagatacaaagaaggacacaatttggttcttgccccaaggaccctagagcaatatttttcaaaacgtgatgttaatygattttataggaaaaggaattccactggcaagtaaatctggaaaatgccatgttaaattacctctccccactcctaccccatgccacacacaggacttgtcagagtctttaataagctaat

SEQ ID NO: 311642 - DNA, 531 bp, Homo sapiens
gtaagactgcggatttattttggttgcaagaaacagaaactaactaaccagttagttgagacaataaggaacatttttactctgtccataacaagaagcctcaaggtaaggcagctgagggttaattctgtctcgtcatctatagcttggctttcccagggttgcaaggtggccaccatagttgcaacctctacatcaacaatgttcgcaagatgacacatttccccaatgcctctttttaagggaacgtttaccttttccagaaatctccagaagaatttatttctctttgggcagctctgggttacatatttatctataaaacaatcactggtatgtataatgagataatcataattgaattaaaccaagcaatgttttcttaattacacacggacatcccaattttattgtgtataakgaagaaaatcttgttctcctccaaggaaaaacaaagggaagtggaatgactattggataggtagccaatgacatctgttacaaaaggttaccttggaactaagcaaattc

SEQ ID NO: 311643 - DNA, 574 bp, Homo sapiens
tgattagtcgtgtgcaggacactggaatcaccacattaaaactatcaatgaacaggaatggattcaagggtttttttaatcaaaattaatacacycagtgaactctcattgatcacgcatatattatctgcaggaatgttttggcctcagggaggtttcttcatgtcacccaacatacaggtcacctttccccagccactcagggagtgctcattaattttaacaataaactacaggaaacatacttagaaagagaaatatgctggggcaagcgatcccattattcattctcgagacttggagcaatgctttttggattattcacacggctgctcccgtcaattctaagtggatttatcatctattcttttacacaatattaaaacattacaattcctttccaacctgcactgtttgcttagctttgtattttatgaacaaagcattcctcccttcccctggactctttcctgtgctttatacccaggaaaaccacacaaccttaaatgctttggggttgggtggcttcttcctgcagctcagccccttatgtcttgagaatacaatgccagaa

SEQ ID NO: 311644 - DNA, 570 bp, Homo sapiens
aggcatgtggaagaaagatcatggggtttggagccagcaagacctggctttgattctcacgttaccacttactgcccaggagaccttsggcaagttacttgcttacttagggtatcagaatcttcatctataagatgagcatagtaaaagactcttttcagttgctagaagaaacaggaaaaacaaacaagtatcccttcctagccaaagacaaattggatcttgagactaaaaacattaagtttgtctagcaaggaatatagtgttttctgaagctattcagctcctgagtttagataatgagaattattttggaaaattcatctcaacttactgggttactcagtgtgcatagtaagaatttggaaacagggatgtttacataagtaaaatgactttttttttttaacagagtagatgctcaataaatgatagatataacagaaaaactgaatgccagagaataatgtatgcataaaatagatggataaattatacagggaagatcttcattacctgagaatttgttatttgagagcctataggtacccagttgtggagggaagctaa

SEQ ID NO: 311645 - DNA, 570 bp, Homo sapiens
aggcatgtggaagaaagatcatggggtttggagccagcaagacctggctttgattctcacgttaccacttactgcccaggagaccttgggcaagttacttgcttacttagggtatcagaatcttcatctataagatgagcatagtaaaagactcttttcagttgctagaagaaacaggaaaaacaaacaagtatcccttcctagccaaagacaaattggatcttgagactaaaaacattaagtttgtctagcaaggaatatagtgttttctgaagctattcagctcctgagtttagataatgagaattattttggaaaattcatctcaacttactgggttactcagtgtgsatagtaagaatttggaaacagggatgtttacataagtaaaatgactttttttttttaacagagtagatgctcaataaatgatagatataacagaaaaactgaatgccagagaataatgtatgcataaaatagatggataaattatacagggaagatcttcattacctgagaatttgttatttgagagcctataggtacccagttgtggagggaagctaa

SEQ ID NO: 311646 - DNA, 536 bp, Homo sapiens
cctctctgcttgtccgtggtgttcttcagtgtaccccagccccagctcttccttgccccactgactctaaactttctcaccgtttcacacagatctagttgtgtcttggttatttgtttcaggcacgctgccagctggcatgctctgtctactgctacagaaaacaaatctctcctccatttctcatgtgttaccagcctaacaaatacactactgtctatgttttacactgattcrtgcaaatgacctggctcttttcacgcggagtgctttctgcaggctgggatttaaaaaagatggtgtggtcctctgcctgggcaaagagtatttttagccgctaggttttagttaattacactagctgttgctcatcatggctcttggtttcttttgtgttgctgaggggagcggggtcagcttctgaatctaaagcatgtggctttgaaacataagtaaatctttcttcagggtcccagctctagttctcagggatttcctcattgcattttcatttttaggatgttctgaggttgttt

SEQ ID NO: 311647 - DNA, 442 bp, Homo sapiens
gttcagttagtgaactaaaacaagataatgaaggtcaggctcttaccccaatccctggcacaccgtatacacactcagtggcagctgttgtcatgtctatctgcctggagtggtttggaattgccatttacacaccctgggatctgagtgctgtgtttctccaggctttttgtgaattgtttgatgtaaggcaacactacagtttggaaggcactgctgggagtggaggcaaatccttcaccaaatcaactagtccactttgtttaaaaaagtaaaggaccagttcagaatttatcttcacgtttaaagwtgtttcctttagtcagtgcatgtcagaaattgctgcagcagcagcagcggggaggaagcctctcacaacaatccgactccagcagggagagtcagcccaacacgtcttgcatctaaatattcccagatgctg

SEQ ID NO: 311648 - DNA, 554 bp, Homo sapiens
agtaggcctgagggatacactttaagagagggaaactttactgtaaaccattttgtgcctgttaaattttgtagcatatgaatatatttctctgttcaattaaatattaaatgaagcatttataatgaaggaaaaagttaatttctaaatttaccttwgctgggaagccttccctgactttctcttaccgagttgattgtgtgaagtcctgttcatgtatctgtcaccccctccagtctctactgtcctagaattcagggattgctccttattcctcccttatccttgtccctagtggtctagcacagtgcctgctacttcataagccctcaaaatagctgaggaataaaacaactacacttgcaaatgtatttcccaccacctctcagactcctctatggtcactggccatttctgcctctggggctagctcctactgtcccctctccttggatttccctttcccccattattttgtttttgaagtctcctcatttttcaagactcaactcagctttcaccccaggaagtcatcttctccctgtctgctttcc

SEQ ID NO: 311649 - DNA, 554 bp, Homo sapiens
agtaggcctgagggatacactttaagagagggaaactttactgtaaaccattttgtgcctgttaaattttgtagcatatgaatatatttctctgttcaattaaatattaaatgaagcatttataatgaaggaaaaagttaatttctaaatttacctttgctgggaagccttccctgactttctcttaccgagttgattgtgtgaagtcctgttcatgtatctgtcaccccctccagtctctactgtcctagaattcagggattgctccttattcctcccttatccttgtccctagtggtctagcacagtgcctgctacttcataagccctcaaaatagctgaggaataaaacaactacacttgcaaatgtatttcccaccacctctcagactcctctatggtcactggccrtttctgcctctggggctagctcctactgtcccctctccttggatttccctttcccccattattttgtttttgaagtctcctcatttttcaagactcaactcagctttcaccccaggaagtcatcttctccctgtctgctttcc

SEQ ID NO: 311650 - DNA, 554 bp, Homo sapiens
agtaggcctgagggatacactttaagagagggaaactttactgtaaaccattttgtgcctgttaaattttgtagcatatgaatatatttctctgttcaattaaatattaaatgaagcatttataatgaaggaaaaagttaatttctaaatttacctttgctgggaagccttccctgactttctcttaccgagttgattgtgtgaagtcctgttcatgtatctgtcaccccctccagtctctactgtcctagaattcagggattgctccttattcctcccttatccttgtccctagtggtctagcacagtgcctgctacttcataagccctcaaaatagctgaggaataaaacaactacacttgcaaatgtatttcccaccacctctcagactcctctatggtcactggccattyctgcctctggggctagctcctactgtcccctctccttggatttccctttcccccattattttgtttttgaagtctcctcatttttcaagactcaactcagctttcaccccaggaagtcatcttctccctgtctgctttcc

SEQ ID NO: 311651 - DNA, 544 bp, Homo sapiens
atgggacacatcagaattgcactgcaaaggctttaaaaatggaaatgaggagcttccagatagctgaacatgtgaaggttcccacagggtggatggaagctctgcgcccctcctcccatatcttgccctatgtatctcttcatctttatctatcctttgcaatattccttataataaactgataaatgttaaggaggaaaagaagtagaagaaggagaaggagggggaagaggaggagagggaggaggagggaaagaaggagaagaagaggaagaagaagaggaggaggaggaagggagaaagaaagagaagaagaaaaagaggaggggggaaggagaagaagaggaagaagaagaaraagaagaagaaaagaggaggaggaagggagaaagaaggagaagaagaaaaagaagaggtgagggaagaggaagaagaaagaaaaaggaggaggaggagggaggaggaggaagaaggagggggaggaggaggaaaagaaaagaaatggaaactacatttgcaacagttcccacaggtagaggttgga

SEQ ID NO: 311652 - DNA, 544 bp, Homo sapiens
atgggacacatcagaattgcactgcaaaggctttaaaaatggaaatgaggagcttccagatagctgaacatgtgaaggttcccacagggtggatggaagctctgcgcccctcctcccatatcttgccctatgtatctcttcatctttatctatcctttgcaatattccttataataaactgataaatgttaaggaggaaaagaagtagaagaaggagaaggagggggaagaggaggagagggaggaggagggaaagaaggagaagaagaggaagaagaagaggaggaggaggaagggagaaagaaagagaagaagaaaaagaggaggggggaaggagaagaagaggaagaagaagaagaagaagaagaaaagaggaggaggaagggagaaagaargagaagaagaaaaagaagaggtgagggaagaggaagaagaaagaaaaaggaggaggaggagggaggaggaggaagaaggagggggaggaggaggaaaagaaaagaaatggaaactacatttgcaacagttcccacaggtagaggttgga

SEQ ID NO: 311653 - DNA, 433 bp, Homo sapiens
tagcctgataccaacatcaaacaggcaattctaaaaaataaataaataaacaaaaaaccagaaaactacagaccaaggtcaagaacatgagtgcaaaaaatttcaacaaaatattagcaaatagaatacatcagaaaaaaaatagactgaaaaaatataaacagagcctcaggaatctatgggactayaacattcatgtcatcaaagtcctagaaagtgaggagaaaaaagacagggctgaaaagtctctgaagaattaatgactgaaaatttcccaaattgacaaaacacataaatttctggaattgagaacctgggaaaattgcaaacagcataaacctaaaaaaatccataaggcacattatgatcaaacttctgaaaactaaacataaaaaaaaaaaatcaagaagccagcaagagagaagtggcaccc

SEQ ID NO: 311654 - DNA, 583 bp, Homo sapiens
aaggaaccttcttaatttgataaagagcatccacaaaaaaacctacagccgtcattatacttaatggagaaagactgaatattttctccctaagattgagaacaagacaaggatgcttattctcatcacccttattcaacatggtactgttaacttctagccagtacaataatggkaggaaaggaataaagattagaaaggaagaaatacagctgtctctatatgctgatgacatgattgtctacatagaaaatctcaaggaggccaggcacaatggctcatgcctataatcctagccctttgggaggccaaggcaggcagatcacctaaggtcaggagttcaagaccagcctggccaacaaggcaaaaccctgtctctaccaaaaatacaaaaactagctgggcatggtggcacatgcctgtagtcccagctacttgggagactgatgcaggagaatcacttgaacccaggaggcagaagttgcagtgaattgagaccacacaactgcactccagcctgggcaatagagcaagactccatctcaaacaaaaacaaaaacaaaaacaaagaaacagaaaatct

SEQ ID NO: 311655 - DNA, 583 bp, Homo sapiens
aaggaaccttcttaatttgataaagagcatccacaaaaaaacctacagccgtcattatacttaatggagaaagactgaatattttctccctaagattgagaacaagacaaggatgcttattctcatcacccttattcaacatggtactgttaacttctagccagtacaataatgggaggaaaggaataaagattagaaaggaagaaatacagctgtctctatatgctgatgacatgattgtctacatagaaaatctcaaggaggccaggcacaatggctcatgcctataatcctagccctttgggaggccaaggcaggcrgatcacctaaggtcaggagttcaagaccagcctggccaacaaggcaaaaccctgtctctaccaaaaatacaaaaactagctgggcatggtggcacatgcctgtagtcccagctacttgggagactgatgcaggagaatcacttgaacccaggaggcagaagttgcagtgaattgagaccacacaactgcactccagcctgggcaatagagcaagactccatctcaaacaaaaacaaaaacaaaaacaaagaaacagaaaatct

SEQ ID NO: 311656 - DNA, 486 bp, Homo sapiens
tctctaccaaaaatacaaaaactagctgggcatggtggcacatgcctgtagtcccagctacttgggagactgatgcaggagaatcacttgaacccaggaggcagaagttgcagtgaattgagaccacacaactgcactccagcctgggcaatagagcaagactccatctcaaacaaaaacaaaaacaaaaacaaagaaacagaaaatctcaaggaatctaccaaaacacttctatcactaagaagtgagtttagcaaggtcacagaagagaagataaacatacaaaaaaattgcatttctgtatactagcagtgaacacatgaatactgaaattaaaaatataataacacttataatgacaaaaaataaaaagagtgtataaaatatgtataggacttatatgctgacartacaaatgctgatgaaataaaccaaagatctaaataaatgaagagacatactatattcatggatgaaagactcaac

SEQ ID NO: 311657 - DNA, 531 bp, Homo sapiens
taactttgggggaatgacacacaatggggaccagtggtttctggcaaccccggtgtgatctgggagggtcaggatcagaggatgcatgttgcagmtggagcccaggataaggttagtatatcacactgtgggacccacagagctgcctggtcacaaaacagaaggagtctgaatttccccaagaagagggaggcgcctgcagaatcattagtaggaacagaaagccagtgccccttctgggaggagtgagcggggaagaaaaatgtcctcatgtattcatgaaaagacaaagatgcacacaaggcttcacctttataccccactttatggaaatgggcaaagtggtttgtacatagagcacaaaaaattgcgcacgggtagctttgactttctgtcacaaactctcagttttcctttaaactaaaatgtgtcaagtcaggggctgtgctgcatttgttcaccttatctccaggtcttaacacagtatctgatccacagaaagtgtttagtgaatcattgtggaatgaaggt

SEQ ID NO: 311658 - DNA, 531 bp, Homo sapiens
taactttgggggaatgacacacaatggggaccagtggtttctggcaaccccggtgtgatctgggagggtcaggatcagaggatgcatgttgcagctggagcccaggataaggttagtatatcacactgtgggacccacagagctgcctggtcacaaaacagaaggagtctraatttccccaagaagagggaggcgcctgcagaatcattagtaggaacagaaagccagtgccccttctgggaggagtgagcggggaagaaaaatgtcctcatgtattcatgaaaagacaaagatgcacacaaggcttcacctttataccccactttatggaaatgggcaaagtggtttgtacatagagcacaaaaaattgcgcacgggtagctttgactttctgtcacaaactctcagttttcctttaaactaaaatgtgtcaagtcaggggctgtgctgcatttgttcaccttatctccaggtcttaacacagtatctgatccacagaaagtgtttagtgaatcattgtggaatgaaggt

SEQ ID NO: 311659 - DNA, 629 bp, Homo sapiens
cagcagtgaagtgacatcagggcaggatattgggggcccactgtgcattataagggccactgcaagggagatggggagccaaggaagggtactgarcaggggagtcacataatctgacttgtgttttaacaggatcgctcagactgctttgttgagaaagcactgtgagagctaagggtagaagccgagaaaccagtgttggtgctattgccatactccaggcaagagataatcaaccgcttagaccagagtagtagcattctttaacacattaaaaaaatatgtagaggctgggcatggtggctcatccttaatcccttaaccccagcactttgggaggtggaggtgggcagattatttaagctcaggagttcaagatcagcctgggaaacatgacaaaaccccatctctataaaaaatacaaaaattagctggccgtggtggctggtgcctatggtcccagctcctctggaggctgaggtaggaagatcacttgagcccaggaggtggaagttgcagtgagccaagattgcaccactgcactgcagcctgggacagagcaagaccctgtctcgagaaaaaaaaattttatatatatatatatatatatatgaagagagacagagaga

SEQ ID NO: 311660 - DNA, 629 bp, Homo sapiens
cagcagtgaagtgacatcagggcaggatattgggggcccactgtgcattataagggccactgcaagggagatggggagccaaggaagggtactgagcaggggagtcacataatctgacttgtgttttaacaggatcgctcrgactgctttgttgagaaagcactgtgagagctaagggtagaagccgagaaaccagtgttggtgctattgccatactccaggcaagagataatcaaccgcttagaccagagtagtagcattctttaacacattaaaaaaatatgtagaggctgggcatggtggctcatccttaatcccttaaccccagcactttgggaggtggaggtgggcagattatttaagctcaggagttcaagatcagcctgggaaacatgacaaaaccccatctctataaaaaatacaaaaattagctggccgtggtggctggtgcctatggtcccagctcctctggaggctgaggtaggaagatcacttgagcccaggaggtggaagttgcagtgagccaagattgcaccactgcactgcagcctgggacagagcaagaccctgtctcgagaaaaaaaaattttatatatatatatatatatatatgaagagagacagagaga

SEQ ID NO: 311661 - DNA, 629 bp, Homo sapiens
cagcagtgaagtgacatcagggcaggatattgggggcccactgtgcattataagggccactgcaagggagatggggagccaaggaagggtactgagcaggggagtcacataatctgacttgtgttttaacaggatcgctcagactgctttgttgagaaagcactgtgagagctaagggtagaagccgagaaaccagtgttggtgctattgccatactccaggcaagagataatcaaccgcttagaccagagtagtagcattctttaacacattaaaaaaatatgtagaggctgggcatggtggctcatccttaatcccttaaccccagcactttgggaggtggaggtgggcagattatttaagctcaggagttcragatcagcctgggaaacatgacaaaaccccatctctataaaaaatacaaaaattagctggccgtggtggctggtgcctatggtcccagctcctctggaggctgaggtaggaagatcacttgagcccaggaggtggaagttgcagtgagccaagattgcaccactgcactgcagcctgggacagagcaagaccctgtctcgagaaaaaaaaattttatatatatatatatatatatatgaagagagacagagaga

SEQ ID NO: 311662 - DNA, 592 bp, Homo sapiens
tttttagtatttttccccaggccagactagctggttccacttagacaccaaacaaacaaaaaaaaactctgaaacgctaaatatgatcatctwattgtacattttactaaggaattccagatacaatattctatttaatcttcacaatattaacactggtcaatattattatcttctttttacgatgaagcctggtaccattctcatatgttgctttaaggatatcataaaaggtgtccgaccaacccaatagtattgtacttgaaaacactacatttataacaagaagaaagaaaaataaaattcattgaagttagaggagtgggagaaaatgctaagacactcagagaaagagagataacaatataaatgggatgactactaagcacctttctagttcttcagcgttctaactcaacatttcccaaagtggtatcctaaagaacactggtccacaggctattcatagatatgctgagaacctaagtgtttcatgctcaaacaggcttgagagaccaataaactaaaaccagctaggtacagtggctcatgcctgtaatcctaacactttgagaggtcgaggcagaaggat

SEQ ID NO: 311663 - DNA, 503 bp, Homo sapiens
gttgacactcagtattaactatcacagcactgctatccccatcagagtatttctctgacatcaccctagacagcatgggtatttcaggtgccaagctcatgttatgtcctctcgtcataggcgtggcttcagttaatgtcctatagcaaggtagtaaatkcccctccactggaaattctctagtccaaagtccaattagttgtggtgaggagggggctcacaggcttttgccataaaccccaatgagtgatccataaagggatatcaagtagataacttgtccctaccagcactccagcatctatcctactctctgaggactcaggcagtcttactggttcccatttagcatgttcaagtaatactgcttgaagggcacatttacatgccttcagttctgcaatactaggtagcggaaacagttcccagtcagacacaatgcctattcccataaaacatttaggtgaaaaagacacaactactttacataaagcctaaacatt

SEQ ID NO: 311664 - DNA, 503 bp, Homo sapiens
gttgacactcagtattaactatcacagcactgctatccccatcagagtatttctctgacatcaccctagacagcatgggtatttcaggtgccaagctcatgttatgtcctctcgtcataggcgtggcttcagttaatgtcctatagcaaggtagtaaattcccctccactggaaattctctagtccaaagtccaattagttgtggtgaggagggggctcacaggcttttgccataaaccccaatgagtgatccataaagggmtatcaagtagataacttgtccctaccagcactccagcatctatcctactctctgaggactcaggcagtcttactggttcccatttagcatgttcaagtaatactgcttgaagggcacatttacatgccttcagttctgcaatactaggtagcggaaacagttcccagtcagacacaatgcctattcccataaaacatttaggtgaaaaagacacaactactttacataaagcctaaacatt

SEQ ID NO: 311665 - DNA, 615 bp, Homo sapiens
gctaaattatagtgcaccttgaatccataacttcacagactctctaatgtcaggacartcagcagaaaggagtgggattctgaaaattgggatgaagatgttgagcagattctgatgaaactgaggaacttggactcctaaatccaaccaaccttctttgccagcagaagtagcccttttacccctgtctgaggaggtagatctcactttacctgaagaatgttttttcatgagtttgttgcactgtgggggatagccgaacttttttaaatttcactcccacttcccacatactacctctcattgaatgtacacctaaaatcatatccaactcctagaagttcctaagggatcagttacacattgtgacccttaagaaaatgctgtatgttatgtgtccaaaggaattgcaagatgttaccaattcgtagcaacataaacctggagagtattaattggaatgatatctgaggatgtgggatcaaggtgaaaggaatcaaatgcttcattggactaagtgttttaatatccttacactaaaatgagattttgtgttcctgtgatgtgtcatcttaagtggctgggagtgggctctgtctgtagtggggtcccagg

SEQ ID NO: 311666 - DNA, 622 bp, Homo sapiens
tttgctacaatcgatggaccaatattgacatactattattaactaaagtccatagcttacattagggctcactctttctgtcctgcaggtctatgtacaaagtttkgacaaatgtataatgtcatttatttactattacggtattatacagagtaatttcattgtgctaaaaatctcctgtgatccacctatttcatctctccctgcatttctctgaacccatgacaatcaatgatctttttactttctctagactgttgccattttcaaaacgtcatatacttgggatcatagagtaggtagacttttcagaataatctccatctaagtaaattcactgtattccaaaatgctctgtggagaaacttggaagtcatacttatctctctctcaccgcctacagaaaatgccttaccattcttacctaggacatctccacaatatttgttgaatctctttacttatgccactctttggcatagtccaaatgactggaacatctcacttgtactaatacaacattgttccaatggtcttaaaagtctccctaacatacttcataaaactgtctccctaatacactccctaccgaatatccaggacaactttttaaaagtgaaaa

SEQ ID NO: 311667 - DNA, 500 bp, Homo sapiens
tgcactttatttctattattattacattgtaatatataatgaaattattatataactcatcataatgtagagwcagtgggagccttgaacttgttgtcttgtaactagactgtcccatctgggggtgatgagagacagtgacggatcatcaggctttagattctcttaaggagcgtgcaacctagatccttcaaaagcacagttcacaatagggttcacgctcctgtgagaatctaatgccaccactgatctgacaggatgaagagctcaggtagtaatgcaggtggtgagtagtggctgtaaatacagattaagcttcccttgctcacccacggctcacctcctggtgtgaagcccagtttctaacaggccatggactggtatcagtctgtggcccagagtttagagaaccctattttataccatatttttactgtacgtttcctatgtttagatctggttagaaacacaagtacttaactatttgttacaagtgccta

SEQ ID NO: 311668 - DNA, 596 bp, Homo sapiens
agcattctggtcacagagaggcccatgctatagtcagcattgtgtttccactagaaggataaatcaatgatagaatgtgagtgcatatgcatccccctagaaaagcagaggaacagtgaaggaagctaatcgtttttaatctctctcttacaggaggttttatgttttaagtctcattcctttaaattattttcctaaagtaaaaccttagagtaggcttctgattcttgcattttgagcggaccatttcactcamcacttgtttgaacgtgtgcaaataacaaaatcaggaggtatttgcattctgaccctggatgcgttcaagtggccaggaaaataaatatcttgcatagcactatgaacagtacagaaaatatccttctgtttctttcgcactttatcaatggctactatttagctgttatgctgtacggttatatggacttcctgatagtttctcttttttgatgtatgaattcatgattcagatgcatttagggtcactgcataccccatctcctttatcaaatggttttcatggaccaaggctgaaaagaggagattttttaaaagctttttttttttttttgtcaaaa

SEQ ID NO: 311669 - DNA, 572 bp, Homo sapiens
gtacggttatatggacttcctgatagtttctcttttttgatgtatgaattcatgattcagatgcatttagggtcactgcataccccatctcctttatcaaatggttttcatggaccaaggctgaaaagaggagattttttaaaagctttttttttttttttgtcaaaaacattttcttctattgactttttttcttgccctggcaaaagaaatttattcacatgtttggcttatttacattaagcttattaacatggtgtgccacataaaaactatttaaggtttttgctttatttcaacattctttaaccctttttctaaaacattatctatatgtagtccatttctttatcctaactttcctctttcttggcctcactccccaaacatcwggactcttcaggccttttgggaatttctcttaggaaaccttctgccctctaaattaagtcatccttcaaattcttgtcccttaatgcccaaatgcacaactgacttcataagcatcctctgtggctctcacctggaaattgtaaatcagtgggtttgagtaagaactttggaaacttaac

SEQ ID NO: 311670 - DNA, 477 bp, Homo sapiens
gtcatagctaaaggatattgggtttctttttgagacaatacaaatgttctagaactaactaggctgttggttttccatgtttgtgagaaaaaaattgaattttacatcttacattggtgtattgtttggtatgtgaattatatgtcaatgaagctgccaaaattgcctaatgcagtaaatacttacagacattatctttataagcaaaggcccttcagggtcttcaataatttttaagaaygcaaaggggttctgcaggcaaaatgtttgagaactgctgacctagtgaaccctgtaagacttggcctgagttctgtataacacttgatcatctcaagtatttaaactggcattgttagaaacatgaagcaatggcaattaatacaaataatttccaaaagtagaggttaagtctattacttctgcgtatttcagggaatactgacaatactgttcaatggagttgaaagtcatagg

SEQ ID NO: 311671 - DNA, 596 bp, Homo sapiens
attggtgtattgtttggtatgtgaattatatgtcaatgaagctgccaaaattgcctaatgcagtaaatacttacagacattatctttataagcaaaggcccttcagggtcttcaataatttttaagaacgcaaaggggttctgcaggcaaaatgtttgagaactgctgacctagtgaaccctgtaagacttggcctgagttctgtataacacttgatcatctcaagtatttaaactggcattgttagaaacatgaagcaatggcaattaatacaaataatttccaaaagtagaggttaagtctattacttctgcgtatttcagggaatactgacaatactgttcaatggagttgaaagtcataggttctggaatggatctgccattaacacrctttctgattaaacaatgacttttcttctctgaatttcattttcctcttaaacaataagaaaactgcactcaaagccctctaatatctttttcagttgtcaagtactaaagaaattattgttttaaattgacatggacttcgaaaattaatatctccacattttcccttaatctgcacgtaacacgcaaagatctaataatatt

SEQ ID NO: 311672 - DNA, 596 bp, Homo sapiens
attggtgtattgtttggtatgtgaattatatgtcaatgaagctgccaaaattgcctaatgcagtaaatacttacagacattatctttataagcaaaggcccttcagggtcttcaataatttttaagaacgcaaaggggttctgcaggcaaaatgtttgagaactgctgacctagtgaaccctgtaagacttggcctgagttctgtataacacttgatcatctcaagtatttaaactggcattgttagaaacatgaagcaatggcaattaatacaaataatttccaaaagtagaggttaagtctattacttctgcgtatttcagggaatactgacaatactgttcaatggagttgaaagtcataggttctggaatggatctgccattaacacactttctgattaaacaatgacttttcttctctgaatttcatyttcctcttaaacaataagaaaactgcactcaaagccctctaatatctttttcagttgtcaagtactaaagaaattattgttttaaattgacatggacttcgaaaattaatatctccacattttcccttaatctgcacgtaacacgcaaagatctaataatatt

SEQ ID NO: 311673 - DNA, 596 bp, Homo sapiens
attggtgtattgtttggtatgtgaattatatgtcaatgaagctgccaaaattgcctaatgcagtaaatacttacagacattatctttataagcaaaggcccttcagggtcttcaataatttttaagaacgcaaaggggttctgcaggcaaaatgtttgagaactgctgacctagtgaaccctgtaagacttggcctgagttctgtataacacttgatcatctcaagtatttaaactggcattgttagaaacatgaagcaatggcaattaatacaaataatttccaaaagtagaggttaagtctattacttctgcgtatttcagggaatactgacaatactgttcaatggagttgaaagtcataggttctggaatggatctgccattaacacactttctgattaaacaatgacttttcttctctgaatttcattttcctcttaaacaataagaaaactgcactcaaagccctctaatatctttttcagttgtcaagtactaaagaaattattgttttaaattgacatggacttsgaaaattaatatctccacattttcccttaatctgcacgtaacacgcaaagatctaataatatt

SEQ ID NO: 311674 - DNA, 608 bp, Homo sapiens
aaaaagcatgaacaattgctaaaactcttaatatgtcttgtcaattagctctccaaacaaatatgagtcattgcctgaaatctcttttgtcctcaggaagggatagagctgcttgactcagatctcccaggtggccttagaccgtaatgtcttcctttcgtgcagagctcttaccatcctaagccactactcctacctaatattctataaaaagctttttctccctacccagtgtctccaatgagctgactttcttttctggattactcttttatgtaataaaaagtagacatgagggtcaaacagaaagggaaaaaggggaatttgtttaatttctaccaagtgccaggcatagtacaaagaacatttagataaggcagaaggcattaattatttttatctacccagaaccccctgccccacctaagcaccccagcccctgacctggccacgtgggtggctatgtgaccygagctgaaccaatcagagtccttccctgggatctttttcacatcataaccacatgagaaggtctcccattatgaaacagagaagcttgttggcagccatggttctagccaaggatggaaaaaacaaccaaaaaaaga

SEQ ID NO: 311675 - DNA, 524 bp, Homo sapiens
ggatggaaaaaacaaccaaaaaaagaaaagaaacaaaaaaaacccaccatggtaaaaatatatatatataaaaatraaaaagatatgacagacagacagacatggggaatggtctctttccagttgcccctgccactcaactgctctcctaccttcctggatttggttatgagagtcaataaattatccccttttattgcctaaatgacttccatatgagtttctgctccttgcaaccaacataatcttgacaattaatagtagctagcattttgtgagtgtttactgtgccatgcccattaatacacctaatcctctctacaattggacaggtaaggtgcttttagtaacctccaatgtacaaaaaggaaaacaagttgggtgaagtgaaatgacttgctcacagtcgctgggctaacaagggggcagagtcaaagtttaaagccagagcccatactcttccctattgtataacacagacatgctgtctctgttcccagtgctggggaatgcagagaactggg

SEQ ID NO: 311676 - DNA, 613 bp, Homo sapiens
acaagggggcagagtcaaagtttaaagccagagcccatactcttccctattgtataacacagacatgctgtctctgttcccagtgctggggaatgcagagaactggggactgaaggaagagcaggcgttcaggtaagcattaatcaggggaccttccacaagggaaaagggagtactggcccagttgaagtccagccagcactcagcrtggtcaaggatggggtggtgctctctccagccattcaaggtgctgagaaaagaacagaactttcatctgaggaatacaagccttttaaattattaggcccagagaggcaatagaacgagatagcaatcatgtcctacataccccctttgagctcggtattcatttcttaaaactgcttgccattgccacaagtagctataaattaatctaataatgcccccactggatgctataacccacaccttatagcttaacaatgtatagccaatcactcgtcaatgttatttctgaaaaccagtgagaattcctgacaaccaactgtgtaccagcccactccatgtcccccttttttgcctttataaatccacttgtaactgctgctaattggagtgtatattcagggaa

SEQ ID NO: 311677 - DNA, 613 bp, Homo sapiens
acaagggggcagagtcaaagtttaaagccagagcccatactcttccctattgtataacacagacatgctgtctctgttcccagtgctggggaatgcagagaactggggactgaaggaagagcaggcgttcaggtaagcattaatcaggggaccttccacaagggaaaagggagtactggcccagttgaagtccagccagcactcagcgtggtcaaggatggggtggtgctctctccagccattcaaggtgctgagaaaagaacagaactttcatctgaggaatacaagccttttaaattattaggcccagagaggcaatagaaygagatagcaatcatgtcctacataccccctttgagctcggtattcatttcttaaaactgcttgccattgccacaagtagctataaattaatctaataatgcccccactggatgctataacccacaccttatagcttaacaatgtatagccaatcactcgtcaatgttatttctgaaaaccagtgagaattcctgacaaccaactgtgtaccagcccactccatgtcccccttttttgcctttataaatccacttgtaactgctgctaattggagtgtatattcagggaa

SEQ ID NO: 311678 - DNA, 448 bp, Homo sapiens
aaataggtgattaagtttaaacctatttagctcatttagggtgagctctaatccaatcagactcatgttgttataggaagaggagattaggacacacagagagacaccaggkatggacaggcacagaggaaagaccatctgaggacacaccagaatcgaccatctgcaagccaagaggaggtctttggaggaaccaaccctgctgacaccctgatctcagacttccagcctccagaattgtgagaaaattaatctctgtcatttaagccacccagtctgtagtactttgttatggcagctccagcaaactatatctacagtaatccatcaccacttatgacaggctctgccacatagtaggtgtgtgtgcacacaccacacacaaacatgtttagaatatgaaatccgtgaaccctactcccacactgataacagttcaggaacagtt

SEQ ID NO: 311679 - DNA, 448 bp, Homo sapiens
aaataggtgattaagtttaaacctatttagctcatttagggtgagctctaatccaatcagactcatgttgttataggaagaggagattaggacacacagagagacaccagggatggacaggcacagaggaaagaccatctgaggacacaccagaatcgaccatctgcaagccaagaggaggtctttggaggaaccaaccctgctgacaccctgatctcagacttccagcctccagaattgtgagaaaattaatctctgtcatttaagccacccagtctgtagtactttgttatggcagctccagcaaactatatctacagtaatccatcaccacttatgacaggctctgccacatagtaggtgtgtgtgcacacaccacacacaawcatgtttagaatatgaaatccgtgaaccctactcccacactgataacagttcaggaacagtt

SEQ ID NO: 311680 - DNA, 529 bp, Homo sapiens
ctgataacagttcaggaacagttgattttccctcagggaatctggtttgttttcctagtttccatcccatcaagaccccttcccaccygctgggaaatacttgcctgaacccctcgttcctttcacaacacacacctgatggtaggaagaagcttccaactctgatattgacagggtgcttgtaacctagcaccctttctcctaccttgttatggaaaaataaatcctttatcctatttcaactacagtcttggcaaaggaaaaaacaaaacaaaaaaggaaaccagcctagaaatggaaaccaaagatcatgaacagtgctatgctgagttacagctaagggttggcctttctggagctggctgccttcagatggcagggctctgagagtgtgtgtgtgtgtgtgtgtgtgtgtgtgtgtgtgccagaagcacaagatgacacaccctgtggtggggtcaggcaagctgattgtgggaaaggtgggaacagaatattttacaacaatgttggaaaaatgggtttacgt

SEQ ID NO: 311681 - DNA, 463 bp, Homo sapiens
tgtctggcaagtttcatcattagtcagttattcattcactcaatcaacaactacttactgagttaatatggcagcatggttatgagcacagactctggagcaagaggtcytaggttcaaatcccagttaccctgcttatcagctaaatgacttctcagtgccttggtttctccatccagaaaaatggggattataattaataattgcctacctcattgggttaagtggataaactaagaacagtggcatgcccatatgacatgctctataatttttattatcactgtgtgccaggcattattctatatgatggaggatgcagctatgaatagggcagacaaggtgcctgtctttacagagcttctattctagtgaaggagagaggctttattagcgagtaatccttgatcgagccatacctgaagctaatgccacatccttcaaccttccaatttccccaggc

SEQ ID NO: 311682 - DNA, 463 bp, Homo sapiens
tgtctggcaagtttcatcattagtcagttattcattcactcaatcaacaactacttactgagttaatatggcagcatggttatgagcacagactctggagcaagaggtcctaggttcaaatcccagttaccctgcttatcagctaaatgacttctcagtgccttggtttctccayccagaaaaatggggattataattaataattgcctacctcattgggttaagtggataaactaagaacagtggcatgcccatatgacatgctctataatttttattatcactgtgtgccaggcattattctatatgatggaggatgcagctatgaatagggcagacaaggtgcctgtctttacagagcttctattctagtgaaggagagaggctttattagcgagtaatccttgatcgagccatacctgaagctaatgccacatccttcaaccttccaatttccccaggc

SEQ ID NO: 311683 - DNA, 584 bp, Homo sapiens
agtgcgtgctcagcatcataaagggtggcggtagtaagacaaccctgaagagttgttaaatgagctcccatgcatgtagctggcattactcatgttattaacctgggaaactgtcacgtctcttacttttccatttaatctcatgcccatcctctttgctcacaggagccaagaagtccagtatctcactccacatctgccttctcgtggtccaacactctgccgactcagttaatccaaagatcacttccaaacttcaggctgrtggaaacctgaggagtcggatccattcataggcagccccattttcaccttcccttgtccccgaggctgccattaggttgaaaaccagtctggtactgtcagcgtgtctttgtctacagctatgaaaaagtccacatagtccagtctctacatagggcacaatgattctcctctacatctcagctaccaggtaccagcttgtcgaacacacatgcaaacattcaaacccttctcaggttcccctctagggccttcagggacttatccggcatacctgaggttggggccattgcaatctattcttagtctagtgttaagcc

SEQ ID NO: 311684 - DNA, 584 bp, Homo sapiens
agtgcgtgctcagcatcataaagggtggcggtagtaagacaaccctgaagagttgttaaatgagctcccatgcatgtagctggcattactcatgttattaacctgggaaactgtcacgtctcttacttttccatttaatctcatgcccatcctctttgctcacaggagccaagaagtccagtatctcactccacatctgccttctcgtggtccaacactctgccgactcagttaatccaaagatcacttccaaacttcaggctggtggaaacctgaggagtcgsatccattcataggcagccccattttcaccttcccttgtccccgaggctgccattaggttgaaaaccagtctggtactgtcagcgtgtctttgtctacagctatgaaaaagtccacatagtccagtctctacatagggcacaatgattctcctctacatctcagctaccaggtaccagcttgtcgaacacacatgcaaacattcaaacccttctcaggttcccctctagggccttcagggacttatccggcatacctgaggttggggccattgcaatctattcttagtctagtgttaagcc

SEQ ID NO: 311685 - DNA, 521 bp, Homo sapiens
aaaatgtagctttctgctccttctggtcatttggccacataggaataatcaccaaccatagatgcaattctggaaaagtcattaatgctcatctctatggttgcaagagattattgggcttctatttcatgccaaggcactttacatatgtaaataatggtgcatgctttgaatgaagtcatgtttttgtgacctacaatccccactggctgctgcagcacctggcacatattagccactcaagaaattctcgttgagtgaataaatgaaacattcaatggctctgagaccctacctttcagattatcagcaccrtgaccctgcttttgagacccctactctctctcccttccctattatctcttggtgaatattggggaatggctcacctgaactgccccacgatttcatgcctctgttttcgccattacctgtcaccttacctggccacagtcattccttccaaagccactattcacatctctatcagatgctctgcagttctggggctcctgcctctt

SEQ ID NO: 311686 - DNA, 485 bp, Homo sapiens
ctttcacctatattacctcagctgatccctctacaatgtgcagtatctattttggtcccctctgggaacctgaggcttgacaaggtcaggaaaggccacaccatggcctgttcctgaaacaggaaccacaaatgaaaatccttgyagagagtccaggcagataacataagtgaagaaagggaggaatgagaagcagtagggaatggtggggtctgtggtgaattggagtgcatgcctcattgaaagacgggggtagctgcctatcttgtatccaccaactgtctccacgtgggaacatgggcccaatgctgtcagagcttctaataaattaagagaagctaaaagccagatgctatgtcagtctcccagtttttaaatgatcgcaactgggagtcttgcaactctgtctcccaggctgtaaggcagtggcacaatcctagctcactgcagcctcgaaaccctaggctccaaagatcctcctgcct

SEQ ID NO: 311687 - DNA, 485 bp, Homo sapiens
ctttcacctatattacctcagctgatccctctacaatgtgcagtatctattttggtcccctctgggaacctgaggcttgacaaggtcaggaaaggccacaccatggcctgttcctgaaacaggaaccacaaatgaaaatccttgcagagagtccaggcagataacataagtgaagaaagggaggaatgagaagcagtagggaatggtggggtctgtggtgaattggagtgcatgccycattgaaagacgggggtagctgcctatcttgtatccaccaactgtctccacgtgggaacatgggcccaatgctgtcagagcttctaataaattaagagaagctaaaagccagatgctatgtcagtctcccagtttttaaatgatcgcaactgggagtcttgcaactctgtctcccaggctgtaaggcagtggcacaatcctagctcactgcagcctcgaaaccctaggctccaaagatcctcctgcct

SEQ ID NO: 311688 - DNA, 485 bp, Homo sapiens
ctttcacctatattacctcagctgatccctctacaatgtgcagtatctattttggtcccctctgggaacctgaggcttgacaaggtcaggaaaggccacaccatggcctgttcctgaaacaggaaccacaaatgaaaatccttgcagagagtccaggcagataacataagtgaagaaagggaggaatgagaagcagtagggaatggtggggtctgtggtgaattggagtgcatgcctcattgaaagacggrggtagctgcctatcttgtatccaccaactgtctccacgtgggaacatgggcccaatgctgtcagagcttctaataaattaagagaagctaaaagccagatgctatgtcagtctcccagtttttaaatgatcgcaactgggagtcttgcaactctgtctcccaggctgtaaggcagtggcacaatcctagctcactgcagcctcgaaaccctaggctccaaagatcctcctgcct

SEQ ID NO: 311689 - DNA, 565 bp, Homo sapiens
acaaatcaataaatttgtattatcgtaataaatctgtctttattgattacaaggcactttctcatcccccatcacctaagacaactgcataaagaccgcatgagctataaagaccatttccttgccccaggtcacacggaggaaaagagacagagccaggatttaaacccctgcccctggctttcattcctttgctgtgtccctgcagacccgaggcccacctgggtgaagaacaggtgggtggacattggcagtgttcaccaggggaagcatgccaggtgcaaggaaacatgtgagcacctgtccgtgcccaatgggtctctgtttgtctccctgcatcttcacccaaaccagcttctcacacccccacggccaccaccaccactccaggcctctacctgggccctttaatgccccttccycattcctcaagagcccactggcgtcccttccctgatggcctgctggcctcctgcctccctccctgacctcagcctcctcggattttcaacagcctggggttgcaggctgagctcagcatctggcaggggcctggaagaaatga

SEQ ID NO: 311690 - DNA, 565 bp, Homo sapiens
acaaatcaataaatttgtattatcgtaataaatctgtctttattgattacaaggcactttctcatcccccatcacctaagacaactgcataaagaccgcatgagctataaagaccatttccttgccccaggtcacacggaggaaaagagacagagccaggatttaaacccctgcccctggctttcattcctttgctgtgtccctgcagacccgaggcccacctgggtgaagaacaggtgggtggacattggcagtgttcaccaggggaagcatgccaggtgcaaggaaacatgtgagcacctgtccgtgcccaatgggtctctgtttgtctccctgcatcttcacccaaaccagcttctcacacccccacggccaccaccaccactccaggcctctacctgggccctttaatgccccttccccattcctcaagagcccactggsgtcccttccctgatggcctgctggcctcctgcctccctccctgacctcagcctcctcggattttcaacagcctggggttgcaggctgagctcagcatctggcaggggcctggaagaaatga

SEQ ID NO: 311691 - DNA, 444 bp, Homo sapiens
ctgcagattcagtgcctggtgaggagggctcactctgcatcataggtggtaccttgttgccgtgtccttatatggcaaaagaggcaaaggcgcttgctcaagccccttttataaaagggggcactaatcccattcatgaaggtggattcctcatgaattagtcacttcctaagggkcccctcttactactatcacattgggtattaagttccaacatatgaattcaaggggaacaatgacattcagaccatagcaccagacgtctatctggggaagcccccaaatatttgtctttttttttttttggaggcagggtctgcctctgtcattcaggctggagtgcaatggtacaatcacagctcactgcagctttgaactcctgggctcaagtgatcctcctatctcagcctccccagtagctaggaccacagatgtgcactacca

SEQ ID NO: 311692 - DNA, 444 bp, Homo sapiens
ctgcagattcagtgcctggtgaggagggctcactctgcatcataggtggtaccttgttgccgtgtccttatatggcaaaagaggcaaaggcgcttgctcaagccccttttataaaagggggcactaatcccattcatgaaggtggattcctcatgaattagtcacttcctaagggtcccctcttactactatcacattgggtattaagttccaacatatgaattcaaggggaacaatgacattcagaccatagcaccagacgtctatctggggaagcccccaaatatttgtctttttttttttttggaggcagggtctgcctctgtcattcaggctggagtgcaatggyacaatcacagctcactgcagctttgaactcctgggctcaagtgatcctcctatctcagcctccccagtagctaggaccacagatgtgcactacca

SEQ ID NO: 311693 - DNA, 615 bp, Homo sapiens
tctcataacttgacacgatacagaaacatacaatgaagaatctggtgggtattgaactgtcaattgcaaaataattattcatcactgcaggtccagcctgttctccgggaaggactgtttgaatgtcctgggcctccaagccaagctcccagagcccagaccrtctctttggctaatgctggctctatctcctgaagaaaatagtttgatgcaaggaagaactttcattatcttttgccctggagcaccagtaactgtctacaaagagcagagcaagggaagaagggcagtgagaaattaatctttgagtttcctccttggtgattcatccatttagaaatgggtagattcagagaagtgtttcttcatccggtccctctgttcccatgatctcaaaaatgaaaaggcagccaaccctgatcaccacccatcagtcagcctcttttcacaagtgggaggcatgggctgtgctggaccaagtgcaaatgcaagacatgtctctaacaggccttctggaaccaggggaagctggtggcttggatgcacccactgtgaggtagagtgttatactgcagcccccataaccctgcacttctccaagtctatgattatttg

SEQ ID NO: 311694 - DNA, 491 bp, Homo sapiens
taaaaaacattaaaaaaaaatcagcacagtgcctggcatacagtcagcacctaataagtagtagctgttttttgttttttgtttttttttccatctctgaaaaaaaaaatcagccatttttwaaaattagctgagtgtaatggtatatctctgtaatcccagctacttgggaagctgaagcagggggactgcttgaccccaggagtttgaagcttcagcgagctatgattgtgccactgaactccagccatggtgacagaacaagacccaatccctgaaaataaataaatcaattggcacagtgcctggcatatagtcagcacctaataagtagtagctgttagaataattacaaaaggccaggcgtggtggctcacacctgtactcccaacactttcagaggccaaggagggtggatggcctgaggtcaggagtttaagaccagcatggccaacacagtgaaaccccatctctgctaaaaatacacacac

SEQ ID NO: 311695 - DNA, 483 bp, Homo sapiens
tgtgaggctgaggcaggaggatcccttaaggccaggagatcgaggctgcagtgagctataattgcaccagtgcactccagtttrggcaacagaagaagaccttgtctccaccaataaataaaataaaaactaaattataatatcccttgaaagcaaacagaagaaatcctctatttcaggcagtaaatatgaggcagacagtagatgtaagggatgctccccaaactgggcactctgttaatgacaaaacagagaccagaatccacattcccaacactcaatccagcgccagacccacaaaaccatttggtttttgtgaaaacactgaattttcccaaaataaaacccaaactatcactaacagatattttagatggtcagtcttcatccttgtcttcattcaatgctcattcctccttttactgcaaaaacaaaaggtggctaaaagagtattccagggagatcctgccacagagttgaact

SEQ ID NO: 311696 - DNA, 483 bp, Homo sapiens
tgtgaggctgaggcaggaggatcccttaaggccaggagatcgaggctgcagtgagctataattgcaccagtgcactccagtttaggcaacagaagaagaccttgtctccaccaataaataaaataaaaactaaattataatatcccttgaaagcaaacagaagaaatcctctatttcaggcagtaaatatgaggcagacagtagatgtaagggatgctccccaaactgggcactctgttaatgacaaaacagagaccagaatccacattcccaacactcartccagcgccagacccacaaaaccatttggtttttgtgaaaacactgaattttcccaaaataaaacccaaactatcactaacagatattttagatggtcagtcttcatccttgtcttcattcaatgctcattcctccttttactgcaaaaacaaaaggtggctaaaagagtattccagggagatcctgccacagagttgaact

SEQ ID NO: 311697 - DNA, 483 bp, Homo sapiens
tgtgaggctgaggcaggaggatcccttaaggccaggagatcgaggctgcagtgagctataattgcaccagtgcactccagtttaggcaacagaagaagaccttgtctccaccaataaataaaataaaaactaaattataatatcccttgaaagcaaacagaagaaatcctctatttcaggcagtaaatatgaggcagacagtagatgtaagggatgctccccaaactgggcactctgttaatgacaaaacagagaccagaatccacattcccaacactcaatccagcgccagacccacaaaaccatttggtttttgtgaaaacactgaattttcccaaaataaaacccaaactatcactaacagatrttttagatggtcagtcttcatccttgtcttcattcaatgctcattcctccttttactgcaaaaacaaaaggtggctaaaagagtattccagggagatcctgccacagagttgaact

SEQ ID NO: 311698 - DNA, 598 bp, Homo sapiens
ggctattctaggtatttttgtatttctatataattttagaatcagcttgtcaatttttccaataatctttctagacttttggcaggaattgccrttaatttgtagatcaattgacatctaacaatattgagtaatctaatccattaacatgatatatctctccatttatttagacatttatctgagtgatgttttttagttttcagtgcaaacgtttcacacttattttgttaaatttattcctaattattattgctatagtttgagtgtctctaccaaaactcatgttggaacgcttaagaggtggggcctaatggaaagtgtttgtgtcttgggagctcttcctttgtgggcagcttggtactattcttacattggtgagtgagttctcactcttgtgagattagttctctcaggaatggattagttaccatgagaatgagttgctatatggtgaggtcacgcttcatgcttgggcctcctggtacatgtctactcccctttgaccttcttctaccatgttgtgacacaacactgaagctttcaccagaacccaagcagatgccagtgtcattctttgcagcctgcagaactgcaa

SEQ ID NO: 311699 - DNA, 278 bp, Homo sapiens
atgcactgctaaagccctcaccagaagctaagcagatactggtgccatgcttcttgaacttcccagtctggagaaacatgagctaaataaamctctttatacagtctcaggtgttctattataacaacataaaacaaactaagacatttatttttgatgttattgtgattggaattgttttctttatttcatctttgtattgtttgttgctactatatatataaccaatttttgtatattgatcatatactctacaaactcactaagcccccctctta

SEQ ID NO: 311700 - DNA, 278 bp, Homo sapiens
atgcactgctaaagccctcaccagaagctaagcagatactggtgccatgcttcttgaacttcccagtctggagaaacatgagctaaataaacctctttatacagtctcaggtgttctattataacaacataaaacaaactaagacatttatttttgatgytattgtgattggaattgttttctttatttcatctttgtattgtttgttgctactatatatataaccaatttttgtatattgatcatatactctacaaactcactaagcccccctctta

SEQ ID NO: 311701 - DNA, 278 bp, Homo sapiens
atgcactgctaaagccctcaccagaagctaagcagatactggtgccatgcttcttgaacttcccagtctggagaaacatgagctaaataaacctctttatacagtctcaggtgttctattataacaacataaaacaaactaagacatttatttttgatgttattgtgattggaattgttttctttatttcatctttgtattgtttgttgctactatatatataacyaatttttgtatattgatcatatactctacaaactcactaagcccccctctta

SEQ ID NO: 311702 - DNA, 278 bp, Homo sapiens
atgcactgctaaagccctcaccagaagctaagcagatactggtgccatgcttcttgaacttcccagtctggagaaacatgagctaaataaacctctttatacagtctcaggtgttctattataacaacataaaacaaactaagacatttatttttgatgttattgtgattggaattgttttctttatttcatctttgtattgtttgttgctactatatatataaccratttttgtatattgatcatatactctacaaactcactaagcccccctctta

SEQ ID NO: 311703 - DNA, 237 bp, Homo sapiens
atctattatgaacttctcctggttgatcacattgatacctgtgtactgtttgayccacttccagggatccacatcatacttagcaaattccttgactatatcagggcaaatgtaacagtatttctccttaatggcttttgtggtctccagtgactgctcaagagggattcctacctccctctcccttagtagttgttgaatgaaatacacagtatcacctacaatcaggatgtgatt

SEQ ID NO: 311704 - DNA, 237 bp, Homo sapiens
atctattatgaacttctcctggttgatcacattgatacctgtgtactgtttgatccacttccagggatccacatcatacttagcaaattccttgactatatcagggcaaatgtaacagtatttctccttaatggcttttgtggtctccagtgactgctcaagagggattcctacctccctctcccttagyagttgttgaatgaaatacacagtatcacctacaatcaggatgtgatt

SEQ ID NO: 311705 - DNA, 680 bp, Homo sapiens
tattgtagatgggtgcagcaaaccacatggcacgtgtatacctatgtaacaaacctgcatgttctgcacatgtatcccagaacttaaagtacaataaattttaaaaaaggaatattttaaaggatcaacctactatttgacagtcatggaaatagtgaatgggaattaaagggaaaaaataagtaagcaaaggaagggaggaggaaaggggaaaagaaaggaaagaaaaggaaaagggaaatacaagaaaaggagacaaataaatamataaacaaataagtgactgaaagtctgagagttggcaaatactattcagataacactgacaaaataggcctcttgctaaaaatagcagaatgcacaaagtacaggagcagcctgtctgtcctgagaggctggggaggtttaggaaaagaggctggagagatttgagacaggtctgaagtatgtagtcagtttttgcttggtggaaaaagtaatcatgggtgattcagaaaaagcaagatacttacataataactgttttgtacctttttttagtcttctattactttcataaaattatctttgcatcaaaagttattaacactttcaggactccttgtatgcaaaattctttgaattgcatttcttaatttgtgatcgcactggtaatttatctagcacaatgaactgaatgt

SEQ ID NO: 311706 - DNA, 680 bp, Homo sapiens
tattgtagatgggtgcagcaaaccacatggcacgtgtatacctatgtaacaaacctgcatgttctgcacatgtatcccagaacttaaagtacaataaattttaaaaaaggaatattttaaaggatcaacctactatttgacagtcatggaaatagtgaatgggaattaaagggaaaaaataagtaagcaaaggaagggaggaggaaaggggaaaagaaaggaaagaaaaggaaaagggaaatacaagaaaaggagacaaataaatacataaacaaataagtgactgaaagtctgagagttggcaaatactattcagataacactgacaaaataggcctcttgctaaaaatagcagaatgcacaaagtacaggagcagcctgtctgtcctgagaggctggggaggtttaggaaaagaggctggagagatttgagacaggtctgaagtatgtagtcagtttttgcttggtggaaaaagtaatcatgggtgattcagaaaaagcaagatacttacataataactgttttgtacctttttttagtcttctattactttcataaaattatctttgcatcaraagttattaacactttcaggactccttgtatgcaaaattctttgaattgcatttcttaatttgtgatcgcactggtaatttatctagcacaatgaactgaatgt

SEQ ID NO: 311707 - DNA, 680 bp, Homo sapiens
tattgtagatgggtgcagcaaaccacatggcacgtgtatacctatgtaacaaacctgcatgttctgcacatgtatcccagaacttaaagtacaataaattttaaaaaaggaatattttaaaggatcaacctactatttgacagtcatggaaatagtgaatgggaattaaagggaaaaaataagtaagcaaaggaagggaggaggaaaggggaaaagaaaggaaagaaaaggaaaagggaaatacaagaaaaggagacaaataaatacataaacaaataagtgactgaaagtctgagagttggcaaatactattcagataacactgacaaaataggcctcttgctaaaaatagcagaatgcacaaagtacaggagcagcctgtctgtcctgagaggctggggaggtttaggaaaagaggctggagagatttgagacaggtctgaagtatgtagtcagtttttgcttggtggaaaaagtaatcatgggtgattcagaaaaagcaagatacttacataataactgttttgtacctttttttagtcttctattactttcataaaattatctttgcatcaaaagttattaacactttcaggactccttgtatgcaaaattmtttgaattgcatttcttaatttgtgatcgcactggtaatttatctagcacaatgaactgaatgt

SEQ ID NO: 311708 - DNA, 606 bp, Homo sapiens
tattaacactttcaggactccttgtatgcaaaattctttgaattgcatttcttaatttgtgatcgcactggtaatttatctagcacaatgaactgaatgtgtgtctttatgtttaaagggaaaaataaaatwcaaaacagcatatttgatataatttatgattagataatagagaattatcaactttaatataatttttagaaagtaaagcttaggctagtcacgatggctcatgcctgtaatcccagcactttgggaggctgaggcgggtggatcacctgaggtcaggagttcaagaccagcctgaccaacatggagaaaccctgtctctactaaaaataccaaattaaccggcactaacgattcatgagaaatctgccccatgatccattcacctcccagcaggacctatctccaactttggggattaaaattcaacatgagatttgggcagggacacatatccaaactatatcaacagagtttcattgtgttgatcgggctagtctcaaactcctagcctcaagcaatacttctatctcagcctcccaagtacctttggggattataataatcaatcatcttcactttttacaatctactttg

SEQ ID NO: 311709 - DNA, 606 bp, Homo sapiens
tattaacactttcaggactccttgtatgcaaaattctttgaattgcatttcttaatttgtgatcgcactggtaatttatctagcacaatgaactgaatgtgtgtctttatgtttaaagggaaaaataaaattcaaaacagcatatttgatataatttatgattagataatagagaattatcaactttaatataatttttagaaartaaagcttaggctagtcacgatggctcatgcctgtaatcccagcactttgggaggctgaggcgggtggatcacctgaggtcaggagttcaagaccagcctgaccaacatggagaaaccctgtctctactaaaaataccaaattaaccggcactaacgattcatgagaaatctgccccatgatccattcacctcccagcaggacctatctccaactttggggattaaaattcaacatgagatttgggcagggacacatatccaaactatatcaacagagtttcattgtgttgatcgggctagtctcaaactcctagcctcaagcaatacttctatctcagcctcccaagtacctttggggattataataatcaatcatcttcactttttacaatctactttg

SEQ ID NO: 311710 - DNA, 397 bp, Homo sapiens
atccaatatctgaattgagacagtttctattcactgctttttttccagagtatgagccacattttcctgtttccttacatgtctgataatttttaattgaaaactaaacactttaattacacattatagcaaatctggatctggtttttatttgttattgtctttgttgttgttatgttttggtaattggcctatacttgtgctgtgtaatccttctgcccagtggttttcagcattgatgtcttttatattgtgttgttgytgttattgttgttttagcctgtctttctagggatttcctctgtgtctgttgcatagcttgattttggagagacattatattaaagctagtaaggcttccactctctgccaaataatctgtgggtgggtgggtgaa

SEQ ID NO: 311711 - DNA, 397 bp, Homo sapiens
atccaatatctgaattgagacagtttctattcactgctttttttccagagtatgagccacattttcctgtttccttacatgtctgataatttttaattgaaaactaaacactttaattacacattatagcaaatctggatctggtttttatttgttattgtctttgttgttgttatgttttggtaattggcctatacttgtgctgtgtaatccttctgcccagtggttttcagcattgatgtcttttatattgtgttgttgctgttattgttgttttagcctgtctttctagggatttcctytgtgtctgttgcatagcttgattttggagagacattatattaaagctagtaaggcttccactctctgccaaataatctgtgggtgggtgggtgaa

SEQ ID NO: 311712 - DNA, 450 bp, Homo sapiens
ttaattatcttccatcttctattgttgctgataagaattgagaatctgctctattgtttattcaattatgattaatctctctttctctgtctagattatttaagattttatttttgcctttggtagtctatagtttctcaacattttatctaagtatctatttttacttaatcctgattagaactcatttgacttcctgtgtccaaatcaataaaaaccctaatcaattctgtaaaatttgaagccagttttcttctcaaatattatrtcttcttcattctttcaattatgtttctgaaactaccaataattgtgttttagatcttttccataatctaaatctctcattttccacctcatttttttgtgtgtgtgctatgctcttaaataatttcctcatatctactactttgctgtgttctctcttcagctttgtctagattgctattt

SEQ ID NO: 311713 - DNA, 594 bp, Homo sapiens
agtctatagtttctcaacattttatctaagtatctatttttacttaatcctgattagaactcatttgacttcctgtgtccaaatcaataaaaaccctaatcaattctgtaaaatttgaagccagttttcttctcaaatattatgtcttcttcattctttcaattatgtttctgaaactaccaataattgtgttttagatcttttccataatctaaatctctcattttccacctcatttttttgtgtgtgtgctatgctcttaaataatttcctcatatctactactttgctgtgttctctcttcagctttgtctagattgctatttcagtacttagtgggtttttttcagttgagtaaattttaaagttttttctagatgttctatttaattattttacaatactttcaagtaatttcttcttctcatgtctscaatttttaaaaattttatctagtccctttgaaaatacatattttatagtgtctatctagtggttctattgactttatgcagtctgggatcaggagtgtctattagagattttttgaattagcatctagtaagtgttctagggatacttctatgcagggac

SEQ ID NO: 311714 - DNA, 594 bp, Homo sapiens
agtctatagtttctcaacattttatctaagtatctatttttacttaatcctgattagaactcatttgacttcctgtgtccaaatcaataaaaaccctaatcaattctgtaaaatttgaagccagttttcttctcaaatattatgtcttcttcattctttcaattatgtttctgaaactaccaataattgtgttttagatcttttccataatctaaatctctcattttccacctcatttttttgtgtgtgtgctatgctcttaaataatttcctcatatctactactttgctgtgttctctcttcagctttgtctagattgctatttcagtacttagtgggtttttttcagttgagtaaattttaaagttttttctagatgttctatttaattattttacaatactttcaagtaatttcttcttctcatgtctgcaatttttaaaaattttrtctagtccctttgaaaatacatattttatagtgtctatctagtggttctattgactttatgcagtctgggatcaggagtgtctattagagattttttgaattagcatctagtaagtgttctagggatacttctatgcagggac

SEQ ID NO: 311715 - DNA, 588 bp, Homo sapiens
atgtcttcttcattctttcaattatgtttctgaaactaccaataattgtgttttagatcttttccataatctaaatctctcattttccacctcatttttttgtgtgtgtgctatgctcttaaataatttcctcatatctactactttgctgtgttctctcttcagctttgtctagattgctatttcagtacttagtgggtttttttcagttgagtaaattttaaagttttttctagatgttctatttaattattttacaatactttcaagtaatttcttcttctcatgtctgcaatttttaaaaattttatctagtccctttgaaaatacatattttatagtgtctatctagtggttctattgactttatgcagtctgggatcaggagtgtctattagagattttttgaattagcatctagtaartgttctagggatacttctatgcagggacacttttatggtaggtttagaactttgggatccctaacctgtgcacgtaatgtaatttgagccctacacataagttggatgaggccagttttacatatgaattctcaaaaaagactttgccacccagagaccagct

SEQ ID NO: 311716 - DNA, 528 bp, Homo sapiens
aacctatgatgacatataaaatataatagagttcaaagtccagtgggacaatctgttgaaatgagattttgtttagtgaaacttcttatgaaaaaagactttatagtccaacatttgttaaaataattttctttttggccattgtaaatgtatcaaatatgactgttttgtgtttcaggcttggaggcatttgaaggtggtttgtttcagattggctgtaggtccatgccttatggaggcaagtgcagctgctgttttttcccacttcattatgaaatttccctggcaatgggcaattctattagggtaatttatttctcattttttcttatgaaaatattcaattaaggatgcttggttaaaactgttaaaatattcagaatattgtatagaaaagctctattaaaattcatttcacagtgttaaaatccttggaaagcagttgattaaaagcagagcatgtcccaaaytgcacgaaatttttttaacaaacattcatagcccctaaatgtttatcatcaagaaaat

SEQ ID NO: 311717 - DNA, 646 bp, Homo sapiens
atgtgacctgacccttcactttagctgtctttcatatttttttatttcatgttgaccttggagaatctgatgactctctgtcttgaggatggtcatcttgtatagtatctcacaggattctctgcatttcctggattyaaatggtgacttctctagcaagatttgggaaattttttgggcagtatcctcaaatacgttttccaacttgcttgttctttctccctttctttgagtgatgtcttgagtcatatgtttggtctctttacataatctcagatttctcagaggttttgttcattcttttttgttctttattttcatctgactgagttgattcaaagaagtggtctttgagatctgagattctttcctcagcttggtccgttctgctgttagtacttgttattgtattatgaaattcttgaggtgcatttttcagctctatcagtttagtttggttctttcttaaaatgcctatttcatctttcagctcttatgtcatcttattggattccttacattatttggattggattttgactttcttctgaatctcaatgatctttgtttctatccagattctgtcatttaatcctggttaacaaccattgttggagagttagtatgattgcttgaagacaggaag

SEQ ID NO: 311718 - DNA, 552 bp, Homo sapiens
tttgttcttagacactttgtgtttktaattgatgttgtggattaaattctctttgatcacttattcctggggaagccagctgccatgtcctgaggcagccctgtggagaaaaccccgttggaaaaaactgaagcctgcaatggctacatgagtaaacttggaagcagatcttctccaccccaccctacctcatgggaaatcttaagtcaaggcatacagctaagccatgcccagattcctgacccacagaagtcataagacaataaatatttgttgttttaagctgctatgtttggggatgacttgttaagcaaaatgagaaaaataatacaacaagtgattacaatgtgcagcagagctcaggaaccactgaactagaccagtatgtggtcttagagaagtctagtctcttcttgagcccacagggaaatctgtagcataaactgcaccatagagttgtacagccagaagcaaatctcacatcagtccgtcattggcagatgctgtctggagggaaaatagaggggtgcacaacctccctagtattcccaa

SEQ ID NO: 311719 - DNA, 552 bp, Homo sapiens
tttgttcttagacactttgtgtttgtaattgatgttgtggattaaattctctttgatcacttattcctggggaagccagctgccatgtcctgaggcagccctgtggagaaaaccccrttggaaaaaactgaagcctgcaatggctacatgagtaaacttggaagcagatcttctccaccccaccctacctcatgggaaatcttaagtcaaggcatacagctaagccatgcccagattcctgacccacagaagtcataagacaataaatatttgttgttttaagctgctatgtttggggatgacttgttaagcaaaatgagaaaaataatacaacaagtgattacaatgtgcagcagagctcaggaaccactgaactagaccagtatgtggtcttagagaagtctagtctcttcttgagcccacagggaaatctgtagcataaactgcaccatagagttgtacagccagaagcaaatctcacatcagtccgtcattggcagatgctgtctggagggaaaatagaggggtgcacaacctccctagtattcccaa

SEQ ID NO: 311720 - DNA, 596 bp, Homo sapiens
tttgttgttttaagctgctatgtttggggatgacttgttaagcaaaatgagaaaaataatacaacaagtgattacaatgtgcagcagagctcaggaaccactgaactagaccagtatgtggtcttagagaagtctagtctcttcttgagcccacagggaaatctgtagcataaactgcaccatagagttgtacagccagaagcaaatctcacatcagtccgtcattggcagatgctgtctggagggaaaatagaggggtgcacaacctccctagtattcccargtaggtgcttgtcagcaggacaagggttctagaaacctgcaggtaatagcagccaacaagaagcactgggagatgtgttcattgacctggtaaatggattctggcaggagcaccaaaggcatttctacacaggatatacttcacgctttataaagtaaatgtagaagagatggggtgaaattctggataagatatgccaatagaaggtattctgagcaggagcctccccattcctcatgggtgtcatcaaccactccagaaatgttctcatttgcctttgtaacttaggtggccacacttgtttttttgggca

SEQ ID NO: 311721 - DNA, 471 bp, Homo sapiens
acaacaagtgattacaatgtgcagcagagctcaggaaccactgaactagaccagtatgtggtcttagagaagtctagtctcttcttgagcccacagggaaatctgtagcataaactgcaccatagagttgtacagccagaagcaaatctcacatcagtccgtcattggcagatgctgtctggagggaaaatagaggggtgcacaacctccctagtattcccaagtaggtgcttgtcagcaggacaagggttctagaaacctgcaggtaatagcagccaacaagaagcactgggagatgtgttcatwgacctggtaaatggattctggcaggagcaccaaaggcatttctacacaggatatacttcacgctttataaagtaaatgtagaagagatggggtgaaattctggataagatatgccaatagaaggtattctgagcaggagcctccccattcctcatgggtgtcatc

SEQ ID NO: 311722 - DNA, 471 bp, Homo sapiens
acaacaagtgattacaatgtgcagcagagctcaggaaccactgaactagaccagtatgtggtcttagagaagtctagtctcttcttgagcccacagggaaatctgtagcataaactgcaccatagagttgtacagccagaagcaaatctcacatcagtccgtcattggcagatgctgtctggagggaaaatagaggggtgcacaacctccctagtattcccaagtaggtgcttgtcagcaggacaagggttctagaaacctgcaggtaatagcagccaacaagaagcactgggagatgtgttcattgacctggtaaatggattctggcaggagcaccaaargcatttctacacaggatatacttcacgctttataaagtaaatgtagaagagatggggtgaaattctggataagatatgccaatagaaggtattctgagcaggagcctccccattcctcatgggtgtcatc

SEQ ID NO: 311723 - DNA, 596 bp, Homo sapiens
tttgttgttttaagctgctatgtttggggatgacttgttaagcaaaatgagaaaaataatacaacaagtgattacaatgtgcagcagagctcaggaaccactgaactagaccagtatgtggtcttagagaagtctagtctcttcttgagcccacagggaaatctgtagcataaactgcaccatagagttgtacagccagaagcaaatctcacatcagtccgtcattggcagatgctgtctggagggaaaatagaggggtgcacaacctccctagtattcccaagtaggtgcttgtcagcaggacaagggttctagaaacctgcaggtaatagcagccaacaagaagcactgggagatgtgttcattgacctggtaaatggattctggcaggagcaccaaaggcatttctacacaggatatacttcacgctttataaagtaaatgtagaagagatrgggtgaaattctggataagatatgccaatagaaggtattctgagcaggagcctccccattcctcatgggtgtcatcaaccactccagaaatgttctcatttgcctttgtaacttaggtggccacacttgtttttttgggca

SEQ ID NO: 311724 - DNA, 345 bp, Homo sapiens
ttctagaaacctgcaggtaatagcagccaacaagaagcactgggagatgtgttcattgacctggtaaatggattctggcaggagcaccaaaggcatttctacacaggatatacttcacgctttataaagtaaatgtagaagagatgrggtgaaattctggataagatatgccaatagaaggtattctgagcaggagcctccccattcctcatgggtgtcatcaaccactccagaaatgttctcatttgcctttgtaacttaggtggccacacttgtttttttgggcagacaactctgttccttccttccttacttacttatttactcgagaggtaggaaatgtgt

SEQ ID NO: 311725 - DNA, 564 bp, Homo sapiens
ttttgttttaggtgctgtctctcctgttgttgttgtcctttacatgatggtgttgcaagaaaatggatatggtgttgaggaagacattccaacctactaatggctgctagcagtatggatgacattctggctatcactggattcaatacatgcttgagcatagtcttcttctcgggtaaacaagaaaatataacaaccaccagatcattcatgaccttttttgttagttctttaaacagggtttctggctttgcttcttcatttattaaccaagactgttcaatttaacatctttttaatctccatagaaagctcattccagaccaaggaagatatttcagtggcttaagataccactacttaacacacatgatctcactttaataatcatgtgacaattaatttgatacaccatattattactatttatatgcttatgttgcttttgaattttatcagttctcattagaaaaarttaagcagcagtattatttgtactactaatattttaataggcatttttgaaatgtgcctttttggccatcctaataaacaactggttgc

SEQ ID NO: 311726 - DNA, 587 bp, Homo sapiens
gcagtatttgggcgggagtgccctgtttttccaggtagtctgtcacagcttcccttggctaggaaagggaaatcccccaaccccttgtgctttcccggggaggcgatgccccaccctgcttcagctcaccctcygtgggcctgcacccactctccaacaagtcccaatgagatgaaccaggtacctcagttggaagtgcagaaatcacctgtcttctgtgtcaatcatgctgggagctgcagaccggaactgttcctatttggctatcttggaacccatccaagacatctggtagaagaaatttgtaagcagcaaagtgttcaatttatgacctgagtgctcttaaaagtgttcagttttatgcattcacaaaaatatggtttggaattagaacttatgtttaaaagggagcagagcatgaaagtttggaagatttgcagcctgatgatgtgatagaaaagaaaacccattttctggggagaaattcaagctgactgcagaaatttgcagaagtaacaaggagccaaatgataattgacaagataatggggaaattgtctccagggcatgtcagagttgttcacaac

SEQ ID NO: 311727 - DNA, 404 bp, Homo sapiens
tcaactgaccatttctcatttaggttgttttgttattgagttgttgttctgtatatattttagatattaaccccttrtcaggtatttggtttgctgggaggtttttgattcctgattcagttactagttataggtttattaagattttttattttgtgacttagtcttggtaacttgcatgttacaaggaatctcttcatttctcctaggttatccaacttgtcagtatataatcattcatagtagactcttagaatcctttttatttctgtaatatctgttgcagtgtcttctcttttgttcctaaaagaagttgagtcttcttttttttcttaaatattctagctaatgatttgtcaattttgttgaactttgaaacaactactagtttcactggatttttt

SEQ ID NO: 311728 - DNA, 404 bp, Homo sapiens
tcaactgaccatttctcatttaggttgttttgttattgagttgttgttctgtatatattttagatattaaccccttgtcaggtatttggtttgctgggaggtttttgattcctgattcagttactagttataggtttattaagattttttattttgtgacttagtcttggtaacttgcatgttacaaggaatctsttcatttctcctaggttatccaacttgtcagtatataatcattcatagtagactcttagaatcctttttatttctgtaatatctgttgcagtgtcttctcttttgttcctaaaagaagttgagtcttcttttttttcttaaatattctagctaatgatttgtcaattttgttgaactttgaaacaactactagtttcactggatttttt

SEQ ID NO: 311729 - DNA, 338 bp, Homo sapiens
caaaggccaaagaacctagagtttgatgtgcaagggcaagaggagaaaaaggcatactgctctggaagagagagaaagtgcataaaaaagaaatccaagcaagctgaatgttcccattcttctgcctttttgttctagtcacacttgtaaccaattgcatgatgcctacccacagtgaggatgggtttttctctctcagtccastaactcatccatcattctcctgtggccgcaccctcacagatatacacacacacagtgcttcatcaggcatctaagcatccctcaatcaaactgacaattaatattaaccacacaggccaattggttaagagagt

SEQ ID NO: 311730 - DNA, 338 bp, Homo sapiens
caaaggccaaagaacctagagtttgatgtgcaagggcaagaggagaaaaaggcatactgctctggaagagagagaaagtgcataaaaaagaaatccaagcaagctgaatgttcccattcttctgcctttttgttctagtcacacttgtaaccaattgcatgatgcctacccacagtgaggatgggtttttctctctcagtccagtaactcatccatcattctcctgtggccgcaccctcacagatatacacacacacagtgyttcatcaggcatctaagcatccctcaatcaaactgacaattaatattaaccacacaggccaattggttaagagagt

SEQ ID NO: 311731 - DNA, 474 bp, Homo sapiens
taagtctcttgcatatagtatatatttagattttttaatccattcrgccaattctctgtcttttgattggaaaattagcctatttgcatttaaagtagttactgatagggaggggcttactattgtcattttgttcattgttttatacatgtcttccaggtattttttccacttttcctctctttctgcctccctttatgtttcactgatttctttttttggtagggacgtgctttggttcctttctcatttttatttttgtatcttctgtaggtcttttctttgtggttactgtagaattacatgaaaacatcttatagttataataatctattttaaattgacaacaacttaactttaatcacatacaaaaactctacttctttacacctccttctcacttgttatcaatgtcacacaatatatatcttatattgtttattcacataatttaatacagtaatattatgcttt

SEQ ID NO: 311732 - DNA, 338 bp, Homo sapiens
tttgcatttaaagtagttactgatagggaggggcttactattgtcattttgttcaytgttttatacatgtcttccaggtattttttccacttttcctctctttctgcctccctttatgtttcactgatttctttttttggtagggacgtgctttggttcctttctcatttttatttttgtatcttctgtaggtcttttctttgtggttactgtagaattacatgaaaacatcttatagttataataatctattttaaattgacaacaacttaactttaatcacatacaaaaactctacttctttacacctccttctcacttgttatcaatgtcacaca

SEQ ID NO: 311733 - DNA, 474 bp, Homo sapiens
taagtctcttgcatatagtatatatttagattttttaatccattcagccaattctctgtcttttgattggaaaattagcctatttgcatttaaagtagttactgatagggaggggcttactattgtcattttgttcattgttttatacatgtcttccaggtattttttccacttttcctctctttctgcctccctttatgtttcactgatttctttttttggtagggacgtgctttggttcctttctcatttttatttktgtatcttctgtaggtcttttctttgtggttactgtagaattacatgaaaacatcttatagttataataatctattttaaattgacaacaacttaactttaatcacatacaaaaactctacttctttacacctccttctcacttgttatcaatgtcacacaatatatatcttatattgtttattcacataatttaatacagtaatattatgcttt

SEQ ID NO: 311734 - DNA, 474 bp, Homo sapiens
taagtctcttgcatatagtatatatttagattttttaatccattcagccaattctctgtcttttgattggaaaattagcctatttgcatttaaagtagttactgatagggaggggcttactattgtcattttgttcattgttttatacatgtcttccaggtattttttccacttttcctctctttctgcctccctttatgtttcactgatttctttttttggtagggacgtgctttggttcctttctcatttttatttttgtatcttctgtaggtcttttctttgtggttactgtagaattacatgaaaacrtcttatagttataataatctattttaaattgacaacaacttaactttaatcacatacaaaaactctacttctttacacctccttctcacttgttatcaatgtcacacaatatatatcttatattgtttattcacataatttaatacagtaatattatgcttt

SEQ ID NO: 311735 - DNA, 338 bp, Homo sapiens
tttgcatttaaagtagttactgatagggaggggcttactattgtcattttgttcattgttttatacatgtcttccaggtattttttccacttttcctctctttctgcctccctttatgtttcactgatttctttttttggtagggacgtgctttggttcctttctcatttttatttttgtatcttctgtaggtcttttctttgtggttactgtagaattacatgaaaacatcttatagttataataatctattttaaattgacaacaacttaactttaatmacatacaaaaactctacttctttacacctccttctcacttgttatcaatgtcacaca

SEQ ID NO: 311736 - DNA, 474 bp, Homo sapiens
taagtctcttgcatatagtatatatttagattttttaatccattcagccaattctctgtcttttgattggaaaattagcctatttgcatttaaagtagttactgatagggaggggcttactattgtcattttgttcattgttttatacatgtcttccaggtattttttccacttttcctctctttctgcctccctttatgtttcactgatttctttttttggtagggacgtgctttggttcctttctcatttttatttttgtatcttctgtaggtcttttctttgtggttactgtagaattacatgaaaacatcttatagttataataatctattttaaattgacaacaacttaactttaatcacatacaaaaactctacttctttacacctccttctcacttgttatcaatgtcacacaatatatatyttatattgtttattcacataatttaatacagtaatattatgcttt

SEQ ID NO: 311737 - DNA, 295 bp, Homo sapiens
tagttgtctatttctgttgtcactgggcttcattaagagagttartttggattctttgtcaggtaactcatttatctatttctttagggttggtttctggagatttattttgctcctttaatttagtcatcaggtttctctgtttcttcttatgtcttgttattttttattttttatttatttttgccaagatttgggtgtttgaaaaaactgccacttctcccagtttttatcagctggcttcatacggaagaccttcatacctgaatcagcatggctataggttccagcagcc

SEQ ID NO: 311738 - DNA, 295 bp, Homo sapiens
tagttgtctatttctgttgtcactgggcttcattaagagagttaatttggattctttgtcaggtaactcatttatctatttctttagggttggtttctggagatttattttgctcctttaatttagtcatcaggtttctctgtttcttcttatgtcttgttattttttattttttatttatttttgccaagatttgggygtttgaaaaaactgccacttctcccagtttttatcagctggcttcatacggaagaccttcatacctgaatcagcatggctataggttccagcagcc

SEQ ID NO: 311739 - DNA, 295 bp, Homo sapiens
tagttgtctatttctgttgtcactgggcttcattaagagagttaatttggattctttgtcaggtaactcatttatctatttctttagggttggtttctggagatttattttgctcctttaatttagtcatcaggtttctctgtttcttcttatgtcttgttattttttattttttatttatttttgccaagatttgggtrtttgaaaaaactgccacttctcccagtttttatcagctggcttcatacggaagaccttcatacctgaatcagcatggctataggttccagcagcc

SEQ ID NO: 311740 - DNA, 295 bp, Homo sapiens
tagttgtctatttctgttgtcactgggcttcattaagagagttaatttggattctttgtcaggtaactcatttatctatttctttagggttggtttctggagatttattttgctcctttaatttagtcatcaggtttctctgtttcttcttatgtcttgttattttttattttttatttatttttgccaagatttgggtgtttgaaaaaactgccacttctcccastttttatcagctggcttcatacggaagaccttcatacctgaatcagcatggctataggttccagcagcc

SEQ ID NO: 311741 - DNA, 362 bp, Homo sapiens
gcccctctagccacatccttcccctgctcagatcttgtcattggctcccatgaactgaagttgaagtttaagctccttaggacagcatacacgcycttctatgatctgttcccagaacatatttactggtttatctcatatcatggcccagtttgtattttacacttttgaaatacagaaaatcattacattctcccaataatactaagctagtatatgcctaaaagcctttgccaatattttgtcttttgttgagaattctcttagcttattttgtcacgtggttaactccttatgtcctttcatgactcacatgtcaagacttcaggaaaccttctctaactcccaggctgggctgagtg

SEQ ID NO: 311742 - DNA, 362 bp, Homo sapiens
gcccctctagccacatccttcccctgctcagatcttgtcattggctcccatgaactgaagttgaagtttaagctccttaggacagcatacacgcccttctatgatctgttcccagaacatatttactggtttatctcatatcatggcccagtttgtattttacacttttgaaatacagaaaatcattacattctcccaataatactaagctagtatatgcctaaaagcctttgccaatattttgtcttttgttgagaattctcttagcttattttgtcacgtggttaactccttatgtcctttcaygactcacatgtcaagacttcaggaaaccttctctaactcccaggctgggctgagtg

SEQ ID NO: 311743 - DNA, 589 bp, Homo sapiens
tttgggtcttatatttgggtatttgagatactttgagttgatttttgtatagggtgagaggcagaggtytagtttcattcttcggcatatggatatccagtttttccagcaccatttattgaagagactatcctttccccaatgactgttcttggcatctttgtaaaaaatccgttggctgagatatgtggattttctgggttctttattctattccataggtctatgtgtctgtttttatgccaataccatgatgttttgggttactacagttttgtagtatattctgaggtctggtagcatgatacatccagctttgttctttttgcttaggatggctttggttattcagaatattttttgattccataaaatctctttggattttttttttaattttgtgaggaatgttcataggtattttgatagagattgcattgaatctgtaggttacgtttgagtagtactgtcactttaacaacattcatatttctgatccatgagtgtgaatgtcttctcatttgtttgtatcctcttcaatttctttcattagtgttttgtagttttcattttacctccttggttacat

SEQ ID NO: 311744 - DNA, 592 bp, Homo sapiens
tctttctcttgtctaattacycttgataggacttcacatttatatactttgaatatttaaaatgtttacataaatgtcagaatcaactttcatttttcatagaaaaagaagaccctacttgttttgtagttttaatattaatcaattatttttatctgagacaaattatttaacaaattaatccgtctattaaaatatttcaccacaaataaattccataaggaaaatatctacaactgtttttatgaaagaaaaaaaggcttctctacagttgcttaggcctggtgccatggcacacacctataaatcccagccctgtgggaggccatgtcaagaggatcctttgagcccaggagtttgagaccagcgtggacaacaaagtgagacctcatctctacaaaaaataaaaaagagattagctggccatggtggtgtgtgcctgtggtcctagctactcgagaggctgaggaaggaggatcacttgagccagggaggtggaggtttcactgaaccatattcacgccactccactccagcctgggcaacagagctagaccttgtctcaaaaaattaagttagttaaattaaacat

SEQ ID NO: 311745 - DNA, 592 bp, Homo sapiens
tctttctcttgtctaattacccttgataggacttcacatttatatactttgaatatttaaaatgtttacataaatgtcagaatcaactttcatttttcatagaaaaagaagaccctacttgttttgtagttttaatattaatcaattatttttatctgagacaaattatttaacaaattaatccgtctattaaaatatttcaccacaaataaattccataaggaaaatatctacaactgtttttatgaaagaaaaaaaggcttctctacagttgcttaggcctggtgccatggcacacacctataaatcccagccctgtgggaggccatgtcaagaggatcctttgagcccaggagtttgagaccagygtggacaacaaagtgagacctcatctctacaaaaaataaaaaagagattagctggccatggtggtgtgtgcctgtggtcctagctactcgagaggctgaggaaggaggatcacttgagccagggaggtggaggtttcactgaaccatattcacgccactccactccagcctgggcaacagagctagaccttgtctcaaaaaattaagttagttaaattaaacat

SEQ ID NO: 311746 - DNA, 178 bp, Homo sapiens
ctcactgcagccttgacctctggggctgaagctatcctcctgcctcagtctcctaaagtgctaggatgagaggtgtgagtcaccttgccaggcccagggcaataactatgcaatgtttatataatttggagcaaaaaayatttgaaatatgtgtgctttgctttttaaccttttctat

SEQ ID NO: 311747 - DNA, 178 bp, Homo sapiens
ctcactgcagccttgacctctggggctgaagctatcctcctgcctcagtctcctaaagtgctaggatgagaggtgtgagtcaccttgccaggcccagggcaataactatgcaatgtttatataatttggagcaaaaaacatttgaaatatgtgtgcwttgctttttaaccttttctat

SEQ ID NO: 311748 - DNA, 408 bp, Homo sapiens
gtacacaatttacagaagagcaactaccctcccaaaccaaaagaaaatgttataattttaatttaccarcaaacctaggttgcttctgtgaaatgatctcatttgctgagttttaaaattgactaaatttcccaatttccaaatgaaaatatttagttatcttgccttgctatgtgtttttggttaatatgatgattaatttttggtctattacataatatattccatgattgttgatatggattataaggactcacaaaataattttcagatgtctttaatttttttacttagtgtagatcctataaatggattaggagtattctattaactcccatgtattcagaaattgaattggagtggtaaattctgtttgaggtaacaagggatatcaaagaaaaaaataat

SEQ ID NO: 311749 - DNA, 408 bp, Homo sapiens
gtacacaatttacagaagagcaactaccctcccaaaccaaaagaaaatgttataattttaatttaccaacaaacctaggttgcttctgtgaaatgatctcatttgctgagttttaaaattgactaaatttcccaatttccaaatgaaaatatttagttatcttgycttgctatgtgtttttggttaatatgatgattaatttttggtctattacataatatattccatgattgttgatatggattataaggactcacaaaataattttcagatgtctttaatttttttacttagtgtagatcctataaatggattaggagtattctattaactcccatgtattcagaaattgaattggagtggtaaattctgtttgaggtaacaagggatatcaaagaaaaaaataat

SEQ ID NO: 311750 - DNA, 408 bp, Homo sapiens
gtacacaatttacagaagagcaactaccctcccaaaccaaaagaaaatgttataattttaatttaccaacaaacctaggttgcttctgtgaaatgatctcatttgctgagttttaaaattgactaaatttcccaatttccaaatgaaaatatttagttatcttgccttgctatgtgtttttggttaatatgatgattaatttttggtctattacataatatattccatgattgttgatatggattataaggactcacaaaatarttttcagatgtctttaatttttttacttagtgtagatcctataaatggattaggagtattctattaactcccatgtattcagaaattgaattggagtggtaaattctgtttgaggtaacaagggatatcaaagaaaaaaataat

SEQ ID NO: 311751 - DNA, 579 bp, Homo sapiens
cccacccagaatggtgcctgcctttctacagtttttcagaaagaggaaacattttctgcttctcttgctgaggttttttttaaccacccattaggaatgtatagatttcaggatygaacactgcgattccctcagcactaaaggagtaaaatttcaaacagagctgaaagtgcaatgtggaaagctcaggctgaggaaggttcttagccagtagaccaagggcagaaaggacactgcctcctcagtctcccactagggaacttgtgattcttgtcccctgacctcagaattccttgtcatgtttgttttgtctccaagggaagggtttgaattacagaatttaaggcaagagtgggcctcctgcagttaacattaaccctctctctccttcgctggctgaggtgaagtccggggccatgtagttctgacgtccactctctcgggggatcaccagttcacccacctcacctggcaagctgggccctagtttggcgtcaggaatctcccgcccacctgggaggcagggttcaacactctgcctctgaccttttttccttcctctgccacctgcttaggcag

SEQ ID NO: 311752 - DNA, 468 bp, Homo sapiens
gctaagtccaaaagacataaattattttatactaataactactaatattttattcattaaaatataaaggtcaaagatttcaaaatgatctttaaatgattaataacatgttgatctttttcttctttctgtaaacctttttgagtcttmacaatactaaactatacaagcaatattaaatagtatataaacttggattaaaatattcaaatttactagaatgtggacattggaaagaatgaaaataaacagaagcataaagcagcagatataaaattaagaaagcaactaagagtgtttaaagtacatattcatctgtagtctaatgtctaccataaacaatgactcttctcagtaaaacacaaattgttcatgaagggaaaaagcatgttgtattagagaatattcaacataacttttttagtactaacttgtgcctggagtattattggtttttctattatgaac

SEQ ID NO: 311753 - DNA, 468 bp, Homo sapiens
gctaagtccaaaagacataaattattttatactaataactactaatattttattcattaaaatataaaggtcaaagatttcaaaatgatctttaaatgattaataacatgttgatctttttcttctttctgtaaacctttttgagtcttaacaatactaaactatacaagcaatattaaatagtatataaacttggattaaaatattcaaatttactagaatgtggacattggaaagaatgaaaataaacagaagcatraagcagcagatataaaattaagaaagcaactaagagtgtttaaagtacatattcatctgtagtctaatgtctaccataaacaatgactcttctcagtaaaacacaaattgttcatgaagggaaaaagcatgttgtattagagaatattcaacataacttttttagtactaacttgtgcctggagtattattggtttttctattatgaac

SEQ ID NO: 311754 - DNA, 468 bp, Homo sapiens
gctaagtccaaaagacataaattattttatactaataactactaatattttattcattaaaatataaaggtcaaagatttcaaaatgatctttaaatgattaataacatgttgatctttttcttctttctgtaaacctttttgagtcttaacaatactaaactatacaagcaatattaaatagtatataaacttggattaaaatattcaaatttactagaatgtggacattggaaagaatgaaaataaacagaagcataaagcagcagatataaaattaagaaagyaactaagagtgtttaaagtacatattcatctgtagtctaatgtctaccataaacaatgactcttctcagtaaaacacaaattgttcatgaagggaaaaagcatgttgtattagagaatattcaacataacttttttagtactaacttgtgcctggagtattattggtttttctattatgaac

SEQ ID NO: 311755 - DNA, 460 bp, Homo sapiens
gctacaaaaatgtacttagaaataaatttaagcaaggaagtaaaagatttctacaacaaaaatgacaaatattaatgaaagattttaaggaacccccaaaaaggaaagacatccatgtttatagattgaaaatactaaatattcttaaaatgacccactatcctatgtgatttacaaatttagtacaatcactagcttgtatttttaaaagcacctttgctacatattcttaagatattcaatgacaatgcctggattkaagtttgaggtattattatatctattttatattgggcacaatataatgttatcagaggtaatggttttgattggtcctaggtcatacagtaatatatacagtttgatttatagacatgctgccttttaatactcaggcatttagaaagttcatttagacaaagttataaaaacttgccttcctttctgcctatatcaccta

SEQ ID NO: 311756 - DNA, 460 bp, Homo sapiens
gctacaaaaatgtacttagaaataaatttaagcaaggaagtaaaagatttctacaacaaaaatgacaaatattaatgaaagattttaaggaacccccaaaaaggaaagacatccatgtttatagattgaaaatactaaatattcttaaaatgacccactatcctatgtgatttacaaatttagtacaatcactagcttgtatttttaaaagcacctttgctacatattcttaagatattcaatgacaatgcctggatttaagtttgaggtattattatatctattttatattgggcacaatataatgttatcagaggtaatggttttgattggtcctaggtcatacagtaatatatacaktttgatttatagacatgctgccttttaatactcaggcatttagaaagttcatttagacaaagttataaaaacttgccttcctttctgcctatatcaccta

SEQ ID NO: 311757 - DNA, 460 bp, Homo sapiens
gctacaaaaatgtacttagaaataaatttaagcaaggaagtaaaagatttctacaacaaaaatgacaaatattaatgaaagattttaaggaacccccaaaaaggaaagacatccatgtttatagattgaaaatactaaatattcttaaaatgacccactatcctatgtgatttacaaatttagtacaatcactagcttgtatttttaaaagcacctttgctacatattcttaagatattcaatgacaatgcctggatttaagtttgaggtattattatatctattttatattgggcacaatataatgttatcagaggtaatggttttgattggtcctaggtcatacagtaatatatacagtktgatttatagacatgctgccttttaatactcaggcatttagaaagttcatttagacaaagttataaaaacttgccttcctttctgcctatatcaccta

SEQ ID NO: 311758 - DNA, 460 bp, Homo sapiens
gctacaaaaatgtacttagaaataaatttaagcaaggaagtaaaagatttctacaacaaaaatgacaaatattaatgaaagattttaaggaacccccaaaaaggaaagacatccatgtttatagattgaaaatactaaatattcttaaaatgacccactatcctatgtgatttacaaatttagtacaatcactagcttgtatttttaaaagcacctttgctacatattcttaagatattcaatgacaatgcctggatttaagtttgaggtattattatatctattttatattgggcacaatataatgttatcagaggtaatggttttgattggtcctaggtcatacagtaatatatacagtttgatttatagacatgctgccttttmatactcaggcatttagaaagttcatttagacaaagttataaaaacttgccttcctttctgcctatatcaccta

SEQ ID NO: 311759 - DNA, 504 bp, Homo sapiens
acctaaaaatcctaatttaagaggtaataacattttttatttgatatacaatttatcaacacaataaaaatctaacaattatcatgtgcagagtgtgaaaatctcatcagattaaggaacacaaagacatctttttcatatttcgaatgtaaaactcttttggaaactrttatttttagaaacagttaaaaacattttttcactagtttttcatgtaaaattgtgacaaccagcatgaaataactgtcatcacagaagcatggtatattcgattccaaaacatattcttagtaagttttaatatatttatgtattatttatacttagattgtaaccaataatgtagatattatttttccttcaactcttaagaatattcttaaataataaaattaaaatgaattataatttttgttggttgggaaaaagaatagacacacacgtgacagtgcatcacttcacctcatcatttcatctcatcatttcatctcatttcatcatttc

SEQ ID NO: 311760 - DNA, 184 bp, Homo sapiens
agtgtgaaaatctcatcagattaaggaacacaaagacatctttttcatatttcgaatgtaaaactcttttggaaactattatttttagaaacagttaaaaacattttttcaytagtttttcatgtaaaattgtgacaaccagcatgaaataactgtcatcacagaagcatggtatattcgattc

SEQ ID NO: 311761 - DNA, 525 bp, Homo sapiens
gtagaccctgatcatggagtgtggtgccctcagactgctttcatcccacctctgtgatgaagaacaagtgcagcagccttcagcagwcatgcatgctggacagctgggtgaggactgtggcctgtgggcagggtgcagggagctaggcagcctctgagctcccatctattctctcaatgtgccctcctgaccaactctttctacctgcaggactgctgaccaaccagatgcagtaaggtgaaattccactgcaaagtgtatggcaacttagtatgtggaggtgaacaacagcaaggtgggtgtcaatggcatgccctatgtgactgtgcttaggttagctgctgctgcttgtcaggagcatggggatggcatgccgatgctccacttcactaaactctaccatcattatagaagttttggagtagcctatgaaagacagaatcatgtcattatccaagagacaaaatcctctagagtaagcagttctcctggatataaacttggtgctggttcatttagcatttg

SEQ ID NO: 311762 - DNA, 653 bp, Homo sapiens
tttgcttacctgtccttccacctggagctatggcaccagaagtagaccctgatcatggagtgtggtgccctcagactgctttcatcccacctctgtgatgaagaacaagtgcagcagccttcagcagtcatgcatgctggacagctgggtgaggactgtggcctgtgggcagggtgcagggagctaggcagcctctgagctcccatctattctctcaatgtgccctcctgaccaactctttctacctgcaggactgctgaccaaccagatgcagtaaggtgaaattccactgcaaagtgtatggcaacttagtatgtggaggtgaacaacagcaaggtgggtgtcaatggcatgccctatgtgactgtgcttaggttagctgctgctgcttgtcaggagcatggggatggcatgccgatgctccacttcactaaactctaccatcattatagaagttttggagtagcctatgaaagacagaatcatgtcattatccaagagacaaaatcctctagagtaagcagttctcctggatataaacttggtgctggttcatttagcatttgctacgaaccaatrtctaaaattagaggcagtttctcctaaagtgagatgacatgagtcagttgataaaagtgtgaagcactcctgtg

SEQ ID NO: 311763 - DNA, 539 bp, Homo sapiens
gggagccccatctcacctgccctccatccccagggctcctgctcagcacttcttactttcccaggacaagcctggctccaacagacatctctagatgctgtgtttctctttgtggtgagcaaagaaacagaatgagttccattttttaatttttttctaattttacctataacttatttattgtaaaaaggtttgggctgcaggagacctgacccacccacgcaggaggcctcagtagcctcccaatccaccctgttactaaatatttccactcctaacaatatagggggaagcaggarcaagtgcagtttcactgcaccagtgctgtgaggatggggccagaagggtcctgcccagtaggattcaataggaattatatagaaataaacatctcaatgtttgtttggacggattgacatggagaaatttaattttgataggttctagtacacagaagttaagcttcctaacagccatgagtttacagcttcctctttctgaatttggcagtgttttttgatgtccaaattgccacgatg

SEQ ID NO: 311764 - DNA, 539 bp, Homo sapiens
gggagccccatctcacctgccctccatccccagggctcctgctcagcacttcttactttcccaggacaagcctggctccaacagacatctctagatgctgtgtttctctttgtggtgagcaaagaaacagaatgagttccattttttaatttttttctaattttacctataacttatttattgtaaaaaggtttgggctgcaggagacctgacccacccacgcaggaggcctcagtagcctcccaatccaccctgttactaaatatttccactcctaacaatatagggggaagcaggagcaagtgcagtttcactgcaccagtgctgtgaggatggggccagaagggtcctrcccagtaggattcaataggaattatatagaaataaacatctcaatgtttgtttggacggattgacatggagaaatttaattttgataggttctagtacacagaagttaagcttcctaacagccatgagtttacagcttcctctttctgaatttggcagtgttttttgatgtccaaattgccacgatg

SEQ ID NO: 311765 - DNA, 557 bp, Homo sapiens
agcctcccaatccaccctgttactaaatatttccactcctaacaatatagggggaagcaggagcaagtgcagtttcactgcaccagtgctgtgaggatggggccagaagggtcctgcccagtaggattcaataggaattatatagaaataaacatctcaatgtttgtttggacggattgacatggagaaatttaattttgataggttctagtacacagaagttaagcttcctaacagccatgagtttacagcttcctctttctgaatttggcagtgttttttgatgtccaaattgccacgatgtccacacatatttacaatagtttatattattcattttgtattactaattgtgcactttggccaacagtgtttcatacatcatggttggtttccaacctygcttgaaaattggaagtgacagccctttatggaatgttgcttttgacactcttccatttaaggctctgtgtccccacagtgctacgaagacaaatagtcatcactcttccattttgagggggccagggtaagcaggtgcaatttgagaatacaaa

SEQ ID NO: 311766 - DNA, 431 bp, Homo sapiens
cagcccttgccgcctcaaccctttttggattcttttctccccagactgtcccagagttcaggtcttctcatctcttgtctgcccagtgaaggcacaagggtggaaaggtgagggtgtggagtcaggagctttgttccastgctgggcatagtgagaagtcaaaagagaggttatgatctcattgtgcttgaaggggagaggccaaagcctaagacattctgcctttttaggggaattacctttcaaggcttatttggtcttcactagcctttacatctgaggatgaaggagttgaggctctgttacatggatgtctaaagagatcataactctcacattgaacgacacagagactgatagctctagcacagtacctaggtaatgtgactctctcttgctacgtgtgcccttcctacataaggaaatgtgac

SEQ ID NO: 311767 - DNA, 431 bp, Homo sapiens
cagcccttgccgcctcaaccctttttggattcttttctccccagactgtcccagagttcaggtcttctcatctcttgtctgcccagtgaaggcacaagggtggaaaggtgagggtgtggagtcaggagctttgttccagtgctgggcatagtgagaagtcaaaagagaggttatgatctcattgtgcttgaaggggagaggccaaagcctaagacattctgcctttttaggggaattacctttcaaggcttatttggtcttcactagcctttacatctgaggatgaaggagttgaggctctgttacatggatgtctaaagagatcataactctcacattgaaygacacagagactgatagctctagcacagtacctaggtaatgtgactctctcttgctacgtgtgcccttcctacataaggaaatgtgac

SEQ ID NO: 311768 - DNA, 571 bp, Homo sapiens
tgaaacttaacccaaggaagccaagcaatccggttaaatgattcaaaacctgaaagataaaatagcaatcttaagaaatatctaaactaaaaaaattcttgagctgaaagatttactgtgaggattttataataaaatcagaagtatttccagcagaatagactaaactgagaaaagaatctcagagctcaaacactgttttattgaatcaacatagtcagacaaaaataaagataaaagaattaagaaaaatcaacatccccattgagaaatatgagattacttagagaacaaatctacaatttatcaacatttctgagagagaaggaaagagaataggcaagttggaaaatatgtatgaagatatagttcatgaaagtacctctaatctcactagcgaggttgccattcaaatccaagagaaccccagtcagcccctagtcagatacaataatatatgacagtctgtattagtcagttctcacattgctataaagaaatacttgayactgggtaatttataatgaaaagaagtttggttggctcacaattctgcaggctgcagcggaag

SEQ ID NO: 311769 - DNA, 534 bp, Homo sapiens
tataataaaatcagaagtatttccagcagaatagactaaactgagaaaagaatctcagagctcaaacactgttttattgaatcaacatagtcagacaaaaataaagataaaagaattaagaaaaatcaacatccccattgagaaatatgagattacttagagaacaaatctacaatttatcaacatttctgagagagaaggaaagagaataggcaagttggaaaatatgtatgaagatatagttcatgaaagtacctctaatctcactagcgaggttgccattcaaatccaagagaaccccagtcagcccctagtcagatacaataatatatgacagtctgtattagtcagttctcacattgctataaagaaatacttgatactgggtaatttataatgaaaagaagtttggttggctcacarttctgcaggctgcagcggaagcatggcagcatcagcttggcttatggggagccctcaggaaactaacaaccatggaagaaggaagagggggagcaaggcatcttacatgga

SEQ ID NO: 311770 - DNA, 566 bp, Homo sapiens
cctcccaaaacttactgggtaattctctcatcctaaatcccctactcatcgtgtaggcttttagcactgctgcttaccagtatgctaaaggtgcagacttaggatcagaagtttgatgaactcaaacaaaaagaccacaatgcatatgggtgctaatcccagtgaaatggagtggcagtaaacaccttcaaccaaagagaaaacagatcacaaataaacaaataatgacacaactcaagaaactagaggaggaagaacttatcccaacgttcccagataataaaattagtaaaaaaaatcggagcagaaatgaatacactgaagattagaaaaacaatagaaaatgtagaaaaattgtaagagcttgttttatgaaaacatgaagttgrcatatctttagctagactaagaaataaatgcttaaataaataaaatcagaattaaagggaatacattacaactggtaaaacagaaataaaaaaaggtcataagactgctatgtacacagactcctatgtacaatgatatcccaccaaatgggataagggagaagacatgaatacatt

SEQ ID NO: 311771 - DNA, 281 bp, Homo sapiens
cgcccatcgtgcatcactctcccttctgcctccttcaacttttttttttttttttgtatttagggggaacgagtacaggattcttacatagtcaaaaagctccttatagagaagctcggaactttsaatacagctttgccttttttgccattttaattttccatttaatttaaatgtattctctcatttgaccttcatactctgtggagaaatatttctatttcggcttgtattgacaagctgttttcacacagcccccgcatcacccaaccaaccagcag

SEQ ID NO: 311772 - DNA, 281 bp, Homo sapiens
cgcccatcgtgcatcactctcccttctgcctccttcaacttttttttttttttttgtatttagggggaacgagtacaggattcttacatagtcaaaaagctccttatagagaagctcggaactttgaatacagctttgcmttttttgccattttaattttccatttaatttaaatgtattctctcatttgaccttcatactctgtggagaaatatttctatttcggcttgtattgacaagctgttttcacacagcccccgcatcacccaaccaaccagcag

SEQ ID NO: 311773 - DNA, 281 bp, Homo sapiens
cgcccatcgtgcatcactctcccttctgcctccttcaacttttttttttttttttgtatttagggggaacgagtacaggattcttacatagtcaaaaagctccttatagagaagctcggaactttgaatacagctttgccttttttrccattttaattttccatttaatttaaatgtattctctcatttgaccttcatactctgtggagaaatatttctatttcggcttgtattgacaagctgttttcacacagcccccgcatcacccaaccaaccagcag

SEQ ID NO: 311774 - DNA, 281 bp, Homo sapiens
cgcccatcgtgcatcactctcccttctgcctccttcaacttttttttttttttttgtatttagggggaacgagtacaggattcttacatagtcaaaaagctccttatagagaagctcggaactttgaatacagctttgccttttttgccattttaattttccatttaatttaaatgtattctctcatttgaccttcatactctgtggagaaatatttctatttyggcttgtattgacaagctgttttcacacagcccccgcatcacccaaccaaccagcag

SEQ ID NO: 311775 - DNA, 554 bp, Homo sapiens
aagtccgataaggagctcccggcctggggcccaggcacaaagtgacgtgcaggatacttccagtaggctaaaggaagagcggggaccgagggcctggggacacagaaaggtagccccttggagaggctggcagcctcctgtggctcaagggataaagtcagagagcctgggggtttgtgtgcatgcatgtgtgtgtgcatgtgtgtgtgtgcatgtctgtgtgtgtgcatgtctgtgtgtgtcaggggtggttctgctgctggtgagggaggaggcaaggcctctcagaaccaggattaggctggtgggggaagggagaagggtgttttgcttattggaaacagcaggtgcaaaggggctgaggccagtcagtcatcagggagagaggtggggactgcagaggtggagatctgactccctggagatcctgggtctgtggagcaaaggatcccgagagccttgmcctgggagaggggaaggctgtctgtcctatgagaagaaaggctgttgtgagtctctgacgacaagaggcccctcaggaggttgagaagagt

SEQ ID NO: 311776 - DNA, 554 bp, Homo sapiens
aagtccgataaggagctcccggcctggggcccaggcacaaagtgacgtgcaggatacttccagtaggctaaaggaagagcggggaccgagggcctggggacacagaaaggtagccccttggagaggctggcagcctcctgtggctcaagggataaagtcagagagcctgggggtttgtgtgcatgcatgtgtgtgtgcatgtgtgtgtgtgcatgtctgtgtgtgtgcatgtctgtgtgtgtcaggggtggttctgctgctggtgagggaggaggcaaggcctctcagaaccaggattaggctggtgggggaagggagaagggtgttttgcttattggaaacagcaggtgcaaaggggctgaggccagtcagtcatcagggagagaggtggggactgcagaggtggagatctgactccctggagatcctgggtctgtggagcaaaggatcccgagagccttgacctgggagaggggaaggctgtctgtcctrtgagaagaaaggctgttgtgagtctctgacgacaagaggcccctcaggaggttgagaagagt

SEQ ID NO: 311777 - DNA, 503 bp, Homo sapiens
cctgtctaagcagccaggagcccttgcctggattatggcaatgcagtggctgcccagctggtcaactgcatccactttgcccctttcctacagtctatttgaacaccagagacagagacctttgtgagatctaagatcatgtgactcctctgttcaaaacctccaaaggcttcccatcttgctctgaatccaaatccaagtactttaattgatctctctcccactgcccattacctctttagcctcaagccagtctgtccccacactcggtcctctccagccagactggccccttctgtcagggtctttgcagtgactgttccctctgcctggaataggcttctccaggtttcctgacagctggcttcctgcctcctccagagcttggctcaaatgccaccttctcattgaaccattccctgatcctgctacttaaattgaagccacccacaaactctaycccctaatgctgcacaccatcaaacggaatacatacttgattt

SEQ ID NO: 311778 - DNA, 503 bp, Homo sapiens
cctgtctaagcagccaggagcccttgcctggattatggcaatgcagtggctgcccagctggtcaactgcatccactttgcccctttcctacagtctatttgaacaccagagacagagacctttgtgagatctaagatcatgtgactcctctgttcaaaacctccaaaggcttcccatcttgctctgaatccaaatccaagtactttaattgatctctctcccactgcccattacctctttagcctcaagccagtctgtccccacactcggtcctctccagccagactggccccttctgtcagggtctttgcagtgactgttccctctgcctggaataggcttctccaggtttcctgacagctggcttcctgcctcctccagagcttggctcaaatgccaccttctcattgaaccattccctgatcctgctacttaaattgaagccacccacaaactctatmccctaatgctgcacaccatcaaacggaatacatacttgattt

SEQ ID NO: 311779 - DNA, 570 bp, Homo sapiens
tttttttttttggtatttttagtagagacagggtttcaccatgttggtcaggctggtctcgaactcctgacctcaggtaatccatccaccttggcctcccaaagtgctgggattatagatgtgggccagcatgcccagcccaaattgctttttcaatggctgacatctgattggtgggcctgccatacctaaataatgataaaacctttattttaaagcactattctctaggaataattctgaatgagcccaaagatatatgtatcaggtggtcacctcagtgaagttgacaatggtacaaaataggaaatcattcgaatggctaacaatagtagacagttaaataatttattgagtattatactatgggatgcaatgtagctgtcagaaaggtagaaaaaattgtttttaaatgtttgtgtaaaggaaaaacggtttaccacttcctgtgaaagaagagggatccaaaattttttatttcmcccctccaattatcctaaaaaaaaacagtgaaataaagtttttaaagctacaaacccacactgacaaactgtgaaagaagaaatgaca

SEQ ID NO: 311780 - DNA, 604 bp, Homo sapiens
cagaccatgagctcaccacttaagaattcatcctcctcccaggagccccggcagtgggacrttgctgtggagaccacaacaaagcaaggacttctgcaagtgggtccaagctccctctgccctcccactcatgtggtcctattagcatcccataactcacacagccagacaccatcttggcaaggagtgcgggtggggtggggagcaaatatgagaggctatggatttatttgaagtgattatgctatctaaagaaactgtttaaattactgaataggactttaccagattgagttagatgtaattgtctatcattaaccagagaggcgaagaattctccttgctaaaaatggaaattaacaagcattacatgtatacatatgtgtgtgtgtgtatatatatatatgtgtgtgtgtatatatatgtatgtgtgtgtgtgtatatatatatatatatatgacatgctataataccaccaaagtcttactcttccacaaaatcagaatgcaaagagaactatagaggaaatggtttcctaatgaaatgtcttctatttgctgttctctctaggtaccacttctgtcgcaggcccctaatgcacagg

SEQ ID NO: 311781 - DNA, 625 bp, Homo sapiens
atccaaacttggacctcttattccaagtgcattgctcttttcactacatcatgctgccttctagaaaaatcagctaactctgtgcttctagactctacacagtattcaataactctgatgactttgaattcaggaaatgtctatcaattggaccaggatctgctttttaagcttatctttatttctagtacttcctgagaaagagtaaagtattctgaaatatagaagatggataggtagaaaaatgcatatgtaaatacacagatgatggttggatagatgggcagacagacttttttaaaatttttatggatacatagtaggtatatatgtatttatggggtacatgaagtgttttgatacaggcatgccatgtatggtaattacatcttggaaaatggggtatctatccccttgagcatttatcctttgtgttaaaaacratccaattatatcttttagttattggacagactttgagtttattggacagactttaattgagctcctccatcaaactttgtgactttgaaaaatagtcacttaggttttgtttgtttgttttctataaaatggccttgtcaaagcccttctcatggaactattgtgagaaactacctctaac

SEQ ID NO: 311782 - DNA, 581 bp, Homo sapiens
ggggatcacatctggtgtggagccttggtacctggggctacaacatctggaaatgaccgcctttacaagtggggtgttttgtaaccaccttttactctgtttgatgcagccaaggggaagggaaatcttcagcatctttttcttgggagatagccctctcgtctttgtgcaataaggatttgcagggacagtgatgtcagggttagtgtttcaggtaccttttcatttttcacctttacattcatgagtgactgttggtctaacctgagaaatgatattggtctctttgaaccaatcctgcttgtgtttgtttgatggtctggcttttggtttgtttatktcctcactgacaaaggtaatgttattgtcgatatgaaaaatcaccccaattatggcctggctcggctcatgcctgtaatcccagaactttgggaggccaaggtgggcagatcacttgaggccaggagttcaagaccagcttggccaacacggtaaaaccctgtctctctaaaaaatacaaaaattagctgggcatggtggtgcatgcctgtagtgtcagctactcgggagggtgagctggg

SEQ ID NO: 311783 - DNA, 321 bp, Homo sapiens
tagctaggcctgacataagaaaatggcaaactgtaggggagtttatatttaattctagctgattgttattatgagaaaatataaatggctcagagccactgaatctgatttttctagataagtcctaaatccmgattttaaagtggaatccactgatttttaaataaaggcgataaattcacatttaaaaaaatcaattacatatgttgggccagcaaaatatccagcctatgtggcattattttgaaactcactagttagaaaatgcaagtgcagtcctgtggagacagtcaccagccttgggggctgcggggcatttca

SEQ ID NO: 311784 - DNA, 321 bp, Homo sapiens
tagctaggcctgacataagaaaatggcaaactgtaggggagtttatatttaattctagctgattgttattatgagaaaatataaatggctcagagccactgaatctgatttttctagataagtcctaaatcccgattttaaagtggaatccactgatttttaaataaaggcrataaattcacatttaaaaaaatcaattacatatgttgggccagcaaaatatccagcctatgtggcattattttgaaactcactagttagaaaatgcaagtgcagtcctgtggagacagtcaccagccttgggggctgcggggcatttca

SEQ ID NO: 311785 - DNA, 666 bp, Homo sapiens
gcagtttgtctgatgagcagcccccgtatcaggaatttaaaagtcttcccaactgattctataataatatgcagctgaggttaataatgacatagttcttaatcccagttgaactaagtgccacctggaggctggtttaaaaatatacattccagggctctatctggatcccttctgatacaatggactgaattaggctctaggaatctgcatttctaataagtgyccatgtgattctgatgttaatgattcctcctctacaagatgtatctgactgtagtcacctctctccccatccacctttaactcagctctcagaatatctttcttaaatatatatatatatcttcccaatttaaaacattcactggctgccccttgtctacaaaatagtctttagtgcaactttccaggcctccccagccccagcctttgtccatcttcttggccttctcacccacttcatcccaatctctgtctaccatgctcattgcatcctttcctgattaacttctggcttcttttagagtctttgcttaaacagttacctctgacttcatagacctttcccatcttcaaccacctaatcctgctcttctagcagctggaattccaacactttcatgaaaatttgtttgatcttctaaaattaggatattcacactt

SEQ ID NO: 311786 - DNA, 602 bp, Homo sapiens
agcagcccccgtatcaggaatttaaaagtcttcccaactgattctataataatatgcagctgaggttaataatgacatagttcttaatcccagttgaactaagtgccacctggaggctggtttaaaaatatacattccagggctctatctggatcccttctgatacaatggactgaattaggctctaggaatctgcatttctaataagtgtccatgtgattctgatgttaatgattcctcctctacaagatgtatctgactgtagtcacctctctccccatccacctttaactcagctctcagaatatctttcttaaatatatatatatatcttcccaatttaaaacattcactggctgccccttgtctacaaaatagtctttagtgcaactttccaggcctccccagccccagcctttgtccatcttcttggccttctcacccacttcatcccaatctctgtctaccatgctcattgcatcctttcctgattaacttctggcttcttttagagtctttgcttaarcagttacctctgacttcatagacctttcccatcttcaaccacctaatcctgctcttctagcagctggaattccaac

SEQ ID NO: 311787 - DNA, 632 bp, Homo sapiens
agtaagtatataaactacatacttactaaggagatcatcaatgatattttataagctaaaagcaataatagatgtttttatgaatggaagtaagagatccaaaggtcttgtctgtcctgcaaaaaaaaaaaaaaggtccggaaaacatggtgattacaccttgattaggccaattttatgaccctaagtgactcaaagagcactttatctgagatttttgctgcaggggaaayaatctttcaaagtcaattcacaaatattgaagttttagagacgggaagaatgttagtgtggaaattgctgttagagagcaagctccttgagaagagcatggaaaaataattgtgtacagttaacacttttggagaactttttatgtaccaagtactgtactaaacaatgtataaacattatctaatcttcattaatcctgtgaataggtaccatttttgtcatccctttttaaagatgaaaacactcagagaatttacataattttcccgaagtcatacaattgctaagtagcaaagccagaatttaaatctagggatttttttaatttttattttttaattccagatttcaagctcatgactaatacagaaaaagcacaggtttggagtccaacagac

SEQ ID NO: 311788 - DNA, 550 bp, Homo sapiens
ttataacagcttgtgtaaacaaaggaactcacattaatatgaataactcagatttcctacttgtattaatttcccaatgctgctgtaacaaattactacaaatttggtagcttaaaacagcacacatttttcctgttacatttctggaggctggaagcctaccatcagttttactgggctacaatccatgtgccagcaggactcgttcctttaggcagctctagggagcatctgtttccttgctttttccagtttctagaggccatcttcattccttagctcgtggcttcttctcccrtcatcctagctcctgcttctgttgtcatttccccaacttacctgactctgacccttctgcctccctcttgtaaggaccactgtgactacatcaagcccaccaagatcatttcaggctattctccccatttcaaaatccttaataaaattttcaagcccttttcaccatatacataaatgtaaagtaacactcacagattttgagaattagaatgtggatgtagctggggagccattattctgcttaccacac

SEQ ID NO: 311789 - DNA, 605 bp, Homo sapiens
aggggagaaaaagtcatatctttctctcatccatcacaaggctcatgactgatacccatattacaaaagaaagattaacaagagaaaagcctaacagaattatttaaattgtatctaacatgagaaccttcagaaatgaagacccaaagaaatgggtaaaactgtcctttttatgcttaggtttgatggagaatggatagttgtgtagaaatatgattgaacagatgggggtaargtttaatattgaactggggaaacttggtgtattagtccattttcacactgctaataaagacatacctgagactgggcaatttacaaaagaaagaggttttaattggacttacagttccatgtggctggggaggcctcacaatcatggtggaaggcaaggaggagcaagtcacgtcttatgtggatggcagcaggcaaagagagagcttgtgaagagaaactctcgtttttaacaccaccagatctcatgagacccattcactatcatgagaacagcatgggaaagactcgcctccatgattcaatcatctcccacagggttcctcccataaaagtaggaataatgggagctacaagatgagatttgggtg

SEQ ID NO: 311790 - DNA, 632 bp, Homo sapiens
tgtgaaaaagtgaatgcgatctaatagtttaacctttccccctccagatgggcagcatctcaggctgatcatgttttcctctttgctttggccattaggtggcatagcaccaaatctgattaagtacaaatttttgcaatatccttacaaatggataatctaattttctttattttttagttgaatttctttatccttttttgctcctctttatatattatatgcattttgcaaactcattcaaacctttctttaataacaaaacggagtccaagtaaaataaaataacaaaatatttggatagtgtgtgttgcttgtagatgctttaaaaaaaaattcaacatctgtgtcagtctcttgcttgagcttttctttcctaagatgcttcaggaataaaattagttgcagaaacacgtctgatatcatttgtctattgcacctagcagtgctgtgagtgagagagccttctgtgtgctgataatctcagtcatttgtaaagtgatttctcagagatgatmtgttgagtataagcagaaaaaataaaaaaggaaattccataaaagaaagcagcagcagcatatatctggcaaaacccactagcccagcagcagaggatgaataaagacacacag

SEQ ID NO: 311791 - DNA, 531 bp, Homo sapiens
tggggatgggttgcaaagagaagggaggaagaaggatggagaggctgagtaacaaggcttgtcatgaatagttatgactaattctcttaaattacgtcctgtgaggtacacaggaaactccttaccattattcccaattctacagtaaaaaatatagcctagacatctcctttatgtgtgagatatggaagggcagtgctatggtttktttattcccaccaaaatgcatgctgaaatttgattccccagtgtggcagtgttgggaaagtgaagcctggtggaagctgtttgggtcatggggttggatcccttatgaataggttggtgcccttctggtggttgtgaatgagctcgctctctgacaagactggattattttttgcaggaatggattatttcctgctagagtaggtcattataaagccaagatgcccctccagtcttccctcttcacacgtctgcttcccctttgaaattctccaccatgttatgatgcagcatgaaaaatcttgccagaaggcagggccatgc

SEQ ID NO: 311792 - DNA, 531 bp, Homo sapiens
tggggatgggttgcaaagagaagggaggaagaaggatggagaggctgagtaacaaggcttgtcatgaatagttatgactaattctcttaaattacgtcctgtgaggtacacaggaaactccttaccattattcccaattctacagtaaaaaatatagcctagacatctcctttatgtgtgagatatggaagggcagtgctatggtttttttattcccaccaaaatgcatgctgaaatttgattccccagtgtggcagtgttgggaaagtgaagcctrgtggaagctgtttgggtcatggggttggatcccttatgaataggttggtgcccttctggtggttgtgaatgagctcgctctctgacaagactggattattttttgcaggaatggattatttcctgctagagtaggtcattataaagccaagatgcccctccagtcttccctcttcacacgtctgcttcccctttgaaattctccaccatgttatgatgcagcatgaaaaatcttgccagaaggcagggccatgc

SEQ ID NO: 311793 - DNA, 531 bp, Homo sapiens
tggggatgggttgcaaagagaagggaggaagaaggatggagaggctgagtaacaaggcttgtcatgaatagttatgactaattctcttaaattacgtcctgtgaggtacacaggaaactccttaccattattcccaattctacagtaaaaaatatagcctagacatctcctttatgtgtgagatatggaagggcagtgctatggtttttttattcccaccaaaatgcatgctgaaatttgattccccagtgtggcagtgttgggaaagtgaagcctggtggaagctgtttgggtcatggggttggatcccttatgaataggttggtgcccttctggtggttgtgaatgagctcgctctctgacaagactggattattttttgcaggaatggattatttcctgctagagtaggtcattataaagccaagatgcccctccagtcttccctcttcacacgtckgcttcccctttgaaattctccaccatgttatgatgcagcatgaaaaatcttgccagaaggcagggccatgc

SEQ ID NO: 311794 - DNA, 549 bp, Homo sapiens
ctcgaagcgcacttctcacctcgattaattagatcactgagatgcatttagatgagctactcaaaatakgcaaggcgccagctggctccagtgttcgcttcctccagacagaggggtcagatttagtctctgctggactcagcccatagagaagaaggcagtgaaaaaggaaaagcacatcttcctttatatgacgaggaaagccagcaaaagacacaaccaacctttgggaaaatcttgaagcctacatttgtctctgagaattttctctctacttctctactactttctcctcccaagcctctcatactcttaggtgtttcctctcagcaaggtcccccaggtttgtccccacccacccttatccccttcttagtatcctttatagaagcagaatgagtctagcaaattccttcatgagctttctcatcctctttgcaaacatttcaaacgagtaaactcagattaaagctatgctaacaccaaggaaaaaaatgaccaaaataatagtcataactttctctaagtagggaggctatgtacaatttg

SEQ ID NO: 311795 - DNA, 593 bp, Homo sapiens
ggtgattctctgtgcagccagggttgtgaactgctgcacgtgagtgatccagtagcagagagattaactggattctttttctttcagtcatgcaaccacacttggaggasagagtgacacagtcagttcacggggggtcagagcatccttggttctctttcttggcactgggtcaggtgtatgtcatgacccgttctgggcaccgcaattacttcttagaaccactggatgcttcataccaaatgctttacaaatgtggcttggggttggtaaaggaggaccaatgagggagaatggtgtggaagagagggaatatgaggttgaaataaagagataaaagcaaagagagagacaaagacaggcagggagtggggtgcagagaagcagaagcagaaaataaaactgctgatagtagctttcagaattcagacctgctttcaaaccatatggcagagatattagcttgtctgtaattactacaacattctcaattgcagaatgactttcattaaaacccatggattgaggcacttggaatttgtgaataattcttactttgagctctggctctattatgcctctgtttggagttg

SEQ ID NO: 311796 - DNA, 489 bp, Homo sapiens
ctgcccctttttatctgctctcttccatgtgaggacacagcaggaagatgggcatctaaaaaccaggaaaagggccttcaccataaactagatctgttggcgccttgattttggaattcccaacctccagaactgtgagaaatttctgttgcttaagcaactcagcttatggcatatttgtgatagcagcccgaaccaaataagatgtgctctatttttgaaatctttctttagtacctgttagggccttgagccaaggcacaaagatcctcgatgtataaaatccaygttggagatctggtgggagctcccatacgggttccttgcattcactatcagtgccagctgcagctgcctcccaaaaagtcagctgtttggaataatccattccaactcaggaatcagaaactgtatctcagaggcattgagtttaacaagaacacacggttatttagtaggagaactggcactggaatctggattttctga

SEQ ID NO: 311797 - DNA, 579 bp, Homo sapiens
attattcccaattcacagttaaagaaactaagactcatagaggttagaatcctttcctaagtttgcacagtaaataagtttgaattcaaactcatgctcttaaactgttatgctatgtggcctgttggttctttgtgatggtcgcctgaaaaggctccaactctggaaaacagttgattgtgaaaattatcaaagtatcttactctgtttgggctgtcataacaccatactatagacttttggctaaccaacaatagaaatttgtttctcagttttggagacagagaagtctaagatcaaggcactggcagattgggtgtctggagagggyctgcttcctggtagacaattgacttctcactttaatcttacatgttggaagcggtaaggagtcgttctcaactctctattataagggcactagtctcatccatgggggcttcaccctcataatttattacctcccaaaggccctacctcctaatgccatcaccttaggggtgaggatttcaacatacgaattttgagaggacatgcacattcagaccacagcagtgggagaggcaaggctggaccgta

SEQ ID NO: 311798 - DNA, 587 bp, Homo sapiens
attagtcatcctctcctctgttttcccacaatgcccagcccataccttcattatatataatacacaatacactgttttctagccatctgcctgtcttttcttaggttgtgagctcctttaaagcaggcactgtgttcagagcttgayaagaagtggaccagtcaagcagcttccagaagcattgatctaaaaagggatactaatatatcagtgaacttaatctctgtctacactctcttggcccatggcttttaaatactgtctacaagaaagtgatccgaatttatatctcttgctttgacctgtccactaagcaagtacatctagccgccaacttgatatatacagattcagaccacaccatctcatggatcatgtctaaaacagaactcttgatttcctgtgcttccaaatctgttgctgccttcccaccccccattttcctcatcttggctaatggacctggggttcttctcgactccactctttcccacaccttacaccacaccacagcaagtcctgtagcctccacctccaaaacatatctggattccaactgtttctcaccacctccactgcacaattgt

SEQ ID NO: 311799 - DNA, 589 bp, Homo sapiens
tccactcttcatagaatgcaacttctaagaatactccaggtgacagaaatcccgcttccacactgcagcctccctccaggccagttctggaacacctcaagaaagcaygaacctgagcgtactactgcgcaggactggcttccctatgaaatcctcaacactccgcaaccccacagctatcaactttgtcctgcggtggctgtcaaagcaccccaccacatctgaatctaatctctttaggaaaacaaagcaaaaggccctgcaccaacatatttgaaccatgtttgtagaatgagttgctaggttccatcccccgcatgttagcgacgtcttgttcactgaacactgttaggagtaaagtgcccagatgtcagccgtgaattcacatttccaactgcagcacctcttgccaggtcacgtcagactgtcaaggcttcagttttctgtctacaaaacaggagtaatatcactcatttcaagggtcagctctgggaactaaaggagcaaactcgtgcagagagctaagccaaaagagccccacacacgagccacaatggtgctcgtgaccaggaagactgttgagagaagg

SEQ ID NO: 311800 - DNA, 589 bp, Homo sapiens
tccactcttcatagaatgcaacttctaagaatactccaggtgacagaaatcccgcttccacactgcagcctccctccaggccagttctggaacacctcaagaaagcacgaacctgagcgtactactgcgcaggactggcttccctatgaaatcctcaacactccgcaaccccacagctatcaactttgtcctgcggtggctgtcaaagcaccccaccacatctgaatctaatctctttaggaaaacaaagcaaaaggccctgcaccaacatatttgaaccatgtttgtagaatgagttgctaggttccatcccccgcatgttagcgacgtcttgttcactgaacactgttaggagtaaagtgcccagatgtcagccgtgaattcacatttccaactgcagcacctcttgccaggtcacgtcagactgtcaaggcttcagttttctgtctacaaaacaggagtaatatcactcatttcaagggtcagctctgggaactmaaggagcaaactcgtgcagagagctaagccaaaagagccccacacacgagccacaatggtgctcgtgaccaggaagactgttgagagaagg

SEQ ID NO: 311801 - DNA, 587 bp, Homo sapiens
ggatgtggccaaatatctgagggccatgctcccactctcacttatgcaagactcttaacctgaagaggtttccaaagctgctagaacgaccatgacaaagtaacaacagcccaaagccctgctgggtcaggggatgagagcacttgcaagtgacagcagccagaggctgggatgcaaagggcccagggcctgtccaaacacctgcccaacatctctaggtcagaagcccaggtagatagcacagctcacgctaagcacaccactcccaaaacaaaggcttgagatttcaatcaaacaatgattcaagaaccagagccaaaagaagcatttcacctcctctcctctgaaggttcttgcaccaatccctgtcctctttcacctgctttttcttcatcctacttgaagcagaaggcagactggcagtctcacaaggccaagccaccaggcaaagtgtccaagggcagaaaactcctccccagaaaaggacaaayagtgagggttgccacatgggctaccaggcaaagacccaactgggttcagccaatgctccacagcaggctcatcctcccatgaggaatacacactgc

SEQ ID NO: 311802 - DNA, 608 bp, Homo sapiens
tcatatcaagaaatagatctttgccattttccccaaagaatctccatatatattgtccatattgctagtttgagtttttataaaaaatcatgaatgagtgttgaattctgtctaatgttttgcattaacatgaaagcatgatttttccccagtttttttcctgatgatgtsatgaattagactgattgcctttaaaagcaaaactgttcttccagtcctgaaataaaccctatttcttcataatatggtatcttttgtatatatcactgaacttactatgctaatattttaaaataatttttgagtatatgttctgagagagattcatccataaaagttgggaaatatttcctctccttatagtcttttaatagtctaatatattacttgttatttgttcctgtgaaatgaaaaatccacctgtgcctgggtttttttgtgtggaaatattaataataaattcaataataatctactgaaaaaactgaataataaattaattattgtaaattatataataatttctttaatatatatcagactattcacattttctattcttctgttagaattggtaaattgtatttgaggaatttattgatgtaatc

SEQ ID NO: 311803 - DNA, 536 bp, Homo sapiens
cattctgttctcttccagcatctttcatctcccatcttccctccttcaggggctcattttcagaattttccattgaaatccctcacgtttgtcacttgaaggagtaaccttcatttatatgtaacattcaattaagtaaacactcattgcataaaagaggctttactgtgtgcacagatttgattaggagcaattaygactttgtgtcattcatatgaataagctaacttaagccgaaatgttaacaggagggaatgacttccccatctccctcctcctccataaacatttcccatttagtgaggattccatcatcccagacagaagcagcccagacaaaacagaggcgacatatctccacactgcagtctcaaggctggtagaggaggacagaaactggagaaagaaggccaagagcagcagctgagctcagagaaaacccaatacctgcagagagatgcctttctgtggagaaaagagaaagtcataaccagaaatacactcagggaacaatgctcaatccttggtttccaaag

SEQ ID NO: 311804 - DNA, 572 bp, Homo sapiens
caggttcttaaaaactttctaaaaagctgctattaccccagaaacacactttgaatgtttcccactgtttggaaaaagcaaaatacttttaaaataaataatgtgtgtatgcatattctatttaactccatgatttttacagaaaattttgaaaaacaaaaaattaacgaggaagtactttagcacctactatggtttcatgatgagcaagaaaatcgcccaaaagactattaacaaaatgtgcctctgggaagtcacccaaggaatagttctggttatatatgactgtgtatagtctatagagttcaggaaacttaatattgagttaaatcagattaaactatcctggtacacttttctttattaagtctacttctaaaatgttgccataaataaattattctaaattgatgaaatgaagtagaatggttaacatttaaagaaatcctaacgggaattattttttaaatcacacagtcacctcctgttttgtttaacatgtacttctgcaaacatttggattttattaagaaataamtaaatttaggagagaattttaactgcattctcta

SEQ ID NO: 311805 - DNA, 580 bp, Homo sapiens
atttatatcaaaatttctagaaaagattaaaacttatagacagaaagatgagtcgttgtctgtagctacagtggcccgcgggagcaggactggctgcaaatgagtgagaaggaactttttggcatgatgaaaatgttctgaaacttgatggtggtgatggttgaacaagtttctattactaaatatcactgtacatttaaagtgaatgaattgtatggtatgaacattataactcaataaacccataaaaaagaagaagaaaaaaccctgcaagcaacggtaatgtagtcaatggggcatcataaaaggtgttatagactcattaggggattctttcctaaacaaagtaatgcattttactaccacattccggtgtcaaagaaaggcagaagtgtctgtatctgtgtaaattcacttcccacaatgtccctgcatcccagatcagcccccttagaggaggctccattygtagtatacttagcagacagcttgtgtctacacctgcagatccaccacctaatgagacgggaaggtgcttggacagatcctgtgcctgaccctctatctaaggctatgtcag

SEQ ID NO: 311806 - DNA, 549 bp, Homo sapiens
agtacttatttataggcaaacaagtgaatctctcattagataatttttaaatatattatttgtatagaatagaggattctgattccaacaaatgctgaaygagcatgatgcccagcttccttggccaaaattaagctggtgaactctggaggtaaagccccctgaaatggaggtagggggcaatgctattttaaactcatggagaggtggattcggcctggggcaagagcagccggagctcaacttgcaattttcagtcattttcttcactcagatcatgtctgcacccaaaaccgtggcaactgtggcccctggtccagacggccacagaaggcacatcagagaggtccagattttgtgtgcttatgaggagctgaaaagagttaagtggagagtgatcacttcaggcggtagctcgtgcatcttccccggggctggtgaattccaatctaactgtgtttctccctaatgctgctgttcccagcagggtagtgggtgaagctccaagctgaggagtggttttgtagggtggggactaaccatgactgt

SEQ ID NO: 311807 - DNA, 549 bp, Homo sapiens
agtacttatttataggcaaacaagtgaatctctcattagataatttttaaatatattatttgtatagaatagaggattctgattccaacaaatgctgaacgagcatgatgcccagcttccttggccaaaattaagctggtraactctggaggtaaagccccctgaaatggaggtagggggcaatgctattttaaactcatggagaggtggattcggcctggggcaagagcagccggagctcaacttgcaattttcagtcattttcttcactcagatcatgtctgcacccaaaaccgtggcaactgtggcccctggtccagacggccacagaaggcacatcagagaggtccagattttgtgtgcttatgaggagctgaaaagagttaagtggagagtgatcacttcaggcggtagctcgtgcatcttccccggggctggtgaattccaatctaactgtgtttctccctaatgctgctgttcccagcagggtagtgggtgaagctccaagctgaggagtggttttgtagggtggggactaaccatgactgt

SEQ ID NO: 311808 - DNA, 596 bp, Homo sapiens
agtgagttgatgtacttcaatcgtacagttgcatccgatggcaggctttaagtcagaatctgacatttattttaatccacacatggcctaccattattttatttaccacttctgtccacgcctctttcctgtactgtacaattgtctcagtaacagtttcggtaagcccacaagctaaccctagccaaaatcagtaaaaaacaaatgtcactggaaagcttatttgaaaagggggaaagacccaatcatgagacagcagaagaccctaagactgacaacataaagcaagctgcatttagaagaaaagaccaagagtcctatttaaattacaggttcaytccaacaggtgattcgcattttccaagcccactctgtatactatgtggtgactctccaatgaagccgtgaaacctttaaaattgcttcaccacatggataccaagcactctgcattaaaagatatgcctttggagtttttcaaaggaaaaaacatgaacatgaagaacagaagcaattagtgaaggccaccccttcatcaaatgtgtctgcactgagaacatcattcttggtggctaaccgcattactaaagctaaga

SEQ ID NO: 311809 - DNA, 585 bp, Homo sapiens
acttctgtgctttcacttattctgaacttgatgcggtttcctcattctgatctctagttttacacctttccattttcttcctcctgcatccttccaaaggttgttttgaagataacatgagatgatgaagggacagcatggcctggagtccaggtgtgaggcagcactgggatacaarccactttctagctttgctcatctcttcttcagtcagtcccttattcatctttcatccatgctgtcattggcaaggaattgaccttctgttgccattctcattttcccttggtgaattcagtcaatccttttgctctctgttcgtattatgcaaatataaaaataaaaataatcctgataatgtgtcctgctgaaagaagaaaaaaactatctgatctcactgggatccaatgcagtatgactctcccttatccatttttaaacaagttctaattctgaacactttccccttgctaaagtccctaaacagatctctttgctacacatcccaccagaatgtcaaatagcatctgtccagcttgcttgcaaagtcctcctctccagctcccagtataccagggtctgtgc

SEQ ID NO: 311810 - DNA, 594 bp, Homo sapiens
ggggttaggacttcaatatcttttgaagggatgcaattcaatccttaagagtccttgacctgcacaacagctaaactgaactaggaacctggctaacaggatgcaacattaccaacctggttcccacctcacagataagaggagctgccccagccatacccaatgggttaatgtcgggttgatcaatgtcattcaaatggggagcccatcagtcttaagagacaggtgaagaccagmcctaatggtagaatcttcctcttagctccattctctgagcccagaaggatcctgaagaaactggaagaggcacaggctatgttctgtgtcttagtccgtttgggctggtataacaaaataccacagactgaatggcttatcacataacagaaatttattcctcagagttctggaggctgggaagttcaaggtcaagctgcaggcagattcagtgtctggtaagtgcccatttcctggttcagggatgggacctttccactgtgtcctcataaggcaaaagtggccaggagtctctctcaggcctctttaaaacactaatcccattcaaggccaggcacgggggctcacgcctgtaat

SEQ ID NO: 311811 - DNA, 280 bp, Homo sapiens
cctgacatatgctattgtgcccattttatggaaacagcagggcagaggctagcatgaggcataggaaacacacagcgtgcaaaatttaagacggcattcacacccagctgccaacctggcatgcaaatgaccttgagaataagagctgccttagattctgcaccctagatgccacccttaagtcaccccaggtctggctttggggaataggtgccrggaggcagagaacaagcctaaacatgaaggagctggcttgagttgggctttgaattccttttag

SEQ ID NO: 311812 - DNA, 544 bp, Homo sapiens
ctgctgtgaaaacaatatcctttttgctatacacagtaaagcaactttaatttaaacacagtataatgattattattatatatttatatgcagtataatcatttttatacacacatacacactcacacatacagaataaaaatattatgcacagtatgaaaatttaaacacaatataaataaccacaaactgaggcatgcacaataagccctttaccccttagcaaagtgtcatcaaaataattctctgtatttggggacatttagactttttttctgcaatttgttcrtttcgtttttcattcaatcattgaatatttgtggacccttcttatgtattgggtatatcctgattccctttccttgggtgcaccttgatttcctgttttacaccgtatcagccactttgaagctatccagaagccgagctgctgttataaagtcttttggagtgtgttacagggaattctttgttcattgaatgtctacagtaacaattacagctataacacataccatcttacatagtgcagaaccaagattgc

SEQ ID NO: 311813 - DNA, 544 bp, Homo sapiens
ctgctgtgaaaacaatatcctttttgctatacacagtaaagcaactttaatttaaacacagtataatgattattattatatatttatatgcagtataatcatttttatacacacatacacactcacacatacagaataaaaatattatgcacagtatgaaaatttaaacacaatataaataaccacaaactgaggcatgcacaataagccctttaccccttagcaaagtgtcatcaaaataattctctgtatttggggacatttagactttttttctgcaatttgttcatttcgtttttcattcaatcattgaatatttgtggacccttcktatgtattgggtatatcctgattccctttccttgggtgcaccttgatttcctgttttacaccgtatcagccactttgaagctatccagaagccgagctgctgttataaagtcttttggagtgtgttacagggaattctttgttcattgaatgtctacagtaacaattacagctataacacataccatcttacatagtgcagaaccaagattgc

SEQ ID NO: 311814 - DNA, 631 bp, Homo sapiens
ttaatcactttctcatccttcacacatttagaatgtagaagagttgagactggaactaggctctgctgtagttcaaagctcatgctgttckaactggaattacaattttgaatatttgcactacagctaacccacctaaaaccaaattatttcactttatttctcctggaatacctaatattttttccactcaaaatcaaattaatggaaagatgagagccaaaatgccttctaaaaaagcagtatgatagaatagtccgttgtgttttgtttttgttgttgctgttttgaacaattatgaatagtagtattaactctaacaggatcaggcaagtagacatgaccaggagcttagaccagcaatgaccctggaatgatggatccagttcttatgagaaaggacatggtacccaagaggtggggagacaggtagcaggccaagcaagaggctgtaattctccattgatgaacgccagagaatccaagggctaaaactcagggtggagcttatgacattcacaaatgcaggagagaaggtaagaattcaacattagttaagtttgtcatgtcagcaagccaatagatactctccaagttatatgaataaaggtgtgtttatcacagtgtcatt

SEQ ID NO: 311815 - DNA, 631 bp, Homo sapiens
ttaatcactttctcatccttcacacatttagaatgtagaagagttgagactggaactaggctctgctgtagttcaaagctcatgctgttcgaactggaattacaattttgaatatttgcactacagctaacccacctaaaaccaaattatttcacttyatttctcctggaatacctaatattttttccactcaaaatcaaattaatggaaagatgagagccaaaatgccttctaaaaaagcagtatgatagaatagtccgttgtgttttgtttttgttgttgctgttttgaacaattatgaatagtagtattaactctaacaggatcaggcaagtagacatgaccaggagcttagaccagcaatgaccctggaatgatggatccagttcttatgagaaaggacatggtacccaagaggtggggagacaggtagcaggccaagcaagaggctgtaattctccattgatgaacgccagagaatccaagggctaaaactcagggtggagcttatgacattcacaaatgcaggagagaaggtaagaattcaacattagttaagtttgtcatgtcagcaagccaatagatactctccaagttatatgaataaaggtgtgtttatcacagtgtcatt

SEQ ID NO: 311816 - DNA, 578 bp, Homo sapiens
ctggctcctttgctccatgggttttggattgcaatgatctccattcccttatgtcacccagaaagggcttgagtggtgggtatgggtccgatgttgagttgttgcttcatgaggtgctttaaggagctgactgcatccgctaaactatgaatttcctgaccgcacctgtgtctgtgaatttcctgactgcaccattctaagagctgccccaaggaaacaggccaacaaycttaggctcacaacttgggtgatcccagatattttgctgatccttctagtgaaagaagggggacattttagcccagaacactagaatgtggcagcctaaagtatagggtgagttgggggcagcctggcattgacaggaggatatttagctccttgaccagaaccccccactgccctttgtgcttggaaaacactctttcaacttgccaaagccctaccttgatttggtttcaaaaattccttaacttttctttcaggagtaccctccttccctgaaattttctgtccctgaaaatttccaagccctcacttttaaggctgggaaagtttgactaggaggtgtgtttaat

SEQ ID NO: 311817 - DNA, 315 bp, Homo sapiens
cacagcatggggaggtgcttgaatttcccaaaggaagggggtaagatcttgtccattttctgccttctcccctggtgaatgtgccaatgaaccaacaaatccatgcggtgggagaaacacacttgcaaatggagaactggtgtccctataatcccagtgactttggaaggaaggcctgggatcagcaggatagagaacaaacagccctggaattacagatttccataactacagaaagttagcagtggagccatctggagayttcctagagcagggctgtccaccgagctctctgccagaatggaaaagcccaat

SEQ ID NO: 311818 - DNA, 537 bp, Homo sapiens
ggtggcaggtaggtatatacatgcatacccataccccttatacacatatgctattcatttaaaccttgacaaccaaccatatgatataaatattattaatctgattttatcatttgtagacaggaggcacagaaggcttaagtaacctgctcaaggtcaaacagctaataaatgacagacccaggctttggacccaggcagtatggctttggggtgcatattcttagctactacattataccagactgacattttactctttccaagcttctgattttattcagtgatttgcgagaataaattccaagtggggttcagctcctgcatcctggagkctcccttttgaaagttaaatgcatgcaacttctttttttggcattgtcctcttttttttttttttcatttccatccacaattacttaattgcatgcataatgagttgcatgggaaattggctccctagtatcagacaaacacgaggaaccaacaaattgcccaggaggcctctctgaaggtgggatggatcattcagaatga

SEQ ID NO: 311819 - DNA, 537 bp, Homo sapiens
ggtggcaggtaggtatatacatgcatacccataccccttatacacatatgctattcatttaaaccttgacaaccaaccatatgatataaatattattaatctgattttatcatttgtagacaggaggcacagaaggcttaagtaacctgctcaaggtcaaacagctaataaatgacagacccaggctttggacccaggcagtatggctttggggtgcatattcttagctactacattataccagactgacattttactctttccaagcttctgattttattcagtgatttgcgagaataaattccaagtggggttcagctcctgcatcctggaggctcccttttgaaagttaaatgyatgcaacttctttttttggcattgtcctcttttttttttttttcatttccatccacaattacttaattgcatgcataatgagttgcatgggaaattggctccctagtatcagacaaacacgaggaaccaacaaattgcccaggaggcctctctgaaggtgggatggatcattcagaatga

SEQ ID NO: 311820 - DNA, 603 bp, Homo sapiens
cattataaatgctgtttttcctcctgtacctcatatgtatatatatatatatatatatatatttcatgataatgaaatatcagwggagataattctagctggaatgcatttctgtcttctgagaaaaacacacaaaccacacacatacacacactcaaagtaaagaagacagatgtggctattagttgtgttcaacacaacaaagaaatagccacaactccaaactactagccatgaaattttcgccaaatattacaaaatttgaacccaaatattgaagaatggagaaagctggcacagacttccttagactttgagcagaagtcagttttctgtgaaaaccctctaaaagttgctcttacagtcctaaaagtgccatctggtgatccttacacctagagttgtggatgatacacaagggggaaaagaaaaagaaatttaaaaaggttaatgtttttctagaactggttttgtgtcacacaatggcaagtttggtggaattgaaacaggaaaatcatatagacttgccatctaaattttctgagatcttgtctccagccaagaaagactgatggagattgaattaggttttgaagggagcag

SEQ ID NO: 311821 - DNA, 581 bp, Homo sapiens
tctcagaatgaattctctaagtctctcgggaacctcaaaaattggagatctttaaaaaataacctcagtgattttttttttttgtggccaagcatttacagagatgtttatttgatttttcctaaaatatcagtctgcattgtgtgccacaactccctactacatggatgataccccaagatacgaacattcattatatcatgttcactagacaaatggtcattctaaaatgtagccatgactatatgattcccctactctaaaacctctcatggctgccttcaacctccaaaaaagatcagcctctcagcatggcaaaccagccctcatrtgctggccccatcatggctccaggtctccccctgtccccctgttcacgtcataccttcctacttctagttattcaaccagattcttctgctgttttgtttttttcgcaagctagccatcactcttagatgttcttcctctatttatccatctggaaaacttctgtttactcttcaaaacctaatagaaactgtattctcctggaagccacccttgacccctataaagaatgttaattaccttttatttta

SEQ ID NO: 311822 - DNA, 581 bp, Homo sapiens
tctcagaatgaattctctaagtctctcgggaacctcaaaaattggagatctttaaaaaataacctcagtgattttttttttttgtggccaagcatttacagagatgtttatttgatttttcctaaaatatcagtctgcattgtgtgccacaactccctactacatggatgataccccaagatacgaacattcattatatcatgttcactagacaaatggtcattctaaaatgtagccatgactatatgattcccctactctaaaacctctcatggctgccttcaacctccaaaaaagatcagcctctcagcatggcaaaccagccctcatatgctggccccatcatggctccaggtctccccctgtccccctgttcacgtcataccttcctacttctagttattcaaccagattcttctgctgttttgtttttttcscaagctagccatcactcttagatgttcttcctctatttatccatctggaaaacttctgtttactcttcaaaacctaatagaaactgtattctcctggaagccacccttgacccctataaagaatgttaattaccttttatttta

SEQ ID NO: 311823 - DNA, 580 bp, Homo sapiens
tgacacagtgatagcaggactgcaagtgcagcctgtgttgacctctgaaacctgagtaattaaacatcagagacacccaccagagagactggagggggccaaccaagacatgttaggatttggattgggggctataggtaaagagcgaagctcatacaaataaaagctgtaattaccaggaaccactttttaaagggtgctgagtttagagagacatgtattaaaatgattgaaacattgcattccaagatacaaggtgacawgcactatcctggcacatggtaggcaataaatgacaagatatcttgtctttctggacagaaagatggtcctagcataatgctaatacactagtgtgtatttgtcagcaattgctgtgttaatgctatataacaaactaccctccaaatcagtggcttgcaacaacaaacatgttcatgtttatgagtcatctgctatttgactgagctaggctggggtctttcctgagtggctctaaagcaggatcatgagcagctggacttgcctctagactgaggattgtgttcaataccatgctgtgtgtttcttccttctcttt

SEQ ID NO: 311824 - DNA, 530 bp, Homo sapiens
  misc_feature (1)...(530): n = A,T,C or G
gggtcagcaatgtgctgggcacaggcagcactgggagctggatggagcatctgcatttagtgacacagggcctatggtggggggggacaggctcaggccaccactggccagaagggctgagaactgagagccaagggtctggttcagacacaagggtctggtcntgactcttcggagctgtgtgagggagacagacttcctgggctttaggaaggttatctaccagtgtggatgaagatcattcttattatattatatatgttactatatagtaagatagaaaatagcacatattaatacaatataacactatatcatattataacacgtgtacatatatgctaamatattaatatgttagatttttatataactatatataatataataaactgtcaattaaatatatattaaatttgtattatatcaatacattattttatgtcatttattatgctatattatgcatactaatatacctacattatattattataaattgtaattataaattattacaaatgtggaaa

SEQ ID NO: 311825 - DNA, 530 bp, Homo sapiens
  misc_feature (1)...(530): n = A,T,C or G
gggtcagcaatgtgctgggcacaggcagcactgggagctggatggagcatctgcatttagtgacacagggcctatggtggggggggacaggctcaggccaccactggccagaagggctgagaactgagagccaagggtctggttcagacacaagggtctggtcntgactcttcggagctgtgtgagggagacagacttcctgggctttaggaaggttatctaccagtgtggatgaagatcattcttattatattatatatgttactatatagtaagatagaaaatagcacatattaatacaatataacactatatcatattataacacgtgtacatatatgctaacatattaatatgttagatttttatataactatatataatataataaactgtcaattawatatatattaaatttgtattatatcaatacattattttatgtcatttattatgctatattatgcatactaatatacctacattatattattataaattgtaattataaattattacaaatgtggaaa

SEQ ID NO: 311826 - DNA, 645 bp, Homo sapiens
tgttcttccctgtctgtaacagcatttgcaaaataagtcyttaatttgagtgctttttgaaacactacagttgatttctgatctattaaaatgttatataagtaaagatataagtacacattgatcagcattttattcaattgtctttctcgtttgagccaccttccaggcaggtggctattcacagcattgagaattgtaaatgctggtttgcagctagtacttagtgacttaatttcattctgtaaaatattggaggcgtgtggaaaggtgctattctctttcaaggaagtaatctacaaaatgaatgctagattgggtattagggctaatggaacacgttaataatatagcaggttaacactgacgcttacttacaataaagctgccagagctgggacactgacgccctgaaggaaacattcttcactgtgttcacgcttagaaactcccttcttacttcatggacacaactgaaatgttacgtttcgtatctactgcagccacaacacagcatccaacacacagctctcctttctccagctctgcaggctgatcttgttttacactatacattctccttgttccaaattttatccaattctctccctttttctaggcaaagaataagacacttggacaagg

SEQ ID NO: 311827 - DNA, 608 bp, Homo sapiens
tttgttacataggtaaatgtgtgccatggtggtttgctgcacctatcaacccatcacctagatatgaagcccagcgtacattagctctttttcctaatgatctccctcccgctacacctcacaacaggmctccatgtgtgtttttcccctccctgtgtccgtgtgttcttattgttcagctcccacttataagtgagaacatgcggtgtttggttttctgtccctgcattactatgctgaggataatggcttccagctccacccatgttccacgtccctgcaaaggacatgatcttgttttttttatggctgcatagtattccatggtgtatatgtaccacattttctttatccagtctatcattaatgggcatttgggttgattccatgtctttgctgttgtgaatagtgttccaataaacatatgcgtgcatgtatctttgtaatagtatgatgtatattcctttgggcatatactcagtaatgggattgctggatcaaatggtatttctgtttctagatctttgaggaatcgccacagtgtctcccaaaaaccacaatgaggtaccatctcacgccagtcagaatggcgattgttaaaaggtcaa

SEQ ID NO: 311828 - DNA, 602 bp, Homo sapiens
cattaatgggcatttgggttgattccatgtctttgctgttgtgaatagtgttccaataaacatatgcgtgcatgtatctttgtaatagtatgatgtatattcctttgggcatatactcagtaatgggattgctggatcaaatggtatttctgwttctagatctttgaggaatcgccacagtgtctcccaaaaaccacaatgaggtaccatctcacgccagtcagaatggcgattgttaaaaggtcaagaaacaactgatgttggcgaggttgcggaaatgttattataatcttaagtaaggttttacatgcccatggaagaaagttttcaaatgcagaaaagtaagaagaaaaaatatcatcgcttagaaacaaccatagatcgccttgtattctatttccttctgttcttttacctgtgcatatattttgacatcgtgggtattttttgttatttttcttaataatataagtacttacatgcaataataaatgcttgataacatggttttcacggtttcaaaacattcaatcacatttgggattctgcacattggaatggggtggggggaatttttgtaaaacttcagtgcctgggaacct

SEQ ID NO: 311829 - DNA, 611 bp, Homo sapiens
acatttcctcgctgagtatatttattattaaaaaagagattgctttctggtgtttctgtaagtgaacactaatgtgctgaaagttgaaaataaataaaacaggcagacaaaaaggctaggcagaattcacagtacaaatacctctgttaaaccttgccataccagagtgtgaccttgcaggagacagggggacgtggggagttgtttaggaggcagagaagcagtgatgctgggagatgcatgacctagactggcagggatgccagtgaggggctcattatgaagaatatgattttttaaataaataataaaaacttcctaaatgcttgctctaactttgccctacgaattccacactgagccaggcagagacgttaaagaagatccatattgtgcaaggcgtgctggattttgttccttcygtcaaaatcaggtaagggcaggggagtgagaatggggaggttgcttgacaaattgccttggatttatttttcatcctttatattatattacatagggttggaacgcacctcaatggatggacaggataatagtctgcacgtttaatacgatttctgctacaggcaaaatagtaccagataaagcatttg

SEQ ID NO: 311830 - DNA, 611 bp, Homo sapiens
acatttcctcgctgagtatatttattattaaaaaagagattgctttctggtgtttctgtaagtgaacactaatgtgctgaaagttgaaaataaataaaacaggcagacaaaaaggctaggcagaattcacagtacaaatacctctgttaaaccttgccataccagagtgtgaccttgcaggagacagggggacgtggggagttgtttaggaggcagagaagcagtgatgctgggagatgcatgacctagactggcagggatgccagtgaggggctcattatgaagaatatgattttttaaataaataataaaaacttcctaaatgcttgctctaactttgccctacgaattccacactgagccaggcagagacgttaaagaagatccatattgtgcaaggcgtgctggattttgttccttctgtcaaaatcaggtaagggcaggggagtgagaatggggaggttgcttgacaaattgccttggatttatttttcatcmtttatattatattacatagggttggaacgcacctcaatggatggacaggataatagtctgcacgtttaatacgatttctgctacaggcaaaatagtaccagataaagcatttg

SEQ ID NO: 311831 - DNA, 598 bp, Homo sapiens
gttaaaattggaaagcctgggaaaaataatgcatagcataggcagggccatgaggtgctaggcccccacatctccggcttgggagaggataaacagtttctgcttttctggagggcaatttggcattgtgtttcaaaacctttaaaaaaatgcatacccttgtaccctgcagacctgcatctggacaattatcccaaggaaacaatataaacatgtggaaaatttagctttagggtgccatgcctagaattaggatgcaaaaaaaatttttttggttrtcttgatgggtggggtagcagaaaaaaacaaaaccaaaatgaggacaataagacagagagaaaagaaaaaaacaaaaaacaaacaaacaaaaaactatttcaaaactataggcatctccccttccccaagatgtggaggctggggtcagcccttggtggaggttgctttgtggcttggaagcaatctctacacagggaagaatattaagcaaacaccctcctcggtattcatgggcaaatctaagaaagcaggtgtgttagactcagaagttaaatatcctgctttgttatgtaaattgttaagtgctgtttttagtgaa

SEQ ID NO: 311832 - DNA, 598 bp, Homo sapiens
gttaaaattggaaagcctgggaaaaataatgcatagcataggcagggccatgaggtgctaggcccccacatctccggcttgggagaggataaacagtttctgcttttctggagggcaatttggcattgtgtttcaaaacctttaaaaaaatgcatacccttgtaccctgcagacctgcatctggacaattatcccaaggaaacaatataaacatgtggaaaatttagctttagggtgccatgcctagaattaggatgcaaaaaaaatttttttggttgycttgatgggtggggtagcagaaaaaaacaaaaccaaaatgaggacaataagacagagagaaaagaaaaaaacaaaaaacaaacaaacaaaaaactatttcaaaactataggcatctccccttccccaagatgtggaggctggggtcagcccttggtggaggttgctttgtggcttggaagcaatctctacacagggaagaatattaagcaaacaccctcctcggtattcatgggcaaatctaagaaagcaggtgtgttagactcagaagttaaatatcctgctttgttatgtaaattgttaagtgctgtttttagtgaa

SEQ ID NO: 311833 - DNA, 370 bp, Homo sapiens
tgctagtccagaattttcagaccagaactatacttagaggcccagaaacttaaacccgttgcgaccatacrgcttgatgcccaggtctggagatgcctctgggttcagatatacaatttagaaaatagctatttccacaagacagggccttgaggatgaaaccatgtcccagtccagcttccccaacaataagtttccatgtgatgttctttcccactggctgacctcagaaaggactatcaaactcactgaaggcattaaaataatactgaacctatacatgagaagaatgggtgttttaattactttctttcccaggatgtttctaagctcctgcacaaaatgacaagcaccatcgctgcagaactga

SEQ ID NO: 311834 - DNA, 352 bp, Homo sapiens
gaatatgcaaccaattcggactttaaggcattttacctgatcttagacaattscttttttttttttttttagaattgaagaaactgaggtccatagcaggaaagaaaagtgacctacctaagatcagggccagggctaggaccaaagcccatgctcttaactcccagtcctctccccactttcccacctgtccaggcttgcccaggcacctaccagtcagtgctcttcctcgtgcaattcactaagcctccattttcttccctgattgcttttttaaaatccatccaattccaagatgtctaaaatagttgcatctagcttcatctgggtttagctcagaatgtttatataa

SEQ ID NO: 311835 - DNA, 352 bp, Homo sapiens
gaatatgcaaccaattcggactttaaggcattttacctgatcttagacaattgcttttttttttttttttagaattgaagaaactgaggtccatagcaggaaagaaaagtgacctacctaagatcagggccagrgctaggaccaaagcccatgctcttaactcccagtcctctccccactttcccacctgtccaggcttgcccaggcacctaccagtcagtgctcttcctcgtgcaattcactaagcctccattttcttccctgattgcttttttaaaatccatccaattccaagatgtctaaaatagttgcatctagcttcatctgggtttagctcagaatgtttatataa

SEQ ID NO: 311836 - DNA, 352 bp, Homo sapiens
gaatatgcaaccaattcggactttaaggcattttacctgatcttagacaattgcttttttttttttttttagaattgaagaaactgaggtccatagcaggaaagaaaagtgacctacctaagatcagggccagggctaggaccaaagcccatgctcttaactcccagtcctctccccactttcccacctgtccargcttgcccaggcacctaccagtcagtgctcttcctcgtgcaattcactaagcctccattttcttccctgattgcttttttaaaatccatccaattccaagatgtctaaaatagttgcatctagcttcatctgggtttagctcagaatgtttatataa

SEQ ID NO: 311837 - DNA, 544 bp, Homo sapiens
tcacttttcctctcaaagtgacataaggttcattttacagatgagtcaactgaggcttagaaaatgattttccaaaacaccaaatcaatatatgataagagttggggaacaaattcagattttctctttcaggcctcaagatcttttttggctttcctgtctctgaaggcataatttagagatgtgagtattgatktgatctacttccaactggcgtttcggcttttcttgtttgtttgttacttcatctccttaatatttatgcaacctggaccaaaaggtctgcctttgtttcaattcctatccaaagccctgcagaattcacattagcacttccacaaaagtcataaaggctctgcaaactgctcacagtttaaatatggaagtcaaaaccctaatcacaatttaatataactaaatatgtacatactttatggtcaatcatccagaccatttacagagtcccttggctttgaaattactagatctcaaatggtgccgtagatgagctttgcttgacatgacatatattgaaatagactgt

SEQ ID NO: 311838 - DNA, 429 bp, Homo sapiens
catcttattgaaaacccttgagcagcaaaatagcgccggaaactcttaagatgttttaaccacttattaagaaaattcatctagcttgatcttttatgagcagtttgccttaaatataccttttttttttttttttggtaattgtcaggtactttgcacatgcaccgttggccttgaaattaacccactaattgttctactgtgagcagcggtgggcatgggtggagcacacagcaacacccactgaagtaaaggctgcttggggttgaaagtgtggccttgagaaagggggacttcgtccgtactttggacttgcaggygaggcatcagtcctgagtgcttgccctactgagatgtgcctagcaaggggacagatggctttatgaaaaggcaagttgcacatcacaggtcatgttcaatgagaagcca

SEQ ID NO: 311839 - DNA, 429 bp, Homo sapiens
catcttattgaaaacccttgagcagcaaaatagcgccggaaactcttaagatgttttaaccacttattaagaaaattcatctagcttgatcttttatgagcagtttgccttaaatataccttttttttttttttttggtaattgtcaggtactttgcacatgcaccgttggccttgaaattaacccactaattgttctactgtgagcagcggtgggcatgggtggagcacacagcaacacccactgaagtaaaggctgcttggggttgaaagtgtggccttgagaaagggggacttcgtccgtactttggacttgcaggtgaggcatcagtcctgagtgcttgccctactgagatgtgcctagcaaggggacagatggctttatgaaaaggcaagttgcacrtcacaggtcatgttcaatgagaagcca

SEQ ID NO: 311840 - DNA, 422 bp, Homo sapiens
cacatgcaccgttggccttgaaattaacccactaattgttctactgtgagcagcggtgggcatgggtggagcacacagcaacacccactgaagtaaaggctgcttggggttgaaagtgtggccttgagaaagggggacttcgtccgtactttggacttgcaggtgaggcatcagtcctgagtgcttgccctactgagatgtgcctagcaaggggacagatggctttatgaaaaggcaagttgcacatcacaggtcatgttcaaygagaagccagttgtctgccccagaaaactacaaagcaggatttctcatattttaatgcagagatgaatcaactggggatttggttaaaatgtgacttctagttaggcctaagtgtctgcatttctaacaagcttgagggtgatgatgcccctgccgct

SEQ ID NO: 311841 - DNA, 592 bp, Homo sapiens
atatttgccaaaattttggagttcatagctgcacaaacaagacaactggttataagtattaaatgagtgaacaaatataaaagcccctaggattatgcccagcatttagtagaaacttactgatggctgaatatcaataaaattaggactggagctataatatctaggatattcaccaggttaatgaacgctagttgctacagcaggtaaatcttgaagtctcagtggcttaacaccattgtattagtctgttttcatactgctataaagaactgtctgagactgtgtaacttataaataaaaaaggtttaatttacagacagttctgcatggctgggaggcctcaggaaacttacagtcagggtggaaagggaagtaggcacatcttacatggcagcaggtgaragacagcaaaggaggaacttccatatacttataaaaccaccagatctcttaagaactcaccatcatgagaacagcatggggaaaatcacccccaggatctaatcacctccttcctttgacacgtgggaattacaggtccctcccttgacaggtagggattacaatttgagatgagatttgggtgggg

SEQ ID NO: 311842 - DNA, 592 bp, Homo sapiens
atatttgccaaaattttggagttcatagctgcacaaacaagacaactggttataagtattaaatgagtgaacaaatataaaagcccctaggattatgcccagcatttagtagaaacttactgatggctgaatatcaataaaattaggactggagctataatatctaggatattcaccaggttaatgaacgctagttgctacagcaggtaaatcttgaagtctcagtggcttaacaccattgtattagtctgttttcatactgctataaagaactgtctgagactgtgtaacttataaataaaaaaggtttaatttacagacagttctgcatggctgggaggcctcaggaaacttacagtcagggtggaaagggaagtaggcacatcttacatggcagcaggtgaaagacagcaaaggaggaacttccatatacttataaaaccaccagatctcttaagaactcacyatcatgagaacagcatggggaaaatcacccccaggatctaatcacctccttcctttgacacgtgggaattacaggtccctcccttgacaggtagggattacaatttgagatgagatttgggtgggg

SEQ ID NO: 311843 - DNA, 423 bp, Homo sapiens
tcatggggtctccatctggggaaacccatatcataaaaccatccaactcaaagacagttgygtaggaactgaaaaggaacacttggaacatttggaatccactggctttgccacacccagcctgtccagtgaaatgacaccacccaaactcatagcacagggagaggtttctgcctgttcacaatctatttctaagtccccagaaatggtgaaaaatcggaaaactcgtggccgtcatgaattgattcttagtgttgtatgtctgagtcagccacataatgaggctttgcaatcacatccgccctccttacactgatgctaagctttgattaatgaagcgataaccatggtatgaataggaaaaaggactcaggcctagtcacttccactcaattgcacatagttagtgtgatacttgatata

SEQ ID NO: 311844 - DNA, 650 bp, Homo sapiens
agctattttggtgatgcaggtggagaataatgagacactattcacgtccaaagsctggcaagtaagatgtgtgagcttgggcaattggaagacaatgcacatatttcacttgtaagcaggagagtgagactcagccgcaagaagtttctgtcacagctatcataactgtgagataccaagtatattagtaaggattatgacaagatgttatgcaccagacatgggtttttctgatggcttgcatgtggtaatcccaagtgaatattttgggggataaccaagtgaaatttggagttccttttagtcaccaagctcatctttctctcccacgtttccccgactcccagttaggtctcagaatgctcaacacgctctgctgatggtgccagtcattctttttctgaatttgctactacctttctcctgctgtgtttcctctttcccactaagaggggacatgctggacttggcttcctttgtgattagcaccactggattcaaatttattagtcccaggagcaggaggctaatgagttaaatgccctgatttaattaaaccacctaatggtttcagcttacataaattctcacctgatcagtccggcatctcttaaatacattatctctggcactctgcaggaaggcagcaa

SEQ ID NO: 311845 - DNA, 541 bp, Homo sapiens
ataacaacctgtctggtgttttgatatttttccccatttcctctttttggaaaatgtgaagaaaatgacagggagctgtctctatgaatgctcaagagcccaaaccaaccggagtataagaaagaggwggaagaaataaactacgtttgaaatgtgcttctgtttcaacctaagtaagatgaaaggcagcctgcaaagtttttaattgagaaggcaggaggtaccacagaacagaggtcatctacctggtgatgtagtcattcatatcaattgagcaaatcaaatctgttatgcatacgcacaattcagagttccaatatcttttcctagaataacaagcaaagtgcccttaactatttgccacaagccagtgaattgactcacaggtgtaggctcccatcttggctctgtggcttgttgtgaatgtgaccttcaatgtcatacccaacatatgagggccagtgtgaatgttgagtctgacttctagctctggagtggtggtgcgggttggagatgatgcatgcagatacttttaagagac

SEQ ID NO: 311846 - DNA, 561 bp, Homo sapiens
ggactaaaaggccatagttagctgctgtgccttctggaactctcttttccctagagtgtccaagtctaggtcatcctgggttgttcstctggtcagctgggctgagtgcagaacattcccagctcatagctggacgtcccagctcaaggctgaacaatgccagtcctcttctctgtgcccatctagcatctcatctggacaccagctccttaccaagcttcacaccatggtggggtctcttgatgtctgaggccatgagtcccccagcaggagctgctcctgggagctgcttcagatggggacctgggaaagtctcccccaaagccctggaaggcacagcaaagactgaagaaagggaatagggagaaggacaaggaaacaggagggaagacattttacaacatatctaaatgcaagcatgagcaactccattttaagatgagacacaaatgcatcccagaagacacatttatcctgagttttggaatataatgccaacacagaagcaaactaagagccaacacttgaagctggtgtccttagtctagacaattgtttggt

SEQ ID NO: 311847 - DNA, 555 bp, Homo sapiens
cagtactgggtaacagtcattgagtgagacaatcacacagaaatgagggtctagctagggagggcagggatgctaggcattaaataaacacacagacacacaccgacacacacacacacacacacatttacattaaagtccaaaatcagtgtgtccgtctctaggactaagaggagagagaaggtacatttaraaataggtgtgaacgggtgtgtttcagccatattgcagcaatgggcttggggtaaagatccctggaaggctactgcacctggaagtctatatcattgaattcagggctgggtgctgtggctcacacctgtaatcccagcactttgggaggccgaggtggctggatcacctgaggtcaggagttcgagaccagcctggccaacatggtgaaaccctgtctctactaaaaataaaaaaattagctgggcatgttggcatgcacctgtaatcccagctactccagaggctgaggcagaagaattgcttgaacccaggagacgaatgttgctgtaagccaaggtcgtgccatcacactccagcctg

SEQ ID NO: 311848 - DNA, 570 bp, Homo sapiens
ctaacaagcctgcagccactgtctccatcacccatgcactgcccagtactgggtaacagtcattgagtgagacaatcacacagaaatgagggtctagctagggagggcagggatgctaggcattaaataaacacacagacacacaccgacacacacacacacacacacatttacattaaagtccaaaatcagtgtgtccgtctctaggactaagaggagagagaaggtacatttagaaataggtgtgaacgggtgtgtttcagccatattgcagcaatgggcttggggtaaagatccctggaaggctactgcacctggaagtctatatcattgaattcagggctgggtgctgtggctcacacctgtaatcccagcactttgggaggcygaggtggctggatcacctgaggtcaggagttcgagaccagcctggccaacatggtgaaaccctgtctctactaaaaataaaaaaattagctgggcatgttggcatgcacctgtaatcccagctactccagaggctgaggcagaagaattgcttgaacccaggagacgaatgttgctgtaagc

SEQ ID NO: 311849 - DNA, 589 bp, Homo sapiens
cttacatttgccttctttggaactgtaagtctttaagcagaccgccttcttttacagcacttgggtataaaaacacacaaatacacatgctcattggcactgttcctggtacagagctgtgcccagttggaggggccattttgagcagtgtccttggagttcattgtgtcaaccctgacacatcaggctcyttaaatgcacataagggctaatagacctggcagaactgaatttctcttgcacttgagaattcatattccctgacaataaaggatctagaaatggagacatcttccaaatgcacatgtttgaatgtgatgggaacaatagtgtcatccttgaaccaaggggaaggcacggtgtttgctgggagtgtgtggtttttatcctgcattcaaatcatcatgcagcagctcttcgcacaaggagtaagacgttgttcactgtgcattctgttcagctgtgcaatgaagaggagagagagaggtgctgggcttggtggctgcagctgtgtggggagccactgagtctctgtgatgagatattgcaataggcagaatcaaggcaccctaaagatgccccacgttag

SEQ ID NO: 311850 - DNA, 589 bp, Homo sapiens
cttacatttgccttctttggaactgtaagtctttaagcagaccgccttcttttacagcacttgggtataaaaacacacaaatacacatgctcattggcactgttcctggtacagagctgtgcccagttggaggggccattttgagcagtgtccttggagttcattgtgtcaaccctgacacatcaggctccttaaatgcacataagggctaatagacctggcagaactgaatttctcttgcacttgagaattcatattccctgacaataaaggatctagaaatggagacatcttccaaatgcacatgtttgaatgtgatgggaacaatagtgtcatccttgaaccaaggggaaggcacggtgtttgctgggagtgtgtggtttttatcctgcattcaaatcatcatgcagcagctcttcgcacaaggagtaagacgttgttcactgtgcattctgttcagctgtgcaatgaagaggagagagagaggtgctgggcttggtggytgcagctgtgtggggagccactgagtctctgtgatgagatattgcaataggcagaatcaaggcaccctaaagatgccccacgttag

SEQ ID NO: 311851 - DNA, 585 bp, Homo sapiens
gaataaaacagtcatattttcaaaaaggagatataacacagtactcagcagtagagacaggaccatcctagccaaatataaattcttataatacttttgacatttgttttcagggaggtaaggaatggaagcccctttcctattgatgattacacacacaaacacaatttatttcatcattattgttatcatcattatcagtagcttcttagctgtttgaacccagttatataacctctcttagcctcagtttcctattctataaaattgggatcgggaacacccaccctacccttgcagaggtgctgtgagtattaaatgaacagaagtactgggtctacctcttggaggctctcagtccattacaagcttacttgccaggctcygaacagatctctgagcatgttggctgctatgaccttgcctctggtgctccaagtagaagcaccatttcaaggacatattaaacactccgtgtgcgtttgttgaatagttctctgcctttgatttccacccacagactttcagaaaggccccatttactgatatttaatctttctggagtttctgcttaaactgaaggtc

SEQ ID NO: 311852 - DNA, 518 bp, Homo sapiens
gaataaaatataaagtcttgctgctcctctccagaatttaaactctagctcaagagattggattaccacctgtgcagaaatkgcaaagaagacaagaaaatactgactttatttattttcattttaaacagagttcatctccttggacttccttttgggaaactgtttaaggaactcacatacaatacatttaaacagctaatggccaggaatagaagttcaatacataaacaggagagcatgtagcatcagctaaccaccaggttttttgtacttactctatctgcaccccaatttgctcttgagctccctggcagccaaagcaaagggaaaatatggtcaattgcaaatgtttgcttttatttttgttttgttcttaagaaagaggacacaaaacaaatcctctggaagatctagttagcatcatggataaagtccaaaacacttgcttttagaataaatgcatacctaatttcataggattgttttccataatgactctcaataaaactcaaaga

SEQ ID NO: 311853 - DNA, 518 bp, Homo sapiens
gaataaaatataaagtcttgctgctcctctccagaatttaaactctagctcaagagattggattaccacctgtgcagaaattgcaaagaagacaagaaaatactgactttatttattttcattttaaacagagttcatctccttggacttccttttgggaaactgtttaaggaactcacatacaatacatttaaacagctaatggccaggaatagaagttcaatacataaacaggagagcatgtagcatcagctaaccaccaggttttttgtacttactctatctgcaccccaatttgctcttgagctccctggcagccaaagcaaagggaaaatatggtcaattgcaaatgtttgcttttatttttgttttgttcttaagaaagaggacacaaaacawatcctctggaagatctagttagcatcatggataaagtccaaaacacttgcttttagaataaatgcatacctaatttcataggattgttttccataatgactctcaataaaactcaaaga

SEQ ID NO: 311854 - DNA, 585 bp, Homo sapiens
gaataaaacagtcatattttcaaaaaggagatataacacagtactcagcagtagagacaggaccatcctagccaaatataaattcttataatacttttgacatttgttttcagggaggtaaggaatggaagcccctttcctattgatgattacacacacaaacacaatttatttcatcattattgttatcatcattatcagtagcttcttagctgtttgaacccagttatataacctctcttagcctcagtttcctattctataaaattgggatcgggaacacccaccctacccttgcagaggtgctgtgagtattaaatgaacagaagtactgggtctacctcttggaggctctcagtccattacaagcttacttgccaggctccgaacagatctctgagcatgttggctgctatgaccttgcctctggtgctccaagtagaagcaccatttcaaggacatattaaacactccgtgtgygtttgttgaatagttctctgcctttgatttccacccacagactttcagaaaggccccatttactgatatttaatctttctggagtttctgcttaaactgaaggtc

SEQ ID NO: 311855 - DNA, 585 bp, Homo sapiens
gaataaaacagtcatattttcaaaaaggagatataacacagtactcagcagtagagacaggaccatcctagccaaatataaattcttataatacttttgacatttgttttcagggaggtaaggaatggaagcccctttcctattgatgattacacacacaaacacaatttatttcatcattattgttatcatcattatcagtagcttcttagctgtttgaacccagttatataacctctcttagcctcagtttcctattctataaaattgggatcgggaacacccaccctacccttgcagaggtgctgtgagtattaaatgaacagaagtactgggtctacctcttggaggctctcagtccattacaagcttacttgccaggctccgaacagatctctgagcatgttggctgctatgaccttgcctctggtgctccaagtagaagcaccatttcaaggacatattaaacactccgtgtgcgtttgttgaatagttctctgcctttgatttccacccayagactttcagaaaggccccatttactgatatttaatctttctggagtttctgcttaaactgaaggtc

SEQ ID NO: 311856 - DNA, 575 bp, Homo sapiens
cctcattccttattgatacattctaagtcttactggggagagctccaaaacactgtttttccacagtcaaaatgcttctaaatacagcatcatctacagaatttttttagatattcratgagtaaagaaacattctcttcagctgtgctttctttctgttttagtacattcattcttttataacaaaaatatcaggaactgggtggattataaagaacaatcatgtatttctcacagttatgaagactgggaaatccaaaatcaaggcatgagcagatttgaggcatgggtctgttgagggcccacttcatctcagatgacaaattctctctttgtcttcacatagtggagaaaacaaagcccctcagtcttcttttataagagcattaatactactcaagagggctccacccttgtgatctataggttgatgcaaaagcgattgcagtttttgccattaaaaataataaaaagtaatgacaaaaccacaattgcttttgcaccaacctataattacctcccaaaagctctacctcctaatatcatttcttaagggattagaatttcaacataca

SEQ ID NO: 311857 - DNA, 556 bp, Homo sapiens
aatgcagtaattgacgatttttcatcgacagcaatgtttactacctattctgcaaaaacagagcttcttaaaatattacagaacaaatttttccttagaatctccaaaatttacactcaaaaataacactgatgctttcctcccctttcactaatagaaatatcagttwtttctcagagtcccccacacaagcggctagagtagagaaattcctaaagaatttcattctgatcttgactcctaagagtcatcaagcatgaatccttgaggctacctatgtccttctctctctgggtaccctcttcacacgtccttggctaaatatctctgccattcctgatgccttagcctgaaccaaataagacatctgaaataacaagccagtcttctttccatatcaatcgttgacagccataagcatctctttgatgtttgtagacagaagaagatggaagaaggcataattagttggtgttttaatgtgtgtggtattttccactttttctaattccttttttagctaaagttcaaattgtacagtcaaagaaggcactgg

SEQ ID NO: 311858 - DNA, 556 bp, Homo sapiens
aatgcagtaattgacgatttttcatcgacagcaatgtttactacctattctgcaaaaacagagcttcttaaaatattacagaacaaatttttccttagaatctccaaaatttacactcaaaaataacactgatgctttcctcccctttcactaatagaaatatcagttatttctcagagtcccccacacaagcggctagagtagagaaattcctaaagaatttcattctgatcttgactcctaagastcatcaagcatgaatccttgaggctacctatgtccttctctctctgggtaccctcttcacacgtccttggctaaatatctctgccattcctgatgccttagcctgaaccaaataagacatctgaaataacaagccagtcttctttccatatcaatcgttgacagccataagcatctctttgatgtttgtagacagaagaagatggaagaaggcataattagttggtgttttaatgtgtgtggtattttccactttttctaattccttttttagctaaagttcaaattgtacagtcaaagaaggcactgg

SEQ ID NO: 311859 - DNA, 578 bp, Homo sapiens
tttactctctggagtaaacagcacacttttatttaaaaatctgggtaaatgaggcaagtgttacattgataaattataacgcaaaacttagatactagtaatacagatcttagtaatacagatctttcaagtcattgataccaaatattatcccatacacagctccatattcctaccatcttgctaaactccgcttgctctccctccacccacagaccttttgaaattgctctcagcaccatagcattgtacttactttattatttagagtagatcagttctctatggcatcatatctttctcatcacatgggcggcctagtgacacatgcaccaaataaggtctgttacctatattackgcagtcagcagagtgctctgctccttgctgggtgcacaaaatcctcccaacatcaaaattagtgcttttctgcaccacaggttaaatcagattcttaggcagggtcttcccagtctaccctgtgtaagcagaagggaagtaaggatttatgattctccattaaaaaaataacagaggaacaactcttccaattatatttattaatgaatggaaaggta

SEQ ID NO: 311860 - DNA, 430 bp, Homo sapiens
tccatcattatagggcaggactttcttcaggtaggctctgaaatcatcccacttgtgccgagaaaggtcataacattgttgaaattaataaatatttatgaatcataaatagactgcaattctgtataaactgaaatacattactttatcagaacataaataaaagtggtgtcaggaaactatgaaccccccaggggtgtaatattcargtaagtatttctaaggatactcccttccctgtgtgcatttctccagcatggagaaattattactatagaaatgtgttaatttgagttttcaatcatttcagtttaaaacaaaactggggatggaatttaaaagcataatttttatgttaaagtaaaatcaaattgcatttataaatgtatttgtttattttctgtatccaccaatagaatataagttgtat

SEQ ID NO: 311861 - DNA, 591 bp, Homo sapiens
ttgtcattttcttactcacagttccaggaccttggctcaacaattttgcctgtgtggagaaaagcaggccataaagccaacagttcttaatatctttctaaaagcaataagctcatttgcaacagaacttggagaatttccagtctgtggtgactctaaagaacaagaaaagatgtggtggaagagaaatgtcaggaggtttctagattgaatgaagatttagcttagattattggtcagttagtttgcagaagagaattgaggcataagacagtggagaggagtctactttagtcagaacaaatactgaatatagacctcagaaactagttgtccaaagattcacagtatgattgcattaatttgtagagcaatttatgtcccaagttgcttttgagaaccatagagcaatcagaaggcaattagtggagttcaacagctgagtgtgggcagagaaagagaggcttacaaataccactttcatgyagagtgactgtgggtaatacccaattctatgcctccctgaggagcaccataggaggtttaacactgggaggtgtgatgggaggataatttttcttaaaataatct

SEQ ID NO: 311862 - DNA, 544 bp, Homo sapiens
tcataagccccaaattagatacaacccaaataatgtaaatgtgaatggtaaataaatgggtgctttatgatataatggacaacttctgagcagtaaaaaggaatgaactactgccataaaaatataagatgccacacaagcattaggcaaagtagaagcagccagacataaataygatatacctacttatttgaaattctagaaaagacaaatctagagacagaaagtggatgtgtggttgtcaggaactgaacattttaatgaaaagaggcatgaggagactttgcgttaattaaaatgttctatatctatgttgtactatagggaatataacgccagccaaatatgtaattttttaaaggtgtccagtagccagattagaaaggtaataagaaagaggtacaattaaatttaattacagtgtatattttatttaactccatatcattcaccatgttgcattagctatatttcaaatgctcaagcattatatgcatttggttgctgctgtgttaaaatgtgcagttctatattatgactttgg

SEQ ID NO: 311863 - DNA, 608 bp, Homo sapiens
gcctcacctccactccattcgctctggatctagagcacaataaggcattgcagaatcacagtgtctaaactctgtgtggaagaagcaatcactttaaacaagcaggatttctttccatcttagttgtgttggaaatagtcccaaagctatggagcagtctaaataatttgccaatatatttactgtgtggatttaattgcataaaatttcactttagccaaatggattttctgaatcataatttagtttggacttcctatcttaaaaacatagctagcaaattctgaaattcttaatgacttgtctgstagtcaaattgtaaataaaagacatgtctccagatgctcgctcaggtatttgggtaaattgctcctttcatggagcaactcaagttgttgaaaagtaaaaggcaatattatacttatattggcataatttcagtactcagtacaactctcagccatccagtatataatgcttaaggattagagaagagcacaatcaatcttaccccagttcactgggggatacagaaatagaatgtaaatatgagggactaaaaacaagaataaattgctatttgtacttccctctgtgtaactattaaa

SEQ ID NO: 311864 - DNA, 568 bp, Homo sapiens
tgagtttctcaaataaatgcataatataaaatcacaaatattcttatctttagaaatcaatgtttctttgaaaatatgaggtttttctgcatccagtcatccattatgaaaatatgattttatagactttggcttccctagttctcacaatagttctagaaacatagttcctttcttttagctacactgcttccaaaaggtttttaagaatactcaataaatatgcagttttctttacttttccactttttatactcatctctaagtctttccataattataagcacacataaactgtccactctttaatactaaactgattcatttcattttcataaaactagtgtccctttaagttcatggtttttcaacaaaaataacaataatctttgttataacacaagatatttcttttaaaaaaaycaacgtggttgcaaataaaatattaaatgctgcaatactgtcccattctcccttcccttgtccaaaatcactcttctggctgcaaagctgtcagccacagcatgacatctaccaaaaatgagttcaactcagaatcttgtcaggt

SEQ ID NO: 311865 - DNA, 289 bp, Homo sapiens
ggtttcttggtatctagtcaagttagtgtccaagctttcagttacactcatcattttaggtattttgtatagagtacaggagtgccagtaagtgtcttccacattgcccactttgcaataaacatggaaaatgtttttacyactttgtccagtcattaacttcaattcagagaactgaacaacagttaaagtgcaaggatgctcaccacagtcttgtttatgagacaaccatgtgggaaaaaaataggggcgatataggtaaaaaatggtggctcagacaagtaataga

SEQ ID NO: 311866 - DNA, 559 bp, Homo sapiens
gctaggcgtgcaataatatggtttggttctgtgtccccaccctaatctcatcttgaattgtgctctcatgattcctatgtgttatgggagaracccagcaggagataattgaatcctggggctgatttccctcatactgctctcacgccagtgagtaaatctcatgagctctgacggttttatcaggagtttctgtttttgcatcttcctccttctctctgtgcctgctgtcatccatgtaagatgggacttgctcctccttgccttctgtcatgattgtgagccttccccagccacatggaactgtaagtccaattaaatctttctttgtaaattgcccagtcttgggtatgtcattatctgcagcgtgaaaatgaattaatacagagtcctttcccttttcttacaaaaaatccatgggaaaataatttgcagattgctgtagcaaaggcttatgctctagcaagaacccagagaaattattaggcttaagaactattgctcagaaatcagaaaacaactccactaatgccagtgtgtctctgtgttcctaatatga

SEQ ID NO: 311867 - DNA, 540 bp, Homo sapiens
aatatatcacttggatctttatagaagattttatacatcgatatgttacataatgttttcttagaaagacaaggactatcatgatatttaaaattgtataaaaatgcagaaatacattttatatatctgatttaatgaaaaataagttttcttgggtgatggtagtaatgatgaaaggggaaattacaagttaatgaggwccaagcagatttttctggtaactgtttttgatcaatgggtagaatttaaaatctctagagaagggacaaattgcacgtatcaacgatgtcagatttttttgcatttctatgaatgctggcaactttaaatatcttcccagcaaaagagtgatgcagaaacactgagagtcacttctaaaagcaagtattagaggctagaagtttcttcagcagcattttctaagtgcctcaattcttaggcaacatgctactttatttttctataatatattattatgttaaataaatattcctgaaaaaatttattcttcttgagtcaagtcactcattgctttatttt

SEQ ID NO: 311868 - DNA, 540 bp, Homo sapiens
aatatatcacttggatctttatagaagattttatacatcgatatgttacataatgttttcttagaaagacaaggactatcatgatatttaaaattgtataaaaatgcagaaatacattttatatatctgatttaatgaaaaataagttttcttgggtgatggtagtaatgatgaaaggggaaattacaagttaatgaggaccaagcagatttttctggtaactgtttttgatcaatgggtagaatttaaaatctctagagaagggacaaattgcacgtatcaacgatgtcagatttttttgcatttctatgaatgctggcaactttaaatatcttcccagcaaaagagtgatgcagaaacactgagagtcacttctaaaagcaagtattagaggctagaagtttcttcagcagcattttctaagtgyctcaattcttaggcaacatgctactttatttttctataatatattattatgttaaataaatattcctgaaaaaatttattcttcttgagtcaagtcactcattgctttatttt

SEQ ID NO: 311869 - DNA, 570 bp, Homo sapiens
taacacaatttacccacatttcaatgaccctcaaacttctatttctattttyaatcttttttttccagccccagtcctgcctttcccattctcaactggatacttctattttaatattatatgagtgcctcaaacatttatcacgtcagaaccagaattcataatctccttccaaagccaactggtctccaacctccatatacataataacttcagaataatgttaaactccttgaccatttcccatgtaatcactcttgtaaaccctgttgattatgcctttgaaattttcctcgtacttaaaactttatttttatttccccccaatttccttagttcagacttcctatatggtctgctattctccacttaatagtatacaatgcaggtgagttgaagtaagttttgattctgtcattttctttgttcagaaggctttagtgtctcccattgtttaaaaaatattatctaaactctatttaatttgtaatttaaggctgcctaagggttaccagccccaatctatcttccctcacttccatatattcataatttgttccattccagtta

SEQ ID NO: 311870 - DNA, 618 bp, Homo sapiens
tctatgactgtaatatctcttttaaacgtttcactacccctcaggaatgattggagtgcttttaacttatttttaaagcccacacataactatggcactacctatttccttaacttcctatctctgtggcatcatctaataaacacatctcagaaaagatagcttccttgaccttggatttggaggaaatatcttgggagagaccaaagggaactgttcyttctgatttttgattacttggagtaagttctattttatatactaacaaaatggacatactgttaacaaaaatggacataaaaatagattaggttgtctacaacaaaatgatcagtgacataattttccatagtgaattcaaagcaaatgcaaatagtataatattttacttgtgaagcagttgtccaagtatcctactgttatttccttaggtatgtaattaatatatttagtgctggatatcagaaagagagagagaaagagaattccacgattcaagagttgtgatttaaatacctaatacaattgtcattccttatttgtgattttactttctatggtttcagttacccacagtcaaccgcagttcaaaatgttaaatgggaaattccagaaaca

SEQ ID NO: 311871 - DNA, 613 bp, Homo sapiens
ggcacattggatacattcaatttatgtgaatgatacattcctcctaattaggaaggacattttttactatagtaattataacaccttgatcttttaaaattatttgtgacctaagcacttttatataygttatttaatttgtaaacttcagaagtattataatgcccatattattttcatttccatctacttattgagatataattcacatacaacattcacccattttaagtgtagaattgggtgaattttggtgaatttatgcagttgtgtaacatcactttaataaaactgcaggataatattaatcatcctgaaaacttcccttaagtccagttgaagtcaatctcctcctccaacttctagtcccaggcaaccactgatatgctttaataagtatacttttgtagtttctaattacacatggtgctaagtaaagatagagcttctgtgtcttattttttcccctgcagattttcaattgctgtagcactatttgttgaaaacactatatcttattgaattactttagcatttaattgaaaatcaattgtcattacataagtaggtctacattctattgtgatccaatgagctatgtttctaagtttat

SEQ ID NO: 311872 - DNA, 599 bp, Homo sapiens
gtggctgaactaatttacattcccatcagtagtgtacaagcattcccttttctctgcaatttctcctgcatctgtttttgactttttaataacagccattctgactggtctgagatggtatctcattttgattttgatttgcatttctctaatgattggtgatgttgagctttttttcacatgcttattggctatgtttttgtcttctttggggaagtatcagttcatattcattgccagttctttaatggggttgtattttgcttgttgaattgtttaaggtcttaatagattctagatgttagacctttgttggatgcatagtttgtgactatcttctctcattatgtaggttgtctgtttactccctyggtagtttattttggtgtgcagaagccctttaatttaattacatcccacttgtcagtttctgtttgagttacaattgcttttggagtctttttcatgaaatctttgccagggcctatgtccagaatggtatttcctaggtttccttctaaagtttttatagttttatgttttacatttacgtccttaatccatcttgagtcaatttttatgtatggttaaaggaaggg

SEQ ID NO: 311873 - DNA, 604 bp, Homo sapiens
ccttttctattttatcttttaccctatacttgctttgggtttaatttgttctttttcaaattcttaagtttaatcttagattattgaattttttagacctttctttttattaacatattaatttaaattacacattttcttttcaacattactttagccgcaccctcacaatatttatttgttgaatgttttttcttatcatgtaactcaaagctatcttgtgatttcttcttttccctggaatatgtagaagtgtgtcattttccccccaatatttggagctttcctagcattttttgttaccgatttctaattaattttggttagaaaatagtttccccataattctaatcattttatatttatgaagaaattgttatgaaacaccagaaggtcatttttaaaaagctcatctcggccgagcatggtagctcatgcctgtaatcccagcactttgagaggccaaggcaggtggatcacctgatgtcaggagttcaagatcagcctggccagcatggcaaaacagcgtcgctacaaaaatacaaaaattacccgggcatgttgrcatgcacctgtaatcgcagctactcgggaggctaacgga

SEQ ID NO: 311874 - DNA, 595 bp, Homo sapiens
tgcattgtctcttttcatgtaaaatatgcaaaacttgtaaatgtgtaggttcacaacccacattatgctttagtggatatatgtactgctaataagtaaattattaaatcaatgatctcatttatgtagtttatataatatgtcacattttgtttgctgatgtcaagaacagctctttttyaatttatggttttcaacaatttaatagtgatgtgctgaggcacagcttttttgtatttttttcatctgcttattgtttgttaagaatattctatgtggaaacttctgactcaaatcaaacttagagaattctcagacattaattatttatttttcttctggtctatttcctcatttattttccttctagtgttctaataacatgtatgttagaccatctgatattttctcaaaggtccctgaggctctcttaatcatttatagtctttatttttctgtgttcttcacattggataatttctttccatttatctcctagttcactgattcatctattatttacattgcactaagtccatctagtaatacattttgtatatttattttacaagaatttccacttagttttttatat

SEQ ID NO: 311875 - DNA, 608 bp, Homo sapiens
tgaatatcttaagcagcaattttacaggaaaagggactcaagtataaacttcttaacctaggaggataattgttacattgtcagaacagcaaagagaccaaacttgactgaagatgtgtgaatggtgagcaagaggagagagagggagagaagtaaggtcagagagttaagtagggcaagattttggccattgataaggactttgatcttgactttgaataaaacaaggagtgactgacaggtttcaaatataagagggacatggcctagattacagtataaaatgattcttctgactgtccttttgtcaattgagtagagaaagataggggcaaatcaggaaggttagagttagtccatgtgagagataaatgggcacctggaataaagagaaagtaaygcataggagcagatgtaagtttttcagggacctctttaaaaaatacaaaattattgctaccaagtcaagtacaggagtagatatttatttagaataagtaaagactgcaaatgttaaaaaaactgtcaacatgatgtcaacaggcatcatgaaaggcctaaaatttataagctattagtcatattattattacccgcctgctgtatct

SEQ ID NO: 311876 - DNA, 608 bp, Homo sapiens
tgaatatcttaagcagcaattttacaggaaaagggactcaagtataaacttcttaacctaggaggataattgttacattgtcagaacagcaaagagaccaaacttgactgaagatgtgtgaatggtgagcaagaggagagagagggagagaagtaaggtcagagagttaagtagggcaagattttggccattgataaggactttgatcttgactttgaataaaacaaggagtgactgacaggtttcaaatataagagggacatggcctagattacagtataaaatgattcttctgactgtccttttgtcaattgagtagagaaagataggggcaaatcaggaaggttagagttagtccatgtgagagataaatgggcacctggaataaagagaaagtaatgcataggagcagatgtaagtttttcagggacctctttaaaaaatacaaaattattgctaccaagtcaagtacaggagtaratatttatttagaataagtaaagactgcaaatgttaaaaaaactgtcaacatgatgtcaacaggcatcatgaaaggcctaaaatttataagctattagtcatattattattacccgcctgctgtatct

SEQ ID NO: 311877 - DNA, 627 bp, Homo sapiens
ttcctaaccaaaccaaaggtgctacagtagcagaatcattagcagaaaaaaatagaatttaagtcaataagytttaacagaaatagccacccaagaaaatattcaccaagtaaatttaagcatcaccaatatttagcatctaaaaccacagcttcaaaaatataaataaaaaatatgaaaatcataagtagaaaccaacaaaatagaaacatgggagacttcattatattactatgagaagctaagggtgtgcatagtaaatctgaaaagtaaaattaaaatattttcttacatagatgtagacagacacatgatagagagagctctaacatcgatttatataatttttcacctaacaattaaagtatgcgttaagttcaggatacattgaaatttacaaactggctacaaacaaagtcaaagagtaaattcaagtaaatctcaaagaccattataacaagatattatgatctgtgactttaatgcaattaaattggaaaataagcgttaagcaactatacaactcatatctatttataaattaatatatacattaaatgtatttagtattagatgcaaacaaaataatttcatagcaaaaacgtgtagggtgagtatagtgatatt

SEQ ID NO: 311878 - DNA, 425 bp, Homo sapiens
ttactcaaatgattccagatccctctaaaagtccttacctatggtaagacatttttgggcagttttagccccaaataatttaccttgtaaaattatatttatttttgtttctattaatgtaacaaattatatactgtatgagaacattttaatggttattttgyggtacatatgtatagagtcttcaatgtttgtatataagtgctatgatctgaaagtttgtgtccccccagaatttacgtattgaaacctaatatgatggtattaaaagatggaacctttgggaggcgattaggtcatgtgtgtaggacgattatgaatgggattaacgcccttataaaagagactccagagaactagcttgaacttttcatgtgaggaaacagcaagaaggtaccatctttaaaccaaaacaggaaaggggc

SEQ ID NO: 311879 - DNA, 580 bp, Homo sapiens
gtcccaaccatgtggctcttcctgcaaaggtggtcctgcccatgaggcacgtagtggggttattctggcccactgaatctaaagaggtgacctcaccttttgaaactgagatatgttctaaaacagccttcctctctggggccacggtggcgagagtggtagccctgatgatctttgaattgcctcgagggccattcttgcagttccttaaagaacagtacacattcccagttgaatagctccagtcctgtagaatccatgaattctacagacttctttaattctaccctgctttctctgtcctctttcctcccaactggcaatgtctttgctgatataatcccatctctattcctggtttttrctaaaatggctaaaattaagtccatgcgtcacaacagttatctctttatcaaatggttatttagtcacacccttagtgttcccttcagaataacctctctcacttttgcaacttggatagtctgagagttttccaaattttcaagttcttcttgttttgcttaaaagttcttttttcaattcatctctctctttttacattttaccataagcagtc

SEQ ID NO: 311880 - DNA, 607 bp, Homo sapiens
aataatctctttgctttgttgttgttgttgttgttgttatagccccagaactctgcctcttgattcttcttttgaaatggtaaccataggttctactctgtactcttcttactgctaacccaatcttggatgggaaaagaagttgtctttccatctttcctccttctctgtctagaaagacacaattttcaatattcagaatattctctttcktttttactcataatcacttgagagtaatagttaaaaataaactcgtcaaggtttcaaggtttaccactctcatgtattagaccttagtggatagagctccccactgcctttagagagagtatttgaagcttcattgggctcccattgatttcctatagcagaaaattctccctcctttccctggtacaataaaatataaatatttggtctttgcccctggtctctgtcacagagtccctaaaatccttggaatttattaggttggtgcaaaagtaattatggtttttgccattaaaagtaatggcataatactacgttttgtatactaatgagatgacttatgggcttcaggatgagggcttgtggtcagaaaaaccaagtactcattagaggt

SEQ ID NO: 311881 - DNA, 383 bp, Homo sapiens
attatctgcaccaattagggtatgttatgcatcagcaactccaaaacacagttacttaatagagaaaaggattatttctcactcttgtctaatgtgggtttttaggttttcttcttatcacagtcactcgggtatctagactgatagagcagccaccatcttgattatggtcagtggcaatgcaaaaacaaaaagagttctggatattctagcactgctaattctatgcttgcttacagtccatcatttctcttcaaatttattgggcagaactagtatcaaagcccagtgaawtcacaaggaggtaagacagtataaattcaccatgattctagaatttggaaagtttaaaatattttgctaacagtaataagagcatttat

SEQ ID NO: 311882 - DNA, 383 bp, Homo sapiens
attatctgcaccaattagggtatgttatgcatcagcaactccaaaacacagttacttaatagagaaaaggattatttctcactcttgtctaatgtgggtttttaggttttcttcttatcacagtcactcgggtatctagactgatagagcagccaccatcttgattatggtcagtggcaatgcaaaaacaaaaagagttctggatattctagcactgctaattctatgcttgcttacagtccatcatttctcttcaaatttattgggcagaactagtatcaaagcccagtgaaatcacaaggaggtaagacagtataaaytcaccatgattctagaatttggaaagtttaaaatattttgctaacagtaataagagcatttat

SEQ ID NO: 311883 - DNA, 607 bp, Homo sapiens
tgtttgaaattttttagaagtaggaagggtttggattgacttggagatagackaagaatcaatatccctcaaggctgggtagtatgttaaaaagtgtccattccacaaatggtggagtttcatgacagattcctcattatagattcagaaagatgataaaagcttcagatgcaatattaagtgattccatagaataattggaccttagaaacatatcctcacagccataaaaatatacaatatagtagatgtatgtattagtctgttctcacactgctacaaagaactacctgagactaggcaatttatgaagaaaagaggtttaattgactcacatttctgtaggttgtataggaagcatggttgtggaggcttcaggaaacttacaatcatggcagaagggtgaaagggaagcaagtaccttcttcacaaggcagagcaggagaaagagagtaaagggggaagtgctacaaacttaaaaaaaaaaaaaaaacagatctgatgagaactcactcactatcatgagaacagtaaggggggagtctgcccccacgattcaatcactttttaccaggtcctcctctgatacatgagaattacaattcaa

SEQ ID NO: 311884 - DNA, 523 bp, Homo sapiens
attcaaaatttttgcttttaaatattacagaaacttcaatagttaaaactattaaaaatattcatgaaaaatatcaagatgacatggaactctgaaaaatgcaaatgaataagttacgttcttacatgccatttccgtggagttgtgtttctctggactgaatacctatctgccagtgcaaatcaaagactagtgttattttaaatatttaaatggtgtctgttttccaaggtacgatgaacaatttgaatcacagcattaaggacatttcttatttaccaagtgcwtgaagaaaatgaaagttcacattttagggggaaagcaaattcacaccccattgcaatgtctgctgccatcctatgatgtattttacatggccatttcctgcagttactggtattccctactgctaaagtatgaacacatttttgtatctttccgcttcccattgtgtgcttcatctccagattttcaccacgcttcagttacttataggaaaaaattcaataccatgataagctga

SEQ ID NO: 311885 - DNA, 568 bp, Homo sapiens
taaaattcaatttaacaataatgtttcttttttccccctctctctcacgtagaattgcttttaatctccttgtaaatactgtaacttctttggggagagtcatttttatgttttactgcayctagtacactgtggctaatactacttaccctcaatatgtaattgaatcattgtacattccctatttcaatagccaagcttctttcatttttcttatgttgggattataccataattgtaattttcaatgaaatcaacatataatggtaaaatgactaaaagacaataggaagtctcagtgataaaacaaaggtccaaagtttccaactagcccacaagaagttataaactaattatgctgaataaatactttgcacaaaattctggtgttggggaacagaattgtagacatgcccctggctgtttctgtgaaagacaaggcccctggctgtttccgtaaaagacaaggattcaagtactggttcagtctctacccatatgaccttgaccaagtcacttaatctttattgggcttcagtttcttcaactataaaattaagaaattggt

SEQ ID NO: 311886 - DNA, 574 bp, Homo sapiens
ctagtatggtttctgtcttcctgcccgatacatcccaaatattctgactaatgttaataagatgtttctggaccgggcgcagtaggtcacaactgtaatcccagcactttgggaggccgaggcaggtggatcacctgaggtcaggagtccgagaccagcctgacccaacatcctgaaaccccgtctgtactaaataaaaaaaaaatcagctgggtgtggtgttccatacctgtaatcccagctacttgggaggcaggagaatcacttgaacccggaaagcagaggttggagtgagccgaggttgcaccaytggactccagcctgggcaacaagagtgaaactctgcctcaaaaataaataaataaacaaataagttgtttctttggcatggagttgtttgtttaaatcctaatataaattgtgagaatgacgcctaggagtagatcgcatgtttactagagagaaatctggttggtaaatagttaaaatttgacaattccaatattttgtatcagttttgaatcatagattagaaaagagaagatatcaaaaagaaatcagagaaaagatactc

SEQ ID NO: 311887 - DNA, 609 bp, Homo sapiens
tcaggtgttccaggattttctgtataggtcagcattggtatcgtctacctctattaaataaaaaatgtgattttagctgatgtttggaacatactttataatgtggataacattcacagaagtctagaaatataaacaagtcctggcaagatgttgctagccaataccaaatttatatttttagggggtgctgcactggacatgagctctccttctgggactcagagcttcacttgcctctactgaaaagcccaagtgttctgatagtcagattggctcaggttcattccctctgagaggatttccgkgtctcccttggaatgaacccagaagaatggaatccaattttctcctcacagcattgccacaatgtgctccttcaccactgactcaggttggaaatctcaggctgctgcaccatcaaccacaattttaggagcactgccatgccctgtggccatgagcaaagatctggggcccacagatctttttatttgggccccaagctagcaaagttgattaacttgtgcctatgtagacttttgatggttcctgggcttcagaaacttctcctgtaaatgaaaagaatgatgtttaaatttaatgttg

SEQ ID NO: 311888 - DNA, 613 bp, Homo sapiens
agcctttgtcccaaggtttaggacagtgctcattaaagacctgctctgtcaaaatctcccatgaagtctgtacaagaacattgttctttttattagcatagaggagcatttcccaaaacatggtctatggaacatgaatcctgtgagatgcagctgagggttttatggacaaacaggtatgagaaatgctgcacactatacctcccggcccgaaattcacaaagcaatatcaatagctctaagaacgttcagtgaagaaaagtgagtaggtgtctattgcttggcctgcccagcagtcctttctccctcctttggtaacagcattcaggtttttcctttggggaacaactccctccctcccacccaccatgaccctgcatttcatgtgggctgatttgttgagaccattcagcgacaatgctgcctcatcctcaacacatacacatacacacwcacacacacacacacacacacacacacacacacacactcccacctgcaggcccctagccaaatgtggtaaccagtgcagaattacatgctcaaaaaagattactggaactgaatctctcagatcatagcactcttagaagctgtccgtaagttcctgtta

SEQ ID NO: 311889 - DNA, 585 bp, Homo sapiens
acacccacagctgacttcccctgtttttttttttaaggttccagcttacatatcaattttttccaaaagcaaccccaaaaggattaggtgttttctggtatggatatttgttatttctggttatattattgttgtttcttgttgttaacatctaaaaccctaccaagtttagggaggaattgtcttatagtagtatttgtgggatcctttactccttgtaccactgaggaagctgtagaggggaacatytttctctcccaacccctaacaatctaggtctcacccaatctgaccctactttttggaattttagatcacaagtgagcgacacaaagataaaagagatggccagaattcatttcctgtttccaggggcaggggtagctgcctcatggaagaattgttctttccacttggtgtttggagccttctgggatcctcccattatagtaggtagctaatcaggtatgagcagggcaggagagggctcccccaacccacacaaggagtgttgggcaaccatcagtgatagtcaggttgttgttagctgtccctctaaagtaataattggtcacagccggcacc

SEQ ID NO: 311890 - DNA, 544 bp, Homo sapiens
ttttggaaggtggtttcaacttaaagctaccagctgcattagtcccaaacagagccagcctgtcctttaaagctttgatgtcagacattgacttatcttctctagctatgaaagtcctagctggcatcgtctttcaatagcaggctgtttcttctacattgaaaatctgttgtttagtgtagccaccttcatcaatgatcttagctagatcttctggataacttgctgcagcttatccatcagcacttgctgttcaccttacacttatatgatgtggagacagcttctttccttaaatattatgctagcttcaaactcttctgcagcctcctcacctctctcagccttcatggaactgaagagatttagggccttgctctggattaggctttgggaatattgtgcctggtttgaacttctttccaggccattaacactttctccatatcagcaataaagctgcttcacttaccatttgtgtgttcmcttgtaatttcctttaagagctttttctttgcattcagaacttggctaactaatgcaa

SEQ ID NO: 311891 - DNA, 584 bp, Homo sapiens
ttgaaactaatgagaccaaagataaaatataccagaatctctggaacacagctaatgcagtgtaaagaggaaaacttacagcactaagtgtgcacatgaaaaagttaaaaagatctcaatttaacaacctaatatcacaactaaaagaactagaaaaccaagagcaaaccaacccccaaacttgcagmatacaagaaataaccaaaatcaaagctgaatggcaggagattgagacacgaaaaaccattcaaaacatcagtgaatttaggatttggttttttgaaaaaattaatagattgcttgctaaactaataagaaaatggagaaggtccaaataaacacaattagaaacaacaaaagggctattaccactgacctcacagaaataggaataatcatcagactgttatgaacacctctgtgtacagaaactagaaaatctagaagaaatgtataaattcctagatacgtacaccttcctaagactcaaccaggaagaaattggatctctgaacaggtcagtaatgagttttgaagttgaatcagtaataaatagcccatcgagcaaaaaagcccaggaccag

SEQ ID NO: 311892 - DNA, 600 bp, Homo sapiens
cacacattcatcctacctgccccagtgctagctggccgaggatgccaggctgtacccgaccttaggctgtgcggcttggaacctggaccggggcaggaattgacaggttcccccaaacaatgtcactcccaggaccctaagacctcaagcagcagaaaccacaattctggatgttacgtgcagcgccagctcctgtctgccctgcctccttatccctttctcccagggcgactttggaccaggtctcgaggccgggagaccggccccagcccgcccgaccgggatgggcctggcgcccgggggaggccgcgtcgtgctgagacagctccgagctgcctccccgcagccgcgggccgctacaatacggattcggcggcgagaggaaacagtctggccctccaggggacgcagggaaatccaacctttgggtcgggggcaattaggactgggagtcgatacygcgggcaacgaatgatgaatgaataaatgaaaggatgaacagagtggcgaggcggagatgggccatgcggggcgtcccgaggagggtgcccttccttgccccgatgctgccgggaccgtccctcatcccccaggtcgcag

SEQ ID NO: 311893 - DNA, 607 bp, Homo sapiens
taatgagcattaaacaaactgttaataataccacacctttaataacttacttctccgctatcttccacctacatgagtgtgaatttagagctgtggagcagtcagataaccaacaaggtttgtaatgggcacagctcattcatctttttggctcaactaaaaattcccaggccattctgtgaacacaagaaacatggaaagttattcatattaatgaaacttggtgtggggggtgggtggaggagagaaatcctacagactcaaggatatttccaggaaggggaaaaatgtggcttattgataagtcagtcctttatatagaaaccagaaaatgttcctaaagtcagtggaaaatggtagtcaagaaaaccctttcagctgagtgcagtggctcatgcctgtaatcccagtgctttgggaggccgaggcaggatgatcagttgagcycaggactttgagaccagcctggccaacatagtgagacattgtctctacaaaagtaaaaaaattagccaggcatggtggcatgcatctgtagtctcagctactcaggaggttgaggtggtaggaccgcttaagcctgggaggttgagactgcagtgagccg

SEQ ID NO: 311894 - DNA, 600 bp, Homo sapiens
aaccaattttccaaactcaacaacaatccaaggaatccaacaatattgatggcagaattattatataataaatcctgttgttaaagtaatttcatgaggcatcagatgcttttaacattataataatactgttcaatgtaataatgagtagccacaaagaaattactcagagatgcccaagagtaaatgttgcctgaaatgtgtataatctaggtcttggtttgaaatgtcctgagactttggaggaaaccaaattcctagcttgcacttttgttgcatttctcatctaggggatttagaccaaaaagcacagctgtattagcaccccatcttcatacattagttcgtccaacaggagaccaaatggcttgtcctctgttagggtcagagggtgactccagctcttgaaaatgctggactgtgggctccctctggaggakactatgataatctgacttcgaagagaatttcaggatcatcctcactctcttgagcaagaggggcatacagaccatgtaacagctactggaaacaatcaatacaaagtactgttatccagaaaatgaaattaatactaacatgatacacagtgcatattct

SEQ ID NO: 311895 - DNA, 584 bp, Homo sapiens
cttgtcaatatctacaaaaaggactactggtattttagttgggattgcattaaatctgtaggtcagtttgaggaaaattgccgtttaataacgttgagtctcatgttgttttaaaaaatagaggcgaggtctcactatgttgtccaggctggtctcgtagtcctgggctcaagcaacccttgagcctcagactcccaaagtgttgggattacaggcattagccaccacgcctggcgctagtctcctgattcttgaatcctgtatatctctgcatttatttagatctttactttctctcagcatattttgtcatgtagctgggactacaggcgcctgccaccacgcctggctaatttttgtaattttagtagagatggggtttcaccatattgttcaggctggtctctactcctgacctcgggtgatycacctgcctcagcctcacaaagtgctgggattacaggcgtgagccactgcgcctggccaacacctggaacatttaattgaacatttgttgttattgtcttaaacactggatgccccaaaaaccctgtggttaaaaatgaatggtgaaaaaatatgaa

SEQ ID NO: 311896 - DNA, 557 bp, Homo sapiens
taaaacatttttagtgctcacatttcaggcttaacacagtctacccagtaagttggcaatatcccagatccaagaaccaatacgctactcaatgcttcctgaggcttctcaagcaatgaagcaggcagctctttctcttttctgatcaccatcaaaagaataaattactaaacaatagacaatcctgcttcatttagaacataggaascacttcacaatagtattgctgtcctttttggtctaatgcagcagctgttttaaaggcatagcattagacctcaaaaattattaatccaattaataataatttaatccattaaaatacatattacacactaagtgcagactgtcaattttaatgaagttgcaaaattgtctacaaaaggggtcttagaaaaatctgtttcttcgtgatgttgtgataagatctttctttagaatgtcaaagactttgctaagtaattaaatagatttttaaggcaaacagatcttcgttccttaaataacaatgaatagactccctataaacataaccctactctggatgcttatgaaac

SEQ ID NO: 311897 - DNA, 563 bp, Homo sapiens
taaggcaaacagatcttcgttccttaaataacaatgaatagactccctataaacataaccctactctggatgcttatgaaactatagtctgaccctgaaaagtttttctctgtggtgaagtaatgtgtgcaatcayacccatggtatatcatctttacgacctgtgtgttcttcctgatactgctgggttgagcaatctccatcggtcagtgcaaaatgagccaaatttatctttcagtttctgcagtttcatttattctgcaacctcaaaaaacaaacagcaagtttggcattagtcttgttactaagctagtggttagcaatttctaacaacttaacaaagaggttggaatcaatggtttcaaattctgattaatacatggctatttaagctacaaaggaaataaaggcatctaatcaggatattcttgaagtcagtagagctgcctgcttccaatcagtaatcctatacaccaaaacattttctgagaagtacatttatagatgtatttttgaacttcctgtgtgtcttgctatgagaagaaaaacatccctaaaaaata

SEQ ID NO: 311898 - DNA, 525 bp, Homo sapiens
ccttatcagatgtatggcctgcaaatattattttctcccattctatagattgtctctgtgtctcccattctgaaggaggatccaacaatctcacttctgggcatttacctcaaagatttgaaatcactttgttgaagagatgtctgccctcccaccttcattgcatcattattcacaacagccagttctgtaggttgtctccactgttaccttcactgtggagaaggaagaagtgaaattgttactgtctgctgacagcatgattttatatagacaaaacccagccagccactgggtctcacacctgtaatcctggcactttggtaggccaaggtggacagatcacgtaagctcaggagttcaagaacagcctgggaaatgyggagaggtcttgcctctacaaaaagtacaaaggttagccaggtgtggtggcacacacctgtagtcccacctactcaggaggctgaggtgggaggattgcttgagcctgggaggcagagtttgtagtgagccatgatcacacca

SEQ ID NO: 311899 - DNA, 555 bp, Homo sapiens
tcgatcaactctgcttgccaaacagaatgcctctgacaaggtcatcagcaaagtcactcttaagtgattgggcacagacaattattatataagcactcgtggctctgtgtggaaatgtacactgatcaatcttagagacagaaatttcatggatataaaaagaaaataatctactgcattcacgctgttgagcaattaatttattgccaacaggatacagtttattaccaacagaatatagactatgcttgaagaagacaagaattgcatgttaatttcttgctactgactaaactttgattattctgtcttagggactcaaactaatgatcacacaactgtgctctgaattaatacaggtaaaaaatggtcacacattttsttgagtcaaatgatagctcttcaagcaagagaatagatatgtaattaatttgtaaatagttgtgattcaagtctaagaatatcatttactcatcatgagagttaaagctctcaaggcaaaaataatcacttgcattatattattacacacatcacaagttggggaggtacagt

SEQ ID NO: 311900 - DNA, 555 bp, Homo sapiens
tcgatcaactctgcttgccaaacagaatgcctctgacaaggtcatcagcaaagtcactcttaagtgattgggcacagacaattattatataagcactcgtggctctgtgtggaaatgtacactgatcaatcttagagacagaaatttcatggatataaaaagaaaataatctactgcattcacgctgttgagcaattaatttattgccaacaggatacagtttattaccaacagaatatagactatgcttgaagaagacaagaattgcatgttaatttcttgctactgactaaactttgattattctgtcttagggactcaaactaatgatcacacaactgtgctctgaattaatacaggtaaaaaatggtcacacattttcttgagtcaaatgatagctcttcaagcaagagaatagatatgtaattaatttgtaaatagttgtgattcaagtctaagaatatcatttrctcatcatgagagttaaagctctcaaggcaaaaataatcacttgcattatattattacacacatcacaagttggggaggtacagt

SEQ ID NO: 311901 - DNA, 376 bp, Homo sapiens
ctaggactaaataacttcggtgtttcttcttcctcttattctcaaaatatggctttcctaaaagcaaggtggaaagttggtgattacttgttaaactggtgctgtaaaaacaaaaatttagaaaaaaaaaggattagtatgacattttacacacaatttattctttcaatagcttcattgggaaaaatttacatactacaaaactcatctattgtaagtgtagaagtcagtaatttttagtaaatttggaagtttgtgcaattatcaccacaatctagctttcaagcayttctatcaccccccaaaacttccctcccttccatttgcagtcaattccattcctatcctctctcccatgtaactatggatctacttt

SEQ ID NO: 311902 - DNA, 630 bp, Homo sapiens
tttatttttatacagttgaagatgcagyattcacttaccacttgtcagaagtgtttcttgatatgctgcccctatgtgttatcacgtcaactccatctgtccagaacgctgttactgtttgacgccattgggagttggaagatagcaaaataagtcacacattctcaggatggggcagatttgcatagagatctaatcattacagttatctgaatcgaagccttgtacgtgggtcccctaaactcgacagaagaaagcaggcagcactgtgagaagacagtgtttctatgccagcctgtcattgcttttcctgcttttatgtctctttcaaatttttcatttgttaaataattgaattcttacttgatatcagcttatcatgttaactgatggctatatattgtaatgcaaaggagaaaaccctccaacctgttttggaagacagaggatgaaaattattcatacagtatactatttccaacttacttttcaattttggaaaacagtgaaaaaaacaaaggataattcatatttgtattaattcattcaaaaaatattcactgagtacaaattatgtaccagctactggactaaaccctgggagttgaaagatttatttggtgtgagcat

SEQ ID NO: 311903 - DNA, 630 bp, Homo sapiens
tttatttttatacagttgaagatgcagtattcacttaccacttgtcagaagtgtttcttgatatgctgcccctatgtgttatcacgtcaactccatctgtccagaacgctgttactgtttgacgccattgggagttggaagatagcaaaataagtcacacattctcaggatggggcagatttgcatagagatctaatcattacagttatctgaatcgaagccttgtacgtgggtcccctaaactcgacagaagaaagcaggcagcactgtgagaagayagtgtttctatgccagcctgtcattgcttttcctgcttttatgtctctttcaaatttttcatttgttaaataattgaattcttacttgatatcagcttatcatgttaactgatggctatatattgtaatgcaaaggagaaaaccctccaacctgttttggaagacagaggatgaaaattattcatacagtatactatttccaacttacttttcaattttggaaaacagtgaaaaaaacaaaggataattcatatttgtattaattcattcaaaaaatattcactgagtacaaattatgtaccagctactggactaaaccctgggagttgaaagatttatttggtgtgagcat

SEQ ID NO: 311904 - DNA, 630 bp, Homo sapiens
tttatttttatacagttgaagatgcagtattcacttaccacttgtcagaagtgtttcttgatatgctgcccctatgtgttatcacgtcaactccatctgtccagaacgctgttactgtttgacgccattgggagttggaagatagcaaaataagtcacacattctcaggatggggcagatttgcatagagatctaatcattacagttatctgaatcgaagccttgtacgtgggtcccctaaactcgacagaagaaagcaggcagcactgtgagaagacagtgtttctatgccagcctgtcattgcttttcctgcttttatgtctctttcaaatttttcatttrttaaataattgaattcttacttgatatcagcttatcatgttaactgatggctatatattgtaatgcaaaggagaaaaccctccaacctgttttggaagacagaggatgaaaattattcatacagtatactatttccaacttacttttcaattttggaaaacagtgaaaaaaacaaaggataattcatatttgtattaattcattcaaaaaatattcactgagtacaaattatgtaccagctactggactaaaccctgggagttgaaagatttatttggtgtgagcat

SEQ ID NO: 311905 - DNA, 598 bp, Homo sapiens
gagtcatccaatttctttgcaaccttgccagtatttggtgttgtcactaatttttatttcagccactgtgagaggtgggtagcattacctcattgtggtattaatttgcatttctctagtggctagagatgtggagaatcttttcatttgttagtttactgtttgtatawcctctagtaaaatgcctgttcatgtattttgcccagcttctaactggattttttttttaactattgagtgctgggaattctctacatattctaaatactattctcttgtcatatatgttgcttgcaatattttctctaactctgtagcttgtcttttcattcttttgatcagatctttcatgagctacatcattgtcattagagaaatatgttttaaaccacaatgtgataccaccacacacatgcaaatggctgtaataaaaaagaccaacaataccaagaattggtgaggatgtggaaaatctggaacccatatacattgctgatggacatgtaaaattgtacaactacatttgaaaatagtttggcttattcctcaaaaatcaaacatacatttactctacaatccagctattcttcttggtaac

SEQ ID NO: 311906 - DNA, 598 bp, Homo sapiens
gagtcatccaatttctttgcaaccttgccagtatttggtgttgtcactaatttttatttcagccactgtgagaggtgggtagcattacctcattgtggtattaatttgcatttctctagtggctagagatgtggagaatcttttcatttgttagtttactgtttgtatatcctctagtaaaatgcctgttcatgtattttgcccagcttctaactgrattttttttttaactattgagtgctgggaattctctacatattctaaatactattctcttgtcatatatgttgcttgcaatattttctctaactctgtagcttgtcttttcattcttttgatcagatctttcatgagctacatcattgtcattagagaaatatgttttaaaccacaatgtgataccaccacacacatgcaaatggctgtaataaaaaagaccaacaataccaagaattggtgaggatgtggaaaatctggaacccatatacattgctgatggacatgtaaaattgtacaactacatttgaaaatagtttggcttattcctcaaaaatcaaacatacatttactctacaatccagctattcttcttggtaac

SEQ ID NO: 311907 - DNA, 598 bp, Homo sapiens
gagtcatccaatttctttgcaaccttgccagtatttggtgttgtcactaatttttatttcagccactgtgagaggtgggtagcattacctcattgtggtattaatttgcatttctctagtggctagagatgtggagaatcttttcatttgttagtttactgtttgtatatcctctagtaaaatgcctgttcatgtattttgcccagcttctaactggattttttttttaactattgagtgctgggaattctctacatattctaaatactattctcttgtcatatatgttgcttgcaatattttctctaactctgtagcttgtcttttcattcttttgatcagatctttcatgagctacatcattgtcattagagaaatatgttttaaaccacaatgtgataccaccacacacatgcaaatggctgtaataaaaaagaccaacaataccaagaattggtgaggatgtggaaaatctggaacccatatacattgctgatggacatgtaaaattgtacaactacatttgaaaatagtttggcttattcctcaaaaatcaaacatacatttacyctacaatccagctattcttcttggtaac

SEQ ID NO: 311908 - DNA, 577 bp, Homo sapiens
taaggctacttgagagcaaaggccatattctgtttacaagtttctcaggaattccctagtcatgccaagaattctggttggaattgactgcccagcttttaataaattcttaattaccacaggtttcatctaaatcattatcaatgcatacattagaatgtgctagtaagtaaatgaccacttctcagttcttccaggaattttcatggctgacaaataggccacagatgaatygtgaggcaactgacttatggcactgagcatttccagaccacacacctgtaagttaaagagatagaaaaacaggaaaggactaacaggcctgccaaacacagtccacaccttccaatctagtagatacaccagggactcaacacgccgcagcatcctccggtttacaccatccccaatcttgaagcgatactgaagctactctaagattcaagagcaatgctgtctttcttctcactacagtgccaatcttgagtgggcagaatttgctgaagggaaactctgaagggtaaatcaatgagataggagtaaggatggtattgaggttaaggagatggatgaagca

SEQ ID NO: 311909 - DNA, 555 bp, Homo sapiens
acatggtcatgtttttacctgcaaactaatgggaaaatatgtccatttcatcacaaatcccttgtcataccataaggtgttgtgccacggaaaatattttgattggaaaaaatttcactttgctacttctgcgaaggtaagcagttttacatttatataccattctgtttgtcttctacctttttatgtgcttgtctatttagaaattttgatgtacttagattttatgataaaggtgttgaagagagttatccttatgtggagattcttagaaacataaataaattatacrtagcttcttagtaataatcatttagaaagtcaaaataggtatagatttgtcatttgttgacgagctaatgagggtgaaatacagattaaatgctctactgagacaggtggcactgtacgaataagatagataaaaattcatcacatcagcaatgtctatgcaagaatgcaagtgacggaaacctaacattcagcagttgtctcaccacacttgtgccacacagtgtttcattttgataaggaattggcaagatattttaacat

SEQ ID NO: 311910 - DNA, 555 bp, Homo sapiens
acatggtcatgtttttacctgcaaactaatgggaaaatatgtccatttcatcacaaatcccttgtcataccataaggtgttgtgccacggaaaatattttgattggaaaaaatttcactttgctacttctgcgaaggtaagcagttttacatttatataccattctgtttgtcttctacctttttatgtgcttgtctatttagaaattttgatgtacttagattttatgataaaggtgttgaagagagttatccttatgtggagattcttagaaacataaataaattatacgtagcttcttagtaataatcatttagaaagtcaaaataggtatagatttgtcatttgttgacgagctaatgagggtgaaatacagattaaatgctctactgagacaggtggcactgtacgaataagatagataaaaattcatcacatcagcaatgtctatgcaagaatgcaagtgacggaaacctaacattcarcagttgtctcaccacacttgtgccacacagtgtttcattttgataaggaattggcaagatattttaacat

SEQ ID NO: 311911 - DNA, 568 bp, Homo sapiens
tgagaaacagcccacctggccacagcatgcaaatgtcccattggcagagggctttctccttttaaaagtagtacattggcatctgggtgaaaatgcagatagttatgaagaaaacagaaagccaagaagagaagcctgtctggggtgagggaactgacaagttcatttggacctgctgaatttgagtgatggtgaaacgaacgttggaaatacccactagacatgaaaaaatagaagcaaattctgggaaataaaatgattacaaagattcaggtcctggatatagaccagaagtcagatcatgatgctggggcctttgtagctgggtgggcctctggcagagagcaggtaaggaaagaacaacgagggctggagggtgtaacatagaggtggcacaycaggcaaaggagccagatgggaagataatctggttgtacaggttgtagctcagtgttatggaaacttgagtgatgttaagagtcatctactcagcagtccccaacgtttttagcaccagggaccagtttcatggaagacaaattttccacagatggggtgggggatggtt

SEQ ID NO: 311912 - DNA, 568 bp, Homo sapiens
tgagaaacagcccacctggccacagcatgcaaatgtcccattggcagagggctttctccttttaaaagtagtacattggcatctgggtgaaaatgcagatagttatgaagaaaacagaaagccaagaagagaagcctgtctggggtgagggaactgacaagttcatttggacctgctgaatttgagtgatggtgaaacgaacgttggaaatacccactagacatgaaaaaatagaagcaaattctgggaaataaaatgattacaaagattcaggtcctggatatagaccagaagtcagatcatgatgctggggcctttgtagctgggtgggcctctggcagagagcaggtaaggaaagaacaacgagggctggagggtgtaacatagaggtggcacaccaggcaaaggagmcagatgggaagataatctggttgtacaggttgtagctcagtgttatggaaacttgagtgatgttaagagtcatctactcagcagtccccaacgtttttagcaccagggaccagtttcatggaagacaaattttccacagatggggtgggggatggtt

SEQ ID NO: 311913 - DNA, 449 bp, Homo sapiens
gtttggcctttagaaatcttctgtgatcgcccatactcttcttccatctctgagatccatgcagaggaattggccgagaactctaggaacctaggggatggcagagccgcagatggaaggcgtctggaccctttagctgctgcccacctcgaatatttgyatttaactttgcatgagtgaaaaacagatgtgtactaagatcatgggatttgttacttgctctaatgcatgttaccaactttttatttctatttgtcaaaatacattttttcttagttgaaattaatgtatgaagcatattttatagtctgctttcttctttcaacctttgcatcaacttatttttgtatgtaaagaatgttgacatgctaacagttttgaacacctatattagtatttcatgttgttaatattctcttgaattacccagcctcaactgttttccatta

SEQ ID NO: 311914 - DNA, 449 bp, Homo sapiens
gtttggcctttagaaatcttctgtgatcgcccatactcttcttccatctctgagatccatgcagaggaattggccgagaactctaggaacctaggggatggcagagccgcagatggaaggcgtctggaccctttagctgctgcccacctcgaatatttgtatttaactttgcatgagtgaaaaacagatgtgtactaagatcatgggatttgttacttgctctaatgcatgttaccaactttytatttctatttgtcaaaatacattttttcttagttgaaattaatgtatgaagcatattttatagtctgctttcttctttcaacctttgcatcaacttatttttgtatgtaaagaatgttgacatgctaacagttttgaacacctatattagtatttcatgttgttaatattctcttgaattacccagcctcaactgttttccatta

SEQ ID NO: 311915 - DNA, 583 bp, Homo sapiens
gtgcattcattcattagagagttttccaccaaggcagaaacacctttttgtctgctttgatcactgctgtatactcattatctacaatagtgacaagcacataaaaggcactcaatatttgttgaataaattcttaaaaaaataaaagatgtatagccaacccttgaacaatgtggggtctaggggcattaacccctgtgcagtcaaaaacttaagtataatttttggttcccctagaagctaacaactaatagcctactgttgatcggaagccttaccaataacatgtgaagttcaaatcygtgttgttcaaggatcaagtgtatgtgggaaaaggaaatgaaaggtgagaataatgcaaagggccttttctttcctcccttttcttccctttttttctcttttccctctgtatattcaataaatattgaatggttactatatgccagtccatgtgctatggtctagggaagtagaccaacatcatctctgacctttggcacactaactggctggaataactctgtatattataatttacatgttttcaagagaaaggtatatgggctgctggcaacagtaa

SEQ ID NO: 311916 - DNA, 628 bp, Homo sapiens
taaaattaattccatggaaggcttaattttgtctctcacagtttaagtgatttttttttccagcagttttctggttagttgaaccaaaagaagctaccataacaactgtggttattaccaccgatataatggtggtaccagtataaaggtacaatgaaattttacaaaaatgaaaaattcacaatgtgaaaacaaagtatccttcatactttgtttaaagtacaaacaaatctagttgccaggtgccctagtgaccctaggacttgtcagagcccttgagatcagggaatccttctgagcccagttgtttaagttatcttcttccaggactcttgagagttccgcccrcatatttcatacttgaaaggctcttcttccagccatctaggacccatttctagatatatctgtggttatcagcttcttttatagcattcggagatattcaatgctgctacaagaatttacaaatgtatcccttttcctttacacaaataatctgtgtttgtactttcacttaacaatatttcttgggggatttttccattacaacatacatagagccaactcattcttttaggccgttagcagtgatcaattttacaaatatataaaggttattttaata

SEQ ID NO: 311917 - DNA, 311 bp, Homo sapiens
attcagcaatcatagtgcamttcttttatgtaacagctgaggaaacaacagacagattaggcatgcaccagatagcacagtgatagagctcagttttggggtgcctcctagttcataaaccatctcccctttccaaggatcgcatcccaccaggagataggtcatggcagccatgcataggaccctgcctcctgaatacagatcaatgagttgctggttgtcacccaagcttggccagtctggttctctctcccggaatatggagttaggattcagatgcgtcaggtagacaatgtctcagaagctggaac

SEQ ID NO: 311918 - DNA, 571 bp, Homo sapiens
caccccatatacaaaaatcaactcaaaatggattaaagactaaatgtaagaactcaatttgtaaaattatcagaagaaaaaatagaaaaaaaagcttcttgactttggttttggcaaatattttttcgaatgtgatcccaaaacaacaaaaccaaacatagacaaacagcatggcaccaaattaaaaaaccttctgcacagcaaaggaaaagataatctatagaatgggagamaatatttgcaaaccattcatatgataaggggttaatatacaaaatatatcaggaactcaagcaacgtaatagcaagaaaacaacacaattaaaaaatgagcaaaggacccgaatagatatttctcaaaagaagacatacaaaaggctaacaggtatatgaaaaggtgctcaacatcaccaatcatcagagaaatgcaaatcaaaaccatattgagtgatatcatcttacacctgttaagatggctattatcaaaagacaaaagctagcaaaggttggtgagtgtatgaagagaagagaacccttgtacattgttggtggcaatgtaaattaatgctgt

SEQ ID NO: 311919 - DNA, 571 bp, Homo sapiens
atactaggactgaatctgtcctttacrtattatcaatggaaaaaatggttgtttcattttgcacagtgacaaaaagaaaatgaagatctgtcagctcttgcctcccttaactcttcccacttagtatataaagacaatcaggtccctcatatcttctaaaaacaaacgtttcctttgacctaccaatcttttcttcggctacccaaagcctgttcttttcagcaacaatttttttgattttctcaacttgagctgtgtcaaagctgaagattcactttatttttttgttattcctattaatattgtaactgttgttataaatagaaacaatttgtttttattgtcaaatgataaatatttattacagatgaattagaaaatatgatcagagaagtaaaagaaaaaatgctaagtaattctctccaaacctccacagaggattcagttctctgcatgggcacacacacatctattttcacaataggggatcaaactgtatattctgttttatgatgtgcttttaaaaataatctttttattaaaaaaatacatatagaaaattgcacagcta

SEQ ID NO: 311920 - DNA, 588 bp, Homo sapiens
tttcagtcattttttgtaggtagaatgkatatttgcattaaaaattgtttctagatgattctgcttacaaatatatctggagataccatcaatgtggacaaaatgaaaagagaatgcttcagttttggataaatattttatttgcccagagcacagtttctcttactctttctggcctcagcccgataattccatacatatttttactattggtttaagtacaaatgcctcaaggtagaaagatcgattaaatgacctcttcagattccttctaagctttattattctaatttttcagcttccacagtgagatgagagcatgacagaaaacctgtgttctttgtcctatttatcaagggactatgaagacacatgtttggactccctcatttgctgtagaaacacatgtgtaacaccctcaggattattgtgtcttctcggaaatgcatgcccttggaagtaagcctgtgggtgggcttctctcttttagagacattatgaaaagacatagaaatttctacattgccctttgggttaggtaggcgaaaggtgatatatggcataatactaaagcagcacacgacaact

SEQ ID NO: 311921 - DNA, 598 bp, Homo sapiens
atgttaatgctttctatgttcacattactagaatatgtatacagggagaggaaatttaaaaaatgtaagacacaggccaggagtggtggcttgcgcctgtagtcccagcactttgggaggccaaggccagtggattacgaggtcaggagatccagaacatcttggccaacatgttgaaaccccatctctactaaaaatacaaaaaattagccaggtgtggtggcatgcgcctataatcccagctactcgggaggctgaggcaggagaatcacttgaacccaggaagtggaggttgcagtgagctgaaatcacaccactttccactccagcctgggcgacaagagtgaaactccatctgaaaaaaaaaaaaaaaaaaaaaaaaagacacagactctgctcttgcataatttaaccacagaaatggaatataaatttaragggaattaatgataagtggaagttcatggtagacaaaaaataactattcaaagaagaaactgctttgggcttgacatggaatgcttcatagaagatggagacttgtgcacctttaataaggatggataagattagaaaatatagtcaaagtcgcaggcag

SEQ ID NO: 311922 - DNA, 557 bp, Homo sapiens
tcttctgcttgatcaagcctcctgttgaaatctctttattacagttttcatttaatttactgtatgcagctccagaatttctgtgttatttaaaaatgttttctaactctgctatgattttaatgtttgtgtccctctaaatttatgttgaaatataacccctaatgcaatcgtattaagggagaggcttttaggatgtgaataggtcatatgggcttatcccttgtgaattagtttaatgcccttgtaaaagagccttcaacagcattgatcctttttccctcctagtccttccaccatgtgaagtcacagcatttgtcccttccagatgattcagcaacaaggcaccatcttggaagcagagagaaagcctatagcagacacccaatgtactggtaccttgatcttggacttcctagcctccagaaatgtgaacaatatatatytctctatgtatatattattacccagtccatggtattttgacatagcagggactaagacaatttctttcttgaaattcacactttgttaatcattttctgatgtcactgagt

SEQ ID NO: 311923 - DNA, 528 bp, Homo sapiens
tctatttctactttcagttctgtcagttttttaatcacatattttaagtgtctaggcacatctacatttataattattatatctccctaatacagttggatttttaagtcactacttctctccttgtctacagaaaaatttcttgtcttaaagtctatttttgtctaaaaatatctattgaacacttgatatgtcccaggaattttgctaggtgctcaggagcacaaataataatatatagtcccagccatcaaaagcaagataagtcattatatataagtcaatatatagataagtcaatatataagtatatatatattatatatatacacacacatatatatatacatayatatatatggctgatttcaaaataacatagtaaatgttaaagttgaagcagtcacaagatactttggagaacagagaatagtcatgtgattaagtctggactttcaggtaaggcttcttgagagggattatgcataaattaaagcattttagaatatgtaagaatgaaaggtattc

SEQ ID NO: 311924 - DNA, 541 bp, Homo sapiens
taagtgtttctggagaatggagaggtttaggttaacttctgtccatttgactaaccgtatggtagtggagcatgacaaaagtaaatggagcacaagagtccaatccttagtcagacaacrtgattctatttcttaccaaggtgaaagcagagaccagtgactggctaccatgctgcatgattgcattatctggtacatttgtgctgcagctctgaactaaggagctgggtcattctcctattatgttagacaaagtatgcaagtcactgaaggccttccaggtagcaacatctgggtgatacttcatagtacaaaaagggcctcaaggaactcagcctcaagtagttgcacagctgtttcaggttggaaaatatggtgttctccttgtgaggatgtccttgaaacatttgtagttgctgattgcaaatttcagtttttcaagagtattcatataatgctgcaaacattttgtgaacaacattttaagggttgcatacttctcggagggagtactttttgggaactggtcatatagctccct

SEQ ID NO: 311925 - DNA, 541 bp, Homo sapiens
taagtgtttctggagaatggagaggtttaggttaacttctgtccatttgactaaccgtatggtagtggagcatgacaaaagtaaatggagcacaagagtccaatccttagtcagacaacatgattctatttcttaccaaggtgaaagcagagaccagtgactggctaccatgctgcatgrttgcattatctggtacatttgtgctgcagctctgaactaaggagctgggtcattctcctattatgttagacaaagtatgcaagtcactgaaggccttccaggtagcaacatctgggtgatacttcatagtacaaaaagggcctcaaggaactcagcctcaagtagttgcacagctgtttcaggttggaaaatatggtgttctccttgtgaggatgtccttgaaacatttgtagttgctgattgcaaatttcagtttttcaagagtattcatataatgctgcaaacattttgtgaacaacattttaagggttgcatacttctcggagggagtactttttgggaactggtcatatagctccct

SEQ ID NO: 311926 - DNA, 551 bp, Homo sapiens
attaactccccaacgttcccttttagacagatgttccctaggaaacttgccaaaacacatgcatgttctgttagcagtgaagaagttaaatagaaagccacttcctcccttccctgaatgcatgcttgaaaatcagaaactgtaattaaatgcatatgtggcatttttcacamtatgttaggttggtggttctaattattatcatacgtaccatatttgatctggtagaacatgtgaaaatgtttatatacttttacattatggtttaacaacacttataaacatttaggtacaaaaggattataaattttgttaaaggcattgaattactgtcaaaaagagagaaactttagcaattatccctgtattttttgcaaaccttttgtcacagaacaaactgtttcagaaagtaaaactgtaggagaacacaaattgaggaaatgagacagaaatgtgtcaaataaacagaatatattttgtaggagcagtcttttagggctctgcaatgatcagagaatttagggaccaggcctgattctgagctcatctgt

SEQ ID NO: 311927 - DNA, 527 bp, Homo sapiens
tttacttcaagtagctattgtaagaatcacatgggataatgtaataaagagtgcttagtaaattttaaaacactttacatatacttaggctgggcacagtggctcacgcctgtaatcccagcactttgggaggccgaggtgggcagatcatgaggtcaggagatcgagaccatcctggctaacacggtgaaaccccatctctactaaaaatagaaaaaattagctgggcgtggtggcgggtgcctgtagtcccagttactcaggaggccgaggcaggagaatggcttgaacctgggaggtggagcttgcagtgaaccaagatcgcgccactgcrctccagcctgggcgacagagcgagactccatctcaaaaacaaacaaacaaacaaacaaaaaacactttacatatacttgttactctctagctgagatgaacaaattaagatactatttaattagatattcaatttaaatttacttttgatttttcttaactagtaaatgtgggtcttaagagtagtaaattta

SEQ ID NO: 311928 - DNA, 636 bp, Homo sapiens
cagatcactttagttacttttatccagaatatatctgtggtccatgaaatgataaaatagagttaactattattattatactgtaagctaaaaaaaatactgacaaaaggtgggttttacaatgaatgascagagtttctgaaatattttaaattctacatggatttaaatattttaaattccacattctacacggatgagatttaatgagtttgacctcagtaggacatcagagtccttccctcaggggaagaaaataagtatggtccattagtacacaataggaaataacatacatttaaatttattacctagactcattttacttctatttgtatacggtatatattttgctagataatattataaaatcaaatatgctagcatagaactacaaaaggctcatttttttacttaccctatctttatcatatctttccttcaaatttatctatgtgaatacataaatcacagtcaagtgtcatgaagcataatctgatttgattttaaaatctacactggaaatcattattctgagcacaataaaaatttcttccaaaaaatttctttttttttttttttttggatttatcaatctcttttgaaaatagcttttgggctctggactggagcgca

SEQ ID NO: 311929 - DNA, 573 bp, Homo sapiens
ctcataactggataaactcctggccgtggcagaagttacagtgtatggcctccaaggctagtcataaaagagtatataccttcagcacagctttgtagaagagcttgcttttggaccacagtctcttttccatgaggaagctgtatcagatggagtggactgtgtggagagaaaccaatactgtacactctatggccccagctgagtgtggtccaaccatcagtcagcaactaccagatatgaatggtgagtcttcagataattccagcccttggctgtcaagttatccatagttttcctctcaccacagctaataatgctgcataaaacaaattcaagctctccctgatgggtctcacctacattagagatttctgaacaaaattaatgattggggtgatatgtttcacagtaaataattaacggacaagacttatctccattttgtatatrgggcaactgaagttcatagtggatatatgatttaactagtaacacagcactattaaattatagagactgagctcaagttctattcactttctctatatagagttcttttgaagtttgttc

SEQ ID NO: 311930 - DNA, 549 bp, Homo sapiens
ggttgtttttttatccatcactatatacttagaaaatagaactgtaacaattcttgaactactctagcttagattaatatgaaacaagcagcaaaaaataaatgatgaattttaagaacamctatgaaaattcaattccctgatgcacattagatttacctagagaagtggggttttgttattgttgttgttgttggttggttggttttcatttggtttttaaatattccaatccctgggctccactcaaaccaatttagaatatctggaggttagtctcaaacactaatgtgtatttcaaagctttctaggtgacttaaatgcataggcaaatttaagaaccactggttgaattctaccagtctggaagtcaagttcagcattttagggaaaattgagacaagtcgttaactaaatgtttaagtatgaaatatgaaatagagatgagatagttaagttactagtcattgaaaattatccttcattatattgattaattcattcaataaacatttattgaatgccaactcataccaagtacagtaccaa

SEQ ID NO: 311931 - DNA, 606 bp, Homo sapiens
cctgttcactctgatgatagtttcttttgctgtgcagaagttctttagtttaattagatcccatcaagacaagggaattcttgagcactgttggtggaatgtaaattagtacagccatttatggaaaactgtatagaggatcctctaaaaactaaggatttgaaacctgtatgttgaagagatatctgcattctcaataatcaatatggaataagcctgtgtctatcaacagatgcatggtttaaaaaatatgatatgcatacacaataaaatattattcarctttaaaaaagagggaggaaattttgtcatttgtgacaacatggattaacctggaggccattacgctaagtgaaataagccaggcacaggaggacaaataccacacaatctcacttgtatgtgaaatccaaaacaattgaacacaaaagtagagagtagaatggtggttaccagaggccaggggttagggttccgaagatggggtcaaaggggacaaagtttcagtcagataagaatgagttttttcagatctattgcacagcatggtgactatagttaataataatgtattgtatatttaaaaattgctaagagagtaaattt

SEQ ID NO: 311932 - DNA, 608 bp, Homo sapiens
aacagtacctgctatggagttgtttgagaattacaaggatttctccttttttgtgttcctctgattattattatttgtataaagttttatttatgagctattacatttaaaaacacatggctttttaaaatgctatcgtcatatatgtcatttaaattttgagaagtggagacttttctacaggatcgagactcttggttttctttctctgcccaggattttaaatcttaaatataaatctcaggtccatctttaaaagctgttttaagaaaattcacagtcaagttgcagttccctcaggactggcatcccttctcactgccatacctctgctccgtgctgcctttctagcaaagccagcctctgggtaatcaccmctcaggccatgcaatttgacctgtgccgggctggaatgtattcctgagaagcagtaggtaatatgacctaatttggcttgagcctctcatgagctgagatgagattaccaactgagtacaattatagagggtgatttggtgcttctgacctacagtcagctggagactgaagttggatcatctcacctatgaaatttcccccagggcttccagataatgattttaaatgct

SEQ ID NO: 311933 - DNA, 527 bp, Homo sapiens
tgatggatattaagtaagagtaagaatgaaacccagtagatataaaggatttaaatatactcataaggttttggcactaaaagaaaaccacaagacccttccttttcaatagtcatatttatttcagttcagamacatggtttttcttattaccgctgcagatgccaccataaaaattgatgaaattctgtccaaatctacagtctttgtttaaattttaaaacaagtgtcttctccagtttggcagtaattctagacacagccagaggcagagttggctcctatacagaagatttttgtttttagagagatccagtcctgggctaaatggaatttgaaaggcagcaccaatctgtggatacttcttcctagatctgcatagctgaaagcacaccaaggatgatgcagggatagggactggggtttctagcctcaggttcacccaactctagattcttagatcatacattcagttttgtgatatacattttggcatggagtgttaaactcaacagtattcaataaaa

SEQ ID NO: 311934 - DNA, 573 bp, Homo sapiens
tctatgcaataatagacacttgctcatccctgataggacatgcttagaattcatgactacaggatttgtcaccacaaaatctgtagtttcaactgtcaggttgtagagacaaaaagttgatgtatactaattgttgtccttcactggtctgagtggtctgagttttcaatctccccctgtcctatctttgacagtaggtttccactgcatatatattgggcaggggtgtcataattcctctaaatatactttgtgccacaggaatggagctgcatttatttatagctacttctgcttctcttatatctgagatcttcatgccccacttagcaccrtaaggtgatctttcccagaacaatagtacctacactcataacctcacccacagccccagtgatgcacatttgcatataatgtacttgtcaattatctcctttttttctaacaggtgcagctgaagttcttatcttgggtggggttgagaagggacaggtacaaagcaagcattgaccccagggtcatttaagactttcttttttccatatatgtccactcatgtatagtacacaatct

SEQ ID NO: 311935 - DNA, 627 bp, Homo sapiens
catcaacgtcccttcaaaaggaatttgggtaaaattcatcagatcccaaaattccaaaagctagtgtgatatttaattaaaagaagcagtatttaattaaagatgaggttgttttatttcattgtcctgttaattataggaacatgtctttgtgtagtgtcatgtccacaaccacaagagaggaaagaacaaatctgtacaccagaaacagaatttgtataacatgggtgctcctgggtgttcccagatcagagcagatgccaaacatgtcaactgtctgactgaattcagccctaaattgtgctgttttgccaactcagatttcttttaaaatccttagtgtgaattatgttgggtgaatcatagcccaagtggataggtctaccattccacctctctgctttgactcctaataatcaatttacaggttgatgtgrtctacctgattcctgtaggcaggcaaatttttgacccttgtcttagagttttctgtagtaatctttcctttaatccccaaatagaactatttgagagtatttgtgacatcctgggggaagcaccttagtgttatccctagagtctctgagtatgctaggctatattgcatatgacaaattaactatgcca

SEQ ID NO: 311936 - DNA, 620 bp, Homo sapiens
tctgactgaattcagccctaaattgtgctgttttgccaactcagatttcttttaaaatccttagtgtgaattatgttgggtgaatcatagcccaagtggataggtctaccattccacctctctgctttgactcctaataatcaatttacaggttgatgtggtctacctgattcctgtaggcaggcaaatttttgacccttgtcttagagttttctgtagtaatctttcctttaatccccaaatagaactatttgagagtatttgtgacatcctgggggaagcaccttagtgttatccctagagtctctgagtatgctaggctatattgcatatgacaaattaactatgccaaagtacaatgtcagaagttatagtttytagaactctatcagccgttccttagagaagggagtttctgagcttatgtaattggctgggtgtctcttctgtcccattttctggcatttcttttctctgtcctctactgcatccattgactgcttccccactccatctcctgcctctaagctttagtaactttaatatacaaatttagtcaacttagttctttctagatttaactctttaattcttgataatgcaggaagagtaaggactgt

SEQ ID NO: 311937 - DNA, 567 bp, Homo sapiens
  misc_feature (1)...(567): n = A,T,C or G
tcatggtcagtgttgcatgggctgccacggtatgtagtttacactcctgcagttaacgtctaagaatagttatgccatgtaaaataatggtaaaagatgcctcatgatgctacatgctgcatgttatcgtctgatcaaggagtgaaattgcagcatctgaaaarcaaaacactagtggtccttcaagactattatgagacctcccaactgtacctggaggaaattttgctttgttgtcactgcatggatcaaccaatagaaataaggacatctccagatggggtgaaaatggaataaatggcagatttggtgggaaatgtgcagacgtcagctccaccagatttattaaatgttacaagggtcctgaagtctgattattttaacannatttaggttaaaagtaggtataaagtttctttgctgcaggttttctgtggccttcaatgtgccaatgggcattgtgaatctttgagcaaagaatgctgtatgaatcttttctcaaatttatttggccaaggaatccttgctttcatggtctagtctagtgaaatatgctttggggagcac

SEQ ID NO: 311938 - DNA, 611 bp, Homo sapiens
aagacagctcaagttgcttagggattttccacaaaatcttgtgctttcacccatagaatacttgtgggatattcatctatggatattggtccttcttgttgtccctctgttggtttctccatctcagttagctaggattgtgccatttccctcattattattcttcattttttattctctrtataatgttctagaagaattcctcagcttaacagttcaaatcactgattcactcttcagctagctccatgtgctatttttcagaccataaattgagggttctttttttcaacggctattagtaaatagattaaatagactcatgtgactggcaagttagtgtttgctgtcagctgaaagctcagcgtaggctaagaatcaggaatgttggctttttctccatgtgggtctcaacagtgaggtgcttggccttcatcatggggtggcttaggtccaaaagcaagcattccaagagacccaggtcaaaggcgtgtttgcttttatggctcagccttagaagtcctagagccaccacttctgccataaccataagcctaatcacatttaatgggtgggactataaattccatctctcagtaggaagaatgtca

SEQ ID NO: 311939 - DNA, 567 bp, Homo sapiens
tggttagcagcatatgagaggagaaggaagaggaggaggagggctgggagtattggagttctcatggaccccaatgagaagggtgagtgatgctattataggctgaaataaagaaggagaaagaatgaggactcagcagctaaggaaaaataacttctgctttggacataaggaattagaagcaatgtctgaatgcctatctggaaatgcccactaagcacagaaacagtacaggaacttggaaaagatatcagagcagaagacagttctaagtccatttagcaagcatctgttgagctattgggtaaaagactgtgaagtgtcctggatacaagattaacaagattgttattggccagaagctcatctgttctcagctggtaggttttcagtacatgactgggctttcccaggggtaaaaaagtgaaaagagaggagtcagagggctgaggttaggacctttggaggggaaaatttataggatggagagacactccaagtgctrtaaggcaatcaaggaaaagaagagctgagtaaagacctgcttttgcaatgaggaggacctgg

SEQ ID NO: 311940 - DNA, 586 bp, Homo sapiens
gttaggtgttatatttaggattgtgatattttcctgttagactagtccttttattattatataatgtccctctttgtctttttttactattgttgttttaagttctgtcttgtgtgatataagaatggctactcctggccgggtgcagtggctcacacctgtaatcccagcactttgggaggttgaagtgggtggatcatgaggtcaggagatcgagaccatcctggccaacatggtgaaaccccgtctctactaaaaatacaaaaattagccaggcgtggtggcatgtacctgtaatcccagctactcaggaggctgagacaggagaatcccttgaaccagggagtcagaggttgcagtgagctgagatcatgccactgcactccagcctggtggcaaagtgagacttcgtctcaaaaaaaaaaaaaaaaaaaaaaaaagaatggctactcctgctcacttttggtgtccatttgggtgaaatgtctttttccaaccttttatctkaagtttgtataagtccttgtatgttaggtgagtctctggaagacagcggatacttggtcagtgaatttttatccattct

SEQ ID NO: 311941 - DNA, 665 bp, Homo sapiens
tattggtcaaatgatacaaaatttcagttagaaggaataagtgcaagagacctactatacatcatggtgactatagttaataacaatgtagtatattcttgaaaatcacgaagagagtagattttgcatgttctcattacaaaaaagtgaagtaatgcatatgttacttagctcaatttagccattccacaatgtatacatatttcaaaacaacatgtttgtatataataaatatatacartttaaattcatcaattaaaaataaagtttaaagtatgagattatatttttcccagtctttagaagtgtatatgcccttggttaggaaatgatagtagatagtagctgggtttttaaaaaaacttttaatatacttggcaaaataaaatattattaactctcatgttagtcccatggtttacattttttgtgtgtgactttttcttgtggtttatttgcagttgtactgtcacacatgtaggaactccttctctggaccatatgggagcttaatcaggagttttatattaggttgtaaaacactgagaattggagagaaagagagatacaaattacttggaggatgttatagtaaagaaaggtccaatgaggattctcaatacaagtttgaaatataatttgtgttaaaacagtatgttttaggt

SEQ ID NO: 311942 - DNA, 665 bp, Homo sapiens
tattggtcaaatgatacaaaatttcagttagaaggaataagtgcaagagacctactatacatcatggtgactatagttaataacaatgtagtatattcttgaaaatcacgaagagagtagattttgcatgttctcattacaaaaaagtgaagtaatgcatatgttacttagctcaatttagccattccacaatgtatacatatttcaaaacaacatgtttgtatataataaatatatacaatttaaattcatcaattaaaaataaagtttaaagtatgagattatatttttcccagtctttagaagtgtatatgcccttggttaggaaatgatagtagatagtagctgggtttttaaaaaaacttttaatatacttggcaaaataaaatattattaactctcatgttagtcccatggtttacattttttgtgtgtgactttttcttgtggtttatttgcagttgtactgtcacacatgtaggaactccttctctggaccatatgggagcttaatcaggagttttatattaggttgtaaaacactgagaattggagagaaagagagatasaaattacttggaggatgttatagtaaagaaaggtccaatgaggattctcaatacaagtttgaaatataatttgtgttaaaacagtatgttttaggt

SEQ ID NO: 311943 - DNA, 493 bp, Homo sapiens
ctaccttggctacaaccactccatggagtgaacagttagtgtgaagacacttcagatcaattgtgattgtctacaaatgtcagtgacagagacttttataattttgtgaatatttattatttcttatgtaaattagaataaatattataaattattctgaaaagattaattctgtctttgtaaccaacttggataaaataggagttgtgggtgagttattaaaataattccaaatgccatctagcttttatagagaggtttttttctctttctactttccacagaagagatacttgaattttgtattcttcaaatacaagtcatgtttcatccttgccaagtcttgaggtatgggtagaaaagygacagcggtgcaggttgtggattaagtgctatttcaattaaaagtgtcatggaggtcccctgttacttacctgtgcattgtttgctcatgggggaatggattagtggatgggatggagttaaagattag

SEQ ID NO: 311944 - DNA, 579 bp, Homo sapiens
aaccaaacaagttttcttacttttcaggatgcattaagaaattcttcaacctacacagcgtgaaaacmcaatgactttgaaatcagacagacgagttcttatcccagccttgtcattttctggctgtttgaacttggggcatgtttcttaacctctgaggctagactctctaatctgtaaaatggggataataagatctacgactcaaagctgttgaaaggattaagcgagttaagtgcctggcacaacctaaacactcaggaaatagtacttttcttcccctttcctgtccttgaaaagagctgtgtgtttcttggttcttcaattcacttatggactctacaaaggacgaatggaggttgcttaaaggcaaaacaaaatccatcccaggctgatgatctgattcagtcaccttcctgaaacccaaataattgcctgagcttttggaaaagcagaagctgcaaagatgtcctcaagtggttcggcagctggcagctgtttttattattaattaaatggcacaaacaggtcgtaataaaaccagagccaatcagtcaccctccccccaattatataaac

SEQ ID NO: 311945 - DNA, 579 bp, Homo sapiens
aaccaaacaagttttcttacttttcaggatgcattaagaaattcttcaacctacacagcgtgaaaacccaatgactttgaaatcagacagacgagttcttatcccagccttgtcattttctggctgtttgaacttggggcatgtttcttaacctctgaggctagactctctaatctgtaaaatggggataataagatctacgactcaaagctgttgaaaggattaagcgagttaagtgcctggcacaacctaaacactcaggaaatagtacttttcttcccctttcctgtccttgaaaagagctgtgtgtttcttggttcttcaattcacttatggactctacaaaggacgaatggaggttgcttaaaggcaaaacaaaatccatcccaggctgatgatctgattcagtcaccttcctgaaacccaaataattgcctgagcttttggaaaagcagaagctgcaaakatgtcctcaagtggttcggcagctggcagctgtttttattattaattaaatggcacaaacaggtcgtaataaaaccagagccaatcagtcaccctccccccaattatataaac

SEQ ID NO: 311946 - DNA, 499 bp, Homo sapiens
tactttacaaaagagaaaattgaaactcagagagcttaagtaaatcctctaagtcacacagtgatatgctgcaaaactagtttggaacctagatctggctattcccaagtctagaagcttcatctttgtattatactagctccataggtaagcagcttggactgcagcttgatagttttcatcttatttagaaaatttttcagccactatttctttaattattttawgccttctcccatcttttttctttctgggactccagtaacacaatagcaggccatttaattttgtctcacaactcaatattctgttctttttttaaaatatatatatatctttgtatgttttattttggatactttctattgctttgtcttcaagttcactaatttttttctgcattgtctcttctgctgttaatcttatacagtgtagttttcatcccaaacattatatttttatccctagaatttaatttagatctcttaaaaaatctatc

SEQ ID NO: 311947 - DNA, 408 bp, Homo sapiens
ttttttcctgcttattttcttcaaactttttttttcagaattgggttcctaaaaatgagtattttgtgaatcaataattagttttggtgaacttggatataatccttccagaaatgactagttttctgttttatttgtttttgttttctgctgctgttgttgtctgttttttgtttgtttgttttcttttgttttggrtgatgaaagcttaaacatactcacacattttgttttatgtttttaggttgtctgtacttgtttgcccaactgtactgataaatatttgagaagcatttgtaacaactaagtaggtaaacataaaatactcaaacaaaacagcaagttgctatacaccagatggacaaatgataatgcagtgaagaagaaaaatgaaataaagaccattat

SEQ ID NO: 311948 - DNA, 658 bp, Homo sapiens
tcttagtaatctgattttggtgatccaaatatcaccattttttttcctgcttattttcttcaaactttttttttcagaattgggttcctaaaaatgagtattttgtgaatcaataattagttttggtgaacttggatataatccttccagaaatgactagttttctgttttatttgtttttgttttctgctgctgttgttgtctgttttttgtttgtttgttttcttttgttttgggtgatgaaagcttaaacatactcacacattttgttttatgtttttaggttgtctgtacttgtttgcccaactgtactgataaatatttgagaagcatttgtaacaactaagtaggtaaacataaaatactcaaacaaaacagcaagttgctatacaccagatggacaaatgataatgcagtgaagaagaaaaatgaaataaagaccattataaaaatgagggaaactgtttcaagtaacactcagactggcagctgttctctttccaccaagaagcccaggttgtctaacacatggctctgagatgaaggcatttcaggaacacaggtgtaagggctraattggaggagagtgatgctcccaggatttgcaggattttattcctaataataaatagaacaagaaaatttacagaatgagtga

SEQ ID NO: 311949 - DNA, 570 bp, Homo sapiens
aaaaacatgctctccatttagacatctttaaacaagtatttcagtagcatcgcctggtagaataggatcagacagacctagctacgtattttcacccaatgacacgcacatacataagtgaccttggccaagccattccaaggtggcttacttttctcataatcttgtgtctgctgtgaagattaataaacaaaggatcccagtgtgtaataagtactatgaaatacaaggattgcgattatcttctaaattataatccaagaattataaatagactgccctgatttatagtctaggctaatcattgctaaaattattctactgaatttagctcttgaatatagsttgataagggaatcaatccactctagcatcataagtacaaacctaaaggtatttttagcaaagaactgctgaaagatatatccagttaaaaccataataacagaccaaaataagcccttgtcagcagaccagacattctactttctgataaaagtaagtttttaggggaatttattgaaataattgtaatattagcaaagacattgcacttacttacacataata

SEQ ID NO: 311950 - DNA, 440 bp, Homo sapiens
agagaaaataaacagatatgtgaaaataggcactgttaatgtagcactttttggaactgccaactgccctaatatttcttgctatttaggctgagagcagaggcaggtaccacaaaaaataaaaaaggaagtgttctgatccttgactgggtcttgttgccagcgtttggtcttatcctctgcagtgaataatttgtgataaaactggcaagataatgtatgcttcaataacttggccaattgcattaggcaaacacagarccttaaacagtattgtttatgataaaagctgaccaagaattcttacattagaagaatggggttaggggagccctaatgcatgagaaacaccggaatacaataaaacttgaggcagaggcacacaatattgacactcttttggcttttattcatagaaacaaaatgtgtctttcctgatc

SEQ ID NO: 311951 - DNA, 508 bp, Homo sapiens
caccaatttaccaactatctatagtgaaaaaaacaccttcataataaccaaaaattaggtgagccctcatagtacctggttttaagttcatatcactgaaataggcacagaagagaaagatgaaacagtcctgaatccctgatgccacccctccctgacccccagcagcagcagcatggtgcagggagcatcwctaggtgctgggggagggagaacacagccattgtgaggcattgaactcagtgctgtcctgttagagcagaaaggaaaaccagaccaaactcagctgatgcctgctcatggagggagcctttaaaggagccctagccagagaggaatcacacatcccagctaacagaacttgagttcctgcaaccctcaccactgagggctgcagcactctgtgtctccaagtaaacttgaaaggtcatccaggccataaggattgcaactcgtaggtgagtcctaatgctgaactaggcccagagacagtgcctgaaggagggaa

SEQ ID NO: 311952 - DNA, 581 bp, Homo sapiens
ggcttttcccattccttcctctacccctttattttgctcagctctctaatttgactcagctccaggtaaagtcaaatcctgtcccrtgagctagaccttcaggttccccagtgagggtatgtattcaggggtggacaatctctcctttcctactttcatagcttgggcattcacaatatttggggtgtctcctaggtcctgcaggagcagtctgcttctttcagagggtctgtggattttctcagctttcctgatgtattcctgtagtagttttggagcaaaagttcatgatgtgagtctccacccactgctctgttcatctgagtgggaactgcaatctagtcctgcctcctatctgccattttcccctagaatttccatgtcttgtttctttacactgtagttcatggtgtcttgtttccttatgtgcctgcttatctgcatatgcagggaatagtattttaaaaagtattaatgggaattatttgaagcctaagattaaggcatcttattccaaagagtaagcagggtcacaatctggtttccaatctcctggatataaccagggaacctcaagccaa

SEQ ID NO: 311953 - DNA, 576 bp, Homo sapiens
gtaagacataaacaacataattagaaataaaacttggaaatgagctgatagaatctagaaattagtaacttttaaaaactaattatttctgaaatgaagattaaagaaggaaaatgaatgagtaaagactacagacaatgccttaagagaaatagagattaaaaggaaaacaattttaaaaaattaaaaagaaatgaagaagaaatatgaaaatgacaaagataggcaaagaagctcaaacatacacataatagtggtaattgaaaaagaaaactaaaacaacagaaccaattaaaaaaactataattcaggaaactttcctgattttaaaattcatacagagctgcaaaagatctataawagacaaaacaactgttgaaaaagaacaggctggccatggtggctcacaccatgtaatcccagcactctgggaggctgaggcaggaggacagcttgaggcccaggaattcaagaccagactgggcaacatagcaagaccccatctctacaaaaaaaagattagccaggcattgtggcatgaacctgtagtcctcgctacttaggtggctgaggtgg

SEQ ID NO: 311954 - DNA, 597 bp, Homo sapiens
tttaaaactcctcagctgattgtaactagcagccattgttgagaacctatagcatcacactacatgaatgcttgttataaatggagaatctcaaatcctatcccagtcctactgaatcagaatccgtattttaataagatcccaagatgctctgggctttgtatgcacagtataattggagaagcactgtctagactaattaaatatctaccagtggccacagagtctactaggrctgtatttctcaaaatgtgattccaggaccagtggcatcacctgggaatttgttaaaaatgcaaatatttgagctccaccctagaccttctgaatagaacactgtgggagtggagcccagtagtctgtggtttaacaagttctccaggtgattctcatacataatatagtttagaagcattgcgccaggagtctctcatgaggtttgaaactgctgaattgaggaaattgattcagcaagtccttttttaaaacacatactcctgaagtgaagtgtcattgatgtctgcaactttcaaatggtttagcaaaagaaaaaaattgtataaggctatgtggagagagagagaaagcaaatgctat

SEQ ID NO: 311955 - DNA, 597 bp, Homo sapiens
tttaaaactcctcagctgattgtaactagcagccattgttgagaacctatagcatcacactacatgaatgcttgttataaatggagaatctcaaatcctatcccagtcctactgaatcagaatccgtattttaataagatcccaagatgctctgggctttgtatgcacagtataattggagaagcactgtctagactaattaaatatctaccagtggccacagagtctactagggctgtatttctcaaaatgtgattccaggaccagtggcatcacctgggaatttgttaaaaatgcaaatatttgagctccaccctagaccttctgaatagaacactgtgggagtggagcccagtagtctgtggtttaacaagttctccaggtgattctcatacataatatagtttaraagcattgcgccaggagtctctcatgaggtttgaaactgctgaattgaggaaattgattcagcaagtccttttttaaaacacatactcctgaagtgaagtgtcattgatgtctgcaactttcaaatggtttagcaaaagaaaaaaattgtataaggctatgtggagagagagagaaagcaaatgctat

SEQ ID NO: 311956 - DNA, 597 bp, Homo sapiens
tttaaaactcctcagctgattgtaactagcagccattgttgagaacctatagcatcacactacatgaatgcttgttataaatggagaatctcaaatcctatcccagtcctactgaatcagaatccgtattttaataagatcccaagatgctctgggctttgtatgcacagtataattggagaagcactgtctagactaattaaatatctaccagtggccacagagtctactagggctgtatttctcaaaatgtgattccaggaccagtggcatcacctgggaatttgttaaaaatgcaaatatttgagctccaccctagaccttctgaatagaacactgtgggagtggagcccagtagtctgtggtttaacaagttctccaggtgattctcatacataatatagtttagaagcattgcgccaggagtctctcatgaggtttgaaactgctgaattgaggaaattgattcarcaagtccttttttaaaacacatactcctgaagtgaagtgtcattgatgtctgcaactttcaaatggtttagcaaaagaaaaaaattgtataaggctatgtggagagagagagaaagcaaatgctat

SEQ ID NO: 311957 - DNA, 568 bp, Homo sapiens
tcatcttcctcctttttaattttttcagtctgttttatcctattttcctttaagaaaattcttcaattttgtagattcttctggtgtttgcttagtatttggataaatggcgtttatctgtttgtataagattttgacacacattgcgtatcctttgaaatgcttgagaccagaagtgtttkggatttcagattttggtaggattttgaaatatttgcagaatacatccagttgagtattcctaaaccgaaaatcccaaagccagaatgttccaatgaacatgttgtttgagcatcctgttagtgttcaaaaactctcagatttaggagcacttggatttcagattttcggattagggatgctcagcctgcttgtgtgcattaactgtcacaagtcagaggtccttaaaccttttaagtctgcgctcttaatttttgtttgtgaatttattttagagtgcatacatggaaattcttctaacctcatttttaatgacctcactgtccttagttgtacatatttaggtcttctttataaacataaacatagttttacattttaaataata

SEQ ID NO: 311958 - DNA, 568 bp, Homo sapiens
tcatcttcctcctttttaattttttcagtctgttttatcctattttcctttaagaaaattcttcaattttgtagattcttctggtgtttgcttagtatttggataaatggcgtttatctgtttgtataagattttgacacacattgcgtatcctttgaaatgcttgagaccagaagtgtttgggatttcagattttggtaggattttgaaatatttgcagaatacatccagttgagtattcctaaaccgaaaatcccaaagccagaatgttccaatgaacatgttgtttgagcatcctgttagtgttcaaaaactctcagatttwggagcacttggatttcagattttcggattagggatgctcagcctgcttgtgtgcattaactgtcacaagtcagaggtccttaaaccttttaagtctgcgctcttaatttttgtttgtgaatttattttagagtgcatacatggaaattcttctaacctcatttttaatgacctcactgtccttagttgtacatatttaggtcttctttataaacataaacatagttttacattttaaataata

SEQ ID NO: 311959 - DNA, 609 bp, Homo sapiens
gtgcattaactgtcacaagtcagaggtccttaaaccttttaagtctgcgctcttaatttttgtttgtgaatttattttagagtgcatacatggaaattcttctaacctcatttttaatgacctcactgtccttagttgtacatatttaggtcttctttataaacataaacatagttttacattttaaataatacttttcactagtgtatatgcaaattcaatacttgtttatcagttaaatgatagaatttcagttctcaactacatattacattacataagaaagttatccaactggaagtctactcagtatatttggaaaaaactagctttaacttttgtatctactaagttatggaaagtacttcagatgaaactgaagtgtttaaaaattgtattttttccagtagttttgggttttcagactacttgctacttaatactgacttttttttaaagtcaagctttcttctttaaggacatttttttaacttgctttacttgaatgaaaagccattagaaagccttgtaggactgacagctttcttgatgtgtgagtatattcatggaaaagaattatttttcaawataggtttttgaatatttata

SEQ ID NO: 311960 - DNA, 483 bp, Homo sapiens
ggttctcctcgcagtgtctactggatcccgccaggaggcagcagaggcgccagcacccagtccgacgggacagcggaccggagggggtttccgcttccgggagaggctgaccgtttccgcttccgtccacttggcgagtgagacgctgatgggaggatggacrtactggtgtctgagtgctccgcgcggctgctgcagcaggtttggacgcaggagaccggcgggaaggcctgaaagagatggagcaggctctgactcctgcccaagcggcttcgggggcgggacagctaggcgaggaccatcctggtcctctcagagtggagcggcacggtccctgtgggaacaggaagggttgagagaggaagcacccatcatttcaaagcccgtgtgactgtgattttcagcggaatggagggtccccaccctctcccaggcctcccccaaaccagcgtcttcggtgggctggagcctggcatgttcaga

SEQ ID NO: 311961 - DNA, 483 bp, Homo sapiens
ggttctcctcgcagtgtctactggatcccgccaggaggcagcagaggcgccagcacccagtccgacgggacagcggaccggagggggtttccgcttccgggagaggctgaccgtttccgcttccgtccacttggcgagtgagacgctgatgggaggatggacgtactggtgtctgagtgctccgcgcggctgctgcagcaggtttggacgcaggagaccggcgggaaggcctgaaagagatggagcaggctctgaytcctgcccaagcggcttcgggggcgggacagctaggcgaggaccatcctggtcctctcagagtggagcggcacggtccctgtgggaacaggaagggttgagagaggaagcacccatcatttcaaagcccgtgtgactgtgattttcagcggaatggagggtccccaccctctcccaggcctcccccaaaccagcgtcttcggtgggctggagcctggcatgttcaga

SEQ ID NO: 311962 - DNA, 445 bp, Homo sapiens
ttgaaatcaggttttttagtgaatttaagaatataatttcttcatatgatagagagggctgatgaggggagcataaaacttggactgtccattccaatagacctgagtttgaatctggccttttccacttattctgtcttgtctttgacaagtkacttatctgtagcccacatagaaatagtgataatagtaacaagctcgattttattatgtagatggaataagataatgcatataaataaagcatttggttcaaatctttgcatactcaagtattaacttttgttattgtcattattttatactgttgacattttgatgaatataaatttgtgatgaacataaaattgtgatgaacatgttgatgaacataaaattgacaaacataaaggtgtataggcagcatgtttatcttctattaaaagcatatgtgtcattcaccttt

SEQ ID NO: 311963 - DNA, 553 bp, Homo sapiens
accatggagttaggcacaaggagaaaatcttttctgtttcatggtgggktgtgtgtgtgtgtgtgtgtgtgtgtgtgtgtgtgtgtgtgcgagttctctcaaattctaggagcataatccctgggctttttcaaatctgtctgctcaattatttctataaggggaaaactccagcaggattataggctgcagaaaaagtcaaaattagagacggaggcaaaatgagtggtagggtttaaggtaactggactaaggatctgacaacccaagttatactcctcactgtatcatttattagctcagacaccatgggaaaaaatcacttttacttatgcaagccttaggttcacctaagaagataatacaggtaattatagctgcctcttccaccagcactccttctcttggccccatacacttcacagttgtaaggatgggcatgaaagttttttgcaaactataaagcacaatttttccagaattggacacatcttgctcaagtgcatgcatgtgaatatgtgtaagtgaataccaggctgacatattgttgatg

SEQ ID NO: 311964 - DNA, 553 bp, Homo sapiens
accatggagttaggcacaaggagaaaatcttttctgtttcatggtggggtktgtgtgtgtgtgtgtgtgtgtgtgtgtgtgtgtgtgtgcgagttctctcaaattctaggagcataatccctgggctttttcaaatctgtctgctcaattatttctataaggggaaaactccagcaggattataggctgcagaaaaagtcaaaattagagacggaggcaaaatgagtggtagggtttaaggtaactggactaaggatctgacaacccaagttatactcctcactgtatcatttattagctcagacaccatgggaaaaaatcacttttacttatgcaagccttaggttcacctaagaagataatacaggtaattatagctgcctcttccaccagcactccttctcttggccccatacacttcacagttgtaaggatgggcatgaaagttttttgcaaactataaagcacaatttttccagaattggacacatcttgctcaagtgcatgcatgtgaatatgtgtaagtgaataccaggctgacatattgttgatg

SEQ ID NO: 311965 - DNA, 486 bp, Homo sapiens
ggggcctgttggcacacccaacaccctctattttgttgatctaaactcttgatggtctttttgcaaagtgcatttctgtattgtcttaaattacttgaaccagtaaaattttcactactcttcctttgctctcatggtaaaccaagctcttgatcctctccatcaacatcagtgaaataagaaagcaaaggactagaagggattggtttctctgtgtagttctgccaggctttgatttgtaactggaaaatcactggctctgggctaacctgagtttctgcatcttttttttttttttgacggagtcttgctctgttgcccaggctggagtgcagtggtgtgatctcggctcactgcaacctccgcctcccaggttcaagcaattctcycacctctgcctcccgagtagctgggattacaggcatgcgccaccatacctggctaatttttgtatttttagtagagacggggtttggtgagtttctg

SEQ ID NO: 311966 - DNA, 573 bp, Homo sapiens
ttaaaaacacagctttgagacagctttttagctatgttggcttttttcatgcaactattacatagttmtatttgtggatttattaattttcttgcttttacaatgtgtagtgttctgatttggcttataatttactgtatttgctatatcaagtgtctctccaagtgtggtctgtggaccatctgcatcagaaccacctaatgtgattctttaagaaaaatgaaagttctcagactcacccatggcctactagatctgattttctggaggtggtgccagggagtccatgtttttaacacgcacctgctgcaatttgtaagcatgttaaagcataaagacgacttgctgtatttagactgatttgcatgacatttgccatagcacacactagacatgcattagagtttagtgaacaatatctgatcattgcctttgtaaaacatacaaaatactgactgttgcatttgcagatagaccttactttccttttttacacagcttatttttacacttttatttaatgggtaagagaaaaactctacttgaggatagctgctgagtttgtggttttgt

SEQ ID NO: 311967 - DNA, 573 bp, Homo sapiens
ttaaaaacacagctttgagacagctttttagctatgttggcttttttcatgcaactattacatagttctatttgtggatttattaattttcttgcttttacaatgtgtagtgttctgatttggcttataatttactgtatttgctatatcaagtgtctctccaagtgtggtctgtggaccatctgcatcagaaccacctaatgtgattctttaagaaaaatgaaagttctcagactcacccatggcctactagatctgattttctggaggtggtgccaggsagtccatgtttttaacacgcacctgctgcaatttgtaagcatgttaaagcataaagacgacttgctgtatttagactgatttgcatgacatttgccatagcacacactagacatgcattagagtttagtgaacaatatctgatcattgcctttgtaaaacatacaaaatactgactgttgcatttgcagatagaccttactttccttttttacacagcttatttttacacttttatttaatgggtaagagaaaaactctacttgaggatagctgctgagtttgtggttttgt

SEQ ID NO: 311968 - DNA, 580 bp, Homo sapiens
gagagacttgatccttctatatgtactacacaagcgtcttggggatggggagataggaagatatatgatactcaaggagcgggttgactagccatctcctaaggcactgaacaagactaacattttctgagttgggcaaactaaggctacctcagagctcccytagaacctaggattatctgtatttgtttggttcttctaagcacaccctgagacgagaattgggtgcaatccatttatttgggagatgatcttaaaaagcaccatgaaggagtggagaagtgggacaaggatgggaggaaggtcaacaaaagaagcaatactgcaggggcgtggctgtgacaacggaactctctagtgctgggcctttgagagacggcagagcacaccttgggcttgctcagcatgggggcagggacatgtttatgcagacgctgctgaaaactgctgcagaagacccctgggtgagtgaaggggatatgtgcaaggcaccaacagcatctactatgacttccctgtaaagtcttgtatggataaagacacatttggaagtcactggtctggatgatgtttaaggtct

SEQ ID NO: 311969 - DNA, 580 bp, Homo sapiens
gagagacttgatccttctatatgtactacacaagcgtcttggggatggggagataggaagatatatgatactcaaggagcgggttgactagccatctcctaaggcactgaacaagactaacattttctgagttgggcaaactaaggctacctcagagctcccctagaacctaggattatctgtatttgtttggttcttctaagcacaccctgagacgagaattgggtgcaatccatttatttgggagatgatcttaaaaagcaccatgaaggagtggagaagtgggacaaggatgggaggaaggtcaacaaaagaagcaatactgcaggggcgtggctgtgacaacggaactctctagtgctgggcctttgagagacggcagagcacaccttgggcttgctcagcatgggggcagggacatgtttatgcagacgctgctgaaaactsctgcagaagacccctgggtgagtgaaggggatatgtgcaaggcaccaacagcatctactatgacttccctgtaaagtcttgtatggataaagacacatttggaagtcactggtctggatgatgtttaaggtct

SEQ ID NO: 311970 - DNA, 573 bp, Homo sapiens
aatagaggacattgtgtcctcctgcatactggttctcccaacccagatgcccctcactgccatccagtgagtattcgggtcactcacgctgtaatttcttccaatagtttgttgcatattccattgttggatccatccccttctggatcccctcagtctgtagaatgaccttgccttcccccaactttactgaaaaaaatcaaggccattcaacatgacctaacaaagcttcccttttcttcactctacaatgtctctttatcttttgtcctttccaaaaaagaaatattccttttcttttcaatgtctagtccttttgtccttgtgaacccttcctgggacattgcttcatcagttatcaacattctcttcttcatttccattttctcttctctttatgactcctcccttagctagaaaaatgcccacaaaacttttaaaaaaactttaaactcaaactttaaaaaaamtttaaacttaaactttaaaaaaaagaatctgttggccaattcctctcaagttaaatccattttcaccctcccttttacttccaaatttgctgaatgatcgaat

SEQ ID NO: 311971 - DNA, 631 bp, Homo sapiens
tgtgacctgtgcaaatcccctgggaccgtcaccctgcctgccctctgtactttgactgtggagatgaaaattgctatgctccagtaaagtattttcttttaatcttcttcacaatcactcaaatatcaattatcatcagcaaatggcaccatatttgagcatttaccaaaaggctgggtcaatgcagcctacagctgcaccttacaacatctgctgtctacagagacctagctttgtattttggccaaatagcctcattttctctccaacaagtcctgccccactagcccaatttcaaaccaaacaacagaatctatgtttggaattcatagagagattacatgcgagagcagtaatctcctygtccactgaagctgaagtttcatgattcagcttcaagtgtcccccatggccacatcttgggcactgtcatgcatctgacattagttttttctaagacctgaccatcaattgcccactttgagaattcccttttttcagctttttcatctctttgagaccttatacctttcgttctgttgactgcagtcaccagtcttgtgctcttgcctccacaagccctcagggaatcacccggtttccctcctgcccctctatagctctttctcta

SEQ ID NO: 311972 - DNA, 475 bp, Homo sapiens
tttcctatgtgtagaattctaggatgaggattgttttctttcaacactgtcactccactgtcttctggattgcatcatctgtgatgaagtattactatgcagtagtccctccttaaccacaggggatatattgcatactcccagtggaatgcctgaaaccatggatagtagtgaaccctrtatgtagggtttatgtttatgtttttttctgtagatacatacctgtgataaagtttaatttctacagtaggcacagtaagagattaacaacatgaactaataataaaataggacaattataggaatatactgtaataaaagttatgtgaatgtggtctctccctctctcaaaatattttatcatactgtaatattttcagactatagttgaccatgtgtaactggaaccacagaaagagaaacaatgaataaggagctactgtaattgttatttttgttcctctatgtataatat

SEQ ID NO: 311973 - DNA, 582 bp, Homo sapiens
ctcctatttaacatagtactgaaagtcctaattaatgcaataacaaaagaaaaggaaatttaaaatgtgtagactgggaagcagtaaaactgtctctgcttgcagatgacctatttgtccatgtagaaaatgaactcacgtacacacacccacacactcctccaggccaggtgcagtggttcatgtctggcaatctcacccctctgggaggcagaggcaggagaatcacttcagcccaggagttcaagacccacctgggcaacatagtaggacatcatgtatacaaaaaaaaattttttaattagctggacacggtagcacatgcctgcagtcctagctactgcagaggctgaggcaggaatccttgaacctaggagttcaaggttgcagtgagctatgattgcgccactgcactccagcctaggtgacagggcaataccctgtctctaaaaaaawaaataaataaaaaataaaatacattaatttcaaaaaaaattccaaatgttatttctattagcacaccaaaaattaggtataaatctaacaatatatgtacaagatctttaacaagaaagctataaa

SEQ ID NO: 311974 - DNA, 507 bp, Homo sapiens
agtgcctggttgtatgcagtggccagaccccacgctcactaacacacccctcaccgctccatgactggctctcccttggcaggcatgggacccagactggtagcaggagctgagcacagcctgccaggctgagtgggtagaatgagcccagcaggccagaggaaaactcaggcaaaggcaccactggccacacaagtttctggctggtgaggcgacaccccaaggatcccgtaacaccactgtactccagccagagggagaccctgtcaaaaaaaaaaaaamaaaaaaaacaaaaaaagccctaatatctgaatttataaagtaatgctccaaactgatatttttatttctttttagttcaaagataaatattgtagaaactgatatttaaaatgattttcagattctttcctttgtagataagtagtaaatttcagtaaatttgactgtgttctacccctgggaaaatacatacctctcattaaaatgtacatacacactctgtac

SEQ ID NO: 311975 - DNA, 507 bp, Homo sapiens
agtgcctggttgtatgcagtggccagaccccacgctcactaacacacccctcaccgctccatgactggctctcccttggcaggcatgggacccagactggtagcaggagctgagcacagcctgccaggctgagtgggtagaatgagcccagcaggccagaggaaaactcaggcaaaggcaccactggccacacaagtttctggctggtgaggcgacaccccaaggatcccgtaacaccactgtactccagccagagggagaccctgtcaaaaaaaaaaaaaaaamaaaaacaaaaaaagccctaatatctgaatttataaagtaatgctccaaactgatatttttatttctttttagttcaaagataaatattgtagaaactgatatttaaaatgattttcagattctttcctttgtagataagtagtaaatttcagtaaatttgactgtgttctacccctgggaaaatacatacctctcattaaaatgtacatacacactctgtac

SEQ ID NO: 311976 - DNA, 586 bp, Homo sapiens
ctaggaaaacatgacatcactaaatgaactattaataaataagccaccaggaaccaatcctatagaaacagagatatgtggccaggtgcagtggcacactcctgtaataccagaactttgggaggccgaggcaagcagatcaattgaggtcaggagttccagaccagcctggccaacatggcgaaaccccatctctactaaaaatacaaaaattagccaggcgtggtggtgggtgcctgtaatcccaggtactcaggaggcggaggcaggagaatcccttgaacctgggaggtggaagttgcagtgagtcgagatggcaccactacaagaccctgtctcaaaaaaaaaaaaaaaaaaaggagagagagatatgtgacctttcagacagagaattcaaagtagcttttttggggggaaactaaaagaatttcmagataacacagaggaggaattcagatttctatcagacaacttaataaagagattgaaataaaagaaccaagcagaaattccagagctaaaaaacacaattggcatattgaagaatgaatgcatcagaggcttttaatgacagaactgatcaagc

SEQ ID NO: 311977 - DNA, 570 bp, Homo sapiens
gctttatctgaattaatctggagggtgtttccttctactttctctgttggcttctccartgatactggttgagaagagggtgtaatgaggataataatctgtaatgggaggcatcttcagttctgagtatagacatttagagatgtcagacacaagggctcccagacttgaagactttaaagaccagagaattaaaaaaaaaaaaaaattagaacaccataataaagctgccaagttttaatttttccaataagaatattaaaataaaaacttcttcctactaatattatcatttcataaaataaaagacattaacataaaacaaataattttgaaaggccaattcttcaaggtaaatatctttagctacaggaaaactcactacatgtctttgtgtttctgatttcactacagtccacctttctgcattctgccctaacccactgtttttgtttgtcatttctttcctaggccttagcacagtccctcacatgtcataggtcactatgggaaccacttatcaagacaatacaaaaaattcctaaggtggtaattccgtagtgtttgcct

SEQ ID NO: 311978 - DNA, 587 bp, Homo sapiens
cagcaataaaaagggatgagttcatgtcctttgtagggacagggatgaagctggaaaccaccattctcagcaaactaacacaggaacagaaaactaaacaccatgtgttctcactcrtaagtgggagttgaacaatgagaacacatggacacagggagaggaacatcacacaccaggggctgctggggggtggagagctaggggagggacagcattaggagaaatacctaatgtagatgacgggttgatgggtgcagcaaaccaccatggcacatgtatacctatgtaacaaacatgcacattctgcacatgtatcccagaacttaaagtataataaaaaaagaataaaatagtcagaaactctatatgcacattgtaaatataaatgttagctagttagctagtacctttcataatattgcaaaataatatatatttgcaatattcattacattaattcataaaattcataaaattcttaaaattaattaaggtttgaggaatttgtatttaagaatctaccttctgaatatgtgcttaggttaaaggagaggcagtctgcattaataattcaaaatgctctattt

SEQ ID NO: 311979 - DNA, 596 bp, Homo sapiens
gtctacatccacatgcccataaggctatttcatactgtcttagctctgaatatagcatttcttttatcaaaaacttttttgacaaggctttctggagagctgagctcaaaaaacccaagatgtgtatttgattttgtgacctagatgttaaaatctacactgctttactatatttgatctgagaatagcattctttgctctttgaattaattaagttgtttggaggcagaagaaactacctttagatcaacttgattcaatatagttgttcaycaggctctggcaactcctaaaatacattttttgattacctaaattactatgcagaaaactttcttaagtaaataggcctctgcctaatggaatgttgtactccaatttcatagtcagtcactctgcttcattcctgtgtatctaaaattataaaatgatagacaaatatttgcagagtaaaaaatatacttgaaacttctgtattatggtttgatgactgtggatcttcttgcagctattaggtttagtgttatttgagtattttttatcatttggatattattattggtgtgcagagaatttagaagctccttccctcaact

SEQ ID NO: 311980 - DNA, 577 bp, Homo sapiens
agaagcaattttcaaaggatagtgctttttaaggagatccaaatctagtctgcttcctcaagttgctgctaggctgatggttttcacagttgccatggttataatgctgctgattttcatgactcttgtagaattgggaagtaaggaatggaaataggggaagctaaaacaccacagaagcttgctgtccttaccaaaatttaggcatttaccttgagtaaacactccttaaattcttacaagcctttagttcatttccagggttctgacaaagttgattttgacaattttgtcaatgttttaattacttttatggagaagtgaatttttggatctccttactctatcattctaaaagcctgcctcctaaacagtcccttaatagtgtctgttcttccctacttggagcaggtatgttattttttaataacatctctgagctctaatttcctcatctgtaaaatgaaaattgtcatatatgcctcatggagttgttataaatattaaatgagaaattactgagcactgtgccyggactatagtaggctgtttggaaaggttgtttcttcacttcctc

SEQ ID NO: 311981 - DNA, 575 bp, Homo sapiens
aaatattaaatgagaaattactgagcactgtgcccggactatagtaggctgtttggaaaggttgtttcttcacttcctcttttatacttctgatgtattttataccatttaaatattttcaaaatctaacttagaaatcagccatgattattcatatttgttaaagtctactactctacttagctttcagtttcttccatratagaccccctgtcttccctacagattttcagtcatgcttagctttagccaagctgtttcattcacttttccttgaattgcaagtgatacggagttttgtttctaagcatttattatttcctgaatttgtcttccctttatttctgctctctcattggtactatgcaaactattttttatcctctagcccaaaccaggggataatcaatgaatcaaggcatttcttacttcggtgaaatacagaaacatttggctcctgctagcagagttatttctgggtttctccacctattaactaaacaaccttcaaacttctctgtcctcagtctacacacctttcaggacttcagctgtcatctccttgttaaactgta

SEQ ID NO: 311982 - DNA, 575 bp, Homo sapiens
aaatattaaatgagaaattactgagcactgtgcccggactatagtaggctgtttggaaaggttgtttcttcacttcctcttttatacttctgatgtattttataccatttaaatattttcaaaatctaacttagaaatcagccatgattattcatatttgttaaagtctactactctacttagctttcagtttcttccataatagaccccctgtcttccctacagattttcagtcatgcttagctttagccaagctgtttcattcacttttccttgaattgcaagtgatacggagttttgtttctaagcatttattatttcctgaatttgycttccctttatttctgctctctcattggtactatgcaaactattttttatcctctagcccaaaccaggggataatcaatgaatcaaggcatttcttacttcggtgaaatacagaaacatttggctcctgctagcagagttatttctgggtttctccacctattaactaaacaaccttcaaacttctctgtcctcagtctacacacctttcaggacttcagctgtcatctccttgttaaactgta

SEQ ID NO: 311983 - DNA, 476 bp, Homo sapiens
tatttcctcagtcccagcttcagatgagggacatcctgcattaagaaagctgagacttatgcaataagaggaacagttctytccttgcccttggatgctgaataattaaaaaaggaattatagaacttaacagtttaagcagatgatgataattttagataaactccattggggtacacagaggcatgataagtttgctaagagacataaaactctaagttacatcttcaaggtcaaaagcgtagcctcagtaaactgcattcactgtgaaaagtatgacttgtgaaggtcaaatgatagtgtaaatctgtctagaagtattttccatgtacgtattatgactaccaaaatagaattctgaatttgtctatgtctagctattttagacacatctcttttagttttgtttgcttccaacagctttatttttttctctgttgaactgagaaaagaaattgtaatcatacattttactc

SEQ ID NO: 311984 - DNA, 435 bp, Homo sapiens
gaatttttagtagctctttctcactgtacatagcagagggtgatagaagagttckttttctgtccaccgtttccctgaatgcatcattttctagagttattgtctcttctctcttcagtctgtattaatgtcttccatttaaataagctttcctcaaatactcattctcccaagtgaaaaaaaaaaaaaaaaaaaaaaaaaaaaagaatcaaaagctgcatttggcaaatactagcacaggaaattttccaaaatcgtgaatgcccacaaaagaggtcaacatccatttgcttttcatgtgcatttaattattggaaagaatttgatttggcaattacgctagtgttttgaagcaacttcattttacgactgagaatgaggacttcttaaagtggggactgtgccagtcagctcatgccagatctattgtgggta

SEQ ID NO: 311985 - DNA, 435 bp, Homo sapiens
gaatttttagtagctctttctcactgtacatagcagagggtgatagaagagttcgttttctgtccaccgtttccctgaatgcatcattttctagagttattgtctcttctctcttcagtctgtattaatgtcttccatttaaataagctttcctcaaatactcattctccmaagtgaaaaaaaaaaaaaaaaaaaaaaaaaaaaagaatcaaaagctgcatttggcaaatactagcacaggaaattttccaaaatcgtgaatgcccacaaaagaggtcaacatccatttgcttttcatgtgcatttaattattggaaagaatttgatttggcaattacgctagtgttttgaagcaacttcattttacgactgagaatgaggacttcttaaagtggggactgtgccagtcagctcatgccagatctattgtgggta

SEQ ID NO: 311986 - DNA, 459 bp, Homo sapiens
tagatccaacgttaatgaaatgtttaactgacagctgttgaaattttgaacttttaaagagatttaaaattttaatgaaatggaatcttaaaatattgttttgctggctcaattaaaaacaatttcaaatgcatttagttgaaactgacgtaatgatcratttcctacccatataaaccctagtgctagaaatcttattttaaaaactcttgtttcaaattataaaacctgtaactaggaggtttgtattcatttagttgtgtgcatatgagcacaagagtctaaactcatttttatataacctacatttaaaagcagtcctaaaaattctaaattctaaatttcctccaccacgcctgaccaattctgaatttcctaaaaattcttaattttgtttgtacattataatatgaagaggagagttattctatatatttcaaatgatgtatagcgtgggca

SEQ ID NO: 311987 - DNA, 449 bp, Homo sapiens
tttatcccaaaatccgtagttcctgactccgggcactgtgttctgccccccacagggctctctgggctttgtgatgggatattgcacagagccatcactgagccagccggcattgcaccagtccagcccgccccgccaggcgtcgtacagctggtcgaaggaggcgatcacagcatcctggtccagacacgcctgctgcgcctcgtgaaaattgagattgtagcgccccagtcgtggaaagtaagggaataccacacctgtccaaaggagaaagcaaggagtygttagaagccccaaaactaacaactctgagcaaatgccacctagttggtgaaaaacctaacagaccctccatcagatgagacagtagtttttcgtcaactagcaactgtttctcatgatccctttccccttcaagcagcctctcagttctgagcatctcatgatca

SEQ ID NO: 311988 - DNA, 449 bp, Homo sapiens
tttatcccaaaatccgtagttcctgactccgggcactgtgttctgccccccacagggctctctgggctttgtgatgggatattgcacagagccatcactgagccagccggcattgcaccagtccagcccgccccgccaggcgtcgtacagctggtcgaaggaggcgatcacagcatcctggtccagacacgcctgctgcgcctcgtgaaaattgagattgtagcgccccagtcgtggaaagtaagggaataccacacctgtccaaaggagaaagcaaggagttgttagaagccccaaaactaacaactctgagcaaatgcyacctagttggtgaaaaacctaacagaccctccatcagatgagacagtagtttttcgtcaactagcaactgtttctcatgatccctttccccttcaagcagcctctcagttctgagcatctcatgatca

SEQ ID NO: 311989 - DNA, 565 bp, Homo sapiens
catatttgcaacttctgcttcttagattataaattagctctcttcctcattgttcttgttctgtaaacaaccagaggccagacctattcgccttccagtcactgatcttttttatagattaattgcctcctttattgtcctgtacctaactcagaccagatgacaaaaaagaccccatgactgttacatctgtaatgttgaattttaaatatgccttctcgaaagaaaaagaccacctcgactaatcagatcattgtaactatacatcaagccttatacagaaagatgttgaaattctgttcaccwtccccaagctttatctaaaataaccccaaacttctacacttcagagcactgacttccattcatcagaatctgtgttttgcaggcagccatcctcaaactttgtgcttgaataaactctctttaaactagattctgactctttcggttatttaggctgacatctgtttcataagtgctatttgctctgcttctcttctcttcttttgctgttctctgagaactatgggattggtgtcaatgtatccatcagtacttttag

SEQ ID NO: 311990 - DNA, 583 bp, Homo sapiens
ttgggttaccttatgatgtttcagcattgcattcattcaaaagagataccagtttaatatttttcctaaagtagtaaaaactaatttaaatctttaccgaagttgcttggaaaaatgctacargggagaaactcgctatagggcacactctacatgttttaagcatcctctttaccttcattctattttcattgtattcattacagaaaggaatccgctcaaatgtctcttttctcatccatcccttcttcatctctatttttcttggcttttctccctcactccctctctctccttaatttcacctttattattaattgcccttctttgagttctaggctattctaatgtacactaatttagcttttccctaatcctttcatttcagccactctttccattaccttgatatctacaacagtaatccaggccatggctccatgattaccaaagagtatttccttcttcaccagctgacatggttgggggaagctgtgaatacctaaatgctattatttttattgctcttgaaactcattttataaatctttttgagtgcctactctgcccagcatcatggcat

SEQ ID NO: 311991 - DNA, 444 bp, Homo sapiens
cccgttcatcctcatcctcattcacccacgtcttaccagccaacttttcttgacgcgtccccccctccactctacccggccaacgccacgcccagcgcactggacccggccggggaaccgaagccacctgcwgccacctgcctggcagcggccaagcccctagccctctccctgccccgcgggggcgccggggactgcagacccgccagcctggcaacgcccagggagggcggccacagctccgggacccggtaccccatcgcccagccccgcgacgccgacaggagcgccactcacctcatgggtgcggcgggcggcggctgctcgccggggccgcggggaggcggcgggcttctggccgggctgggacatggcgaggccgctgcggccgctgcctcccggaatgcgccgcggagagtggcggggaggcctggcggggagtcc

SEQ ID NO: 311992 - DNA, 498 bp, Homo sapiens
taatggctacctgggctcctgtagctttctagttcctggtgccaggccctcatgacgctggaacacaattttaggctggggttcagggagatactgcagtgtcctgctaataaattctttcttttaacctaaactggtttgaggtttagcttacttggtttgtgttgcttggaactaaaagtcttaagacacttctaaaatcacaattttagatcaattatctcaacatcctcagcacctgtatcgtgcgtgttgttagggttagaaaagaaccgtgtcagcaacrtttttaagtcactcgttctgagaaattacccaaagagaatagaaagggaggctatgaaattacaagtgacaggaagggaaaagaagaagaaaagatagaagagtcttgataggaatatgctgtgggagaacttaagggagaaaaataataatagagcataaaaaaagcaattgttataaaaattctgcctttctcatcagttttattagaaa

SEQ ID NO: 311993 - DNA, 562 bp, Homo sapiens
atgaatcctcatactgaagaaacrtaccaaattccaagctgcataaactcagataaaaacctcatctagacacgtcgaggtaaaactatggaatataaagcacaaaaagaaaaatctcaaaaggtaaaaagacagattgcctttgaaaaattaagataggaaaaaaactttttcacaaggagaaatttgtaatggtcactgtatctttgttatagcagaaaatgaaaacctcttaaatgtatacatatatgagattgactaaataaactgtaatttatgtttatatagtgggatatatagcagttaatatgaatgaacgaactatgcatataaatatgaacaaatcttaaaagcagtgttgtgtgagaaaaatacaagcatctatataaaaaatttaaatgcaaataatattgtaatttatgatgggcagatacacaaatatatagtaaaataagaaaagaggaatgaaagaaggacaaatggatacccatcagcttcaagatagtcattacttccagagtagaaagagtattggaatggaaaaaaagaggaggatttaact

SEQ ID NO: 311994 - DNA, 601 bp, Homo sapiens
tcaggtgtttcttctacttgctgtgatggttttgttacatgtttagctgaagcaatgtttatgagaacaaagaaataggttcagatccctaaatatgtcttctatgtatatcaatcagtatccaaatatgccctgagccctgttggaaaattaaaccgaaactatgaactgcacaaagggataaaaggcagttctcagagctttcttatatgcaggaagtggctraatctgagaagctggttggtagttaaaatcactgggtgagagccgcataccaattaattcttcagctgtcccttgaaatatcagagagatgtggctgtgaaataccactaaacaaaagtaacctaaagcactagactaggagtccagtttgtgatttataactgcccttgagtaagtaagtctctgtccctcactgagcctgttccttcaactgtcagaagaggaagatgatatctgccttcctacttcacaggctcgttgtaatgaatacgtaggtcttcgtaaatccataatgctagtacagaaaaaagacaaaaagaacatcacttgcaggtcattaacacccagtgaggaaggtaaggaaggcaaggcagga

SEQ ID NO: 311995 - DNA, 585 bp, Homo sapiens
accataatccctgagatggttgcacagctcagtggaggtggaggggctcctaatatgatttcttgtggatttcacactctcgttggccagtgacaacttacaatcagagctaatatgatttagaaaatctaggaaatgtgatatgtcattctcttttctctctgtggggaaattataacatacttttctgtattttttcccaagttttctacactgggcctgcatccattttaaaattaggaaataagaaatgttgtaagcaatacattaatccttctatggctaaatatgcttagatttttttaaaccaatgtgatttttaagtttcagttttagttaagcatgtttttgataaacagaaaaattraaatgctgtttatttcatcaaatttgcccacattaaactaaaaaattttaagcttaagaagctaaaagctctatccaccacccaagtggtcgaataaatattcagttttattttctcgtaacttttccatggatatacattaggacattaccatgggactttgctcaatttcaattgagccatgaagacaatagatgtcttattccagattaagactc

SEQ ID NO: 311996 - DNA, 519 bp, Homo sapiens
aattataacatacttttctgtattttttcccaagttttctacactgggcctgcatccattttaaaattaggaaataagaaatgttgtaagcaatacattaatccttctatggctaaatatgcttagatttttttaaaccaatgtgatttttaagtttcagttttagttaagcatgtttttgataaacagaaaaattgaaatgctgtttatttcatcaaatttgcccacattaaactaaaaaattttaagcttaagaagctaaaagctctatccaccacccaagtggtcgaataaatattcagttttattttctcgtaacttttccatggatatacattaggacattaccatgggactttgctcaatttcaattgagccrtgaagacaatagatgtcttattccagattaagactcccatgcagaaattcagagtaaatgacctaacagttttagatcatttattttagatcagttataaaaaaaaaaggagagattaaagtagatttggggaaaagatt

SEQ ID NO: 311997 - DNA, 602 bp, Homo sapiens
taaaatgagggaatcaagaattacacaaacatactttaagcattttattttacctatgtctgtatctaaatctgtatactgctcatcttttgrtgcagggccaatgtcttggtgtgtgtcccctgtttggagttgtgtgtggtctttcctgcacatgcgtgatccacaatgcattatctgaaatttccagtctaggattctgcaaaagggagcaatgacttagagatccttgtgaaaccatctgaatgcagcatccctctggatgtttaagattcctacccccttcaaatccatttgctcgcccacacctaactccacatccataattttgcatgagtgacttgctttttttgagtctttccaaagcctttaatttagttttcattgaaacagtaactctcttatttatcctattcttatgtaattggtttctataatgtgtattttaattacataatttaaaaaaatggctcaagaggccttagcaggcttaagaacaaatacaactcactcctggtaagcagacagctcagctggtgaaagcctcaggacgcagagcacaggggagcagcccctggtgtggagcgataatgacccagtgg

SEQ ID NO: 311998 - DNA, 602 bp, Homo sapiens
taaaatgagggaatcaagaattacacaaacatactttaagcattttattttacctatgtctgtatctaaatctgtatactgctcatcttttggtgcagggccaatgtcttggtgtgtgtcccctgtttggagttgtgtgtggtctttcctgcacatgcgtgatccacaatgcattatctgaaatttccagtctaggattctgcaaaagggagcaatgacttagagatccttgtgaaaccatctgaatgcagcatccctctggatgtttaagattcctacccccttcaaatccatttgctcgcccacacctaactccacatccataattttgcatgagtgacttgctttttttgagtctttccaaagcctttaatttagttttcattgaaacagtaactctcttatttatcctattcttatgtaattggtttctataatgtgtattttaattacataatttaaaaaaatggctcaagaggccttagcaggcttragaacaaatacaactcactcctggtaagcagacagctcagctggtgaaagcctcaggacgcagagcacaggggagcagcccctggtgtggagcgataatgacccagtgg

SEQ ID NO: 311999 - DNA, 567 bp, Homo sapiens
  misc_feature (1)...(567): n = A,T,C or G
catgcatccccatnggccaaatggtataggtactattttctccaaatgcttaatgaagacagcaaagggagtagggaatacacaatctcctcttcttaagtgtcttgctttsttgtggttgctgcaccaaacctctacctccatagtgaagctctttgggtactcaactctctcaacacatgacacacacacacatagttctgtgcaacatttataatccagggagtctatgttagaaagaattcagtccattatgccatgtgttctgcctagaactagtcctcccctaaattttggagagcttatacaaagaggtgagtgggtcagagtgttgggtccaatggtgcctcacaggccaaggagatcatcccagcatcagaacttcagtttggcctccacacacactccagtccggtctaggggaagtcctaccctcccccatcccagggcccacccactccctgacccatgatgattggcagccagaatgcccattctcttgcctcctgttttccctaaagactgataccagcaaatttctctcagttcaagatcctcagttaccac

SEQ ID NO: 312000 - DNA, 571 bp, Homo sapiens
catgtctctggctcggctgctgcatcaggagggactcccattcagagcttgtctttgttcccatgccttgctgacagaggacagtggcaggccacccatgggtagactgacccccaggaaagcacatctatcttctcttcttgccygcccttctctgcttttcagccactctttgggcatcacaaagaatttaaataaaccactagagaattcacttcccctcccctctgagtcattaggtataaattaaatgaaacgtaaataagcttcccaagtggaccctgctgagcaggttactaattcgatccgatgagtcaatgagaagctgaagcttttaaagaaaaaggaaaagtttatgcttcatccaagggaactaaggagaaactctctctttttcctgctggatattaatgaagaaggatgctgatccaggaacttttgaccaccattctggcatccacgactgggaaaaagtctgcctaactctactctctccaggaatagtactgacaagcagagcatctcagacgcgtgcttcaggtgagcctcagatctcaccatctgggaaact

SEQ ID NO: 312001 - DNA, 571 bp, Homo sapiens
catgtctctggctcggctgctgcatcaggagggactcccattcagagcttgtctttgttcccatgccttgctgacagaggacagtggcaggccacccatgggtagactgacccccaggaaagcacatctatcttctcttcttgcccgcccttctctgcttttcagccactctttgggcatcacaaagaatttaaataaaccactagagaattcacttcccctcccctctgagtcattaggtataaattaaatgaaacgtaaataagcttcccaagtggaccctgctgagcaggttactaattcgatccgatgagtcaatgagaagctgaagcttttaaagaaaaaggaaaagtttatgcttcatccaagggaactaaggagaaactctctctttttcctgctggatattaatgaagaaggatgctgatccaggaacttttgaccaccattctggcatccacgamtgggaaaaagtctgcctaactctactctctccaggaatagtactgacaagcagagcatctcagacgcgtgcttcaggtgagcctcagatctcaccatctgggaaact

SEQ ID NO: 312002 - DNA, 385 bp, Homo sapiens
tggtggcttagaacaacatacatttattctctcaccattctggaagctaaaagtctgaaatccagatgtcagtkgggccatgatctctctgaggactccgtgggaggatccttcattgcctctcctagtttctggtagttgctgtcaatcattggcatttcttggcttatagatgtatcagtccagtctctgcctctgtcataatttggcattctccttgtatgtctctgtgtccatatttttctctttgtgtaagaacaccagtcattgggttagggtgcgccctaacccagtacaaccagtaacaatacaacctcatcttaacttaattacatatgcaaagaccctgtttccaaatggtcactttcacaagctttggggttta

SEQ ID NO: 312003 - DNA, 502 bp, Homo sapiens
accccaccttcttcttccagactgcccctctccamctccactgtatttttcccactgtgttccacccaatatctttctctccccagaatcttttctccagaagcttctcttcagtgtcttctccccactccccccaccatcatctttcccactccctctccccacacaaccctctttctgacccttttctccctgaccacattctcccaacctccttctccccactccttcaccctacaatcttcttcccacactccctctccccagagtcttctccccactgtgttgtgtccaacatcgtctttccagagtttcctctctagcatgttctctttacatctccaccccaccatcttcttccagatcctctttctccctgaacctcttctccctgatcaccttctccccaccacctttttccacctgctcaccccaccatctcttccctacctcctcctcactctttctccccaatgttttatccccactttcactcctcacc

SEQ ID NO: 312004 - DNA, 502 bp, Homo sapiens
accccaccttcttcttccagactgcccctctccaactccactgtatttttcccactgtgttccacccaatatctttctctccccagaatcttttctccagaagcttctcttcagtgtcttctccccactccccccaccatcatctttcccactccctctccccacacaaccctctttctgacccttttctccctgaccacattctcccaacctccttctccccactccttcaccctacaatcttcttcccacactccctctccccagagtcttctccccactgtgttgtgtccaacatcgtctttccagagtttcctctctagcatgttctctttacatctccaccccaccatcttcttccagatcctctttctccctgaacctcttctccctgatcaccytctccccaccacctttttccacctgctcaccccaccatctcttccctacctcctcctcactctttctccccaatgttttatccccactttcactcctcacc

SEQ ID NO: 312005 - DNA, 502 bp, Homo sapiens
accccaccttcttcttccagactgcccctctccaactccactgtatttttcccactgtgttccacccaatatctttctctccccagaatcttttctccagaagcttctcttcagtgtcttctccccactccccccaccatcatctttcccactccctctccccacacaaccctctttctgacccttttctccctgaccacattctcccaacctccttctccccactccttcaccctacaatcttcttcccacactccctctccccagagtcttctccccactgtgttgtgtccaacatcgtctttccagagtttcctctctagcatgttctctttacatctccaccccaccatcttcttccagatcctctttctccctgaacctcttctccctgatcaccttctccscaccacctttttccacctgctcaccccaccatctcttccctacctcctcctcactctttctccccaatgttttatccccactttcactcctcacc

SEQ ID NO: 312006 - DNA, 502 bp, Homo sapiens
accccaccttcttcttccagactgcccctctccaactccactgtatttttcccactgtgttccacccaatatctttctctccccagaatcttttctccagaagcttctcttcagtgtcttctccccactccccccaccatcatctttcccactccctctccccacacaaccctctttctgacccttttctccctgaccacattctcccaacctccttctccccactccttcaccctacaatcttcttcccacactccctctccccagagtcttctccccactgtgttgtgtccaacatcgtctttccagagtttcctctctagcatgttctctttacatctccaccccaccatcttcttccagatcctctttctccctgaacctcttctccctgatcaccttctccccaccacctttttccacctgctcaccccaccatctcttccctamctcctcctcactctttctccccaatgttttatccccactttcactcctcacc

SEQ ID NO: 312007 - DNA, 573 bp, Homo sapiens
atgatttgatttgtgatttaaaaagaaaattcagggccaggtgcagtggtgctcatgcctgtaattttagcatttggggaggctgaggtgagaggatcacttgaagccaggagttcaagaccagcctgagcaatatagtaagactccatctctacaaaaaataaaaataaaaataaaataaaatgaaataaaaatgttgattacagcaagatagatatttggaggagatagggactggagtctgggtttagagcagagctaaatcacatctttatttgttttttgttgttgagaatcaagtatwaattaagttgtgaaaatgggtgactcatatatctcatatgctagagatgagttattttaatttgaaccataatgaccattcaagctatactcttccatcacaggtaaagaggtagacattcatggatcatgaaaggaatgttggagattaattggaactaccgcagtgtggcactgatgctataaactcattgttcaaattgtacttaattaacatttgcttacaagatctcctttctctgctgaacaccatgaatttaaactgtgttt

SEQ ID NO: 312008 - DNA, 610 bp, Homo sapiens
actgggatgctattttgacatactgagagtttttcccccagaatttcattgcatctcattcctttcttcctttccaaccatcaggccatttcttgttaactgcgtgggagaaagtatagaagaataagaaaaagcaagggagctgaagtaggccctactgatgctgcatccatgccccttcagtcctcgccacttctgggcatccctgtgcaacatccagctgccatgtctgcattcctttaccttagarctttctcctcccagacccaagggaggccaatgtgccagagaaataacttctataagcagctgtcatccaataactaatgcaaactggtagataaataccccagctccctcacctgtcaggtgaaataacttaggggcttgtattccccctttttatagaacaatgttctaaatttgtttcaagttttagattcaaggggtacatgtacagatgtattacatgggtatactgcatgatgatgcggtttgggcttctagtgatcccattgtccaagtagtgggcctagcactcaataggtagttttccagcccttgcctcccttccttcctccccagtgtctattgttctgctctttgtgtc

SEQ ID NO: 312009 - DNA, 576 bp, Homo sapiens
tacattcatgcctgccttcctttactcattcattccatctgattcttttcataagtcccactttgtgcccagccttacactaagttctgtgtaacataaagacagtttatgcctcaagcaatttaatgtctcattggggaggtaagctcatgagaaagtttgaaatattcaaaaggtgaacctygcatattcttactttaatgcactgaattgctttctcacttaatagtagcttggatttggttaaagtgcgattgaaccacttctagacattttatttttatacctaaaacaaaggggagctgataatctctttgctgctggccgtcttctgcattgatacatgacttttctgcatgccttgctctgcccttggcccactcacatttctcagctttgttaccatcataggaccagtactttttcctgaatttcagtttgaaaaatccccaggaagaacagtgattggcttgacttggattggccagagactacatataggagcctctgaagacctcagttggaggggaaaggagcaattctcccaaacaagaggtgcttgaaacagatgtcagg

SEQ ID NO: 312010 - DNA, 497 bp, Homo sapiens
gtccaggagaaggtaacacgctggggcttcgaattggcatttcacataatgaggatttcgcagttcaaacaatcactagatattttattctgraaatcgaagctgttagtcaactaaaagtcctcatcctgagctgtgaacatgggcagacattaagcaagcattcggtgacatcactcattccatttctgtcttttcttcccagttctcaggcaccacagatgataacagccactggatccctcaagcacatggaaattcccagaacttcacagatgctcacagatgcatcccatgatcttgacctttgagtaatgggataagcaggtacaaaggagacagaagggccaggctgggtgcttagagaattccaggaagagaaagaggcactagaagtcatggcaggcagcatagagcagtgggtaagtgtacagacctgaggaccagattcgatttccaccgctcaagagccacttggccttacttaagtcacattg

SEQ ID NO: 312011 - DNA, 520 bp, Homo sapiens
tttaaaggcttgtacatctaccatgacatgcttaggcaaagcagacaccaagaagcaccccatgtgctgaaactctagtgaccgcatagggactatttcaattcttagtttgtatttgtttagaggctgcagggaactggccttggtgtgagttctagaaaattaaaaagaggttctaattgtatttcatattgcagcttttatttcaatctcagaagctttcttaaagctcagaaagcttttaaaaagcgtaagaacggtgagaagtaatttcgatatttttgctctttatttagtctattgaagcaggactctccaacttagatgcctatagaaatgtaatgtgagtagatgaagtggtcttgggatattytctcaacagatacttgtgaaagtaaagtctatttccacttgtccattaagctaagaaaggcatggtttcattctaattttcctgaaacatgtgtttctcacaatctttccttcacttctgatagaaacaagagtgttagtttgggtt

SEQ ID NO: 312012 - DNA, 507 bp, Homo sapiens
gggttgtctaaaaccaaacacgagaagcagaaaatggcttgtcttgcacagtgggcattgggcccacctgtttgccgctggaagtcccaggcttcgaaccgcagtcccctccttgcaagargcccaggacctcagccaccaccagagggcaggaaaccacatctcactctccctgaagcccccacagcacagggcttggcatgcgcaggtcattctggaaagacttccagattcattccctcattcttcaactcctattttctgagcacctactctgtgtcctaaaaagttcagcagtgagcagaaccctgctctgagcaggctgaccacctgctggagaagtcagacaggtgaagaggaaattaagacacagacagtatggggaggaggttccttatggtgtgggaacagttctgtatcttgattgtggtgatgtctatacaaatctccatacaggtgacaaaatttcctagaactgtgcacaaaaacatgcacacacacaaaaaa

SEQ ID NO: 312013 - DNA, 532 bp, Homo sapiens
agattcccgtggagtgcacacagcaaccctgtggaggctgatgctgtatcatcatcatgcacattttayagatcagtgcatgcacaaaaaggttagataacttgcccaagggtgtgcagtcagtatgtgctgggaccatgacccaaatgcagggtgttccgttttctcttccactcaagcaccagctcctccactgtttccatgagcatctccactcaccttgcacaagattgacgcctttccagctccccagactggagctaaggaagcttggagtagctaaggaccattccctgcaacacctccagacacacctcctgacctttatgatacacctggaagacaggtgcatcccctgaaatcccttggaccaaggacaagatccttcagtagcccttggtctttcttgagatacagggaagctttgtaagattcccattaatgaaatatttaggtgatacttctctcacttcagaaaacaaatgagaaaaggagttttgcttacagtacattaagttactttaaattactg

SEQ ID NO: 312014 - DNA, 621 bp, Homo sapiens
tcattattaaaggatttaagtttttatattattttagtactttgcatttgaatgatcttttctacagcctctcatctttaaaaagagataaaaatactgcctatgttgtaatctgtaaataagaatgagtgaggtagcccaggtggagttttgcacaggcttgggacataatgtgtgtttaataaatgttggctattacggtgtcattcttgcctgtgacccatcatgtataaggaggaatgaattgtcatcattgcagtggaatacattttggctgcctaggttagataaattgtttmactgtgtgcaatgtccagagattataatttctgctatatggagggctgctgggaaccagagggtatgattgattcgaactttatttcagagactttggttccaagttccaatcctcaaccctcctggccacccacaaagagtcaagaaaatatccaagcatatttccaacatttattggaaacatttattttaaatatatttataatagccaaaaattggaaacaatccaaatgttcatcagcaagagaataaatttcgtatatttatacaatggaatatgacacagaaattaaaaataataaactgctaagaaacacaata

SEQ ID NO: 312015 - DNA, 395 bp, Homo sapiens
aggggaattgcgtctggcccgccctctgccatgaaatcccgaccttgcaagtttccacgatcttgcatagggaatcatgagacttcaggcttttgtctccatcagaaaccaatcagagccaggtacactgctggaagcagytcctgcttgcagaggatgccaggtggacagtggcagtcccctccccactgaagcctctgggtgagcagctaattcccaccctgacacatagacatctgagaaattttggcattcttttccagtagtagccacctacactgtactctgatgacagcctcccttaagcagaatgccagagctcggcaacacaaccaggagactatcactgtctccaaggcttgggtttgttgtgcattcttgttgatttcaaaaca

SEQ ID NO: 312016 - DNA, 596 bp, Homo sapiens
cctttgcagggacatgaatggagctggaagccattatccttagcaagctaacacaggaacagaaaatcaaacactgcatgttgtgactgttaagtagaagctaaatgatgagaacatatggacacayagaggtgaacaacacacactggggcctaatggagggtagagggttggaggagggagaggatcaggaagaataactaatgggtactaggcttaatatctgggtgatgaaataatctgtacaacaaaccttcatgacacaagtttatctatccaacaagcatgcacatgtaccgctgaacttaaagtaaaactcaaaaaaataaaaaataaaaaaacaacagatttgtcatgaatacagagaaagggaaaggctcataccatgttggtaggtccataagttagttcatcctgtatggaaaacagtacggagatgtctcagagagctgaaaatagaactaccatgtgacccagcaatctcactactaggtatctacccaaaggaaaatatatcattgtattaaaaagacgcctgcattcagatgttcatcacagcattattcacgatagcaaagtcatggaatcaacataag

SEQ ID NO: 312017 - DNA, 596 bp, Homo sapiens
cctttgcagggacatgaatggagctggaagccattatccttagcaagctaacacaggaacagaaaatcaaacactgcatgttgtgactgttaagtagaagctaaatgatgagaacatatggacacacagaggtgaacaacacacactggggcctaatggagggtagagggttggaggagggagaggatcaggaagaataactaatgggtactaggcttaatatctgggtgatgaaataatctgtacaacaaaccttcatgacacaagtttatctatccaacaagcatgcacatrtaccgctgaacttaaagtaaaactcaaaaaaataaaaaataaaaaaacaacagatttgtcatgaatacagagaaagggaaaggctcataccatgttggtaggtccataagttagttcatcctgtatggaaaacagtacggagatgtctcagagagctgaaaatagaactaccatgtgacccagcaatctcactactaggtatctacccaaaggaaaatatatcattgtattaaaaagacgcctgcattcagatgttcatcacagcattattcacgatagcaaagtcatggaatcaacataag

SEQ ID NO: 312018 - DNA, 596 bp, Homo sapiens
cctttgcagggacatgaatggagctggaagccattatccttagcaagctaacacaggaacagaaaatcaaacactgcatgttgtgactgttaagtagaagctaaatgatgagaacatatggacacacagaggtgaacaacacacactggggcctaatggagggtagagggttggaggagggagaggatcaggaagaataactaatgggtactaggcttaatatctgggtgatgaaataatctgtacaacaaaccttcatgacacaagtttatctatccaacaagcatgcacatgtaccsctgaacttaaagtaaaactcaaaaaaataaaaaataaaaaaacaacagatttgtcatgaatacagagaaagggaaaggctcataccatgttggtaggtccataagttagttcatcctgtatggaaaacagtacggagatgtctcagagagctgaaaatagaactaccatgtgacccagcaatctcactactaggtatctacccaaaggaaaatatatcattgtattaaaaagacgcctgcattcagatgttcatcacagcattattcacgatagcaaagtcatggaatcaacataag

SEQ ID NO: 312019 - DNA, 596 bp, Homo sapiens
cctttgcagggacatgaatggagctggaagccattatccttagcaagctaacacaggaacagaaaatcaaacactgcatgttgtgactgttaagtagaagctaaatgatgagaacatatggacacacagaggtgaacaacacacactggggcctaatggagggtagagggttggaggagggagaggatcaggaagaataactaatgggtactaggcttaatatctgggtgatgaaataatctgtacaacaaaccttcatgacacaagtttatctatccaacaagcatgcacatgtaccgctgaacttaaagtaaaactcaaaaaaataaaaaataaaaaaacaacagatttgtcatgaatacagagaaagggaaaggctcataccatgttggtaggtmcataagttagttcatcctgtatggaaaacagtacggagatgtctcagagagctgaaaatagaactaccatgtgacccagcaatctcactactaggtatctacccaaaggaaaatatatcattgtattaaaaagacgcctgcattcagatgttcatcacagcattattcacgatagcaaagtcatggaatcaacataag

SEQ ID NO: 312020 - DNA, 624 bp, Homo sapiens
taaagtataatattaacaactgctattagtaagtttttcgttgtttttgttttttttttttttttgagatggagcctggctctgttgcccaggctggagtgcagtggtrcgagcttggctcactgcaacctccacctcccagattcaagtgattctcctgcctcagcctcctgagtagctgggattacatgccaccatgcccagctaatttttgtatttttagtagagacaggatttcaccatgttaggcacactggtctcaaactcctggcctcaagtgatttgcctgctgtggcctctcaaagtgctgggattacaggcgtgagcctctgcacccggcctagagtcccttttataagggccctaatcccattcatgagcaatccactttcataacctgatcatctcctagaagcttcacctcaacaccatcacctcggaggttaagatttgaacatatgaattttcagggggatgcaaacattgagtccattgcagggtaggattattctgtgcactgtgaggggtgtcctctgcactgtagagtgttgagcagcatccctgacctccacccactagatgtcagtcacactccttcccagttgtaacaaccaacaatatctc

SEQ ID NO: 312021 - DNA, 591 bp, Homo sapiens
atcgtttctttttttcttttcatagaacagagaagagaaaaaggactttcttccccgaaacatggatttggcattgtctcaacatcaggtacattaagatttcttttctgcgctgactttgccggttgastgaaagacactcatgcgggtccagagagcctccggtgagatgggcaggcctgataccaacatctgagcaagacactgtgcatctttttctaacacacaaaacttcaagccatgaagccagccttgagtcccgctgcacatttggacgtttgcctgtgaaatatgaaatgcaagggctttgtgcctcttataactccctcttggggttactctatctgctctgtttgtataacgagctcattaaaatgattacagttccctggaacatgaacttgactccacctacccccactccttgctcctcaggggactacagctcttgctcaaaaaacaggatgcctttctcaacacatttcctttctgcatttttccccgtttagttctctttgaagcaggagtgtaggcaacccttttctgctggatgcaattgactttttttcttgcaatgctcagcgttagagc

SEQ ID NO: 312022 - DNA, 591 bp, Homo sapiens
atcgtttctttttttcttttcatagaacagagaagagaaaaaggactttcttccccgaaacatggatttggcattgtctcaacatcaggtacattaagatttcttttctgcgctgactttgccggttgagtgaaagacactcatgcgggtccagagagcctccggtgagatgggcaggcctgataccaacatctgagcaagacactgtgcatctttttctaacacayaaaacttcaagccatgaagccagccttgagtcccgctgcacatttggacgtttgcctgtgaaatatgaaatgcaagggctttgtgcctcttataactccctcttggggttactctatctgctctgtttgtataacgagctcattaaaatgattacagttccctggaacatgaacttgactccacctacccccactccttgctcctcaggggactacagctcttgctcaaaaaacaggatgcctttctcaacacatttcctttctgcatttttccccgtttagttctctttgaagcaggagtgtaggcaacccttttctgctggatgcaattgactttttttcttgcaatgctcagcgttagagc

SEQ ID NO: 312023 - DNA, 541 bp, Homo sapiens
tgggtctgtgtgggcaggggagaggtgaacagggtgcctaggtcggggaggggctgggctcggagctgtgggtgctgggacgggagctgctgatatcctcctgkgggcttctctgtgcccggtggatgccccagctccatgtgagtgttgggctggtccaggcagcccctccaaccctgaatccaggtgttccctgaccgatccaggtacaggggagtccctgggcagagaatgggtgcagccaatggcaaagcagggctttgtccctgagtgctgcctgccagccttggagcacttctctgcagcccatgagtgcctaggcatctggtttcccaccagcctttccctgtgtccagaatgacatccccttagtgccacaggccagatggtatatcacgggcagcaatttggtgagtgacctttttggcttctggaatattccgaggagcgtggcccggctctgctcacctcttgcgctgcaggtgcccccgacacaggctctgcaggcggatgatgctctgtttctggtgccggtagagct

SEQ ID NO: 312024 - DNA, 581 bp, Homo sapiens
tccacatttttgatgccacgaaattggagtccatccacacagtggaatcacccacagtactggaggagagtaatgtcactctgatgtcactactgatgttaaaccatcactgagatccttcgggcaagcaaatcaaggcgcagcgcagccaggacagacactggcggattctggggaaggggacgggtgtctgagggtagattctactgtgcactctgaattctcacccatgtgactatatcatctgttcagaagaacttagatcaggactactggggagaataagaagatgagggaagaggagtattcagcaggtggggactcaaagcctggatctgctatgtgaatggcaccctgcccttgttatggggccagtgggagttgtgtgtggaagaggccaaggggagtgaggggaggatggggacaggtgctcaggtggccttggagactaacgatggggaagacctctgtttcacttacaagagggtctcaggttacgaagttgagtccaggaagaagcagtagcccagccctgccccaagctgcaggccctgctcccycagccccagggagggggctct

SEQ ID NO: 312025 - DNA, 487 bp, Homo sapiens
agggggaaaagtctcctgggtaaccaccaaacttcacactcatacaatgggccccagtaaaacagtgggccctaataaacacattccttcccctttaggtacactaagatagggaagctaaaagcagactcagggggtatgcctgcagctgcaggaagaygtatgggattagacacaaaactctccctcccaggtaagcaagacaaagagacacagaaacattctgagcctgtgataagctgtaccgccctgaatccttaaaaactcttagtcggtaaaagagagtgcctctgacctaactcagccagaagcccttctcaggtttagtctccaaaataaacctatctttaactgttcagctgttttttgtgtttccttcttctttctttaattcttataatgcgtgagagaggggagcatctgcagtggctcccagagccccgactcaagcagcagggacttgggggtgtcatggcagagagctggt

SEQ ID NO: 312026 - DNA, 654 bp, Homo sapiens
catttcactgtgtacatgtctatctgaatatcacgttgtacatattaaatatatacaatgaaaataaattttaaaaattaaaataaagaaaaataaatgaaaaccaaatactgcatgttctcacttataagtaagatctaaatgatgagaactcatgcacacaaagaggggaacagatatgaggatctagttgaggatggaaggtgagaggagggaaaggagcagaaaaaataactattgggtactaggcttagtacctgagtgatgaaatgatctgtacaaccacctcgtgacataagtttacctatgtaacaaacctgaacatgtacctcygaacctaaaataaacgttaaaaaagagaggaggtgggggagaaaagaaacttaaaaaataaaatttaaaccaaagttccagcatcattgattaagtaatttatcctttcccacagacctgttgtgctggctaggttcaccttttccccagtgatcttctacttgccctcacacatgttagaattctatactatatcagcctcttggcttccattggctgttcacacccactggtattttattatttatattgctttataataacctttgatatatagtaggacaagcctcaccattttactcttctccttcaaagtgtctt

SEQ ID NO: 312027 - DNA, 632 bp, Homo sapiens
tttgtctgtcttcttgaggaatagccaactccaatcttaaaaaactcttctagaatgtcataatcaaatttttaaacttctaaagattagaatagatgaaataaaaaagcaaccacagactggaagaaaaatgtttgtgatatgtatatctctaaaagacttatttttagaatatataaaaaattttcacaacacartaattttaaaacacaatgaaaaatgggtggaagatttgaagagttgcttcagcaaagaggataaatgagtggccattcggcacttgaaaaaatgcttgatctgggaaatgcaaattaaaattactatgagataccactatgagatactcactaaaacatattaaattaaaaagactaacaatactaagtattgataaggcagtggagcaactagaattaccatgcatatgataaaagataactattaaaacaccaactctcaccctaaataaggaaaattcaggagcattctcatttgaatcagaaacaagacaaggatgcccactgtcaccactgttacttgacattattaaagaggttatagccaacaaggtaaaaccagaaaaataagcaagaaatgtaaaaattagaaactgagaaatatttccagtattt

SEQ ID NO: 312028 - DNA, 354 bp, Homo sapiens
aatcaaaaataaaacaaaaaaacaaaaaacgaccatgaaggcacatgagaatgacaaccaagagactcgctgatgactggtaaagttggatgccaaaccctgaccatttcctgtctctgtggcatctactccgggaaatgaagtgggcatctccagcctcatatgttccaggcagcrctcagtgtttctctcctcaaacttcctgcagggggcgttccctctggccctttgggatgtctgagcatcagtatcaagtggtatctgtttgcatctgcctgcatcccagtgtcatcctgatttccaattcccatatacaatctatccacacggcctgtcagttaaactttttttttt

SEQ ID NO: 312029 - DNA, 354 bp, Homo sapiens
aatcaaaaataaaacaaaaaaacaaaaaacgaccatgaaggcacatgagaatgacaaccaagagactcgctgatgactggtaaagttggatgccaaaccctgaccatttcctgtctctgtggcatctactccgggaaatgaagtgggcatctccagcctcatatgttccaggcagcactcagtgtttctctcctcaaacttcctgcagggggcgttccctctggccctttgggatgtctgagcatcagtatcaagtggtatctgtttgcatctgcctgcatcccagtgtcatcctgatttccaattcccatatrcaatctatccacacggcctgtcagttaaactttttttttt

SEQ ID NO: 312030 - DNA, 563 bp, Homo sapiens
aggctttctaaaacaacatttatttctcttaagccatcaaagacatctttctattgcatttagccttccaatrttgctcctaaaaaagtcagctgtcagtctaattgtggttttttgcttgtttgtttgttttgttttgctttttctgagttggagtctcgctctgttgcccaggctggagtgcagtgatgcaatctcagctcacttcaacctccacctcccaggttcaagcaattctcctgcttcaacctgcagaagtacctgggattacaggcaagtgccaccacaccgagctaatttttgtattttagtagagatggggtttcaccatgttggccagaccagtctcgaactcctgacctccagtgatccacccacctcagcctcccaaagtgctgggattacaggcgtgagccactgctaactgtggtcttttaagtgtaatctatctttttatttttcatggctactcttaagaattttccttaatagttggtcttcattaatgctttcttcactttcactggaatagtggagacggattgtaagaggaagctgtggaa

SEQ ID NO: 312031 - DNA, 563 bp, Homo sapiens
aggctttctaaaacaacatttatttctcttaagccatcaaagacatctttctattgcatttagccttccaatattgctcctaaaaaagtcagctgtcagtctaattgtggttttttgcttgtttgtttgttttgttttgctttttctgagttggagtctcgctctgttgcccaggctggagtgcagtgatgcaatctcagctcacttcaacctccacctcccaggttcaagcaattctcctgcttcaacctgcagaagtacctgggattacaggcaagygccaccacaccgagctaatttttgtattttagtagagatggggtttcaccatgttggccagaccagtctcgaactcctgacctccagtgatccacccacctcagcctcccaaagtgctgggattacaggcgtgagccactgctaactgtggtcttttaagtgtaatctatctttttatttttcatggctactcttaagaattttccttaatagttggtcttcattaatgctttcttcactttcactggaatagtggagacggattgtaagaggaagctgtggaa

SEQ ID NO: 312032 - DNA, 586 bp, Homo sapiens
tcgagtcacagggtccaccgttagcacaaagttaggtcatgcgacaaacattttggcactgactctgggcaaggcccagaggctacgtcactttttttttttttttttttgagacagagtctcgctctgtctctcaggctggagtgcagtggtgtgatctcagctcactgaaacctctgcctcccgggttcaagcaattctcgtccctcagcttcccgagtagctgggattataggcrcctgccaccatacccagctaatttttgtgtttttagtagagacggggtctcaccatgttggccaggctggtctcgaactcctgacctcaggtgatccacctgcctcggcctcccaaagtgctgggattacaggtgtgaaccattgcgcccggccagagtcactcctgagattctgagtcatatctgcttgccatacagagcatctgctgaatgaacaggtgaatgaatgaatgaatgagcgaagagggttgtggggagagggagagagagggaggaaggggccttaaaattcaggcacaccagctttatcagaggacactcactgtgctggccacaccccagggggtg

SEQ ID NO: 312033 - DNA, 586 bp, Homo sapiens
tcgagtcacagggtccaccgttagcacaaagttaggtcatgcgacaaacattttggcactgactctgggcaaggcccagaggctacgtcactttttttttttttttttttgagacagagtctcgctctgtctctcaggctggagtgcagtggtgtgatctcagctcactgaaacctctgcctcccgggttcaagcaattctcgtccctcagcttcccgagtagctgggattataggcgccygccaccatacccagctaatttttgtgtttttagtagagacggggtctcaccatgttggccaggctggtctcgaactcctgacctcaggtgatccacctgcctcggcctcccaaagtgctgggattacaggtgtgaaccattgcgcccggccagagtcactcctgagattctgagtcatatctgcttgccatacagagcatctgctgaatgaacaggtgaatgaatgaatgaatgagcgaagagggttgtggggagagggagagagagggaggaaggggccttaaaattcaggcacaccagctttatcagaggacactcactgtgctggccacaccccagggggtg

SEQ ID NO: 312034 - DNA, 600 bp, Homo sapiens
gtcttgtttcattcttttgcttatggatatccagttttcccagcactacttattgaagagactgtcttttacycagtgtatattcttggcacctgtgtcaaaaatgagttcattgtaggtgtgtggacttgtttctggattctctcttctgctccattggtctatgtgtctgtttttatgccaataccatgctgttttggttcctatagtataatttgaagtatatttgaagctactgtagtataatttgaagtcagttaatgtgattcctccaattttgttcttttttctaggaatagctttggccattctgggtcttttgtggtttcatataaattttaggatagtttttttctattactctgaagaatttcattggtattttgatagggattgcattgaatctgtagattagtcttgggtactgtggacattttaacaatattgattcttccaatccatgaacatgaaatgtatttcagtttttttgtgtctcttcttcaatttctttcaccagtgttttgtaattttcattagagagatctttcatttctttggttaatacctaggtatttaattttatttgtacctcttgtaaat

SEQ ID NO: 312035 - DNA, 539 bp, Homo sapiens
ctgtcttttactcagtgtatattcttggcacctgtgtcaaaaatgagttcattgtaggtgtgtggacttgtttctggattctctcttctgctccattggtctatgtgtctgtttttatgccaataccatgctgttttggttcctatagtataatttgaagtatatttgaagctactgtagtataatttgaagtcagttaatgtgattcctccaattttgttcttttttctaggaatagctttggccrttctgggtcttttgtggtttcatataaattttaggatagtttttttctattactctgaagaatttcattggtattttgatagggattgcattgaatctgtagattagtcttgggtactgtggacattttaacaatattgattcttccaatccatgaacatgaaatgtatttcagtttttttgtgtctcttcttcaatttctttcaccagtgttttgtaattttcattagagagatctttcatttctttggttaatacctaggtatttaattttatttgtacctcttgtaaat

SEQ ID NO: 312036 - DNA, 579 bp, Homo sapiens
gggagagatagtaacatgtggatgagagagtaagagtacttaagaatccagtctgctaacagaaaaatgctgagtatgatatgtgaattccagagagcttctacagagtgagatacatataaagtcaacagagcatccattacaatttcytgagtggccttaaggagcatggcaatggctaaagtggccctcagacaagggggtatgctacagggcataattgctgactatcatagccaatagattattataagaaaataggactatactgtcctccatggttttgggttagaaccctcagcatgctgccgtggctctcatgagaaaaaaaggaaaagcagcagcccaaatatggcccaaaacaggggctattgtaagattttcttttttttcttgaatagctctttgttcttctgatgttcagtacgtgggcttaagttgatcttctttcaacaatgtatataactgctgtaccatgagagtaaaattggagatccagctagggtagccagctaaacctaaaaccccccttagctgtctagtttttggagtggggtatacaagaattctagttactca

SEQ ID NO: 312037 - DNA, 541 bp, Homo sapiens
gaacaaccagtcctagtatttttgagctgctggtgacatacatttcatggtggaagttgttatgaactgtatttaacttatgtgattatttggaagactatataactcaatatatctaatatattatatatatttcacagatctttttktaactaacatgtttttgataattctatatttgttttcctttctaacagctttaactcttctatgactataattacattgtgtctttaacattattttgattaaggttgagatttggagcagttacttaaattctttcccacgctacccatctgttcaaccaaaaagcacattttccataattataaacaatatccccaaataatctcatttattctcctggctctgtcttcaactacggcaggatttgggggaagccatgaaactggtgacactaaatccatggctgacattttcttttaatcttttaacagcctttgatactttccatcatcatttttgtctcgaagcattctttcacatgtataatatcagacacctggttttctttcaa

SEQ ID NO: 312038 - DNA, 523 bp, Homo sapiens
  misc_feature (1)...(523): n = A,T,C or G
tgatttctttgcattttttctactttgcatttgttgagttttttgtatgtgtagattatatckttcatcaaatatgggaagttttcagccattatttcttcaactattctttctgcccttttttcattctctttttcttctaagactcccataagatatgattttttctcatttttttcctttttgttatgtttttccatttccaacttttatttnnnnnnnnnnnnnnnnnnnnnnnnnnnnnnnnnnnnnnnnnnnnnnnnnnnnnnnnnnnnnnnnnnnnnnnnnnnnnnnnnnnnnnnnnnnnnnnnnnnnatagtacctgataagtagtttttcaaccctcattctcctccatccttcgccctaagtaggtcctgatgtctatttttcccctgtttgtgtccatgtgtactcaatgtttagctcctacttataagtgagaacgtgcgaaatttgttttctgtttctacgttaatttacttaggatactgtcctccagctgcatccatgttgctgtaaa

SEQ ID NO: 312039 - DNA, 421 bp, Homo sapiens
aatagggaaagaaagaaaaagaaaatattctacccacacaaaaataattacaaaaattagaagtgttagtgtctccagataagagggagccagtgcaataattcttgcaccacgaaaaatacgaatgtagtgacaccaccaaaggattgccctagctctccaacaatggttcctaactgaaatggaaattcagaaatgayacataaagaattcaaagcatggattgcaaggtggctcactgagatccaagacagggttgaaagtcaacagaaaataacttctaaagcaatccaagaaatgaaggaagagataacatcttaaaaagaaatcagtcacagcttctggaattgaaaacctaactgaaggaatttcaaaatacagttgaaagctttatcaacagattggcccaagcagaagaaag

SEQ ID NO: 312040 - DNA, 614 bp, Homo sapiens
aagatatacaaatggccaacaaacaaatgaaaagaatgctcaacagcactaattatcagggaaaggcaaatgaaaaccacaatgtgatamtaccttattcctgcaagaatggccacaataaaaaaatcaaaaaacagtagatgctggcatggaagtggtgatcagagaacacttctacactgctggtgggaatgtaaactagtacagccactatggaaaacattgtggagattccctaaagaactaaaagtagcactaccatttggtccagcaatctcactactgggtatctactcaggggaaaagtgtcattatatgaaaaatatacttgcacacatatgtttatagtagcacaatttgcaattgcaaaattgtggaaccaacccaaatgcccatcaatcagccagtggacaaagaaactgtggtatataaatacaatgaaatattgctcagccataaaaaggaatgaattaatggcattcgtagcaaactggatgagattagagactattattctaagtgaagtaacacagcaagggaaaactaaacattgtatgttatcactgatatgtgcgagtctaagctatgaggacgcaaatggcaaaagaaagata

SEQ ID NO: 312041 - DNA, 614 bp, Homo sapiens
aagatatacaaatggccaacaaacaaatgaaaagaatgctcaacagcactaattatcagggaaaggcaaatgaaaaccacaatgtgataataccttattcctgcaagaatggccacaataaaaaaatcaaaaaacagtagatgytggcatggaagtggtgatcagagaacacttctacactgctggtgggaatgtaaactagtacagccactatggaaaacattgtggagattccctaaagaactaaaagtagcactaccatttggtccagcaatctcactactgggtatctactcaggggaaaagtgtcattatatgaaaaatatacttgcacacatatgtttatagtagcacaatttgcaattgcaaaattgtggaaccaacccaaatgcccatcaatcagccagtggacaaagaaactgtggtatataaatacaatgaaatattgctcagccataaaaaggaatgaattaatggcattcgtagcaaactggatgagattagagactattattctaagtgaagtaacacagcaagggaaaactaaacattgtatgttatcactgatatgtgcgagtctaagctatgaggacgcaaatggcaaaagaaagata

SEQ ID NO: 312042 - DNA, 614 bp, Homo sapiens
aagatatacaaatggccaacaaacaaatgaaaagaatgctcaacagcactaattatcagggaaaggcaaatgaaaaccacaatgtgataataccttattcctgcaagaatggccacaataaaaaaatcaaaaaacagtagatgctggcatggaagtggtgatcagagaacacttctacactgctggtgggaatgtaaactagtacagccactatggaaaacattgtggagattccytaaagaactaaaagtagcactaccatttggtccagcaatctcactactgggtatctactcaggggaaaagtgtcattatatgaaaaatatacttgcacacatatgtttatagtagcacaatttgcaattgcaaaattgtggaaccaacccaaatgcccatcaatcagccagtggacaaagaaactgtggtatataaatacaatgaaatattgctcagccataaaaaggaatgaattaatggcattcgtagcaaactggatgagattagagactattattctaagtgaagtaacacagcaagggaaaactaaacattgtatgttatcactgatatgtgcgagtctaagctatgaggacgcaaatggcaaaagaaagata

SEQ ID NO: 312043 - DNA, 620 bp, Homo sapiens
aaatgaaaagaaaaagagaaaaaaaaaaacagaaagggaagtgcaaaataaagataagacttgctaccaacagtttctctgatggaatgggtactcattccatcatggctatggctacagcaggaatctagataaacattttctatttcacatgactgaatttgaaaaacaacagcatatacatacatcagagactttcagacaatagagcaactacccccgatttctaagaccttagagcaccttctgggccgaactctgattaaattactattaggatatttatttggcctgaacaacacaatgtagctgaaatcatattattcaatgattaagtcraaaaatataaaaaatagattaggcctcccatcttactgaaagttactttatgattataaaacaaaatacgttacatgctttgtaaatcatcttggcacagctaatactcatggcctcacaaagtattaccacagtttatgacgacaccaattttaagtatgaaactgtggtaaacacttaggactgggtagcctcccctttaaatacaatgtcaattctgagttacctcccctttgatgactactgccaattcttaagatcattaagataaaaggagactt

SEQ ID NO: 312044 - DNA, 546 bp, Homo sapiens
ctctgctaagggacagactgcctcctcaagttggtccctgacccccatgcctcctgactgggagatatctcccagcaagggtcgacagacacctcatacaggagcgctctggctgggatatggtggaagcccctctgggacaaagcttccagaggaaggaaaaggcagcaatctttgctgttctgaagcctctgctggtgatccaggcaaacagggtctgaagcagacctccaacaaactccagcagacctgcagcagaggggcctaactattagaaggaaaactaacaaacagaaaggaatagcatcaacatcaacaaaaaggatgtccacacagaaaccccatccgaaggtcaccaacatcaaagaccaacagcagataaattcatgaagataaggaaaaaacagcacaaaaaagckgaaaattccaaaaaccagaacgcctcttctcctccaaaggatcactactcctcaccagcaagggaacaaaactggactgaggatgagtctgaagaactgacagaagtagacttcagaaggagggtaa

SEQ ID NO: 312045 - DNA, 638 bp, Homo sapiens
ttgtagttatcctcaggttcaaaatggaataagtaattgtttgatactttcttgctaagtctttaaagtactatacaactgctgatgtatgtttgtgctggcattgtagagtagagccttgggaatacaaaatctgatttcagagaaaccagaatttagttcaaataaaagagccactttctccagctgataagacttttcctgaaagaaaagcaccaagtaagaaacatgctggtgatatctcctgttagttctttacaatcctaatcaaaacttttttttaatttacttcattatatacttctcttttcacattttctcctgttagtttaatttttgttagttttatttgtttgttgtatgtctcagagtataatcacattatttcaatatacattgtattagatatttcagactaaaaaatataactatgtaattgcagaatatcctcaaagatctcattagaaagggaagcaaattttaaaagaatgaagtaggtacttttcttacagatttacaatgttactaagcaataataatcaggtaacaycatcagtcatatatgcatgccataaaactttaatgtaataactaatcacatttatttatattcttatcagaagagttgaatgatataa

SEQ ID NO: 312046 - DNA, 582 bp, Homo sapiens
ggaatatcagagtctcttctttggaatattcttatagaatcactttgcaaagcatcacttatataggtatagcgatgccatctgtaaacttgtttttccctcagctatcaccagaggaaatcttttggagcactcatctaatattctgtgagatcaaatagaatcacgacaaatactggaactgccgatttgacaaataacaaggggatcattcatttaaagrggaaaaaagtcactaatttcccaggattgacttcaactatggatatctacatactagaaaaagtgtcggattttctgccaagcagctttcctgagagtggttacatttgctggttcttaactgcactatggagcataatgtgtcatttgaagagtagtttatcctaaagtgctattttaaaaagatattaggaatggagctgtaaaaatgcatatagaagaagaaaagccagggtttacatatgatgtattagatatacacaatccattcctgtctgcttctctcgccaggaactaaatcacgtacaggaacatttaagagatatttcccagtgtacgctaaatccttctttgttttct

SEQ ID NO: 312047 - DNA, 588 bp, Homo sapiens
tttaaagtactgaaacaaaaaacaaataaaaaaacacacgttctatacaggaaaaaatatatcttttaaaaaatgagggcaaaatacagaccttttccagacagacaaatactgagagaaattgatgctatcagactggcactacaagaaatgttaaagttcatcagcaaggataaaaattaaaccagaaagaaatataactctacacaaaaaagaaaaaagtaccagaaatggtaaatatgtgagtaaaaataaatgttttcctcatattttaatctttttaaaagataaaggtactgggtgcagtggctcatgcctataatctcagcactttgagaggtygaggcaggattgcttgagcccaggagtttgagacaagcctgggcaatatggcaagacctcatccctactgaaaatcagtatttaaaaaattagctaggcattgtggcatgtgactgtagtcccagctactcaggagcctgaggtagaaggatcccttgaacccaggaggtggaggctgtagtgagacatgattgcaccactgcacttcactccactccagcctggcaacagagggaaaccctgtct

SEQ ID NO: 312048 - DNA, 452 bp, Homo sapiens
aggctggctggggtcagagtgatatgcagggcaattgatggagtagggcagcgttcctcaacaaaatgtgccaagaatattttgtgagaggggcctgatatgatttttaaatttttggcaggtaaygtgtgttttggggaatgctgttttagtgataaagggaagtgcaacttcttaaaactaaatttgggaatatctatattattcaggctttcttataagtagtatcttcattgcttaatatgtggcaatattttgacttttaactttgagtatcttctccttaaacatgaggtaaattaacagataatttcattttggataaggatatgtcgttcaaaaaagtgattaggaaaattgttaatgaacataataagcaaagaaaataaaagtaacgcagcaaaagaagtagaagaaagttagttccaatgatggggaaaaaatagaataga

SEQ ID NO: 312049 - DNA, 576 bp, Homo sapiens
gaagaaacaagtgtcatcatgaaagacaactagtagatattactcggcagagaaaaagaaaaacaaaaactaaaaggcaaataaaacatcagcctataaaatttttaatctttatcatgaaaagggccttaggtaaaacccatttttagagcaaaaacctttccacagttactctgcccactaaacttaattcagttttattttatctgcacctccctaaaaatacttcagttctgcaaattaaaacaatgattcaaatgtagccccttgaacagtgataacagacacatttatcttgctccaayagccaattttcggatacctgcaaccttatcctaaggttctgatataaacagtatattagaagtccatttagtaactttatttgacagctaaactagctctaaaaagccctgggcaaaggcttctttcacagagtgttgtaacatacaaacaactacgatgtttagtctcagaattggcctgtaagctttgccctcagtactgtgtttatcagtgaaaatacatgtaggcctgtttgcaaaagcacttaagatgtgctcagaatgaagtgtc

SEQ ID NO: 312050 - DNA, 576 bp, Homo sapiens
gaagaaacaagtgtcatcatgaaagacaactagtagatattactcggcagagaaaaagaaaaacaaaaactaaaaggcaaataaaacatcagcctataaaatttttaatctttatcatgaaaagggccttaggtaaaacccatttttagagcaaaaacctttccacagttactctgcccactaaacttaattcagttttattttatctgcacctccctaaaaatacttcagttctgcaaattaaaacaatgattcaaatgtagccccttgaacagtgataacagacacatttatcttgctccaatagccaattttcggatacctgcaaccttatcctaaggttctgatataaacagtatattagaagtccatttagtaactttatttgacagctaaactasctctaaaaagccctgggcaaaggcttctttcacagagtgttgtaacatacaaacaactacgatgtttagtctcagaattggcctgtaagctttgccctcagtactgtgtttatcagtgaaaatacatgtaggcctgtttgcaaaagcacttaagatgtgctcagaatgaagtgtc

SEQ ID NO: 312051 - DNA, 547 bp, Homo sapiens
taaatggaattaagagttggataaaccatctaagtcctgcaaagtatgacttactttggagaggcatctgggattttgctgatagataggatccttttcccagaaaatatctgcctgtgcacacgaatacacacacacacacacacacacacacacacacacatcgttaaaagttttgaaattcatggactccaggatgaaagcttttgtgctactgtcctcagaccattgattaagaacaatgcacctatggaaatggtgtgagaggacagaactctgcaacacaacaagcaaagagcaagctgtaggagaaagygaaaggaaagcagcgccttggaccacaatggctcaaagagcttttgtcccagtgtttttttttatttgtttgaattttattttaagttgtatctggtttctaattacaactagctgttgaggcagtgtggttttgttgttattgctattgcttccttatgagacaagaagattcaactgattaaaggcctctccctcttttacctctgaaggtgaaagagctgagatcttg

SEQ ID NO: 312052 - DNA, 547 bp, Homo sapiens
taaatggaattaagagttggataaaccatctaagtcctgcaaagtatgacttactttggagaggcatctgggattttgctgatagataggatccttttcccagaaaatatctgcctgtgcacacgaatacacacacacacacacacacacacacacacacacatcgttaaaagttttgaaattcatggactccaggatgaaagcttttgtgctactgtcctcagaccattgattaagaacaatgcacctatggaaatggtgtgagaggacagaactctgcaacacaacaagcaaagagcaagctgtaggagaaagtgaaaggaaagcagygccttggaccacaatggctcaaagagcttttgtcccagtgtttttttttatttgtttgaattttattttaagttgtatctggtttctaattacaactagctgttgaggcagtgtggttttgttgttattgctattgcttccttatgagacaagaagattcaactgattaaaggcctctccctcttttacctctgaaggtgaaagagctgagatcttg

SEQ ID NO: 312053 - DNA, 547 bp, Homo sapiens
taaatggaattaagagttggataaaccatctaagtcctgcaaagtatgacttactttggagaggcatctgggattttgctgatagataggatccttttcccagaaaatatctgcctgtgcacacgaatacacacacacacacacacacacacacacacacacatcgttaaaagttttgaaattcatggactccaggatgaaagcttttgtgctactgtcctcagaccattgattaagaacaatgcacctatggaaatggtgtgagaggacagaactctgcaacacaacaagcaaagagcaagctgtaggagaaagtgaaaggaaagcagcgccttggaccacaatggctcaaagagcttttgtcccagtgtttttttttatttgtttgaattttattttaagttgtatctggyttctaattacaactagctgttgaggcagtgtggttttgttgttattgctattgcttccttatgagacaagaagattcaactgattaaaggcctctccctcttttacctctgaaggtgaaagagctgagatcttg

SEQ ID NO: 312054 - DNA, 561 bp, Homo sapiens
atggggtcttgagagtggagtttgatgaaatgatgtactttcatcaattctacctctgctagtggaaattggatcaattgccaagatgagtcasaacataacctggctaggaaagtgcggggtgtactatggaaggaaaagctctgtacctggaagaagctatgggacttagctgacatataccagtaggagttgggacctgatgaattgggcaggattttgagcatgctgtataaggagagtagaatgtgaagttgagtaagagatagttttttcaacacgggaacagcctcctatgatacaagattcaacaccctgacaatgacctgggagatactgtcaacactctgtaacgacagctcttacaagtttgggaaaaataatggcccacactaagtaaagtgtaagtgtcagaactgctgaaacaactagtggaaaaagatgaggtccaaggcttaaagtgggcatgctatgtagatgtattaggtaaggacagaaaacacaccagctggagctttccagaggaaactccaggtatgacggattttgggatggtaagtc

SEQ ID NO: 312055 - DNA, 561 bp, Homo sapiens
atggggtcttgagagtggagtttgatgaaatgatgtactttcatcaattctacctctgctagtggaaattggatcaattgccaagatgagtcagaacataacctggctaggaaagtgcggggtgtactakggaaggaaaagctctgtacctggaagaagctatgggacttagctgacatataccagtaggagttgggacctgatgaattgggcaggattttgagcatgctgtataaggagagtagaatgtgaagttgagtaagagatagttttttcaacacgggaacagcctcctatgatacaagattcaacaccctgacaatgacctgggagatactgtcaacactctgtaacgacagctcttacaagtttgggaaaaataatggcccacactaagtaaagtgtaagtgtcagaactgctgaaacaactagtggaaaaagatgaggtccaaggcttaaagtgggcatgctatgtagatgtattaggtaaggacagaaaacacaccagctggagctttccagaggaaactccaggtatgacggattttgggatggtaagtc

SEQ ID NO: 312056 - DNA, 556 bp, Homo sapiens
ttaagtctgtcaacagtggagagaaatactgagccgctaataagaaactataagctgttagaaccaaccagcaacctggttccattatggagggggaagcaactcatcctcactggaatagataattgggttgtatccagtttatgtacttcctcagattttcttggccccacccgtcccacttgtttgctcaatggaatgctcccgtctcgtcatcactaccattgtctcatctcaactcctgcatgctttccacccttccttgaatgagggcaaaggggaagcctacttttcccgccatattcaaactaaattgaagcaacctgctttggagcatgatatctggctccccagtgactgcccagaggcgctaagtagtacaacttggaagtgtgggggagttaatgmctcaaatggtgaattttgaccagtaagagatagggaaacagaaagaagccacagcataatgagtgcatatttgtttgcataatattggtgggagcatgttgttgatgctatttgttgttgtttttctaaacaggtatgcaaatataca

SEQ ID NO: 312057 - DNA, 573 bp, Homo sapiens
tattataaatcgttacaagtatgtaatagttaattaaaaggaaaactacttaggtctgtaggtttaaaatatctaaaaagagaaaagggtatcttttttaaaagcctataaacatttaaaaacttccccagagttctgattagtaaagaattgactgcacaaatataaaaatcagcgagtaggggagataaaatgcaaaaatagggtttttttccttcttcttctttaatgaggtagaaccagtattttawaaaacttgttatccattgggaaatgtaaacaatcatggtgtttttgtgaatcttttttggtatagggcagtggttctcaacgtgggacagtttgcctcttctggagacatatggcaatgtctagagacatgtttgctttttacaatgcagaaaggatgtaaaggtgctactgacatgtagtatacaaagggcagggattatgctaaacatgctttaatgcacaggatagcctctcaaaataaagaattatctgaccaaaaatgtcaatagctctgctgttgagaaaccctgctataggagaaaataaaataggaaatgtaag

SEQ ID NO: 312058 - DNA, 604 bp, Homo sapiens
aagatggatgaggggcctggcttctcattgtctggatttgaggagttgcagtttttgcyggagggttggtttcctgaggaaggaaatagagcaagacaaatttaagtttcaagttttaaaaccagggagagtcaatttctatgtttattaaaaaaaaaacataaacattagttccatgggacaattgagccagttttgatatgccaccccaaataagtctctttggcatatggattattttgagctagttattttgagaaattgctgactaaggagtagttccaaaatgttatcctttggttagagaaatttacatctatcaggaaatctccatatataagagtgtctccctttctgcaccaggaaaagtaggctgactaaatcactagagattcttaatcaatggaaaagttatcaacttaaatctgtccaaaaatccttaccaaagacacctggtgtaagggggaagtggtcctgagtatcagcatgtgctcagcctatcaagcagtgtgtctggtgccaggaggtgatgttctgtctcaaggtgatatatctatcttctcacagatgtcctgcagagttggctttttttgattcacaatca

SEQ ID NO: 312059 - DNA, 604 bp, Homo sapiens
aagatggatgaggggcctggcttctcattgtctggatttgaggagttgcagtttttgctggagggttggtttcctgaggaaggaaatagagcaagacaaatttaagtttcaagttttaaaaccagggagagtcaatttctatgtttattaaaaaaaaaacataaacattagttccatgggacaattgagccagttttgatatgccaccccaaataagyctctttggcatatggattattttgagctagttattttgagaaattgctgactaaggagtagttccaaaatgttatcctttggttagagaaatttacatctatcaggaaatctccatatataagagtgtctccctttctgcaccaggaaaagtaggctgactaaatcactagagattcttaatcaatggaaaagttatcaacttaaatctgtccaaaaatccttaccaaagacacctggtgtaagggggaagtggtcctgagtatcagcatgtgctcagcctatcaagcagtgtgtctggtgccaggaggtgatgttctgtctcaaggtgatatatctatcttctcacagatgtcctgcagagttggctttttttgattcacaatca

SEQ ID NO: 312060 - DNA, 604 bp, Homo sapiens
aagatggatgaggggcctggcttctcattgtctggatttgaggagttgcagtttttgctggagggttggtttcctgaggaaggaaatagagcaagacaaatttaagtttcaagttttaaaaccagggagagtcaatttctatgtttattaaaaaaaaaacataaacattagttccatgggacaattgagccagttttgatatgccaccccaaataagtctctttggcatatggattattttgagctagttattttgagaaattgctgactaaggagtagttccaaaatgttatcctttggttagagaaatttacatctatcaggaaatctccatrtataagagtgtctccctttctgcaccaggaaaagtaggctgactaaatcactagagattcttaatcaatggaaaagttatcaacttaaatctgtccaaaaatccttaccaaagacacctggtgtaagggggaagtggtcctgagtatcagcatgtgctcagcctatcaagcagtgtgtctggtgccaggaggtgatgttctgtctcaaggtgatatatctatcttctcacagatgtcctgcagagttggctttttttgattcacaatca

SEQ ID NO: 312061 - DNA, 600 bp, Homo sapiens
ctaaattgcccttattcttgagattctgatggattcattccacattactggcctctataataggatgttgttatcattgatgaaatgccaaattctcatttctgttatatttttaaaatctattactttttttatttggggtgtttgcccaataaatttcacaaaagtgaattcatgaataaaattgtgcctagccttacccttgtgatttatattaagattatttcttttaatacatttcagtttttactttgtcacttggctttctcctaacctagttrttctttaacttgactattgttaacttgacgattgttctctatagcaaaatgtgcctactgctttattggaaaccctaacaaataacttcactaatgaattgctttgcttgtcacccaagtaatatcttcaaagacactcagttaaaccatccaagttaaatatacattaaagctggcaaacttaaacaaacttttcttatctagcttatatactgttagctgactttaaagttctttcttaaaccaactgttaaatgaatgactagtcagagtgttttctttcagatctgttttccagtgctaatgacctttcccttcc

SEQ ID NO: 312062 - DNA, 542 bp, Homo sapiens
tgagttatatcagggcaggttttccatgaaactttaagaaaccaacaattactcaaaactttggaggaggatttttttttccagataggcacatattccgtaggtatactttctgaagaaaaatgagttttagaaaccttattatttatatccaaaatggagtgaaacaaacaaaaggaaatatcactcccaaatattatcagctcattttactttttatagatgctttggctaagggtgatttggttgcataaggtgggatagggcttcatttgtaaatccactatctgaggctgtttattsaagtgcagaggaagccagacaggcagggaacgttatggaatcatttatatttatctgtcagtatacctcctggcaaaatgattttcacaacactgttttcaactaaagactatagtgtctatgggacagcccaattaaggagctatcagaaactcttacatgctttcatcatactgttctgtctgacaaacctctccaacaagtggtttaaaatcaaattgtggagctcagagatttaa

SEQ ID NO: 312063 - DNA, 548 bp, Homo sapiens
aaggttaggttgactacacccttggtattctgtcctgaacatgttttttgttctttacaacatggccaggcacaagttctgcttcatttttattataaatttaatcttctcaaattttacaataagcagtcaagagaagccatattgtacctcaacaatttgcttaggtagttgttccaccaaatatcttctttcatcagttagttctactttctacaaagcactaggacatgaacacaattcarctaaattctttgccactttataacaagaatcacctttcctccagtttctaataacatatttctcatttccatcttagacctcatccaaatggcttttaccatccataattccaccaacatcctgcctgccatcttttaggtaatctctaaaaagactgaggctttctctacgtctcccctcttcttctgagccctcaccagaatccacctttatgttccatgtataacaatgcaggctttttgtagcatgcagctccaaattcttccagcctgtatccattaccctgttcccaagatgcttcc

SEQ ID NO: 312064 - DNA, 548 bp, Homo sapiens
aaggttaggttgactacacccttggtattctgtcctgaacatgttttttgttctttacaacatggccaggcacaagttctgcttcatttttattataaatttaatcttctcaaattttacaataagcagtcaagagaagccatattgtacctcaacaatttgcttaggtagttgttccaccaaatatcttctttcatcagttagttctactttctacaaagcactaggacatgaacacaattcaactaaattctttgccactttataacaagaatcacctttcctccagtttctaataacrtatttctcatttccatcttagacctcatccaaatggcttttaccatccataattccaccaacatcctgcctgccatcttttaggtaatctctaaaaagactgaggctttctctacgtctcccctcttcttctgagccctcaccagaatccacctttatgttccatgtataacaatgcaggctttttgtagcatgcagctccaaattcttccagcctgtatccattaccctgttcccaagatgcttcc

SEQ ID NO: 312065 - DNA, 659 bp, Homo sapiens
agagccaggcagattaaaatataaaaatatttttccgtctgtagcatattcccctggatacaggaaagaccaagggccaaagtgcacaaaagctcaaaaatagagataatagtgaattgaaaatctagctctcatcatcaggctatttctcccttcacaaaaggaagaaaattaaagagccagacatctgccatagtagcatcttgcttactggtgggaaaccacattcaacatgaatattcaaactcaatagccggtgtctttatggaggstttatgggtcttcctaaagaaccacttaggaagaactgggaaatcagctcagtcttaaataatttctgcatcaatattggctacgtgttttttgtttgtttgtttgtttttatgcttctgctgaaaggacacactttgttgttgttgttgtttttgagacagtgtctcactctgtcacttctgctcacttgcaacctccacctcccaagctcaagagattctctcacttcagcctcttgagtagctagaactagagacacacgccaacatgcacgcctaatttttgtatgttttgtagagatgggttttcattatgttgcccaggctgcccttgaactcctgagctcaggtgatccgacctcctcagcctcccaaagtgttgggatt

SEQ ID NO: 312066 - DNA, 659 bp, Homo sapiens
agagccaggcagattaaaatataaaaatatttttccgtctgtagcatattcccctggatacaggaaagaccaagggccaaagtgcacaaaagctcaaaaatagagataatagtgaattgaaaatctagctctcatcatcaggctatttctcccttcacaaaaggaagaaaattaaagagccagacatctgccatagtagcatcttgcttactggtgggaaaccacattcaacatgaatattcaaactcaatagccggtgtctttatggagggtttatgggtcttcctaaagaacyacttaggaagaactgggaaatcagctcagtcttaaataatttctgcatcaatattggctacgtgttttttgtttgtttgtttgtttttatgcttctgctgaaaggacacactttgttgttgttgttgtttttgagacagtgtctcactctgtcacttctgctcacttgcaacctccacctcccaagctcaagagattctctcacttcagcctcttgagtagctagaactagagacacacgccaacatgcacgcctaatttttgtatgttttgtagagatgggttttcattatgttgcccaggctgcccttgaactcctgagctcaggtgatccgacctcctcagcctcccaaagtgttgggatt

SEQ ID NO: 312067 - DNA, 566 bp, Homo sapiens
ttgaaatagacctataccacagtgaagaaaatgaagaagaagaagaagagtgtgcaaatgctactgatgtgacaaccaccccatctgtgcagtacataaatgggaagcatctcgttaccactgtgcccaagggaccagaagctgcagaagctaggcgtggccagtttgaaagtgttgcaccttctcaraatttctcgaacagctctgaaagtgatactatccatttgtaatagccaaaacggaattgtctactgctgtgcaacctaatgaatctacagaaacaactgagtctcttgaagttacatggaagcctgagacttaccctgaaacatcagaacatttttcaggtggtgagcctgatgttttccccacagtcccattccatgaggaatttgaaagtggaacagccaaaaaaggggcagaatcagtcacagagagagatactgaagttggtcatcaggcacatgaacatactgaacctgtatctctgtttcctgaagagtcttcaggagagattgccattgaccaagaatctcagaaaatagcctttgcaagggctacagaag

SEQ ID NO: 312068 - DNA, 577 bp, Homo sapiens
tccttcaactgcagcaaaaaggagggcaactagttttcatgtagcaatatgyagaaatttgttgctcataaagcattttcttaagaggtagtgtcttgccatgctgtccaggcttgacttgaactactggcctcaagtaatcctcccacctctgcttcccaaagtgctgggatcataggcgtgagccaccattcccagcctcatgaagcgttgtttgatgttctattaaatattttctcgtgatgcctactatcgtttagaagtttgttaatttgtaatctggatagaggttcatttaactttactgcgtgatatccttgccagtgactcacctcatggtaaaagtaaatatttttgaggataaatctgtagaactgtctaatctaggtgttcactaattaaaatgttttgaaaaaaaggaacaagtggcttccaaaatgagggtagcgtggataagatctggcacattttattgggtcactgaatttttgccaatggcatcgcttaaaaacaacaacaacaaaaaaatagaaaatttctatcataaaaaaaagaaaatttctatcatgagtgaggg

SEQ ID NO: 312069 - DNA, 504 bp, Homo sapiens
gcagaatgctcatgtcagatcttatccttgacttgcccgccctgcacacagtgggtgtggagcagattgctcttctcttgttgaacacaaatgaatccgttggctggcatgtggcatycatgaggaatgaaaatacatacactgaagcactggagttccgattcagagtgggaagctaatcaccctctgagggagaggaatgagactccagtcgcccatctctctcacgtgtcttggcatatgcttagtgaggggaatggcaggcaaagtctgcaccatttgcatttaaatctacgctgtgggaggctgaggtgggaggatcgctcgaggtcaggagttcaagactagcctggtcagcatagccagattcccatctctacatttatatttttttaaattcttttttctttcttttctgttaattaattaattaattaatttatttatttattaggcagagtctcactctgccagccaggctggagtgcagtggcacgatcttgg

SEQ ID NO: 312070 - DNA, 516 bp, Homo sapiens
actctaccatcaaagatgtatctatgtttacagacattcttttattcatttgaaaagaaatttcaatgttcaataataaatattagcctcatttgtgaattaaacagatgttaagattgcatgcacgtcagtaaaaaaactgttgtacaggaaactctatgcacaggagcctcctaccatgtcatccagctcagctacctttttctattcagctttctgcaagtatttattttatataatgcacatgtaactataaggatacaaacatggatcatacaaagaacctgccctcatggagcttaaaatctaaagacagatgataagtgctaaacataaataactgtccacaacattaagatatcagtaaattcattcattcatttaattcactcatacattcacttgtgcagcaaacatttactgaataggaactgatttcaaaattttcagctaggaatgcaaaactgagagagaaaaattctyagccttcaaaaaaatcaaagtcgaactgctcag

SEQ ID NO: 312071 - DNA, 576 bp, Homo sapiens
actgtagagtagggacttgtcgtgctctttattggcagaagtgtgactggctacccctgaccgttcgggagaggagacatgtacacctggccaatcagaccagcagattcactgctggtgatgagtgaagttgcagatgtcagggacagcttgtgctgttcaggttaaattatctcacttcagctctcactctaargatgatttataactagtattcttcactttcagtcttttcactagcaagcaggatacttatggaaaataattaggatgaaaagaggtcactctatcacaatagtgagtttttgaattcacactttaaacgagatgatcctccttaggaaaagcaaaataaaacgaatttccatgccattgttgattctacttgagttaaatactaacataaaaagttggttttctgtgcatagcctggagaatcttgtctctcagaattatcatgccccaggccattccttgcagattttgaattccctttgtctcaaaaacatccagaaaatctttttgaccttcgggtggttggcagaacatgtgttgtgagggcacctcagtttagaa

SEQ ID NO: 312072 - DNA, 566 bp, Homo sapiens
ccttttctacttttaatagataaaattgtttttaattcatgccacagagatgaaccaacaatctaaaagaatggactcctaatcaattgtagtgaatggaccatatgttcatattatctgtaattaaatggaggaatttaaaaggaaaggtgtgagaatggaagagaaggctgctccccacatcctatccaaggctcctgtttctacccgcacaccctaccacagaaatacccaagatttattttctagagaaatgttctgcagaaagggtcaggactctgagagagaagatgtagcaccctgcagggatgaggtgtggggctgaaacaaggaatgaagggaatgtctgtggtgcagrtctggttccctgagatactccgagatagatagagattgggatgcagggtgtttgtggggaaatgttctcagtgtgagcaccacaggaagaagagtaggaacagggttaaaggctcaatggaggcctcttctggttcagttggggtttctaaaacttagaggaaggggttaggactctatactatctccttcccgtttatcaaatagcc

SEQ ID NO: 312073 - DNA, 608 bp, Homo sapiens
tgcagccagtcagcaacagtgctgggttttcaatgcagaaatgtctgattccaagaccactcacgtaaaaaaaaaaaatgttgcagtttatcagtgatgtttggcaaaagaatggatgttgatattagtttacccagtttcattctaggtagttcacaaccaggagcttctcaagaaatacttgtttacagaattcatgaatccaaattagctctgtttcccaaaaccatagataacyggaaactaaaaattggataaaagtcagcttcaacagaagaaaaaagagtttgtattaaatatgaatgagcatttactttgttaaatgatatgtgggcttttcacctagattacaggaaaattactctagcatcaatttttactttgaactttgaagaactttgaagagctatattgagtaaaacccaaagtgctctccgcatgaaaaattctagtttgcccctactgtaaaaattcacaatataaatataatcatgagggtattttctttcatagcatcagtcatttaaaaatacaaatctttgaagaaaaaaaaattgttgacgaagtaaaatagcattaaatcctgtaaaaagattacaggcacaaaa

SEQ ID NO: 312074 - DNA, 587 bp, Homo sapiens
ggtccagttctcaggtctggggcctggaggagaattgccaagggagatagagattgagcatagtcagggaagggtaatcccagcagataaagcaaactgtgtaaatacggggaaaagctagcaggaaacaggcaacaataaattcattgtttctggagacagtcttaatgggacatggcaaacagagagaggatactagtgagagagccaggtgctgcgttcctgatggccaaaaggtcttgttggagagtttgtattttatcttcagggatctggaaagccttgaaagatttcaatcaaaaagatatttaaaaacatgacagagtaagagaacactaagttcctcacttaaaagttatggcagacatttcaaaactgttcaccaatttccagttttcttcttccaaccccacaggaaaattgtacttccctgcctctttgaggttaacmaagttgcattgctttggaaaatgaaatatgatccacttttcggggtggaagcatttaattgtgacttctggaatctctaaccctttcttctgtcatggtgaaggtagacacctgtggtttatatggcggcattgctt

SEQ ID NO: 312075 - DNA, 600 bp, Homo sapiens
cttttggccactagatggacacagtgtactcagtgctaaactgctgacccaccaggttccttttgttaccagccaatactgacagagtgattgagttgtgaacttatgttatgaattgaaacttattttagagaaaaaatcttaaataacacattccatcttacttatagttcataggtcagagaaagactgtggtgctacaaaaacattagccaatatattatttgctttcacgctaagtgtaatgtgtgtaacatgctatctctttgaaattttttgccttaaaaatgctaatcagttggcacaaggcgatcatttacatagtcagaatagagcttttggtttagcattttatcttaaaataaggcagaaatggcattgctctggatgtcagtatggtgcattataayccaagtggtggaaaaataactgctaaatggcaaacacatagaaactgaattctgctagtcagcttccatttggtagagatatgtgtgcccttgggtagctgcaatgttagctattattaatagttcaaatctttgcttcataaaagttctgcatatagtgttgtacaaattgaagtgattcaaggaaatc

SEQ ID NO: 312076 - DNA, 618 bp, Homo sapiens
gacaggggccattttatttttctcttgtatctgttgaaatttcccactctgctgggtttttctaaggtcaaaataaattagaattaagtgattgactttttaatgttgtatagtggtgggaaaaggttaaaaagagttgcttttcgtagcaagatggtatgggccaatgacttctaccaacamctaattcggtgatataaatgatatactcttagcttgggcttttcctctgtgaacttctatggcaattgggtgtggacaaatgggtccttgaagatattttgaaaatttccccaacaagaacccagtgcttaatgaccctctactgccaggtaaccttcctaggttgctgcacctattccctctgcttttctttaaaatcacatacttttatatttcctaagagaaggtagaatgtaataggcatcattaatttttgcagaaagtctccaaaacatgttgttaaatcaccgctgtcttcttacctccaggcaaaaaggtaccaacttatttaaatatttgttcactcacattatgtgctcctgtgaattttctctgggtgtcactcttcacagtgagtatgagctctcatttaatctctttcaagggaaaatgagc

SEQ ID NO: 312077 - DNA, 543 bp, Homo sapiens
gccatggaatcttatataactattgaaaagaactcactaggtctctgtgcattcacaaaaataattttttcatgattgacttaatattaataaaggattatacatagtatgagcccactttattcaaaaaggaaggagaatccctatacatgtgtgagggtttgtgtattgtgtgtggtatatttatatttgtataaataaaaagtttgctgtcttttccctcccattaatcctaccaaggaagggaaaagacagcaatcttttttatcttcacatttctgtgtcatttggcatgttaaaaaaatagcatgtataattttgtaattgaaacctaaaatataagaaagaaaattattgaatagaaatggtaaatactatgcagccataaaaaagaatgagagcgtgtcttttgcagggacatggatggaactggaggctattatccttagcraactaacacaagaacagaaaaccaaatgccacatgatctcacttacaagtgggagataaatgatgagaactcatgaacacaaggaaggacac

SEQ ID NO: 312078 - DNA, 478 bp, Homo sapiens
tcagtagtgctaaggtggaaaaaaccttatgtgaatcaattaaatcagggagaacttcagagcttttttaagacctttatttatatctagatgattgatattttttaggtattcatgaaaatactttcttttacctttcttgtggtaascacaagataacactttcttgcctggttaaaaatggacaactgctacacttttaaaataatataaagcattcagtaattcaaaccatcctgtcttctgatttgtctgaattagtgtggctttactgcattttcagggcttattattctttcagtagggagactactaagatttcattaaagatagctgaataaatgatcaaatacattattgtagctccagactaggtaataaacattgagatatgcttttcaagtagtggtgaaaatactaggcaaaattacacatacacttacatatattaagcgaccatcctgttggcctggtatgt

SEQ ID NO: 312079 - DNA, 447 bp, Homo sapiens
aatccatgttgaggagacaactacaatatctattagttaggtaatgaggataatttccacttagtggaaggcattttttattttaaaatctcaaactttaatctcaagtaatagaaagtgtgcacttcagaatcagccagatgctacacatactagttgtgctacactggatagttcactcactgagccttttcttgcatctgtaaaatggggatagcacatagctcacaggattgttgcaaatatttcataaggtagtataagaaaaataactgataaaactactcagtaagtgttggtttcatttatgacaatccttgtctttacttcaagaatagtggagaatggaaaagaatcttccyaccctcctacttaaacagaagctaacaggtagaaatcaataattaaggccaaccaatgtaaaatttttttctacttatatcatga

SEQ ID NO: 312080 - DNA, 535 bp, Homo sapiens
aactcctctgtctctgcctacataaatgaaaccttaacttctctactttagaatactgactctgtatctttggagttgatgtttccgggtgggctatcctcaaattttgcacttgtataagctctttaaattagattcatacccttttgattattttrggttgacgtaaagagcttgttaaacaaaaaattggggaaggccatggttttgcactgaacttctgcactgggtcccagcagaccagaacaaactaatggagctgctcatactaaatgccacataatcaaactgaaacttcaaggaagcagataaattccaaagcagaccattgtttcctttgaaaacagatttcagtctacctgagtcagcacaataaggaagtcccctctactttaatccttacaaaaaagtaacccgatgttaaccttttttctctatttttctgtttcccaccttaaaaaaccccttgttctgctattgtccagtgggatttctcattctactttatagaatgaagggcttccctgatgaatgg

SEQ ID NO: 312081 - DNA, 504 bp, Homo sapiens
tgttcaccagtatagcaggcaggcttttaagaataataaatccataaattagattaaaatattggaccatattaatggttggtgctatcaggaatggagacttactaggaagagtttagcgcatgttggrggaaactcaggaaaaaaaaaaggccaaaagtaacacctgtgaagtaaggtgaaagcgcctggagctatttagccagaaatgagttgtggtataataactgtcatagatatgtatcagaacatgactaattgttgttcgtctttgctgaaatctgaaaagaaaaaagttcaagggtagtttaagtgatgtatgtttaatactgagaagaagagccatgacagctgatggacaggacataagaatgcttatcatgggatacatctcttgggaagagaaaaagggcttttacatgtagcagtcttccctgtcatgaatgaggacaggtcctgccttaaggcagagggtttactagttggcttccacaaggcccttct

SEQ ID NO: 312082 - DNA, 430 bp, Homo sapiens
gccttattagtagtaccctatgcacttggaggccaaatattgatttatcatgctcatttacactctaggcccttaccccaccacatgcacactgccagcatacatcgtctaggtcagaattattgaaaagcttagacttataaacaagaggactttaggtagcacaacgcatggaattaaataacaaggaataaaagagagagcgagaacatccttttcttttcaattacttttcaatgattctgattacatcaagaagaaaacttcaatttgtgctactctggttttaactctgctaatctttgatcatctcttttttaaggaagaaatcartcctcagagttacagccttctgcatgtggacaagtctagctataatttactaaaaatgttatgtttccattacaatttatttttacaatttgtttct

SEQ ID NO: 312083 - DNA, 592 bp, Homo sapiens
agatcaatataatttgagtaaaaccttgactctagctgctatcaacttcatgaaaagttcctctttgtcctgaattacatggttccttgcctcaaacaccatattttgcagtatgaatttgaccttgaaattttacaaaatcaatattctgtttattagatacgtagctttcccaaaagagtttttaaaaaaccctttattttttttaaaaaaaaagaggaaaaaaagaaaaaaawtattaacaaaaaataactagtagttgaaacacttcacttggctaacactactttgttcttaaatgtattactgcaaacacataacccacacatatatgtctgagggtaaagtgtttacaagaaagttctttgaagctattttgtggttagtgttctttttctctctctctttcaagttctccagaacagtttagaagcagatggcacctgtgtcttttttttttttttcccccaaaatctggagttatttttaaccttgtgacagtatttaaacatggaaaagtagtgtgctcttaaagcaatgatgttatcgtagccttcacttgattttaaggtttttacagtgagtatatttc

SEQ ID NO: 312084 - DNA, 604 bp, Homo sapiens
ctcctgtgacttctaagagttttctagttttagctcttatatttagatttattctctctgaattgacttttgtgtatggtatgataaaggggtccaaattcatttttttacatgtggatatccagttgtcccagcactatttgttcaaaagactattcttkctccattgaaagatcttgtttcctctgctgaaagtcatttgaccatgtatgtaagagtttatttctggactctgaattctcttccattgatctgtatgtctgttcttataccagtaccacactgtcttgattttgatagctttgtggtaagttttgaaatcaggaagtgtgacttctccaggttttttgttcttttttcaagattgttttggctcttctggtcccttgcatttccgtatggattttagaatgagcttatcaatttctgcaaaaaaaagcagctatgattttgatagggatttcattttgattttatagatcagtttgagtgttgtctctgatctatgaacatggggtgtttttccatttgtttagatcttccttaatttttcaacaatattctgtagttgtttgtatataagtcttacacttctttgggtaca

SEQ ID NO: 312085 - DNA, 557 bp, Homo sapiens
gtttcccataatggaaatatctgccataattatgaactcctacaaggtagaaaccattgttgtctaacctactttgtgactgtgccatctactagaaaagaaactgggttcaggacagcctgtattaatttctatcatagcaattatttcccatattataattgcctgtctacttgcctgttcattccctcattcccaacaactctattagaaaataagcttcttttctactagagtgaattaattattaaagtggcatattaaaatttccctctaaattttttgttatttttatagttataatagttatcacatagtgttttcggtcatcgtgttatctgatgcatacatgtatctgcttattataccttcttcaaaaattgtgtcttttcttttatacaatggctcattttgtctgagcagtgattgcattttacaattttatcttgttcaatgtatctatttccctctgattctttcttrttacattttcctggtaaggtctctgcctttttaatgtcttttttagtttatcacattagcgatatttcttacaa

SEQ ID NO: 312086 - DNA, 678 bp, Homo sapiens
ctatttattttattgtttccttccttacttttacttgtttctcttggtatgatcaaaccactcttcttctcttgtttacacttgataatttggaaatttaactattattgaactttatccattacactgggggttaccatctcatttcaagtacaaattctcacttgtgatataaaagcaacttattaactgttccagttgtggacactgctagttacctaactgattctcctttttttctctattaatcagaatgcagatatttcaggaggcaggaggtgttgccaacttgattgcccttgctttcttttgattagaagtggcccatggaccactccctggctaatgatatggaagcagaaatttattgggtacrgctctagggaaaacaactctagactcagctggcaatgtatttttgccttttgctcttcctctcctttttgcctaaaatacagatatcatgcctaaagggagtgcagccaggtgatgatgacaaaagcaacaagaaagaggactgagtgggaatgcaggagattaggcccctcttagcaccgtggaactgcactggatggcctgcttccagactcctgttatgtgagaaacacaagcccctttttagtcagatttcttgttttgtgtagctgaaggtaaccctaatggaaacactccccactg

SEQ ID NO: 312087 - DNA, 604 bp, Homo sapiens
ctcctgtgacttctaagagttttctagttttagctcttatatttagatttattctctctgaattgacttttgtgtatggtatgataaaggggtccaaattcatttttttacatgtggatatccagttgtcccagcactatttgttcaaaagactattctttctccattgaaagatcttgtttcctctgctgaaagtcatttgaccatgtatgtaagagtttatttctggactctgaattctcttccattgatctgtatgtctgttcttataccagtaccacactgtcttgattttgatagctttgtggtaagttttgaaatcaggaagtgtgacttctccaggttttttgttcttttttcaagattgttttggctcttctggtcccttgcatttccgtrtggattttagaatgagcttatcaatttctgcaaaaaaaagcagctatgattttgatagggatttcattttgattttatagatcagtttgagtgttgtctctgatctatgaacatggggtgtttttccatttgtttagatcttccttaatttttcaacaatattctgtagttgtttgtatataagtcttacacttctttgggtaca

SEQ ID NO: 312088 - DNA, 553 bp, Homo sapiens
agtctgaataaaattccactgtatgtatacaacacattttgtgtactcagttgtctcttaatggacattttggttatttccacattttgcttattgagaatgttgcttctatgaccactgttgtttaagtatctgttcaagttcctgcttccatttcttgggagtatagacctagatgtggaattgctgggttccatggtaattctrtgttgaactttttgaaataaattaccaaaccactttcacaatggctgcaccattttatatacccaccagaatatttttgatccattttgagttaacttttgtatgtgttgtaaggtaacttcattattttgcaattgggcattgaagtttcccagcactatttgttgacgactgacctttctccatggaatggttttggcacctatacttaaatcaattgacaatatatgggagagtttcttccaggactctctattctattgcaatgatctgtctgtctttatgccaataccacactgtttctattactgtagttttgtagtaagttttgaggtcaggaagtgtg

SEQ ID NO: 312089 - DNA, 553 bp, Homo sapiens
agtctgaataaaattccactgtatgtatacaacacattttgtgtactcagttgtctcttaatggacattttggttatttccacattttgcttattgagaatgttgcttctatgaccactgttgtttaagtatctgttcaagttcctgcttccatttcttgggagtatagacctagatgtggaattgctgggttccatggtaattctatgttgaactttttgaaataaattaccaaaccactttcacaatggctgcaccattttatatacccaccagaatatttttgatccattttgagttaacttttgtatgtgttgtaaggtaacttcattattttgcaattgggcrttgaagtttcccagcactatttgttgacgactgacctttctccatggaatggttttggcacctatacttaaatcaattgacaatatatgggagagtttcttccaggactctctattctattgcaatgatctgtctgtctttatgccaataccacactgtttctattactgtagttttgtagtaagttttgaggtcaggaagtgtg

SEQ ID NO: 312090 - DNA, 607 bp, Homo sapiens
atatctcattgtggttttaatttgcatttccttgatgattagtgatattagtgccctttaaaaagcaactccagtagggttctccagaagagtcccattctccatgtgaggccccatcaagaagacagccatctatgaagcctcaccagacaccaaatttgttggtgacttgatcttgcattcccagyctccagagctctaagagataatatctattgtttataacccacccagtttatggcattttgttacagcagcctgaatgggctaagacagtatgtgtgtaaattacctttttagcactgtgtttgctgcaatctataagttttaatatgctgtgttttttatttcatttgtctcaagataatttctaaatttcctcgtgacttcttctttgattcattggttagttaagagtatgttgtttaattttgcaaagattgggaaaatttgtgattttttaaaagttttccttctgttaattcctttcatgtgacttgataagatgctttgtataatttctgtcttttaaagttaattaatacttctcttctggcctaatatatggtccatccttgagaatgttccatgtgcacttgagaaaaat

SEQ ID NO: 312091 - DNA, 539 bp, Homo sapiens
actccaggcaaaagccacagcaagtgcaaagcctgaggctgacattttcaaggcataggtgggggactgggatggcagattactgagtgagaagyatgataaagtgtgaggtcagagacacaagcaggagacatgccattaaggatctttatggacataataaggagtttggattctattctaagtgcaatgggtgggtgcatggaagtctcgtgaagattttaggaggaaagagacatgatcctattaagtaactcattttcttggtgacttgattttgaaataaagtaatacaggaaagtaaaacattcagaaaaagaggtcagatttgcatttagaaagcccactctggcagttctgtggagaagatattttaaggaggcaagaatggatgtggggatgccagtcgggaggctactgcaatagactaaacaagtaatgacggtggctcagacaagagttatggcactggagatggaggtaagcagacggatatgggatagatctttaagacaaccttaggtggacttgttgatggt

SEQ ID NO: 312092 - DNA, 582 bp, Homo sapiens
gccgactgagtttgaatcctggctctgccatttgctagctgtatattaccaagcaaattacctaacctctctgagtctcagtttccttacctgcaaaatgggcatgattagagtagtactcatctcctagggttgctctgagtactgaatggttcatatttgtaactcattgagagcattgcctggaacatagcaagtgctattyaaatgttcattagattacttaatgaattcattaaattacttaagattcattacttaaattacttaagattaaatgacttaagattcattgtattttactaatttttcaaataaaaaaatgctggtccacatgtccgaatcacccatcaagtcagtgtgatgcctaactccgggagagccagttttcctctagtgttgcaaactcccagtttcctgtccgtgccttatgtttcttttgcattcccagaagatgaagaaacagcaatcatgacttttttccttttgtcttgaacccctttgcagatcagcatccccagaacacacctgtgttaagtcaaagaccttggacccaatggtcatcttcttcaccagtgggac

SEQ ID NO: 312093 - DNA, 582 bp, Homo sapiens
tcaggactgtacctagggtctagtcttctcggtccaagctgattctcccaggctagcaaaacatttccaacctgctagttggtaaagcccatctgatcattcctccagaacatcaaactgcacttcccatatctcattacctacctctatatcaatgcctcctcctgtgtcaccatcattattttctgtaccacattctgcacctgagacttaaagcaccacaaacaagactgaccacccttcccatcctcatgcctaattcttccgctgctatagagagtgtcccaaaaggtctttatgtattttaagccttagtaaatgcttaaagtttaaaattctacaaatttaccaaaaaagcatttgcattactatttcccacttactatttttatgaattattcataataatttttaatttagatattktattagtccatcttattgaagactaaaacaaaaagtcttttaaatttttgattcagagggtgcatgtgcagattcgttacatgagtatattgcatgattctgaggtttggagtaagaatattctcatgacccagctagtgcatatagtacccaata

SEQ ID NO: 312094 - DNA, 582 bp, Homo sapiens
ttttgatgtgctgcaggactcagtttactagtattttgttgagaatttttgcatctacgtttatcagggatattggcctggagttttcttttgtcattgtatctctgccatattttggtgccaaaagyattctggcttcatagaatggttagaaaggagtcccttctccttaatcttttggattagttacagagggattggtaccagttctttgtatatctgttagaattcagctgtgattctatcttgtccagggctttttgggattagtaattactgattcaatttcagaacttgtaatttgtctgttcaggttttcactttctttctggttcaatgttgagaggctgtgtgttcccaagaatttatccatttcctgtagattttctaattcaggtgcatcagtgtgttcataatagtctctgagaatcttttatatttctgtgggaccatttatagtgtcatctatgtcatttccgattgggcttattttgatcttctcatttttttctttgttaatctagctagcagtctatcaatattgtttattcttttgaaaaacaagctctcagtttcattgat

SEQ ID NO: 312095 - DNA, 515 bp, Homo sapiens
aaggggttttatgccctgggcttagattatggtgcggcagggcagccttccaccctttggcacagagattggtgtcccaaaggccacaagggggtttaggccctggacccaggacatgttccaagactcttttacatcatgacagagaagccagtcctgcctcagctcttctaccaacacagcctaaggcaattgtctgtcaccaagtcagcaatccaactcactgtgcctggggtgaggttactgacacagacattgctggagtgggcctgagactttcacagacatgtaaagacacctgttggggtaggggcagtgggccaggggtgagagtaggacaaaaattttaaaagcrtatataaatgtgagatattaaagagatagaggctagagattgaaagctgattgggtctttatgaagggagggactggaagtagagctagatttgtccacaaatgacaattatatttcatcatgattctaaatggaatatatggacgttcccattttacag

SEQ ID NO: 312096 - DNA, 514 bp, Homo sapiens
atttctgtagttttcgctttgaggctattgatgtttaatgctacatagaatcctaggacatgcaccctggtgtgtacaagcatgcatttctgtagagtttttcaaggagaggaattgcgggtcacactgatacaacacaataccayactatcttccaaaccaatttatgcttctttatataagcagggcaggagaatttccattgttccatgttcctgccaacatttggtattgtcagacttattaatttttgccaggctggtgggtgtgtggtgttatcttaatacaactttatttttgcatcttcctatgtttgagaattaattttaagctaaaccaaaacacactctttgaaacttatggatatttatgtatcttttagggactctgaaattgaaatggctagttcaaaaatcagagctaatatgttttagacataaaagttaaaatatcagagtttaatgattgcccttacagagctaactctgaattataatttgattttactcatgaa

SEQ ID NO: 312097 - DNA, 514 bp, Homo sapiens
atttctgtagttttcgctttgaggctattgatgtttaatgctacatagaatcctaggacatgcaccctggtgtgtacaagcatgcatttctgtagagtttttcaaggagaggaattgcgggtcacactgatacaacacaataccatactatcttccaaaccaatttatgcttctttatataagcagggcaggagaatttccattgttccatgttcctgccaacatttggtattgtcagacttattaatttttgccaggctggtgggtgtgtggtgttatcttaatacaactttatttttgcatctycctatgtttgagaattaattttaagctaaaccaaaacacactctttgaaacttatggatatttatgtatcttttagggactctgaaattgaaatggctagttcaaaaatcagagctaatatgttttagacataaaagttaaaatatcagagtttaatgattgcccttacagagctaactctgaattataatttgattttactcatgaa

SEQ ID NO: 312098 - DNA, 609 bp, Homo sapiens
aatcaccgggttgtatggtagttctactttaagttttctgaggaacttaatttacattcctaccaacaakgtataaggattgccttttctctgcatcctctctaatgcttatacttcatcttttaaataaaagccatcctaacaggagtaaggttatcttatcatggttttaatttatatttccctaattagtgagtgatactgagcattttaaaatgtatctattgaccatttgtgtgtcttcttttgagaaatgtctgttcaggacctttgtcgagttttaactggattgttttcttactattgagttgtttgagtttcttatatattttggatatagaccccttattaggtatatggtttgcaaatattccctcccattctgtgggttgtgtctttactctgttggctatttcctttgctgtgcagaaactttttgtctgaagttatcccatttatctatttgtgcttttgttgcttgtgacacaaaaatagttagaataggccacaaaaaataatgaaagaatgaataagacttagtatttgctagcacaatgggtgactctagtcaaaaataatttaattgtacatttaaaaagaagagtataa

SEQ ID NO: 312099 - DNA, 621 bp, Homo sapiens
tgctgttttgattaaaatcactttataatatgttttgaaatcaggatgtatgacaccctcagctttgttctttttgctcaagattgttttgactatttggggtcttttgtgattacacgcaaatttaaccattgcttttttctgtgtctgtaaaaaaatcacattagaattttgatagagattgcattgaatctgtagatcactttaataatatagacattttcataatattaatttttccaatccatgaacacaggctatctttccatttatttatgttttcttcatgttgcttcattttaaagaaatagataactgcctatggcctcaaggagctcgattccttgttgagactggtcagacatacatggaacttacttattgttagagaatatggaagtttgggcataagtggtttttcarttgagactatataagacatttgtctatacaaatcttctgaaattgcaattccagtgttaataggagagataattagttaagatcaacaaaagcttttttttttttcttgattggagaaaggccaggaaaagagccctccttgagcataactgagtctcaatgaatttgggctaaagtgagataggaattgagtggaag

SEQ ID NO: 312100 - DNA, 566 bp, Homo sapiens
gagattgtccagaccatctctgcagctctatgtgatggtaaatgacacatttgctgccttgtgttttacagaccatctgcattgctatgaggttgtgcaggcaatgctgtccacctgagattgtatgggctatgtctgccacttctggacattatatgaatcattcctgcagctctaacatgctacacaggccacctagtttccctggtgaggctgcacaggccacttcataggttgcccagacttctttgtggctttatatagtttgaagtccacctccaccatcttgagagattgcctagaccacatctgcaacccatcaaggctttatgggatatattcgtcacctcccagagttgtgtgggtcatcaatgaaaccatctaagtttccaagggccacctctgcccctcccaattttgcacagccatctctgaagcagcatgaggtatgtgggtgcttcagagacagtggaatygtcctccatcccccacgtatatatttaacaagccagtggacggacatgctttggtcatctttggggtgaaattggactcctgccggatcc

SEQ ID NO: 312101 - DNA, 552 bp, Homo sapiens
tgtgcaatttctttgcagtttatgaataatttttgtccacaggktttgcagcaaatattagttacagtgtaatcagatggatagagccagggttagaaaaacaaatcctttcaattattttcacagcttcatcacagaccttgtgatttttcagcaatctgtgagcctgtatgtctaaaggtcaaactattctgaagcaaagaaataggaaattcacaaattcagaaactgtttatgcattatagttgcctcccaaatctaattgcaggactagatgacttcttcccaaatgcacacagtccttacttttttaatgtgtggtgtattcctcagctcaggctgccataacgaataccgtagactggatagcttcgacaagagaaatgcatttcctccgagttcagggggctggaagtctaaggtcagggtgccagcgtggtcaggttttggggaggttcttgcagacagccaccttctctctatgaccctgcatggctttcctccaagtctgtgcagggagagtgcaaaagatctctctctcttcctctgctt

SEQ ID NO: 312102 - DNA, 598 bp, Homo sapiens
cactctgttggtttgaagaaatggtcaatgacaggcatccaccattatgatgtcatacagagtaatttcactgccttaaaaatcccctatgctccacccattcatgccatcccycaccccaatacctggcaaccgctgacctttttactgtcttcatagttttgctgttcccagaatgtcatatagttggaaatgtacagtaggcagctccttcgggctgacttctttcactcagcaatatgcatttgaggttcccccatgtcttttcatggtttgatagctgatttatttttagcgtggaataatattatattgtctggatataccacagtttatttgtccattaccttctgaagacatctcgattgcttccagttttgatatacgaataaagctgctataagcatctatatatttgtgtccatgtgaacacaagtttacaactcttttgggtaaatacaagagagcacaattgctggatcctttggtaaaagcatgcttagttttgtgagaaaccaccacactgtctacctaagtggctgtaccattttgcattcccatcagcaccgaatgggggttcctattgcttcacatcctc

SEQ ID NO: 312103 - DNA, 598 bp, Homo sapiens
cactctgttggtttgaagaaatggtcaatgacaggcatccaccattatgatgtcatacagagtaatttcactgccttaaaaatcccctatgctccacccattcatgccatccctcaccccaatacctggcaaccgctgacctttttactgtcttcatagttttgctgttcccagaatgtcatatagttggaaatgtacagtaggcagctccttcgggctgacttctttcactcagcaatatgcatttgaggttcccccaygtcttttcatggtttgatagctgatttatttttagcgtggaataatattatattgtctggatataccacagtttatttgtccattaccttctgaagacatctcgattgcttccagttttgatatacgaataaagctgctataagcatctatatatttgtgtccatgtgaacacaagtttacaactcttttgggtaaatacaagagagcacaattgctggatcctttggtaaaagcatgcttagttttgtgagaaaccaccacactgtctacctaagtggctgtaccattttgcattcccatcagcaccgaatgggggttcctattgcttcacatcctc

SEQ ID NO: 312104 - DNA, 571 bp, Homo sapiens
aaatagcttcactgaaaacacagaagggcttgaattcctatcatgatgctgagatctgaccctttagaaatcagtcgaagcaatgcaggaacagaaagtgaagtcccagagaaacgaatgcagcctcaaggagaggccagaatgttatacaggacacaacacttaaaaaagaaatctgamagccctggggaagcggccagacagctgagaccaaaaactttgctgcaacctacgtgggtttccccacagactaaagcagtgaactccgtggcagctcagctctgctgctgtcctggtgttgcgtctccagcagcttcccgggacaacacagccccacatctaaagtcacccagggagtattgttgagattcaagatcttcaaagacagcctcattcagtcgttccttttcccaatggccagagatccttgctgagggattcaaactacttaatgccgtgggttctggggtcagaatatttacatcccagcttcatcctttatctctgtatgagacaagttatccaatttttcttcgcctctgtttcatcagcttaaaatgatgacaatagt

SEQ ID NO: 312105 - DNA, 571 bp, Homo sapiens
aaatagcttcactgaaaacacagaagggcttgaattcctatcatgatgctgagatctgaccctttagaaatcagtcgaagcaatgcaggaacagaaagtgaagtcccagagaaacgaatgcagcctcaaggagaggccagaatgttatacaggacacaacacttaaaaaagaaatctgacagccctggggaagcrgccagacagctgagaccaaaaactttgctgcaacctacgtgggtttccccacagactaaagcagtgaactccgtggcagctcagctctgctgctgtcctggtgttgcgtctccagcagcttcccgggacaacacagccccacatctaaagtcacccagggagtattgttgagattcaagatcttcaaagacagcctcattcagtcgttccttttcccaatggccagagatccttgctgagggattcaaactacttaatgccgtgggttctggggtcagaatatttacatcccagcttcatcctttatctctgtatgagacaagttatccaatttttcttcgcctctgtttcatcagcttaaaatgatgacaatagt

SEQ ID NO: 312106 - DNA, 571 bp, Homo sapiens
aaatagcttcactgaaaacacagaagggcttgaattcctatcatgatgctgagatctgaccctttagaaatcagtcgaagcaatgcaggaacagaaagtgaagtcccagagaaacgaatgcagcctcaaggagaggccagaatgttatacaggacacaacacttaaaaaagaaatctgacagccctggggaagcggccagacagctgagaccaaaaactttgctgcaacctacgtgggtttcccmacagactaaagcagtgaactccgtggcagctcagctctgctgctgtcctggtgttgcgtctccagcagcttcccgggacaacacagccccacatctaaagtcacccagggagtattgttgagattcaagatcttcaaagacagcctcattcagtcgttccttttcccaatggccagagatccttgctgagggattcaaactacttaatgccgtgggttctggggtcagaatatttacatcccagcttcatcctttatctctgtatgagacaagttatccaatttttcttcgcctctgtttcatcagcttaaaatgatgacaatagt

SEQ ID NO: 312107 - DNA, 608 bp, Homo sapiens
gctcacactgtcacccatactatatcctcacctccaaataaatagcttcactgaaaacacagaagggcttgaattcctatcatgatgctgagatctgaccctttagaaatcagtcgaagcaatgcaggaacagaaagtgaagtcccagagaaacgaatgcagcctcaaggagaggccagaatgttatacaggacacaacacttaaaaaagaaatctgacagccctggggaagcggccagacagctgagaccaaaaactttgctgcaacctacgtgggtttccccacagactaaagcagtgaactccgtggcagctcagctctgctgctgtcctggtgttgcgtctccagcagcttcccgggacaacacagccccacatctaaagtcacccagggagtattgttgagaytcaagatcttcaaagacagcctcattcagtcgttccttttcccaatggccagagatccttgctgagggattcaaactacttaatgccgtgggttctggggtcagaatatttacatcccagcttcatcctttatctctgtatgagacaagttatccaatttttcttcgcctctgtttcatcagcttaaaatgatgacaata

SEQ ID NO: 312108 - DNA, 547 bp, Homo sapiens
agtggaaggttagcactggttttcaacattctgatcaggggaatctggaggtgaaatatgccacagtgcaaagaaaacaaaattttgtacagaatgtagtagccaggtgtatccttaggccacattagctgatgccagggaagcccaaaaccctaaactggttcatttcctgttacccccaccatcttctccttcatgcacaacacaaaatggcatcttaatccctgggaagggatctgtcacttgtgaaatgctttatgaaactgttagaaatatagctgtaaggatgtaggcaattgtttagcctctcaagtcctcaaaataatctcaaatgaaataatctcaaaggtattttgcaactctaactattcacaattaattctatggttatatataaatgactatggtcatgcatgcttattttgttyaaatctgtcaaaaaataacaaatatttatttgatttgaacaaggattaattcaatttcattgcaatacatggaagaattctttgtgatgagcagttaaaaattttacctcagcgtggaa

SEQ ID NO: 312109 - DNA, 608 bp, Homo sapiens
cagcagtttcttccatctcaattgcaaagagctgaggttagagacacktccattttgggaatataccttgagtaaaagtgatgtatccttatgtgacacatagagatgttgtatttgtatagactgttatagcttcagccacatttggaaagaaacacgtgataaacaccatgatattgaattttttgtgcaattagttttccatgatgagaaaagtcttgtatgccaatcaatattgagcatgtaggaaatatagcacaacagatactattcctacgtatcattcatattatacaactcccatagagtagctataaagagcatcaaacagacagcatatgctgaagtgcctcaggaactgaaaaacagacaacaaacgtgagttctgtcagagagtgcttaggagtggggaaaatccctatgccttgaaagcgcagcacagtcgtgatatggcaaagctagggtagcccttccatttgcatatattattctgttgatgccacatatgtctcacgtcctattttcaaagtccccagagaaggaaataacctcctatatacttagcaacacccaacgctatgagccttgtggcaaccacacgaaaaatc

SEQ ID NO: 312110 - DNA, 545 bp, Homo sapiens
taacctgatgtgatgacttaagactgtcagaatggagaattaattggagtgagcctagcctgggagagagaaacaaatgaaccataaggacaagtcataagcaggtgtgattaggatggggcctgacaagcggtgtgaggtcatgaaggagctgtgggtcaagtaggttgtgaggcagctgtggaaagagggagacaggtttgagagaggctgagaaagcagaatctacaaggttcatccatgcactggatttggggatcccccaaaaaatgagggaagctattttgaatggggaggggccagcctatccaagcaccacatctgccttccaggactcagcgttgacagtggcgggtccagctttccccagcagccgtacaaagactgttctagcatcattttctccttcagagcctgagcctcagctctctgtcaccgaygtcacttaagggcttttttttaaatcaaggttcccggaacccactcattatctaaaaatggacccattgtacaaagacagacaaaagtgtttgccaaaagcatga

SEQ ID NO: 312111 - DNA, 562 bp, Homo sapiens
cctgtcaccttgcaagggatggcatggggctttccaatcttgttcccccagtagcctctgtcccccagtagcacagggacaatggactgcttggccaggatcatggccccacggatggcagtggccacctccttggagcacttaacacccagaccgacgtggccattgtagtccccaatgtagtcaaggcaacaaacgccttgaacctggtgcactggccagcgtggrtctgcttctgcactggcgtaacctttaaaacctcatccttgagagaggcccccaggaaaaagtcaatgatctcagactccttgatgggcagggagaagagatagatctccagggatttcatcttcatgtccttgaccagacggcccagcttggtgatgggcatccaactccttgtcctcaacttgcctccgcaagctccgtggctgcgaccctggccctggatgccactgccgaagcctccccggaagccactgtggttccccatcccagggcccttggggcctccggcccgacctgtccccgtgctgcactggcatcatcgtcactcggtgtt

SEQ ID NO: 312112 - DNA, 458 bp, Homo sapiens
gcccaattcattttcatttctcctgtctgctgcccacaccttactaagtcatctgccaagcagtgttggtgctttacaaaattattgttttgtacgaagaaaatgaattgtaacccagtgtatgctatatttaagtataatatcagctacttgtgtacttttcttattctaaatctattttcataacttctctcctcactaagaaggyctttttgtgaaatgcaactgaacattttttcttcaaaatactcatcttcctccagagtgatgtgcaccaatccatagaatttaaaattatgttttaaaaatactttcatttctagatatagcagatgtttttgttgtgattttagcatagatttttaaaatagaacaaatgtgctcttaaggaatatttagctacataatttcacatatggattatattaacattgagaaaatgtgtcatttagtaaagt

SEQ ID NO: 312113 - DNA, 564 bp, Homo sapiens
tgatttttctaaacgtgttttctaatactttttataaattatatttcagtctaaaacaacagtgttcatgtgttcacaacagggacaaaacaatcaagttagtcctaaagaaaatatgacagattttcccccagagctttactgaggtgtagttaacaaataaaaatatgacagtttaaaaatagaatcggtaacttgctttcttttattattacattgggaattttatatgtcttaggtcagcrcaacttgggcattttctaccaaagtactatggaaataataaatcaggccaagtgcggtggcacacacctgtaatcccagcactttgggaggctgaggcagcaggatagcttgaggccaggagttcaagaccagcctgtgcaacatagtgagaccctatcttggcagaaaaaacaaacaaacattagctgagagtggtggtgtgtgcctgtagtcttagctacttgggaggctgaaatgggagaatcgcttgagcccaagaatttgaggctgcagtgagctataactgggctactgcacttcagcctgggtgacagagcc

SEQ ID NO: 312114 - DNA, 595 bp, Homo sapiens
taatggcgaccatgtagtctgggaccagatttttatggccgtatcaatcaacttaaggagtttgaactttagtccttggatactggagagttaatagasaactcaagaagggtggaaggggacatgggattgaatagatctgcattttagaagctcattcacattctctaaaatttcattactggtatcattttggaaaaataattcaaaaagtgagaagggaaatttatgttgagtccatatcactcagactaggtagtaggatggctataatcacgtttggtatgtttaaatacttagcttggttcgaaatgtatatagacttcctaatatttacggttgctagatttggtaaataaaaacagagagtgtccatgcaaatatttgagacatatttataagaaaatctttgtttatctgaaattcaaatttacctgggcacattttatctagaaaccctacctgaattgtcaattggatgtgatttctccctattttttcttccctttcctatgagcattttaattttcagcatatggtcatgctttacattttgtatattcagcaaaccctaacaaaaactacctacagtgga

SEQ ID NO: 312115 - DNA, 591 bp, Homo sapiens
gtcttttaaagatgtgcccatctttcctaatgcaggggaactgcaaatagttatttcctttgtcaaaagacactttgcaggtgtcgttaaggctaaggggccttgagataagaagaccatcctatagtatccaggtggaaccaacctaagcacctgggtatttaaaatcagagaaccattcccacctgaattcaattcagaggagaggggatgtgattatgggagaatagtcaaagagatgcaaggttgctgatgtaagagggccaaaagctaagaaatgcaggcagcctctagaagatggaaaggcaataaaacacattcttccccctagcctccagaagggaatgcagccctgctgacactttgatattaatccagtgagtactgtgccaaacgtcaagcctatagaactgtagtaaaataaatgtttgttattagccagtmagttcatgataatttgatatgacagcattagaaaactaatacttgggaatgttggtaaattcagactagacatggtagatttttaaaatatacatattttatgtggtaacacaagtttcaaatatgttatgatactcagaatgttcc

SEQ ID NO: 312116 - DNA, 613 bp, Homo sapiens
cagatgacgtaatttggaggaatgaatgaaatatacagtgaaacacaagagaggaatagacagtctgtaatgttatgctttcattcttttccatatgttgtttgaaatgctctactcttccatctactgttggttcatacataaactcttactcatccttaaaatcttkcttagacatttgcctttttgtctgtttgcgtctaactttccatttataaaatagagacaacagactagactacgtgattgatatgagctgtgacttaaaaaaagatatttacataaccactttgagttatttggggaaaatatggtacacacaaacaggttttattagatttccagtgacatggatggagaaattaaaaggttgaatcttcagggattgtatgttggggtatactacggtaaaaggaccttcataatttccaataattacattatcatgcgtattaactttcaaaaaaaggggtttatttcctgtattgaaaaggatttctacattaaaaaaatcaattttgatttgatttttattagctcaattttttgagaaaaatattttacaaagcccctgtgtaaatgatataaatttaaaatatatgtctatgataag

SEQ ID NO: 312117 - DNA, 546 bp, Homo sapiens
tgatatcaggatagtttttctgtcttagtccagtaactatgcaagggaaaaagtctcctctgaagactctgaaccagagtattactctataagagttcaggattcaattttcacatcatcttcaggtgtcaagaatgcaaagataatccttagtattacaaagaagttctgaaaatccagtattttgaaaaaaacggtagttctggtctcataataagrctgtcttagtttgggtactcctgaaatagtttctgagttggtaagtatttgagtgagtaggggagtatgtgagtcaggagagtaaaggcagccaataaagggtacattatccagtgtgttacccctgagggtaaggagattttatccccatgggggaaaactgggagatgataccagtcactaacctcagaactattccatccaagacgcaagagagctatggtatttacacaccaactctgatctttcatttgttgaggtagggaacattaattaccttgcacttttggccttctgtgtacctggtaagagtggtggccagacaaa

SEQ ID NO: 312118 - DNA, 585 bp, Homo sapiens
gttgttgccatgctcagacagacttttcatctattcttctgagggaagctccaagagattccctagggaactttatctgtatcatataacaacattttccctatgcagctccacccctcaccttcccttaatgtctgcatcccaggtccttacatctctaccctatgagtagagtatttaagcatcaaccatctggtccctatttgaattcatattttgaactcaaaacttggcatgaagctatatgagcatcagtaaaagcaacaaatatttactgaccaccagctctgtactaaataccaggctagacttaggccagtcactctgccattttgataccatttcatggagrgagtaagaagggaaggaaggaagggagggagagagaagagaagagaagagaaggaaggaaaagaaagaaagaaagagaaagaaaaaagaagaaaaaagaaaaagaaagaaagaaaggaagaaagaaagaaagaaagaaagaaagaaagaaagaaagaaagaaagaaagaaagaaagagaaggagggaaggaaggaaggaagaaaaactatagatataaagtctaaaatacata

SEQ ID NO: 312119 - DNA, 559 bp, Homo sapiens
tgctatgtgaaataagccagacacaaaaggacaaatatcttataattccacttatatgagatacccaaaataatcaagttcataaaggcagaaagtagaatagcagttattagggtctggggcagggagaaacaargactttttgtttaacaggtacagagtttcagtttgggatcctgaaaagtttctggagatagatagtggtggttgcacaacaatgtgaatgttcttaatgccactggactgtacccaaaatggttaagatggtcaattgtatattatgtgtacttcactaaaataaaaaaaatgaccagtgactctgttgggcaaatttaccctatttcttttatcagttataaagtagccattgtaaccacttagttttaataatagtttattctccacctgatgactaccaagagcgcatctcaagttgaacaaattgaacttatcacttgttgcgctgagtgagaatgtgcatcatgggaacctgggacaccttagaaagaggatgttagaaagaacttaaaatatttgagcttgccttaggtgatttgga

SEQ ID NO: 312120 - DNA, 574 bp, Homo sapiens
atgtgcaagcttgaacaagttgcttaacctctctgtgctttagttgcgtcaactccatcatagtaacamtaatagcacctatcccacagggtagttattaattgaatgagttttatttgtaaagcacttctaacagttcctagtatatagaaaatgctatataactgtatgtaaatatagtaaatacatacattttattaatttgctttccatgagagaggaatgagttcaagaaaaggggaattgaatagttgcttggaaccctgatagggttagattataaagccaaaatagtaaaatcataaagaattgacctgtctgtagttttccagggttaaatatgaaacagcactaattcaatttattgaaaataggtgtagcttgaaggaacaaaaatttccacatcttcttctgagatcagggcttaatgaggccgagaatatttaggaaagatacaaaatgcttcacaagcatggttggagtttcgcttgcctctctacttgggccttcatctgtccagaatcaacttaaaaaacctggaagggaattctgtgacccagtgtaagcactcatg

SEQ ID NO: 312121 - DNA, 577 bp, Homo sapiens
agaagctagttagggaatgagaagaatggaggagacagaagaccaagcagaggtgagaggccttccatcttggagacaagagagcctttttccaactctctaatgtccacgacaagggacccagctttttctggtttcttgccctcagatactgggaaattgtttaaatagactttacaatccaggataaattacgacttaaagaagcctcccatcttgaataatattactgtcctccctctccctactacgtaattcaaaataagcttaatgcacaaattgcaattatcatacttgtgctaatcgagcttctttctaaatgcactatttgtgaaattcaggtaagtttatygaagctttaaaaaccctgtatttctttggctatcactgtttttctgctgtccagcatgggtttattcagcagataaaggaaagtaagaaggggatgaaagtggatggggggatggagaagatgtactgcattgaggttgttcattccttatttgatagggtcttaaaacgtttagtgataaactgcatgttattcttttaatgtcttccctaaaagttatgttaa

SEQ ID NO: 312122 - DNA, 553 bp, Homo sapiens
caacaacagtgtgtaaagggccaaatccagagcttgaagaaatcaaaaactacttcatacatctatgggctactggacaaaagatataaacctacttcagaataggtttttccaaagaaaatttaaaagtattgaaagccaaaataattatctatagaattcaactaaagttcagttatttaatttcaygtattctatacttttagatacttaatatagtcaaggaaaacatatatacttaaatgaaagtacccccttcattctttctaaaagctcttttacttaagcttcacctgaacaagactgtcacagaatctcatggggttagagaggagaccaatgtaaaatctgaacttgtgattgaaatgttagctcccatgcccattctcacattaaagactctgtacttatttcctcttatcttttatttaataaaattatcctagttggaatgtaaagatatgagtaaatcagaagacatcacacctgtctttggggagcttacaatctaaacacagtgacaagacatcatacatgaaacaacagagagatg

SEQ ID NO: 312123 - DNA, 572 bp, Homo sapiens
cttagcaggtgcacaacaacagtgtgtaaagggccaaatccagagcttgaagaaatcaaaaactacttcatacatctatgggctactggacaaaagatataaacctacttcagaataggtttttccaaagaaaatttaaaagtattgaaagccaaaataattatctatagaattcaactaaagttcagttatttaatttcatrtattctatacttttagatacttaatatagtcaaggaaaacatatatacttaaatgaaagtacccccttcattctttctaaaagctcttttacttaagcttcacctgaacaagactgtcacagaatctcatggggttagagaggagaccaatgtaaaatctgaacttgtgattgaaatgttagctcccatgcccattctcacattaaagactctgtacttatttcctcttatcttttatttaataaaattatcctagttggaatgtaaagatatgagtaaatcagaagacatcacacctgtctttggggagcttacaatctaaacacagtgacaagacatcatacatgaaacaacagagagatggaatac

SEQ ID NO: 312124 - DNA, 509 bp, Homo sapiens
gtatgggaagaaattggattataaggtgcagaggctggaaaaagggaggctaactactgtccatcaacatgtgataaatactgctagctattgaccaaaatccaggtttccttcttcctggacatggactatagtacattccccagcccctcttggagccatgtgtaatgcttatcattggaatatgacaaaagtaatgcctgcaatttcttcctcacttacttgggaaaaaattcctatccctgggctttggtttgttctgccttaagttgtttggaaaggtgaccactagcgaaattgttactgaatccctgaatgcctaagtagagaaaaactgccaccaacttagaacagccccgacagacttatgtgagaagaaaattaaattgctcacttttaagtgaaaaagtattgtgcttcttattttagcactttaatcaattttccttagttaatgaygaaaaggcaataagaataacatgctaatgatagagacaggagacagacaa

SEQ ID NO: 312125 - DNA, 590 bp, Homo sapiens
atttccattgaagggagaccaagctgtcctccaggtatcctgcgcctcctctgaaccatccaaagcacattttaatttcctgcatgggtcatgaatggaaaatttgtccataaaaaaatagaaggtttctaagaagaaactgagagagattattttcattactctctgtggcaaagcctactacttgcctatccaacatttatttttctccttccaacttagtactagaaccttgacttttaggagggcatattaatgtgctaaatgaaagactgcatttcccaatgcatccagaagtagccattttaaaagttccatccaatgagatgtaagccaaagtattatgtattatttgggattttcaggaagtctttttaaatgttttttttttctccattgaggagtaccctttctcctccctgttgtctggaatgcgggtgtcatattgaaccaagaggtggccttgagaatagtctccaagttctaagagttgcaaagcccaaagataggagcctgggttcctgaagacatcatataccatttcagctctggactaacytcttccaaatgtctttcaggtgagagaaaaa

SEQ ID NO: 312126 - DNA, 581 bp, Homo sapiens
gtaatttttattaaaaagagtaagccctctctatgccatgataatagtgaattctccttctaaatctgtatgtaacaatgaataaacaactcagaaggtgttgatctgacaaggaggcaaaaacacaaagtatgcacatgtgacttagttaacaatattccacaatcttccaaattcaytggacagttttcagtgccaaagaagttcactaacattttctgaaatgttaatgtatcccaacagtttatgtatcatacacattaaagtaataataaacatatgttaagaccagagtactgctaacctgccccaaacaccacatttctaagccacagttttgttacctgtaaagtgggagaaaaataaaagacaacctcagaggagtattacaaggattaaatgaaataatgaatgtgtaaatcacaagacattattgaggtgttttatgatttactttagcagacttacattgagaagtaacttttccaacatccaaaagtaagcaaactaagcaaggttaaaaattgtgttgtgatggtagaacaatgtctaaggaaagtttcatttaccacacaggggaa

SEQ ID NO: 312127 - DNA, 581 bp, Homo sapiens
gtaatttttattaaaaagagtaagccctctctatgccatgataatagtgaattctccttctaaatctgtatgtaacaatgaataaacaactcagaaggtgttgatctgacaaggaggcaaaaacacaaagtatgcacatgtgacttagttaacaatattccacaatcttccaaattcactggacagttttcastgccaaagaagttcactaacattttctgaaatgttaatgtatcccaacagtttatgtatcatacacattaaagtaataataaacatatgttaagaccagagtactgctaacctgccccaaacaccacatttctaagccacagttttgttacctgtaaagtgggagaaaaataaaagacaacctcagaggagtattacaaggattaaatgaaataatgaatgtgtaaatcacaagacattattgaggtgttttatgatttactttagcagacttacattgagaagtaacttttccaacatccaaaagtaagcaaactaagcaaggttaaaaattgtgttgtgatggtagaacaatgtctaaggaaagtttcatttaccacacaggggaa

SEQ ID NO: 312128 - DNA, 514 bp, Homo sapiens
ttaaattaaaaaaagaacaacgaggccgggcgcggtggctcacgcctgtaatcccagcactttgggaggccgaggcggacgaatcacgaggtcaggggatcgagactatcctggctaacatggtgaaaccccgtgtctactaaaaatacaaaaaaattagctgggcgtagtggcgggcgcctgtagtcccagcttyttgggaggctgaggcaggagaatgacgtgaacccgggaggcggagcttgcagtgcgccacagcactccagtctgggcgacggagccagactccttctcaaaaaaaaaaaaaaaaaaaaaaaaagaacaacgagagaatagtgagggttggggtttggtggggcaggggcagataaggagtattgttgcttggctccttcctaccagggaattttcatccagaggctgttttaaactacccttggctttggagaatggattggccaatcacattcataccaaagccattaaccagtaatggaaagcatggcttcaatcc

SEQ ID NO: 312129 - DNA, 616 bp, Homo sapiens
ggagccttgagcagccttaagcccagggtgctaaggtcacaaartggatcactctccctttgctggctgggctccagccacagcaggcttttttgagcttatcaaatatactaagctcatttcagcttagcccctgcacttggtaatcccactgcctgcgatactctgcccctcattgtgtgcatggctggcaccttttcattcaagtctcagtttaaatgtcatcttcttaaataaacctcgtatctaaagtatctaactcatccaaccctcccctgctgcctgttagtctgtatcacatgatctagtgatattttcttcatagagtttatcactagcttcaagtttcattttatttagttgcatatttgcttgttgtctatctctccccactagcatttaaattccatgagaattagtatagaatctgtcttgttcgctattgtgccctcaacaaaaggcactgccactagtacatgaaagatgttccataaatatttgttgcatgaaataatatattttcatttcactaaacctcaacatcctcatctataaataggactgatatcactacttataaagattataaaataagtgataagcagtaaacacaaat

SEQ ID NO: 312130 - DNA, 503 bp, Homo sapiens
atgtgtgagccccagaggatattgcatttaattgccaagattgggacggaggccttaaaatggcccaaagaacagagcaggaggaggaagccattacagctatccctctctgcaaatagaatggataatatgttggcataaagttacaatttcttcctgtatctgcttaggtaaggctgacaaataaaactagcgtaaaccttcaaacctgggaggcaaacagttatctcattaaggcaaaggccattaacttgccatcatcatctggttacatgctgtgctgtgaataaattaaattcagatttagaagcattctggctattgttggctgacatgcaatataacagtacaaatgccaccaatcattcatagaccaaaattatgggggacaaagaaggaggaaagagagaagcctattctcaggctctggtgcagctgtaactgaaagcctcataacagctcttaaacrccataaagagttaagacataggctataatttttc

SEQ ID NO: 312131 - DNA, 553 bp, Homo sapiens
aatgttctcattctcctcaaaagtacaatctaatattctttcaaatagaaaaagatattacactcactgatatcctcatagcaatttgcattaatgcattttataccaaagctcagaaaaaaattttaatgaatgactaaacaagattgattttgctgagaatgtaaagctgaaattgtaaagtatagcttagagcatagtcagtggtcaaatttcataataactttctaattttctaaactatacagacttttctaccattttcggtgacaccatagattttcacattcaaaaattgaaatgcattctctctgtgtgtagcttaatttttattgcccaaaagcagactatgagactaagattttagtgcaagtagtttatttgaaaggtgatcataaaaggaccatagaggaggtgggcagtgagatagggaagggaaaaagccagtgtaaagtacactgataagcagaataacattgtgagaagtggggttccatcctactrggaatacctaggacatactataggagtgcctcagagttatctcacctgg

SEQ ID NO: 312132 - DNA, 461 bp, Homo sapiens
ctatttacaattcaactcgatagacatttaagtgcctctgattgcaaaagtgaacacaaagctgttgctgatgtcaacaaggcaacactctagcagaaaagatgggtatagatgactgtggtaacaaaagtgttatgcctaaatgtatatgcagagaggaaaagcattgacttttcaagaatatttaaaagcagccccaaagagaaatagagtgattattttgtctggtagatctgagatctttcctctctyttttttttttttatgttggatgtccacccctaatccttggtctcagcaaagaacatgatgaactcacctactgaaagacattgaagggaaactggaccctaagaactagctctccatgaggttcttcctttcttcacatttgtcacttttttgctagccttcagagagcaattttctttaaacaatataatcagctgattcactgagca

SEQ ID NO: 312133 - DNA, 575 bp, Homo sapiens
acaggcaatggctgaacagcactaaagaacccagaaactgaagagaaagggagtacataaactctgatggaatgagaaaatgggaagtataaagttaggtgtaagccatataaagtgaagtgcagaaacatgccttcagaaaataaaactaaacatgaaagggcaatcctaccatgtgagagccaatgcatgcattctgaaaaggtacactgcctgtccttaaagaactgcatatagttcaaggatatttgttttagtgtattctgaaaaggctttaggatcattatcaatcctgtaataagcccaagaggaaatttcaggaagctgcagttctcctaccacattttcaagtatgataatgcaggtcttgagagaacamgaaacacagttattgtcccatatcaccattgtgttaaaaacaatgcatgtaagattgtcgcaaagaatagaatcatttaaaatacaaggtgttactactgctggtagtatggtacagtgatagatggagtctggagtaaaaaaaaataggggtcaaaattctactatgcactcactaagctatgtagggtgtgata

SEQ ID NO: 312134 - DNA, 555 bp, Homo sapiens
agaaattgagttgtgataatttagtcctatattcctatgtttccattaagagactcaattttaatttaggtatcaaatctactcaacaagcatgtgccctgtaattgacaccttggttctacccacagtcctgaagaaataactgtatgaaaacctctcccagtagcctgaaagagccggaagctcacacgtgcactcaggctaggttttagaaaggcgtttaatctaggcagcagatgtcatacctctgtaagaaacatacatagttacaagagttgccatattcaggaaagcctaaaactatgccacatcatatagttgcatatagggttgctcctagtccagattcagtttagaaatccagggtcattttatcacaagcaattcagcctaaaaacatagctaacattttacacttatcagattgccaagagaacagaactagtgagctaacgaaaggtcagattctgctgcagcaagggaaatgggtaccaacagaagtttaaacrtatttgcaacacctgtgagacaatccaatggagatggtatgttggc

SEQ ID NO: 312135 - DNA, 458 bp, Homo sapiens
tctccctttttgtttttgaattaattgagaaaggcaattgaaaaatgtgcagccttcaatttgtacggtacaggtgggtccactaaacgccatgggttgtgacagataaatctctctcctagttgtacttccaaatccctgattctctcayttctcctttcatgaagaagggtgcaatttacaaggaataagcaacagttgagcaacatattttcccagttcaaaaacccaaagatcttgtgacattaccactactacctgaatttctccttcacaatcaaaatcaacaactcctgggactacagtaattccctgtaaattgacttttacccagaattaatcccatgtatcctgttggcaaaggtccccaaataccagtggaaatcttagtgagtgtgtctcctccaactaacgcaacccgttctctgactgggagatctaatcctgtgcttccaggt

SEQ ID NO: 312136 - DNA, 458 bp, Homo sapiens
tctccctttttgtttttgaattaattgagaaaggcaattgaaaaatgtgcagccttcaatttgtacggtacaggtgggtccactaaacgccatgggttgtgacagataaatctctctcctagttgtacttccaaatccctgattctctcacttctcctttcatgaagaagggtgcaatttacaaggaataagcaacagttgagcaacatattttcccagttcaaaaacccaaagatcttgtgacattaccactactacctgaatttctccttcacaatcaaaatcaacaactcctgggactacagtaattccctgtaaattgacttttacccagaattaatcccatgtatcctgttggcaaaggtccccaaataccagtggaaatcttagtgagtgtgtctcctccaactaacrcaacccgttctctgactgggagatctaatcctgtgcttccaggt

SEQ ID NO: 312137 - DNA, 618 bp, Homo sapiens
tctctgtttgtccctgatgtccctgtttgtccctgttcaggcgccacytgtggctgtctgccacaagtactatttgagaccatcactacgacagttactacttgagactgtcattacaagagttacttctgttactacttgagaccatcattacagcagttactgctgttactacttgagaccatcattatgagactgaatgaagggatgaacatagaaatgaaaacttaagacaaaagaaactgttttaaaggaagggtccaggggaaggaaaagagagttctctgcttctagtgagcaaaggcagcccctgagctttcatagccctttgtatttattgggtagcaagagcaaggaggaggaggtaacaattggtcagctgcttaacttataacaggctcatattattactaaagggcttcagattacacatgaataatatctgtacataaccccatcataaatccaggcaagtactgaatgcatatcactttcacatcatcataaaatagagaaatcataagttgaaccatcctaagctgaaccattgtaagttgggaacagtctgtacattatctcatttgattctcaccactttgggagagtgggcagaaaaaa

SEQ ID NO: 312138 - DNA, 399 bp, Homo sapiens
atacatgtaagtgactttcagacagcagcctttaacaaatggtcacaattactgtgatctcttcctatgaacataatgctataatacataagctagatctcccagaactggacttctgcctgcataagagctacccagcatactkgagatgagtcagataacacttttggaatcacacatatggagcaaaaccaacaattatcttttcatcacctctgaaacaacttcctttaggatcctaaggtgcagggggaccctaaaactcagcaagtactctccaacagcttctgaaaaaagccagtcaaaagcagagatgctgtcttctgaaattatcccagtcagggtctgaaatggaaggtgcaagtaaataacaagtatgatatgattcaagtaactgcc

SEQ ID NO: 312139 - DNA, 499 bp, Homo sapiens
cctcccctatccaaaatactgtcaacaccactaacacacacaaaattaaatggcctaattttactgatcttggtattctcatacatatttttaaaggctccaaatgcattaatgtagaattcctctcattttgaggaggcaattattgatctcaccttctaatatgtaagaaaatggaagcaaaaaggcattaagtgacttgctccactttaggaatcaagactgccagttatgaccccaaaaatctaatacccattttaatataaacattaggggtatagggggccgcagctatatgtatgattttcaaaacttaagcagattgacttggttaagtaaattcttgtactcataaagtctgtgacttaagatcctggaacatgcacacacacacacacacacacacmcactaactgtattctaaaatatttttgcacatattcattgaacaatttggaccaaaataggtaagccatgtttaagttactgtatgcattag

SEQ ID NO: 312140 - DNA, 508 bp, Homo sapiens
acagtctatggttggactgcttctggaggctaagcagagctgagcctcaaatggaaagacagaaaatttgagagtcttcaactgaggtgagacaagaaacaaaggagcttagagaggcagagaaaaaggcagtccctaccagagaccctgttagcaaagtaaatgaggttagttagatatgatgtaatggtcgaaagagctacgtttattgactactaactctgtgatacacatactatgtatattatcctcttgaattctgacaacaaagaatatgaggttaatactgtactcatctcaattttagagctgagaaaatagcacctcagagggtatttagtgattcccctggagctattgtaagyagcagagccacagtttaaaccaagactgaccatggcatgaatcccccaaccgttttacagatgtaacacctgatcctacttgaattaccaacttacagataattagaatgcgaatttaaaaaccaaagcagtgttaaaaataa

SEQ ID NO: 312141 - DNA, 559 bp, Homo sapiens
cgtgttctgcgttgctcacgctgggagctgtagaccagagctgttcctattcagccatcttggctccctcccgggttttattttttacttatttattgttaagacagggtcttgctctaatgcccargctgaagtgcagtggtgtgatcagagctcactggagccttgaactgggctcaagcaatcattctgcctcagcctcctaagtagctgggactgcaggtgtggagggttttatataagcaaattatgtacctaacttacacttctgaaagatactctgtattgagggtcaaaaatgagggcaggaaaactggtttgaagaacagtagaaatattcatatgggagatggcagtggccacattaggactgtaatagtggcagcagagaaaagtggaaggattgtagatacattttagagaaatattccacagaatttattccttgagtggttttaggatttaagtaaaaaataaaaatgaagaatcactcctagattttgggcttgggaaactaataggtaatgatccaaaatacttagatggggaaagcttgagg

SEQ ID NO: 312142 - DNA, 558 bp, Homo sapiens
tgcaagagacaaagaagggcattatatgatgatataattggatgagtcaagtcaaccaggaagataaagcaattataaatatatgcacacccaatatcagaacacccaaatatataaagcagtgacagaactgaagsaagagataggcaacatacagtaataggaaaaaatttaatatcccacatttaatactggattaatcatccagacagaaaatcatgaaggaattggacttcaactacagtttagacaaaatgaacctaacaaacatatacagaacatttcatttaacaacagcagaatacacattcttctcaagcacacatggaatgttctccaaggttgatcacacgataggccccaaaacaaatcttaacaaatttaagagtattgaaattataccaagtatccttcaagtatcttcttcaagtatcttcttcaaccacaactagaaatcaatatcagaaggaaagctggaaaactcacaaatgtgtggaaattaaacaatgcatcctttaacaaccaattggtcaaacaagaaatcaaaagggaatttta

SEQ ID NO: 312143 - DNA, 498 bp, Homo sapiens
caaggatggccattcttactgcttgtatttaacataatactatacaccctagtgagagcagttaggttaraaaaaacaaaaaagaaagaaaatgtatctaaatagaaaaggaagtagcaaaattatctctgtagatacattttatatgtaaaaaactagattccaataaataaataaatttgttagaattaagcaaatctagtacattgcagaatacaaaatcaacattaaaaatcagttgtgtttttatacactaaaaatgagcagtctgaaaagaaaattaagaaaacaatcccacttacaatattatcaaaaggaacaaaatactttggaataaacttaacaaaggagacaaaagatttcactgaaaattgcaaaacgttgcagaaagaaattaaagaacacgcaaacaaatgaaaagtcatcatacgttcatggactggaagacttaatattgctcaaatgttaccactccccaaaggaatctatagattcaat

SEQ ID NO: 312144 - DNA, 498 bp, Homo sapiens
caaggatggccattcttactgcttgtatttaacataatactatacaccctagtgagagcagttaggttagaaaaaacaaaaaagaaagaaaatgtatctaaatagaaaaggaagtagcaaaattatctctgtagatacattttatatgtaaaaaactagattccaataaataaataaatttgttagaattaagcaaatctagtacattgcagaatacaaaatcaacattaaaaatcagttgtgtttttatacactaaaaatgagcagtctgaaaagaaaattaagaaaacaatcccacttacaatattatcaaaaggaacaaaatactttggaataaacttaacaaaggagacaaaagatttcactgaaaattgcaaaacgttgcagaaagaaattaaagaacacgcaaacaaatgaaaagtcatcatacrttcatggactggaagacttaatattgctcaaatgttaccactccccaaaggaatctatagattcaat

SEQ ID NO: 312145 - DNA, 543 bp, Homo sapiens
tttttatcaattccataactgtatcctgcacatacttctgtaactgccagtttgggttttaaaacattatttccttctccttttgggtatttgcaatacttcccaataatttctgcatttgttattcacccttccagatcacgcttgcaaatgctaaattaaatgacatgcctatggacatcactacattcacaggttaataattaccctgctttaatggatctactagagttttttggttggagaattctaagcccaattcctctcctccttttcagtggcagataaatcattatgaggcttttattttgtatatcttcsaagatttagaaacctacatagtcatacagaaataatctgaaatatattttgatttagatatcgtcaattaaggtctagtcagggaatataaaccatttttgttcattcagtaggggaaatataatacaggaaactagttactcaggtgatgctaaaactgagaagccaaagaggagatggtgaagtaccacagaggttggcaatggctggaagatccttcca

SEQ ID NO: 312146 - DNA, 543 bp, Homo sapiens
tttttatcaattccataactgtatcctgcacatacttctgtaactgccagtttgggttttaaaacattatttccttctccttttgggtatttgcaatacttcccaataatttctgcatttgttattcacccttccagatcacgcttgcaaatgctaaattaaatgacatgcctatggacatcactacattcacaggttaataattaccctgctttaatggatctactagagttttttggttggagaattctaagcccaattcctctcctccttttcagtggcagataaatcattatgaggcttttattttgtatatcttcgaagatttagaaacctacatagtcatacagaaataatctgaaatatattttgatttagatatcgtcaattaaggtctagtcagggaatataaaccatttttgktcattcagtaggggaaatataatacaggaaactagttactcaggtgatgctaaaactgagaagccaaagaggagatggtgaagtaccacagaggttggcaatggctggaagatccttcca

SEQ ID NO: 312147 - DNA, 543 bp, Homo sapiens
tttttatcaattccataactgtatcctgcacatacttctgtaactgccagtttgggttttaaaacattatttccttctccttttgggtatttgcaatacttcccaataatttctgcatttgttattcacccttccagatcacgcttgcaaatgctaaattaaatgacatgcctatggacatcactacattcacaggttaataattaccctgctttaatggatctactagagttttttggttggagaattctaagcccaattcctctcctccttttcagtggcagataaatcattatgaggcttttattttgtatatcttcgaagatttagaaacctacatagtcatacagaaataatctgaaatatattttgatttagatatcgtcaattaaggtctagtcagggaatataaaccatttttgttcrttcagtaggggaaatataatacaggaaactagttactcaggtgatgctaaaactgagaagccaaagaggagatggtgaagtaccacagaggttggcaatggctggaagatccttcca

SEQ ID NO: 312148 - DNA, 570 bp, Homo sapiens
agcagttgcaacagaggctgtgtagcccacaaagcctaaattatttactgtttagtcctttatagaaaaaagtgtgctgactcctgtgttaaagaatcagaagaggagctgactagaaggattaaccatgggtgaaaaaggggagtgagagatcagagaaaggagaataataatagtattgtaatggttacttgctaagtgccaggtattttatgtgcaataccacttttaatcctctcagttatctttgaggtagagtcagggtcccagccaagcacagatgcccactccaagtaggataattggaaggcggtttggtaactggagtgtttatagagtaagacctgtggtaaggatccataagagatagtgcagtgtcccaggctagygacaaagaactggttaccacctctaggcctgaagcattgagggaagagaggaggttccagaatccagaaggaaagagttatgcagatagggctgccttgagagcagcagtgaccttcagttggaggacacagccagtcagataggaccgcacaaggagctgaggccatcaacagcctgcac

SEQ ID NO: 312149 - DNA, 467 bp, Homo sapiens
caagcatgcccgtgtcccaagggctggaggaaaacagtctcccagcacccctcccaaaccagccatcatctgcctccactggacttggttctatgtggccgcctccaccagactctgcttataaatggccaggacaccttccaccatgtctattagccacttttctgccaggtggtggtaattctcactaatttgtaccagcttcatagatgtcaagccaaatttcattttattatgtttttgaagaagaaatattgattagctgggtgttagtgaaattattttctacaagttgggtgatggaaagagatttyaaagtatgcctactatctaaaacacatttacaaatgatatatgcaaacattattttaataaaaattacattggtgtgaataaacagagtgtgagcaggcagcataataatgtctatttttctgagtgcaaaaatacacagttcaaagataaat

SEQ ID NO: 312150 - DNA, 467 bp, Homo sapiens
caagcatgcccgtgtcccaagggctggaggaaaacagtctcccagcacccctcccaaaccagccatcatctgcctccactggacttggttctatgtggccgcctccaccagactctgcttataaatggccaggacaccttccaccatgtctattagccacttttctgccaggtggtggtaattctcactaatttgtaccagcttcatagatgtcaagccaaatttcattttattatgtttttgaagaagaaatattgattagctgggtgttagtgaaattattttctacaagttgggtgatggaaagagatttcraagtatgcctactatctaaaacacatttacaaatgatatatgcaaacattattttaataaaaattacattggtgtgaataaacagagtgtgagcaggcagcataataatgtctatttttctgagtgcaaaaatacacagttcaaagataaat

SEQ ID NO: 312151 - DNA, 520 bp, Homo sapiens
tggtgggaattggggagggtgaaagaaacatcactaggtctgttgtcctctcctcaccagcactactcctgtgacaagatcaggtctktcttccccacctagcaaagacaggggccatggggattctcaggaaatgttgggttggaaggggcagaaataaatcactatagctgggagcatagagtctgtgtagaggaagtgatcttccttcgttcataaaatccccatccatttgtacctttggtgagaatactactttctccctgaggtctatgggctgtattatcattaaaattatcatgatatttatattaactggctcacaaagtacatcacccatcaggtccagtttgcttcttaaagctggaagagtgaagagtccccctgaaattcttgggctctgtttctttccattaagttcttttgtatatggtgtatattcatgatcatattttaaaccagataattttttcatgcctcgtttaacttgtgtgtcttttcagagcctataccttggtca

SEQ ID NO: 312152 - DNA, 520 bp, Homo sapiens
tggtgggaattggggagggtgaaagaaacatcactaggtctgttgtcctctcctcaccagcactactcctgtgacaagatcaggtctttcttccccacctagcaaagacaggggccatggggattctcaggaaatgttgggttggaaggggcagaaataaatcactatagctgggagcatagagtctgtgtagaggaagtgatcttccttcgttcataaaatccccatccatttgtacctttggtgagaatactactttctccctgaggtctatgggctgtattatcattaaaattatcatgatatttatattaactggctcacaaagtacatcacccatcaggtccagtttgcttcttaaagctggaagagtgaagagtccccctgaaattcttgggctctgtttctttccattaagttcttttgtrtatggtgtatattcatgatcatattttaaaccagataattttttcatgcctcgtttaacttgtgtgtcttttcagagcctataccttggtca

SEQ ID NO: 312153 - DNA, 569 bp, Homo sapiens
cttggtcaggtttctaatcaaagccagatagcataggtgagtgttgggatgtgagggtagtaggggttttggtgaccagtactcagtgggtagaaaaaggtgaacagtgtagtgctgggaatgctggggtcagaagatctcggatcaagaaataactcaaacaggtattagctgaatgaccttggatytgacttaaaactttctgaacatcagcttcttatctgtaaagtggagataatacttaccttgaaaggtattgggaaggctcaaataagataaggtatggggaacggctttgggaactatacagtcttacatatgtgaaaattatggcttctgatcttaagtgtgatcaaatagttcttgaaagaaaatggtctaagtatggggctttgttaaacagatatttcttattgatttttctcctaacaggatttaatgtatactctgttgttttgtgtctattttctcaagatataggcaagttaataaagcctgtgcttggcattgtgtttggcagggccctgcaccttgccaggccaatgtagaaacgggtcggagaccgagca

SEQ ID NO: 312154 - DNA, 579 bp, Homo sapiens
aatcttgtaagtctttgaaagaaggactaataaaaatataccttgttagatggcttttcctgtggctgcacagcctgtttgtttaagaacacgttgcagcttggcagctcaccttaccccgcctcaatcccaaaagcacaaagtatttctggttttaytgagagccatcaatggaaaatgtcagctgttcctttttttttttccctctcctgaaaattgaattagttgcccaggaaaagtataagagagctccaatgtacagggcctgaattcctgtgctggtgtctaaggcatggacatcttactatgtgttcaagaaacagctcacactgttctttgggccacagcacggagcaccaacctcatccttccaggctttggaggccagacctaccacaaggcccagtcctgtttcttttaggccccagccacaatgaaaccatgtacttccgaggtcatgtatcacctacctatccagggtcagcctttcccccatgggaagctgcgaaaatacccatgtggctgtgggcttcttcactcatcctcaagacaagaagaaacctgtgtcacaccctgccc

SEQ ID NO: 312155 - DNA, 389 bp, Homo sapiens
ttatgccatcatgtgaacctcagataatatctagcatgtaatttgagaatcaatgaattcgcagtcttcgtcatgcagctgaggagactgaggcacagtaagatgaagtaacatggctgaggttatatgaagggcaaagctggaattgatgtgaacccccttggatcctgagatgctgttttttccattagactgtgacactcacattaaatttgtgtgccatttgaaccagttgacccacyctttaatttttatacgtcttctaagttttacttattacatattggaacacttctcttgacactgcatttgaaattattttatggctaaagctttgaaggtttataatgcagtggcctcctaatagcaggtcaatcagaaagactttc

SEQ ID NO: 312156 - DNA, 538 bp, Homo sapiens
gacttgccagcttcagatctccccatggggttttctagggcctactttagaattgcattacagctcaacttctccctctgcccgattctgcttcgttccctttcttttcacaggcattgatattaagagcactacttaataagctctgcacactaatctccttcttagagtcagcttcccagggaacgcaacctacaacaatcttttatccaacagttgcattacttgaattatttgacagtttctcttgtatatgtacattgtcagaaaaataatcaaaagcattttcttgcttttccaatttttatatctttcatttctttttcttgtctaacaccattgtctaggacctccagtaccttggtgaatagatgtcatgatgaccagcatttttgttttctctttgaaggtaataccatagagtataatgtttgctcttaaattttgctagctatcctttatcaaatactccccttttctatttttgytaaaaaatttttattatcaaaatatgttaaatttttcaagggctttttac

SEQ ID NO: 312157 - DNA, 522 bp, Homo sapiens
aaaaaatcttaggtcttgtgtatacgttattctgcacaacagtggactgctgaagcattatgacacccatcaggagtgtccctgaaagatgctagaaatagggtagaatggaaatcctagcgagcagaacttcaagcaggacatttggttgtccatgttgtctgagctgagagatggccaataatacaatcgatgttggttcataggcagaggtgagtggtgtcctaggtttcaaggactcagaaagaacaagattggaatgtgagtaacaggaagtatggtgaacaagtataaggatatctcaaagtgggcacagagtgtaaagatagttgtgttccctgtgaacactcacccaagggcatccactgcaaaggaggctctaccagtcaggtgaacaagctggtgtattctgtggatatcagtcagtcttttcccccrgacatcagtgtttccttgataagcccatgtacacaggatgcaggctaccatgatgaaagcatgaaggcgatgcatgagcttaaa

SEQ ID NO: 312158 - DNA, 630 bp, Homo sapiens
atacttaaaaatcttctctaacaagagaggtattgttttagcattttgataaataactttttgtttttaagcccaggccattcagcccacctgtaacttccaacaccagcccacctcctgctgcaccattagcccgggcagaaagttcttcttctatctcatcatctgcttcattgagtgctgccaatactccaacagtaggtaagtgattatcatcaattacatgtgaaatgtagtgtacaaagtatatgtatgctaaatatgtatrtatttttaaatgggctaatgaagaatttaacattataaattttgtttttctggaaacacacctggaatttattaaactgtccatgctttgcttttctgtttcacagtctatgttatctggatagaagaattttaactgtggttagcaccgttaagaatgagttaaatttataaattgctgatcaatataaatagttgaaggcaaaacaaaatgcagttcttccttctgtgaactgatagttgcgtttctaagaaagtttatgttttaaaaacaatagtgttttgaaaatgattgaatgaaagaaaacaatttgtgcttgcagtgaattatatttttccacaagaatttcaagacttaaaaat

SEQ ID NO: 312159 - DNA, 546 bp, Homo sapiens
tggtttctgttgcaactactcacctctaccatcacagctagaaagcagccataaacatagacaatataaacaaatgagcatggctatgattcaatacaactttacttatgaacaccaatatttgaatttcatagaattttcacgtcacaaaatattcttcttttaatttttttcagccattgaaagtataagttctcctattcaagtaggtgtagttagaaataaacaaaataaagtcattcttagttcactggtcttacaaaaacaggaggcagccagatttggcccttgggctatagcttgctcacttctgcaatactaatttgttgaacttaaaaagaaataggrggtaaatctggcaagatggtggagtagaaaataccaggaatctatctccccacttagacaatgatttgctggcagaatctgtttgatgtaactgttttataactctgaaatctattgcaggcttaaaaacttccagtggaaggttgggcagtaaattgcagttactgtcaatcagttttagctcttagcagagtagta

SEQ ID NO: 312160 - DNA, 601 bp, Homo sapiens
gaagaatcgaattcccttccctttgtatctgggttggtttagtgacttgcttgagcaatagaatgaaatgagagtgatattctgggactgccaaagccaggtcataagacgcctcacagcttccacctgggaccccaggagtacttgctcctaagacacttcctcttgaaacccagtcccctggccgggagaaaccacatggaaagacacaggtgagtgctctggttgatgagccagcgaagctcctagcatcagctgtcagtcacatgagtgaaccatcttgatgtcccactcaggtgagcttctakgttctggcagcccttgctgactgcctgacaaaactcagccaagccacataactgttttaagccacaaaattgggagtggattgttatatagcaatagataactggaacaccctctcagttcttctgtcaaatttatttcatattctttcaatgacattttatgcacagacattcaatgatgtgtatgtctttccccttgcaaataatggcataataagcacactacagtactcactctgctttctttttcaaccaataacacatcttagagattattccatacctgtgtatgt

SEQ ID NO: 312161 - DNA, 601 bp, Homo sapiens
gaagaatcgaattcccttccctttgtatctgggttggtttagtgacttgcttgagcaatagaatgaaatgagagtgatattctgggactgccaaagccaggtcataagacgcctcacagcttccacctgggaccccaggagtacttgctcctaagacacttcctcttgaaacccagtcccctggccgggagaaaccacatggaaagacacaggtgagtgctctggttgatgagccagcgaagctcctagcatcagctgtcagtcacatgagtgaaccatcttgatgtcccactcaggtgagcttctatgttctggcagcccttgctgactgcctgacaaaactcagccaagccacataactgttttaagccacaaaattgggagtggattgttatatagcaatagataactggaacaccctctcagttcttytgtcaaatttatttcatattctttcaatgacattttatgcacagacattcaatgatgtgtatgtctttccccttgcaaataatggcataataagcacactacagtactcactctgctttctttttcaaccaataacacatcttagagattattccatacctgtgtatgt

SEQ ID NO: 312162 - DNA, 543 bp, Homo sapiens
agcacactacagtactcactctgctttctttttcaaccaataacacatcttagagattattccatacctgtgtatgtacagctgacttgctctttaacagtggaagagaaccttatattttaccaccataagttatttagccagtccactactgatggacatgtagggttccccatccctgtactttgttagtacagatagtgattcattgtctattctgctaaagtatccttttgtaaggtgtctattgtaagtatgtaggttacattcctagaagatgtttgtagcttctttaattctgttgtacgtacattttgaattttagtaaatattgccaagccccycaaaaagaggttgtgtcaagttatactcttccccactcagatttaaagctgttttcccagtgacttgccaaaacaatgcattcataaagttttaaaaatggtttaccctagattcttattcaaattatggattttattgtggagaagaaaatgagcttaaactttgatatctatttgatatctttgtattgcttgtttg

SEQ ID NO: 312163 - DNA, 559 bp, Homo sapiens
ggatgctgtggaacactgctcagatccaccttaagactgaggcatttattcccccaactaccagaagtgttgcctgctgaccgttcatactacactcctctctgggcattttcctcagcaggaaagaaggccgccttgaccaagattatgtccccttcttgggtggcaacctgcatccagtsgctggccgatacgggaatacaaaggcctggcaccttaacttcaatttggaacaattctgaagcagcattcaagctccaggaagacctaagcattcagctgaagcctatgttgcaactgcatcatagttcaacttttccctttgtgcaatttggctaccctcactcccattaggcattgtttcctagagcattctccaacaaatctatggcattcaagtgaccccctcagcatctctttctagggaacctacccaagatgctatctaatcagggtgatatctccttactggtgctataactgaaccttcagtaagccattctaccattcttttgggctagctgcttctggatgatagaggatgtaattatagcaatga

SEQ ID NO: 312164 - DNA, 580 bp, Homo sapiens
aaatcttgcatcctaattcctctcctttgatattgtggaatagggtttacatttttagaatccaagaagcatgctctccttgttgtgggtacactcagtgctatcctggatacacagcaggtatatgagacagctctccttggaggggtgtatatgttgtctgctcacagaggacatcaagttctgaaagacgcatgaaagggaactcgcagaggagaggcctctttccagggagagcaggttgcagggtgtgggcaggcggagctgctgggccaaagggctggagacccttggaggtaacagggttactggagcatatccttgtgtgtttttgagaggtgattrgcctgccctcaagggttacttcacaggttctttattctacagtgtgtaatggaagtgaacacaaccccaattcctctaacctaccaagaccttctaaaaaagtaaatgagaatctcaggaccgctattatgctttctcacctttagattagcaaaacgtattttaaactctcattgccttctccttggagaaggaaggggagatggaattaatgcattttctgaagggctaaatt

SEQ ID NO: 312165 - DNA, 548 bp, Homo sapiens
gggccagcccgtgcgggacagtctggactccggactatcccgagaactcaccatccttcttgatcttctcattgaggttgttgatataaatagtgtggttagggcgggtctcgggaactgccatggagtgaagtgttgaggtaagtcttaaaggaggaaaaacgtgactttagccctgggtttctccaaatcctttgtcccaacgtcggctgctcaaggatcttcctccgaaaaggaagtcaggtaaggcgggagtaggggsaaggacggaggcaaagcgcgacaacaaagcgtgcgtaggacccgcttctccagcccgcgtgcggagagaactctcgagagatttactacgacttccaggatgctctacgcgacccggtgggcggagcaccctaaatggcgattcccattggcccaagcatccgaagggccgtcccggagaaaaaacccggatgtgggagccagtatagaaaaaagggacaggtcctaggcagcctggcctcgagcagcaagtttcctcagacgggcccaggaaggcccggacgcca

SEQ ID NO: 312166 - DNA, 572 bp, Homo sapiens
ctggggacttcaacaccccactgtcaataatggacagatcacccagacagaaaatcaacaaagaaacattggagttaaactacattttagaccaaacaggcctgatatttacagaacatttcacccaactgctgcagaatagatattctttccatcagcacatggaacattctccagagtagactatatcttaggccacaaaccaagtctcaataaattcaaaaaagtaggaatcttattaagtatcttttctttttttaaaagagatagggtcttactctgttgcccaggctggagtgcagtggtgagatcatagttcactgcagcctccaactcctgggctcaaatgatcctcctcgctcagccccccagatagctggggttacaggagtgccccacaatgcccagctaattttttttttttacttttgtggagatggaatctcactatgttgttcaggctggtcttgaactcctggcctcaagtgatcttcccatcttggcttcccaaagtgttgasattataggcgtgagccaccaggcagggcgtaagtatattttttttaccacag

SEQ ID NO: 312167 - DNA, 587 bp, Homo sapiens
gacaggatcatggctcactgcagccttgacctcccaggctcaagtgatcctctcgtttcagcctcccgagtagctgggactacwtgcatgtgccacaacactccactaattttttaaatttttagtagagacaaggtcttgctatgttgcccaggcttggaacttgcttttaaacaactcgtcattatgtttctaacattcacccacgttcccgtgtgggactttgttcttccattttcactgttgtattacatcctactgtgctattgtacagtaggatctgtacaattgatctattctctgtcaattatgtgtggatttcttccccagtttttggatactctggctactgccgctatgaatattcttatgcatgtcctcttgtacatgtcttgtacatatgtgtaagagtttctcataggtatacacccaggagtacaattgctggctgtagggtttgttcagctttgggagtaaatgccaaattgttttccaaaatggttgtagcagttatacattactggtgagagggtaaagaatttttgttgaaatacatgcccttcaactgttcacacttaaaaattttt

SEQ ID NO: 312168 - DNA, 587 bp, Homo sapiens
gacaggatcatggctcactgcagccttgacctcccaggctcaagtgatcctctcgtttcagcctcccgagtagctgggactacttgcatgtgccacaacactccactaattttttaaatttttagtagagacaaggtcttgctatgttgcccaggcttggaacttgcttttaaacaactcgtcattatgtttctaacattcacccacgttcccgtgtgggactttgttcttccattttcactgttgtatkacatcctactgtgctattgtacagtaggatctgtacaattgatctattctctgtcaattatgtgtggatttcttccccagtttttggatactctggctactgccgctatgaatattcttatgcatgtcctcttgtacatgtcttgtacatatgtgtaagagtttctcataggtatacacccaggagtacaattgctggctgtagggtttgttcagctttgggagtaaatgccaaattgttttccaaaatggttgtagcagttatacattactggtgagagggtaaagaatttttgttgaaatacatgcccttcaactgttcacacttaaaaattttt

SEQ ID NO: 312169 - DNA, 593 bp, Homo sapiens
aagccatttctgtccttatttggtacgtggccaacaataagggtagcatgagttggagtcagtgttgcaactggtttcccaattaaacaacctgtctctaggatcccataagttttcaaaaaataagtagaaacatttctatatttaggagaagcttagggttttgagcaatcgagaaattctatcacctaatttttgtaaaatttcttgccacctaatttttttagatcttgtaaacaaagttcttagagggttttaatgctgcaaataaaacattaacatttcttcatatgattaaccttcaagatataacagctaatattttattcttacacacatgggatataaagatttcaaatagagaaaagtgttatctatcaaaactgaggactgatattctttttgaaactgataaartggtatgcctatttaccatgctcatgaagtaaccaattggcaatttttagaacttaaagatgtttctaacagtataaaaatagttttcctacctctcccaaaagcttacaaacatcagtagtgtgtgcctaaaattttgtccagttttcagaatgtttttatataaattgccttat

SEQ ID NO: 312170 - DNA, 569 bp, Homo sapiens
ttttgttatttcaaatgacagcatcaaagatagtaatccacggtgctcaacaaaagtcgaatgaccttttttccttctccattcataaatacataagagctgatgcttcattatgtttaaatacaaaatgcacactcctactttgttttcctatatgtgagttctcatgtattcttcaaatgctcatctaattactgttacctactattccaaatgcaaatgacaaggtcccagtttactgttgatcctatattacaagagtcatcaattttggttgagaaacacaaaggacaaatatytcattattgtgctaaccatgcctattattagttttgtgcccccataacataagtaatagccccaaatacatggcacttatcacacaccaggcataattctaaatggcatgttctccatgttatggaagaagagactgaggcatggagagagtgagtaacttggccaaactcacaaggctacaaaggcagagaatcaggttttgaactcagggctgcctagaccctgtgttcttaactatcatcatatagtgtctctcttactgtttctca

SEQ ID NO: 312171 - DNA, 474 bp, Homo sapiens
agaggatgccccaggtaatatcctttccttcttctagagaggaacatttggctctagaaaggcatttagcctatgagttcagaacaggaatggtcttaggcatctgattcaacctacgacattgccagtctgaaccaactcatccygatcccactgcaaatgagctaggcaacagtgaagagtggttctagtctgggtttggataaattgtgaaatatttctagaatttttctatagactctgaaccatttccccagaagtgtgcacattcaaaatgtcatttgcttcagaataacattttgaataaggcaagcctaatttttgttttttaacagaattttaaaataattaattcacaatatttgtacataggataatgggatattttgttacataaataggatgtataatgaccgagacaaattatttagggtatccagcaccttgggcatttatcatttctatgtagtggaa

SEQ ID NO: 312172 - DNA, 520 bp, Homo sapiens
actttacacaacaatcacaactgtgtgtaatgattatagacttattctctaacatctcttaagcacttaggtaatgagaaatgtcataatgaaaatatctgttaaccgaggaagatcaagggaacaaaacaaaaaacctaaatgaagtgtgaaggtggtagaagtaaagacatagatggtttcacttgggccagagatagattgaatgtgagacatttgaaagtctaatgtactttcagtacgtactttccagtttactttgatggaacgcactgtgttgaatgttattgtgctgacaaataagcccccaaattaaatgacttaaaaaataaactcattcttcatcaagtagcgttctrggatggtgtttaggaggatgtggcagctctccttgctctcagtcacggaccaggattctcccaccttctgtttctaccatccttcacgcatcagcatctttagcatccagctggcagaaaaagaacatcaagataggcatgtgggaggagctatgagccag

SEQ ID NO: 312173 - DNA, 457 bp, Homo sapiens
gccatttgagatcctttttgaaaaagttgctttattgtgctaaaaacaaagacacataatatgagatctaccctcttacattttaagtgtatagtacattattattagctgttagcacaatgttgtacagcatatctctagaatttattcatcttgcatgattaaatgatacacattgaacaacaactctccatttctccctccacccaggcccagcaaccaccatgctacttcctgcttctatgagttcaactactttaaatccctcatataagagggatcatgcaatatttatctttctgtgactgacttatttcacttggcataatgtyctcaaaattcatccatgttgtagcatatgacaggatatccttcttttaaggctaaataatattccattgtatgtatataccacattttttaatccattcattcattgatggatatttagattgtt

SEQ ID NO: 312174 - DNA, 594 bp, Homo sapiens
ctcgctctgtcgcccaagctggagtgcagtgacgtaatcatggctcacttcagcctcgacctccttagttcaggtgatcctcctgcctccacctctggggtagctgggactacagataagcaccaccacacccaggtaattttaaaattttttgtaaagatggtgtttcaccatgttgcccaggctggccctgaactcctgggctcaagcagttcaccagccttggcttcctaaagtgctgggattataggcatgagccaccacacccagccccatacgaaaatttagtctcagaattagcctttgcatgcgtcacctgtaagttaatcagaatgttactttcaaaagttccmtgcaggtgaggaagctaaaaggtattcttgtatttttttaaatgaaacttcataatagaggtgtaaacagagtccattctccccagccttagaatcagacagcttgagtttaaaacccacttatgagcttgagcatactactgaacatagagtcacttgtctatgcctcagagtccccatggtcgaatggaaaatacagtgcctacttcaaagtgttattgtgaggattaaatgagataat

SEQ ID NO: 312175 - DNA, 592 bp, Homo sapiens
aacagtgtattaacttgtctaatggcttaatacagtcaactctaaatgttagggaagggttcttgtttgaccaacaaaaaaaacactacattattcttcataagtgtttcagggcacatgcacatgaaaaaatggaaactaatgctgtttcaggtagtaattcagtgttcatcttgcccagcmgaattacatgtcatgaattcaaactaaatattttaataatcttttgtttctggaagtcatattaaaaatcttgacctcatgacttcactaaactgtcaatgactgttttacaacaaaatcagcttattttaaccaaataactggaaagaaagaaaacacttaaaaaatattggatttccttcttcatttgagtattctaggtgttaataaagagaagattgattattctttattattgtttagaaagaaaaccttttctgtttttgattgattacaatctatagcactgaaaggtatctatttaatcaatagtaaatagaagtgacattgtttgcaaaattttggatataaggtctttcttatttagaccaaatgcagcacatctggaagctgccaagcctatgtagaa

SEQ ID NO: 312176 - DNA, 610 bp, Homo sapiens
tagtctgatgggcttccttttgtaggtgaccttacctttctagctgcctttaacatgttttctttgatttcaaccttggagaatctaatgattgtgtgtcttggggatgaccttcttgtgaagtaccttaccaggagtttctgcatttcctgaatttaaatgttggcctctctaactaggttagggaagttctcatggataacactctgaaatatgttttccaagttggcttcattctcctcatgtatttcagggacaccaatgagtcgtagattcagtctctttacataatctcatatttctcggttttgttcattccttttcattctgttttctctattcttgtctgactgtcttattttagaaagccagttttcaagctctgagatttctgagattttttcctccacttaggctgttctgttattagtacttgtaattacattatgaaattctaataatgttttcagttctatcaggttggtgacattcttgtctatactggctgtttgtctgtcagttcctscattgttttatcatgatttttagcttccttccattgggtttcaacatactcctgtacttcaatgatcttcattccaatccatat

SEQ ID NO: 312177 - DNA, 389 bp, Homo sapiens
actgattgcagtcacaataatttattgtacattttttaattaaagagtataattggattgtttgtaacacaaaggataaattattgaggtgatggatacctcatttaccctgatgtgattattaggcattgtatgccttatatcaaaatatctcatgtaccccataaatatacctactatgtacccacaaaagtaaaaagtaaatacattaatttcacctggttgtaaaaataactttttgtaatatggctttttaaaaatttaaaattacatgttgtggccatcattcatggttcacattatrtttctactgaacagcgttgatctagacagtagacactacgcaaaaacagctaagaaaattattaattctttaaaaggataaaatt

SEQ ID NO: 312178 - DNA, 630 bp, Homo sapiens
gaaaaaaattagtgcagagtaaagaaatagtaatacgagtgtgattttagattaaaaagtcagaataggtatccctgtctgttaaactgacatttaaatcttaacaaaatgagtgaattatgcatttttccaaaggaagagtgtttcaagaaaaagaaatagcaagtgcaaagctccttaggaggaggcacattgtgtttaaggaacaggaagaagttgagtattgtgggaactgagtaagcaagaaagagaatagaaaaggaggccataaagagaggagagggcttttgaaaaccatggaaaagmgtttggattttatcccaaatggagagggaaactagtaaagggttttgagcagagaaatggcatacattttcaaaggatcactctgggtgctctgtgaagaatagagtaggagcaagagtagaagcagggaaaatggttatgacgccactgcaatagccttggaaggagacagtagtgacttggacccgggtgatggcagtggagatggcgagaagtgatcagattctggcaatgttttgaaaccagagctaattgtgtttgatgacggatttttacatagagtgagagaaaaagagatgagtcaaagataattcaagggttttt

SEQ ID NO: 312179 - DNA, 635 bp, Homo sapiens
agaagcctcctggccagaactcaggggagggcacacatctggcgtgcagactccacaggtggagtagaaccaatccctttcattcacagctgggaggtgggtagcctggggcagattttcaagctcatcttgccctccaactgaaaatggactcaggctgttagagggtgggagacacagtgagagtgagactagccatttggtttgggtttgcgtggaagcagagtgaggcctgtgactgctggctttcccccacttccctgacaacctgcatgactcagcagaggaagccataatcctcctaggtgcacaactccagtgacctgggaatctcacycccatcccccatagcagccctagcaagactcacccaaggagagtctgagctcagacacacctagccttgcccccacctgatggtccttccctatctaccctgggagtggaagacaaagggcatataatcttgggagttctagggttcctccccatactaccacagctgatgctctctggaaggcaacacctcctggcaggagaccagccagcacaaaaatagagcattaaaccacgaaagctaagaacccccacagagcccattgcgccccccaacccctaccccctgcaccagaaca

SEQ ID NO: 312180 - DNA, 635 bp, Homo sapiens
agaagcctcctggccagaactcaggggagggcacacatctggcgtgcagactccacaggtggagtagaaccaatccctttcattcacagctgggaggtgggtagcctggggcagattttcaagctcatcttgccctccaactgaaaatggactcaggctgttagagggtgggagacacagtgagagtgagactagccatttggtttgggtttgcgtggaagcagagtgaggcctgtgactgctggctttcccccacttccctgacaacctgcatgactcagcagaggaagccataatcctcctaggtgcacaactccagtgacctgggaatctcacccccatcccccatagcagccctagcaagactcacccaaggagagtctgagctcagacacacctagccttgcccccacctgatggtccttccctatctaccctgggagtggaagacaaagggcatataatcttgggagttctagggttcctccccatactaccacagctgatgctctctggaaggcaacacctcctggcaggagaccarccagcacaaaaatagagcattaaaccacgaaagctaagaacccccacagagcccattgcgccccccaacccctaccccctgcaccagaaca

SEQ ID NO: 312181 - DNA, 567 bp, Homo sapiens
tgacctgcatttcaaattgctgagaagttagcaagctgacttttacactaggcacatcagaaataattgattaaaaatagagttattgaagttgaatttttttcatttatagaaaagtacaatgtcttgttcatgacaaacaaggcctaacatttatataatgttcatttaaaatatatcaaaagaaaacaaaataataaaacccacagaaaacccaaaaacaactcacctattaaaacatctcttgatttataaatattatagtttagtttgtacaatatcagtaactgtggaaagctcccaattatctcattcccaagtgcttgactgactcataacttaccaacaattttcttatttcagagaatcccaaaaacatattacctaggactaacctggaataaaacttcatggttgatagcttttatcaattaaatgggtattgatttkgataactcataatcttgagcatatctttagatttactttttatcctgaatttatttttgttagtaagatttagaaattcagatttattttgtgctttatatgacatagaaaaaaaca

SEQ ID NO: 312182 - DNA, 505 bp, Homo sapiens
ctgggctgaaatagaaacttctgtacaaatgtatctctcctgtgctctttccactttaacagaatagaaagaattgactggttgagcccaaatatttcccccaggccagwgttacaaactggcgtttcaccaaaaataactcatttgatatgtttttaatgttgatgatctgaaaaatcatcttcttgtttttgtttgtttgtttgtttttagagatagggtcttactctgtcagccaggctggagtgctggagttcagtggcacactcacaactcactgcagcctcgattcccaggttcaggtgattctcccacctcggcctcccaagtagctaggaccccaggcatgcaccaccatgcctggctaacttttctcttttttgtagagatgggatctagccatgtttcccaggctggtctccaactcctgggctcaagagatctgtccgccttggcctcccaaagtgctgggattacaggcatgagcttcatacctggctacctt

SEQ ID NO: 312183 - DNA, 604 bp, Homo sapiens
atctaatatggacgcagtttgtggcaccccaaaacaattacaatagtaacatcaaagatcacggatcacagagcaccataacacatataatgcaaaagtttgaaatattgggagaattgtcaaaatgtgacacaaagacttgcaatgagcacacaccagtagaactccacagagggttgccagaatccttaaatttgaaaaaaccaaaacataaaaaaacaaataaaaagaagcaccattaatctgtgaagcacagtaaagcaaagttcataaaatgaggtatgyctgtatcttttataaacaaaaccttggagtcccagtaagtttttaacagtataaaggaatctcaacatcaaaaagcttgcgaatcattctcctaagtcttctcttttctgggttaaacatcgccagggctttgatttatttcatatgagttccagttaattaatcatcttgattgccatccagtttgaatctcttttaaaatgtttttgccagaatttttcatactacagcatgtggtgcccgttgtggtgcggattatagcctttattccttttaatcatcgcagttctagtaaggcaactttaaatttaggttgtca

SEQ ID NO: 312184 - DNA, 602 bp, Homo sapiens
tatggtggccaggcatggtagctcatgcctataatcccagcacttagggaggctgaggcaaaaggatcgcttgaggccaggagtttgagactagcctgsccaatatagcgaaactctgtctgtgttttaaataaaataaataaagttgtggaacaaggagtaaattgtgcaagtttacaaagccaatcttttcatcaaaatgaagcctcatgctgtctgttcttttgaatagttcttagaatggccacatgcccattttgacctcaccgtgacaaagtgagggttgtttgagccaagaaaagtctaaactaaataagtaaatacagtaaaaagttaagtttattagatttaatttcccctttggaaaagagccaaaaacatggcattctaaagcaagacaacccttagatcaaatctcagatgtgccatctgtacttgaccaatctgagccttagtgtcttcgtcaaatgacattgaataaataagcacttgatagatgcttaataaatgttgggcactttctttttcatgaaaatttacatcattcattaaatattatttgactgtctaccatgtggccaggcattagcagacacacataa

SEQ ID NO: 312185 - DNA, 459 bp, Homo sapiens
ctcttgaactcaatagttatcttttagaaatacaaacttcagggaggtaactgttatcaaaagaaaaaaagagagaggaagaaacaagtttaaacaaagtttaactttttagtttctttgcttctgtgatattttttataactgcctgatttttaaacaagaaaaataaaatgatgcttagctttgtttaatgtctcaagaagttgtcatgagcagtttaattgttgagaacaagttaaataaatataactggagtaaaaatttgtaagtgaactcttcaataataacattttatacaagatgtcaacttaaaaagaggttccaaaatctttttggtaacttgcaaccttaaagttatacttaagtaagattaagtaacagatattcattaamtgtctaggtcatttcttagtaaaataaaatgctgaaacattaattgctgaacataaatttgaattt

SEQ ID NO: 312186 - DNA, 542 bp, Homo sapiens
gcattaactttcatgacaatattccagttttaactcagtcatattttctgttggtatgattgtaaatttagaatatacttatgctatttattttcacaaaaattccacataaataggaaaaaaatcagggagatttttgtggggaaatcaatatagaagattttcttcctggctttaatatttaggagatttgtaatctcctgggacaaaaaatgtcccaggaagcaaatgtgctcattatgaaagtcaaaatatcagatatttgctaaacctactctgatattttctagaactaaactataaaattatatatatccaatgcaagtatatagtctttattcaccttttactaaagaaccaaatttatgtaccrtttgaaataatttgaaggagatgtctgctttggaaatcaggagaaaacaacatgttaaggagatccttatgtaaatgtgggatctcatgttgtaacgactttgaaaggacatatgactactctaaacttagaatgagtaatccgtttattattttcatccctaccaaag

SEQ ID NO: 312187 - DNA, 666 bp, Homo sapiens
aattaaccgataaacattatcacaaactatgataaatgtgtaagtgaatcttcagaaaattatgagaatgccaagtaaacagatttgaactatcagaagaggtatgaaaagtcttaaaaatggaatatttaggacaaaaatgttacaaacaacaaaaaaagcatttttgtatgggatgaaatctgtaagaaaataggtgatttttaaaacatggtaaacaatttggttaactatgtaattatgtaccccacaattgtgggatacaccttgtttcaaatatacaagaaatgttataaaaattgatggaattctgggcataaagtagcctttagaaaattaaacaaactaaactaaaacaaaaaaaaatgtgttttcttactacaatgcagccattctagacatcaraaataatatgtaaataactcatggttaaatacaaaattaaaacagaaatttgatttttttttatgaatgatggaactggtggattgtatcttattttcagggaactctttaacccaagctgaaaatatcagaaaaaaatagtattttattttgtttaaaaatcagtggctaagtatccatctcaatgttataattcaccactgtgcccacagtcttcttgtgttctatctatggctacataccaatgttaccccaaacagt

SEQ ID NO: 312188 - DNA, 566 bp, Homo sapiens
tttgaagtttaaacacttgaacccattctttattttgactgatggaatgcacttctatttctcatgctatttgaatttattaagcttctgtgcttctaaacataattagcaaggcattaagaatattttataccttgattatgcatctttattttcaaaggcttatgcttctgtgatgtgtttgaaatcaacaaatattattgttctgtgctcgtgactagaaaatatttcacaagcaccagtaaacaaatgtaacgtattttttatttggagcaatattctgtagattttaatagagaatagtaaaaggaactattcatttyttcataaagtgtttttatgaaagaagttgaattaagatacttcatcctttacttgaataatactattatttgtggatagccataaaagatctcaccactcttgttatttcctcctggaagggtcatgtgattcttcctttccctaattttcttctctactgcttagttctcagcactaatataaaagtgtggtctcgtaggtcccctcacatgacccgacaagcaactctgatccttggaaag

SEQ ID NO: 312189 - DNA, 599 bp, Homo sapiens
atttattgtattaatgttgtactgtaacacctaaagttagactttttactcaccaatgttcagcttttcttctctaattgaattacttaaggctataaacttacatctgagcactattttacctgtattccacaggttttgacaaggagaattttatcattgatatctaaatgtctaatttctattataatttccaattggacccagaagttactgattattaattggctttcttactagatttcaaaagcatttttctagttatgtctttttttttaagttactgcattagatgcaatgtaatcacagaatattgtgtttttttgtaaagatctgcaactagctttatgtcttaggatatagccaattctcagagagactttgtgttttatattygtacaatatatttagcttatttattggtttgttcagatatcctatgaccctatttatagcttttatgtgttctaccaattattaagaaggtaaggcaaaaatccctccaatataatgacagattttctaattctccttgttattaaaaattttgctaaatatattcttagatgtatcaactcagaacatgtttctactgagtt

SEQ ID NO: 312190 - DNA, 589 bp, Homo sapiens
gagtaggtcacaaagatcacatgctttaaagggcaataaagatcacaaagcaaagggcaaagcaaagaccacaaggcaaagggcaaaattagaattactgatgatggtctatgttcggctgcacacatattgtcttgataaacatcttaaacaacagaaaacagggttcgagagcagagaaccggtctgacctcaaatttaccagggcaggatcttttccccaccttaataagcctgagggtactgcaggagaccagggcatatttcagttcttatctcaactgcataagacagacactcccaragcggctgtttatagacctccccccaggaatgctttccttccccagggtattaattattaacattccttgctgggaaaagaattcagtgatatctctcctacttgcatgtccaattataggctgtctgcaagaagaaaaatatggctctattctgcccaaccccacatgcagtcagacctttggttgtcttcccttgttccctaaaatcgctgttattctgttcgttttcaaggtgcactaatttcatattgttcaaacacacacgttttacaatcagtttgtaa

SEQ ID NO: 312191 - DNA, 589 bp, Homo sapiens
gagtaggtcacaaagatcacatgctttaaagggcaataaagatcacaaagcaaagggcaaagcaaagaccacaaggcaaagggcaaaattagaattactgatgatggtctatgttcggctgcacacatattgtcttgataaacatcttaaacaacagaaaacagggttcgagagcagagaaccggtctgacctcaaatttaccagggcaggatcttttccccaccttaataagcctgagggtactgcaggagaccagggcatatttcagttcttatctcaactgcataagacagacactcccagagcggctgtttatagacctccccccaggaatgctttccttccccagggtattaattattaayattccttgctgggaaaagaattcagtgatatctctcctacttgcatgtccaattataggctgtctgcaagaagaaaaatatggctctattctgcccaaccccacatgcagtcagacctttggttgtcttcccttgttccctaaaatcgctgttattctgttcgttttcaaggtgcactaatttcatattgttcaaacacacacgttttacaatcagtttgtaa

SEQ ID NO: 312192 - DNA, 581 bp, Homo sapiens
ggtttttatggttttaggttttatgtttaagcctttaatacatctcgagttaatttttgtataaggtgtaaagaagggttccagtttcagttttctgcatatggctagccagttttcccagcatgatttatgaaatagggaatcctttccccattacttgtttttgttaggtttatcaaagatcagatggttgtagatgtgtggtgttatttctgaggcctctgttctgttgtgttggtctatacatctgttttgttaccagtaccatgctgttttggttactgtagccttgtagtatagtktgaagacaagctaattttctttcctgttcattttttgtctgtttttaaaattattattatttttaatttgtttttttagggagaggtagtaaaagggacattatatgctatcattgctagtggaaaaatgatcatatataacgttgccacttatatttaaagattagaaaaaatattgtaatcactaaaggaagctaagtaatgatcccatttccagcaagctattagagaagttcagtaattagatcacttcattaagtattagaaaaagctaaattt

SEQ ID NO: 312193 - DNA, 563 bp, Homo sapiens
gttagctttcttcagcagagagaagcagcaaactgtattgtcaaagttacggttatttctttatttaaataataaaagactttgtgttccttctttcttttcattattstatgtctgaactttgctcactggaaaagcattcttccccaactttatttctaagaaagcattgatgtgttaattgtcattaacaactggtaataattggaaaatttttaaggtactttctttcataggttcttttggttgtttcccctgaaacagagactgagaccgaaatgtttgttgagtaagtacaagagtgttcttagaaaggaagcgagaattctcagaaagggaaggaaaaaaacatctaagcaaggatcagcctgataccatagagaaatttaaagctgaattttgtcaaaaaataatttttttcccatgtatcagggacctgtccttttctcccttgtggagggtggagggtgagtactagagatgacagagccttactggctggtgaggaagatcttgtttggacagggtacctctttaaagagcgcagccatcactcacagcaa

SEQ ID NO: 312194 - DNA, 593 bp, Homo sapiens
taacattaaagtgttaattgaatgcaggcagcccacctggaagaagaaaaagggattccaataaaatctcaggtattaggtgagtgagcccaggcatggtcataagagacaaaatggaagagaaggtggcatgcccaccttccaggggcactccactggaaaaaggaagaaagcctcagatgggcaagcatacaacttcctaaacacacggcrtgtgctcagtttccaagggtaagaaatgcactgcgcatgccggcagcccaccctcaggaaagaatcacgggaaagggatgcaagatgctagcctataaagtcctagcatcacagttaaattgggcatttgttcttcaagtcacccacctggatctcttctaagtgcactttcctttctttcctgatctaaagctttttaatgaacttccactcctgttttaaaacttgcattggtcgcattttctgctttatacccctcagtcaaattctttcttctgaggaggcaagaattgaggttgctgcagacccacatggattcgctgccagtaactcagatacctgccaccagtaacacaaccaaaaaaatattttactgtcat

SEQ ID NO: 312195 - DNA, 599 bp, Homo sapiens
cataaacaattgcaaatacttgaagacaaagaaagaaaatggtcatcaacccagaattccatgcacagacaaatctttccataagagttaagaaaaattgacatttttcatttatttctttgccttcatttaccaacaaccttaaatgaagccaagtttatgaytccagtttcagttaattaaggctcagcccttcttcctagttctctgtggctcttgactctgcactctgggtcagctttcctcttccattgaacttggctcttgttttcagaagagtagcaaagatcttctgaggtgttaacaaaaggctttacatcacccccttgcttttacctttaccatgttttcctgatagaagtctggatcatatctgtcttagaagtcattatttaacttgagaattgccagacatctggagagggtggggatgagaaagagttttattttctaattcaagaagccctggcttctttatatttagctcatttctttctgtcttatatttcctgcacagcaagaagtagtcaattcttcctggaaatcttcttcgctaagttttacagttcattaaatatatatcctgtttttcacaatgc

SEQ ID NO: 312196 - DNA, 599 bp, Homo sapiens
cataaacaattgcaaatacttgaagacaaagaaagaaaatggtcatcaacccagaattccatgcacagacaaatctttccataagagttaagaaaaattgacatttttcatttatttctttgccttcatttaccaacaaccttaaatgaagccaagtttatgattccagtttcagttaattaaggctcagcccttcttcctrgttctctgtggctcttgactctgcactctgggtcagctttcctcttccattgaacttggctcttgttttcagaagagtagcaaagatcttctgaggtgttaacaaaaggctttacatcacccccttgcttttacctttaccatgttttcctgatagaagtctggatcatatctgtcttagaagtcattatttaacttgagaattgccagacatctggagagggtggggatgagaaagagttttattttctaattcaagaagccctggcttctttatatttagctcatttctttctgtcttatatttcctgcacagcaagaagtagtcaattcttcctggaaatcttcttcgctaagttttacagttcattaaatatatatcctgtttttcacaatgc

SEQ ID NO: 312197 - DNA, 599 bp, Homo sapiens
cataaacaattgcaaatacttgaagacaaagaaagaaaatggtcatcaacccagaattccatgcacagacaaatctttccataagagttaagaaaaattgacatttttcatttatttctttgccttcatttaccaacaaccttaaatgaagccaagtttatgattccagtttcagttaattaaggctcagcccttcttcctagttctctgtggctcttgactctgcactctgggtcagctttcctcttccattgaacttggctcttgttttcagaagagtagcaaagatcttctgaggtgttaacaaaaggctttacatcacccccttgcttttacctttaccatgttttcctgatagaagtctggatcatatctgtcttagaagtcattatttaacttgagaattgccagmcatctggagagggtggggatgagaaagagttttattttctaattcaagaagccctggcttctttatatttagctcatttctttctgtcttatatttcctgcacagcaagaagtagtcaattcttcctggaaatcttcttcgctaagttttacagttcattaaatatatatcctgtttttcacaatgc

SEQ ID NO: 312198 - DNA, 406 bp, Homo sapiens
ttactacatggctttaaacttgcctgtttacatataggtctcccacagtgagctgtgagctgttagaggctacacaccatgtttgtatgcatggcatctaggatcatggcccctttatacagaatctgaacattctatttgaatgaaagagtgcagaggaaagcaatctttcacgttcctttgctatttaataggtaattcaaactgccttcctactgtctgccatttttcatgtctaaatattgttgcatctcaaatacttctatgttccaccatctgatagatatatattattaattaatgttgcactcgattccaatatatgtcagtgctacccaatgcttgttgccattcctctctgatttttctttcttrttccttaagtgttgaaagaagatgtattgag

SEQ ID NO: 312199 - DNA, 410 bp, Homo sapiens
ttattatttttttctcagctttattarcatgtaattgacaaatacaaattttagatacttttggtatagaatgtgatgttttgaaatatgtatacacagtgaaatgctgaaatcacgctagtttacatatggatcacctcacatacttatcattttgcgtgtgtgatgagatcatttatgatgtaccttatgagcaattttcaagcacacaattattactgactatagttagttatattagtcactatagtctacaatacatctctcaaacttctgcatcctgcttaaccaaaactttgcaccctttgaccaacatctcccaattcccccagctccacctcaaaccgtggtgaccatcattctactctctggcttgtataacatcaacattttaagatgacaaatataag

SEQ ID NO: 312200 - DNA, 585 bp, Homo sapiens
accgtggtgaccatcattctactctctggcttgtataacatcaacattttaagatgacaaatataagtgaaatcatgaagtatttgtctttctgtgcctggcttctttcacttagcataatgtccaccaggctcattcattttgttgaaaataattcatttctttttaaagactaaatattttatttatatggtaayatagtttggatatttgttgcccctcaaatctcgtgttacatttttatcttcaatgctggaagtggggcctgctgggaggtatttaggtctggggacagatcccttatggcttggtgctgtcttcatgatagtgagtgagttctttcaggatctggtcatgaaaaagtatgtggcaccttcctctccaactctctcttgttgctgctctggccaagtgatgtgtctgcttccctttcaccttctctcatgatggtgagcttcctgaggcatccccaggatctgagcagatgccagcaccatgcttcctataatgcctgcagaactgtaagccaattaaacctctttgctttataaattactcaatctttggtattcttcatagcaatgc

SEQ ID NO: 312201 - DNA, 537 bp, Homo sapiens
tagtgatatggaccatgaagttcaggtcaatgaagatgtaaatgaggaacttagtgggaagtggagcaaacgtcattcatgttataccttagcaaagagcttggctgcattctatttatgccctagggatctgtggaagtttgaacttcagagtgacaacctaggatatccggtggaggaaatttctaagcagcartgtgctcaaaatattgcctggctgcttctaacagcctactctcagatgtagaagcaaaaataaaaaataaaaaataaaaaaaaaaaagaaaagacttaaagttggaatttatatttgaaagggaagcagagcataaaagtttggaaaatttgcagcttgaccaggtgcagaaaaagataaagctttcttaggacagaattcaagcaggctgtggagcaaccacttactagaaatatgtgcataactaaaagggagccaagtgctaacaaccaagacagtagaaaaatggcctcaaagtcatttcagagacccttgtggcagcccctcctatcacaggcctg

SEQ ID NO: 312202 - DNA, 453 bp, Homo sapiens
gagcaaccacttactagaaatatgtgcataactaaaagggagccaagtgctaacaaccaagacagtagaaaaatggcctcaaagtcatttcagagacccttgtggcagcccctcctatcacaggcctggagtcctaggaggaagaaacagttttatgggtcaggcccatgggcctgatgtgctgcacagcctcgggccactgcttccagcatcctgactgctctgactccagccttggctcaaagggccccatttacaactgtggctgcttcttcagagggtgcaagcagtaagccatggtggctttcaggtattgttaagcttgcaaragcacagaatgcaaaagtgaagaagcagcctctacctagatttcagaggttatgtggaaaagcctgtgtctacagatggaatcctgctgtaatggtggagcttccacagagaacttctattcag

SEQ ID NO: 312203 - DNA, 522 bp, Homo sapiens
aagggagccaagtgctaacaaccaagacagtagaaaaatggcctcaaagtcatttcagagacccttgtggcagcccctcctatcacaggcctggagtcctaggaggaagaaacagttttatgggtcaggcccatgggcctgatgtgctgcacagcctcgggccactgcttccagcatcctgactgctctgactccagccttggctcaaagggccccatttacaactgtggctgcttcttcagagggtgcaagcagtaagccatggtggctttcaggtattgttaagcttgcaagagcacagaatgcaaaagtgaagaagcagcctctacctagatttcagaggttatgtggaaaagcctgkgtctacagatggaatcctgctgtaatggtggagcttccacagagaacttctattcaggcagtacagatggaaaatgtgggattggaggccccagtagagtccccaccggggcactgcctagtgaagcagtaaaaaggaggtcaccatcattgttctccagg

SEQ ID NO: 312204 - DNA, 530 bp, Homo sapiens
atttcagccagctggaaaatgtgtttcaaaataaagttaaatttactaaattaaaagtaaatgtaggctaggctcagtgacacacctataattccgtacttggggaacctgaggtgggaaratgccttgagctcatgagttaaagactagcctgagccaaaaagcaagttcctttgtctacaagaaattaaaaaaaaaaaaaaatagctgggtgggtgcagtggctcatgcctgtaatctcagcactttgggaacctaaggtgggaggatcacttgagtttgtccaagagtctgagaccaacctggacaacatagaaaagaccttgtgacttaaaaaaaaaaaaaaaaaaaaaagccaagggtggtggcatatacttgttgtggtctcagctacttggaaggctgacaagggaggatcacttgagcctgggtgaaggctccagtgagccataatcatgctactgcactccagcatgggtgatggagtaagattttatctaaaaaatataaagaaatcatttaaaaactaa

SEQ ID NO: 312205 - DNA, 530 bp, Homo sapiens
atttcagccagctggaaaatgtgtttcaaaataaagttaaatttactaaattaaaagtaaatgtaggctaggctcagtgacacacctataattccgtacttggggaacctgaggtgggaagatgccttgagctcatgagttaaagactagcctgagccaaaaagcaagttcctttgtctacaagaaattaaaaaaaaaaaaaaatagctgggtgggtgcagtggctcatgcctgtaatctcagcactttgggaacctaaggtgggaggatcacttgagtttgtccaagagtytgagaccaacctggacaacatagaaaagaccttgtgacttaaaaaaaaaaaaaaaaaaaaaagccaagggtggtggcatatacttgttgtggtctcagctacttggaaggctgacaagggaggatcacttgagcctgggtgaaggctccagtgagccataatcatgctactgcactccagcatgggtgatggagtaagattttatctaaaaaatataaagaaatcatttaaaaactaa

SEQ ID NO: 312206 - DNA, 563 bp, Homo sapiens
ttgggagaggacagttgattaaagtgttgcccaacatgcagcagactttgaataagccagaagtaaatttttgttttgttaagccactgagatttggaggttgatttgtttcaaccacattacctggcctatattcattgatgtaagaggatttggagctgtaatcrttcattctcacactgcaaaaaagacatacttgagagtgagtaattaataaagaggtttaattgactcacagtttcacatggctggggagacctcaggaaatttatggtcatggtggaaacatgtgcttcttcacagggcggcaggaaggagaagaatgtgagcaaaagaggggaaaccccttataaaaaccatccgatcttgtgagaattcactcactatcatgagaacagcatggtggaaactacccccatgatccaatcacctcctaccaggtccctcctttgacatgtggggataacaattcagatgagatttgggtaaggacacaaaaccaaacattatcaggaggtaaggcagttaactcttggtaaccataataattcacttgatgggaa

SEQ ID NO: 312207 - DNA, 585 bp, Homo sapiens
caatattcaccttgtgcagatatgtgacaactaagaactcattgtttgggttgagaccccaggcatgctgcatatttataacctgttccctgggcttcaatctaagtctagaaaatactgaactatactttagctataatggcttgggtagagactttggtagttgatttggatcaactaaatcaaggggacagtgcagaaatcaaccatactaagggttgagagacacataaatcaacagcatcgaagccaccttgcacttaggcagatctgattaagtttgttctctggcagtaggttagatagaagcattagactttgagtagagcaaagtagtaacagcatctggaataataatgtttcctgtaacaaatgacccaacagaatamcttggataatgtggcaaatctgttttgttacattaaagacagaaaaatgtatattaggtttttctaaaattttgttccagagggaggggggctccaagccgagagagaaaaaccctgtgtgtggcacaaacatagtcggttatattgggaggctggaggaggcggtgtcttatttgcacagggcccaggggattgg

SEQ ID NO: 312208 - DNA, 585 bp, Homo sapiens
caatattcaccttgtgcagatatgtgacaactaagaactcattgtttgggttgagaccccaggcatgctgcatatttataacctgttccctgggcttcaatctaagtctagaaaatactgaactatactttagctataatggcttgggtagagactttggtagttgatttggatcaactaaatcaaggggacagtgcagaaatcaaccatactaagggttgagagacacataaatcaacagcatcgaagccaccttgcacttaggcagatctgattaagtttgttctctggcagtaggttagatagaagcattagactttgagtagagcaaagtagtaacagcatctggaataataatgtttcctgtaacaaatgacccaacagaataacttggataatgtggcaaatctgtyttgttacattaaagacagaaaaatgtatattaggtttttctaaaattttgttccagagggaggggggctccaagccgagagagaaaaaccctgtgtgtggcacaaacatagtcggttatattgggaggctggaggaggcggtgtcttatttgcacagggcccaggggattgg

SEQ ID NO: 312209 - DNA, 589 bp, Homo sapiens
agtatattaaaaaatattcagcagtggattctgagattagtaggtgattggtggaaggaaaaagcaggtctggaaagtctttgcgtatgcaaagttatctcttcatgttacctaatgggggtatggtggaggcacctaacagccataatgggatcctactttgagagtgaccttatggtccaagaagaatgtctgctytgagttctgagcaaggaatccagaagtggccagctcattgattcactccttatctatgaaggatgtctgaacacccagcccattccttagaaagcagactgtacagggaattgaagtcctatattttgagttaaatggaagttactaggcagagggtgctgaaaatgctatataaactgcatgctttttacaaacaatagtgattctcctgtccagcccactaccactagactgccccatatataattctcctcaataaatctcatgtctaattcactgagtttctagttcagcctctcagatatggtttcatccatactggagtcagtaggggtctggaacaacaatgggtcacatgggcaaatttggagggagttaatatgaaacacgt

SEQ ID NO: 312210 - DNA, 589 bp, Homo sapiens
agtatattaaaaaatattcagcagtggattctgagattagtaggtgattggtggaaggaaaaagcaggtctggaaagtctttgcgtatgcaaagttatctcttcatgttacctaatgggggtatggtggaggcacctaacagccataatgggatcctactttgagagtgaccttatggtccaagaagaatgtctgctttgagttctgagcaaggaatccagaagtggccagctcattgattcactccttatctatgaaggatgtctgaacacccakcccattccttagaaagcagactgtacagggaattgaagtcctatattttgagttaaatggaagttactaggcagagggtgctgaaaatgctatataaactgcatgctttttacaaacaatagtgattctcctgtccagcccactaccactagactgccccatatataattctcctcaataaatctcatgtctaattcactgagtttctagttcagcctctcagatatggtttcatccatactggagtcagtaggggtctggaacaacaatgggtcacatgggcaaatttggagggagttaatatgaaacacgt

SEQ ID NO: 312211 - DNA, 589 bp, Homo sapiens
agtatattaaaaaatattcagcagtggattctgagattagtaggtgattggtggaaggaaaaagcaggtctggaaagtctttgcgtatgcaaagttatctcttcatgttacctaatgggggtatggtggaggcacctaacagccataatgggatcctactttgagagtgaccttatggtccaagaagaatgtctgctttgagttctgagcaaggaatccagaagtggccagctcattgattcactccttatctatgaaggatgtctgaacacccagcccattccttagaaagcagactgtacagggaattgaagtcctatattttgagttaaatggaagttactaggcagagggtgctgaaaatgctatataaactgcatgctttttacaaacaatagtgattctcctgtscagcccactaccactagactgccccatatataattctcctcaataaatctcatgtctaattcactgagtttctagttcagcctctcagatatggtttcatccatactggagtcagtaggggtctggaacaacaatgggtcacatgggcaaatttggagggagttaatatgaaacacgt

SEQ ID NO: 312212 - DNA, 548 bp, Homo sapiens
tagtgtaccctaatttgtttagattggtcattttgtgaaagttgtactccattgcatgcattctgtactattctatgcactactgaaaataattgacattatcagtaatctccatcasgtaagaaaaccatcaatgtctaactcaatgtgctgggtgaatttaacccgtattcatttgtgagacaaagtgtgggaattcattaaacctctttgaatatagttttaccatttaaatattagaaaggaagtaatgaaagtcatttaacatgaacatatttaaaggacattactaaactctcaaaatctcatgtggaggtatttatcccatttcatagagaaggaaagaaaccaaaactaagagaggtcaaaatagcagtttcctacagtaatagatgggcaaaaaccacaattttggcaaaaccactgccccacaatataatattaactaatactattagaaagtaccaggcatatttctaagaactattgaaaattaactcaatgaataatcaaataataacaagaaacaaacaaacaagcaaaaaaac

SEQ ID NO: 312213 - DNA, 487 bp, Homo sapiens
aggcttcatgccattgatctgtgcaatgaatttttgaataaaaccttaacagcacagacaacaaaatcaaaaatagacaaatgggattaaattggactcaaaagcttctgcacagcaaagggaatgatcaacacgatgaaaagacaaactacaggatgggggaaaatatccaccaactgtgcatctaataaggagttaatttataaaatatataagaaactcaaacaactcaatagcgaaacctaaaaaaaaattaaaattaaaattattcaattcgaaaatgggtaaaaatctcaatatacatttcccaaaaaaagagtaaaaggccaccaggtatatgaaaaaaatgctcaacattactaatcatcaagcaaacgcaaatcaaaaccacgatgagaatcacttmccactatcccagtttgtatggctattacaaaacagataaaatataacaaacactggttgggatgtggagaaaaacagactc

SEQ ID NO: 312214 - DNA, 543 bp, Homo sapiens
ctattacttgcttttatgactgttgatgtatgaaataagccattcaactgaaaaacaaatatttaaattgaataagaatgacattgacaatgaggttaatatgcataaatgtatatctagatcaaagtaactttttctatgatttacaaaaaatacagtttacattaaggcagcaagatcaatatgcttcaccactgttagtggaaatgtaaattacagataacagtatggaaactgcttccattacagaaaacagtatggaagctgctcagaaaattaaaaatagaactacataatacgataatcccattaccaggtatatattaaagggaaatgacatctgtttgtcaaagagatatctgaactcttgttattgaaggactgttcataatagtaaagatatgaaatcaacytaaatggctgtcagtgaaatcccaaaatatatggaggttaaataacacatggttcaaagaataaatctcaagacaaatttaaaaatattttgaactaaacgaaaatgaagacacaacttagaaagagtta

SEQ ID NO: 312215 - DNA, 606 bp, Homo sapiens
ttcataaataaaaatcaatcactttcctatatataatcaatagacaagtggaattttgaattaaaaacagattataatttacattagcactctaaaaataaaataattagggatatattttacaaaatctgtacaagaaccatatgagaaaaaccacaaaactgtccaatgaaatcaaagaactaaatagagtgatattccatggttatagataagaaaactcaataatattaagatgtcagttcttccacacttaatctatagatttgatacaatcccaatcaaaatatcagcacgttattttgtgcattttgagaaattaattccaaagtttatctagggaggtaaaagacccagaataaacaacatattgaagaagaactgacagtacccaacttcaagacttactataaagctacagtaagcaagacaatgtggtgttggtgaaagaatagacaaataggtcagtggaacagaacagagagcccatgaatagacccacatatacatagtcaactgatctttgacaaacacggtctatcattcagcactaaaagaaaaccatgagctatcaagmcataaaaatacatggaagtatctaaatgc

SEQ ID NO: 312216 - DNA, 499 bp, Homo sapiens
actgctcaattgctgcagcatttcattgataggatccaggttctgtctgcctttttgctccgccacttcctggtgtggtaatatctactctcagggctatcagatatctgctgcagatcccagcatcatttacagtcagggactagtgcctctccctgtggctcccttttcattaggaagtcaacctttttttaagacccccacacagacacacacagcacactttcctcctcmtgttcccctctgccaggactggaccataaacacaagtcccaacttgaagcaagtctgggagcatgaatatccagcaagtgtgtatccctagagggaagctggatccaccaggaaagaagcagatgcagggctgaggtagggacagaatgggtggtgagtaatagcccacactggatgacccagggactcaggaatgaatgaagagaagaacagaagcatttttcctgcctgtaacttggatggtctctcttcctactgcaccaga

SEQ ID NO: 312217 - DNA, 445 bp, Homo sapiens
gtgccagtatggtcaggttctggtgagaatatacttcctggtttcaacagtcaccttcttactgtgtcatcacctggcaaaaagagtgggaactaactctctggcctcttcccaaagggaagacattgatgtgtggaagcacttataagcatcagtcagaggttaaagatttataggcaataacaagagggacagagtttgatgatttttttaaataytgcatctaaatattatttatcttgattactgagtttgttgatgcacccttaaattttgtgtgcaacataagtgccttcctcatctcacctactcctagccctggttactcttccctgacacttggtaagtgctcaagggcagttaattgttatttatggggcagcttaaagataaaaatgtatatattaataatgtttttacaaaaaaaattagtggtgtttgtttt

SEQ ID NO: 312218 - DNA, 577 bp, Homo sapiens
gccgggcatggtggctcacacctgtaatcccagcactttgggaggccgaggcaggcagatcacctgaggtcagsagttcaagaccagcctagccagcatggtgaaacctcatctctactaaaaatacaaaaattagccaggcatggtggctggtgcctgtaatcccggctacttgggaggctgaggcaggagaatagcttgaacccagggggcggaggttgcagtgagccgagatcactccattgcactccagcctgggtgactctgtctcaaaaataaaagaattctggactgtaatttttaaaatttaaaataaacatacacactcttttacacaataatttcacttttgagaaatgatacaaattatagacaaattttccttttaaaattatttgtaatagaaagaaactaagtgtatctatttagattatagtaattcctttcattataatatgtagcctttgattatgtcaaggagcaatttttaaagacacgaaaatgtgctttattctttgttaactaaaatatatatcaagattataatatctcatataagtgaaatatatattacata

SEQ ID NO: 312219 - DNA, 591 bp, Homo sapiens
acattctttgtgattccatttatataaagtataaaaacaggcaaaaccaatctatgcagctataagtcagaatagtagttactcttggagaaaggaggggtagtttctggaaggacacacaagggaaatgtcagggtattattaacatgctgtttcttgatctaggtgctagttatatttaaaatttcactacactgaatcatgatatcacaagtacggtcatcccttggtatccatgggggattgsttccaggacctccctaggatactaaaatttgcagatgttccagtccctgatataaaatggtataacatttgcatataacctaaatcattgcatactttaaatcatctctatattacttattaatacctaatacattgtaaatgctatgtaaatagttgttacacagtactaaacgtttagggaataatgacaagaaaaataagtctgtgcatgttcagtatggacaaaatttttttcgaatactttagtttggatgcacagatggagaatctatgactacagagggccagctgtatacatatatgcacttttctgtaagtttattcttcaataaaaagtttcag

SEQ ID NO: 312220 - DNA, 602 bp, Homo sapiens
gaagagaacacagatttcctatattcttggattatccttcctttctgagggtctcagatgtctctatgcatctgccaaaatgccagctgtacctgaagatttaagagatttttggtagttgctggcatggtccctcgacacttaaagtttatatcacaaaaacaaaactaggttggtttcagctctttagtcctttgttaaaaaccataaatcaaatttggttatttaaaagtgaccttaaaaagtttaaaggaaaatatatatattctatcttcccaataagaaacagattycatatttatacttaaatggcaaataaatatattttaaagccaagcaagttcctctcctctatacaggctaagaaaacagagttattatatctttattgctgatgatcacatcactcatcaagaactagtttcacaattttaggagacttttttcatgacataatataaaagataagggtctaacttaagtctgagcaggcagaatagagctgtgctcccaacatccctatcacaaacatatgacgaatgaacaacaaaacaactgaatctgtttacatcataaccattgtctatgtgatacacaactgc

SEQ ID NO: 312221 - DNA, 565 bp, Homo sapiens
ctaccagggtttttatcactttctctagtttcatcatgaagaaaaactaggctcatgaaaagcgaataagcaattttgtggccacaacacatgaggtgtccaatgacaaggtctgtcttttttgtacttggttgctacattacagacacattgagaacatccaaggtttgacgttaaactaaattcccaggaatgattagttcaagaaggtcccatctcagaaaattgaatcttagaggaaggstaataatttattcattgaacaaaattcattgagctcttagtaaacacttagtaaatacagactagctctgtagacccttagatcaaatgtggagctcacgctacaatgaggaaatcaaacatgtggatacataatcagagtataatattgtaagacactgatatagaaagaaatgcttcgtacatggaagtactaaggagagctgctaactcagcaggacatggggagtgtcagaaaagatttcctggaaggagtgacacacagtctcaatctcaaatgataacttagaattcgccaagcattcaggacagcagaaacagc

SEQ ID NO: 312222 - DNA, 592 bp, Homo sapiens
tacaagtacaagtgcaggtttgttacacaggtaaatttgtgtcacgtgggtggcaaggtggggggtgttttacagattagttcatcaccaaagtattacccctagtacccattagttatttttcctgattctcctcctcctcccacccctaccctccaaaaggccccagtgtgtgtttttcccctctatgtgtccacgggttctcatcatttagctcccactgataagtgagaacatgcggtatttggttttctgttcccgtgttagtttgckaaggatagtgtcctccagctccattcttatttcagctgccaagagtcaaacttcacatacatcctcatttggaacttaagtcatcagaaacatctcacctttcctaatgttggggctcagaaaatgatatccccaaaatgttgctttggacttcaaactgagaacaccttggaagcagcaaatgcagaactctgatgttcccttatctgcctaaggaaagttcctccagaagaaatgcagttgtcatgataccccttcctataatctcatcaaacagggatgattaactcacgggaaaggagactaaagggaaggttca

SEQ ID NO: 312223 - DNA, 451 bp, Homo sapiens
ttcattcattcaacaaatattattgggtacctactatatagcaggcataattctaggcagacagattgtasaagcaataaaatagaggtcctgctctcatagactcacattctagctggggaacaggggagagatatacagtaaacaaatatatgtcaggagaagatataaatcaaggagaaaaataaaggaaagtgtatttatgaccagagaaaatagcaggtggtttcccagataataaaaatcccatagttctataattaaactgtgtcacaacatccacatatattcaggtatttctcaggtcaaatcatgaccattacaaaagcttaatatacgaaaattctagtagaccatgctacctcataaggagatgttatccttatgagtatgaagacattaaagtaacgttagcagtggtgaatccatatgggtctgcaccatcttgatt

SEQ ID NO: 312224 - DNA, 496 bp, Homo sapiens
aacaaattgaggggtatgtgcttccattcaaaggaaatgaggagcaattttaaaagcagagcagggccaggtgcagtggctcgcacctgtaatcccagcactttaggaggctgaggcaggaggatcgcttgaggccaggagttcaatattagcctggatgacaagtgagaccccatgtctacaaaaaaaatttttaaatatatagctaagcatggtggctcatgtctgtaattccagctattcaagacrctgagatgggaggattgcttgacgcctggaagtagaggctgcagtgagtgtgatcatgccattgcactccagagcctggtgacagagcaagatcttatctcaaaaaactttttaattaaaaaaataaaaaaagagcagtcaagcatgtggctacaaaaatcatttaaaatagagataatttttaaagtgagtagcattgatctagaaattactttttaaagttacattataccaaaatgtgtgtata

SEQ ID NO: 312225 - DNA, 579 bp, Homo sapiens
agtccatcaaggatctttgaatatattcactgatcatcctctgtagacatcctgacatagcctagaaaataaagtcagcatcctcctcaagtgattattatgcatccacttgcaaaataagcytgaagaaatgtctgcttcccgaagttcgctgattactcctctctgacacattggctaggtgaatatgaaacactgggtttctgtacatgacaaaaacaagagactgtgcctcccagggtgagaggacattggtgaaaataagctagggactcattcctgatgattgtactgtttcagcacctagtacactcccatataatttgtagggacttacaaaaaggcttgatgaatgaagggtgagtgagtgagtgaattaatgaatgaaagctactggccgctttcaaactacagaatataaatctcccaggaatatagagcaagattatctgaagtgctggacgcatattttgccttctttttcttctgaggctctttttcttggaagatgtggactgtatttgagagagaagaaagccaacttcaagttctatcagataaaaattgtgtatgtagctc

SEQ ID NO: 312226 - DNA, 608 bp, Homo sapiens
tctgcttcccgaagttcgctgattactcctctctgacacattggctaggtgaatatgaaacactgggtttctgtacatgacaaaaacaagagactgtgcctcccagggtgagaggacattggtgaaaataagstagggactcattcctgatgattgtactgtttcagcacctagtacactcccatataatttgtagggacttacaaaaaggcttgatgaatgaagggtgagtgagtgagtgaattaatgaatgaaagctactggccgctttcaaactacagaatataaatctcccaggaatatagagcaagattatctgaagtgctggacgcatattttgccttctttttcttctgaggctctttttcttggaagatgtggactgtatttgagagagaagaaagccaacttcaagttctatcagataaaaattgtgtatgtagctcctccattacttgggtaaggtcaggagtccaccacagggctatgtgccaaagacgtggattaaaatcttgaaaacaagttttaagtcttttaataaatagaaatcttaatgagagagtacaaatcatttaactcaggtagctggttgggcatgatgtcttgaa

SEQ ID NO: 312227 - DNA, 608 bp, Homo sapiens
tctgcttcccgaagttcgctgattactcctctctgacacattggctaggtgaatatgaaacactgggtttctgtacatgacaaaaacaagagactgtgcctcccagggtgagaggacattggtgaaaataagctagggactcattcctgatgattgtactgtttcagcacctagtacactcccatataatttgtagggacttacaaaaaggcttgatgaatgaagggtgagtgagtgagtgaattaatgaatgaaagctactggccgctttcaaactacagaatataaatctcccagsaatatagagcaagattatctgaagtgctggacgcatattttgccttctttttcttctgaggctctttttcttggaagatgtggactgtatttgagagagaagaaagccaacttcaagttctatcagataaaaattgtgtatgtagctcctccattacttgggtaaggtcaggagtccaccacagggctatgtgccaaagacgtggattaaaatcttgaaaacaagttttaagtcttttaataaatagaaatcttaatgagagagtacaaatcatttaactcaggtagctggttgggcatgatgtcttgaa

SEQ ID NO: 312228 - DNA, 533 bp, Homo sapiens
gagaattactaaaatgtgacacaaagacatgaagtgagtccctgatgtttgaaaaacagctccaacagacttacccagtgcaggattgccacaaatcttcaatgtgcaagaaatgcaataaacgaagtataataaaactaggtctgccattatattaaatatggtgttttaaaaacaatcacacataaagtaaggttatatatagaccaattgacagaaatataattctttatccagatttttgttgatggtcattttcatagattttgctttgacttacarattgtattaggccattcttgcactgctataaagaaataatggagactgggtaatttataaatagaagagatctaattggctcaaggttctgcccactatacaggaagcctagtggcttctgcctctagggaggcctcaggaagcttccaatcattacggaaggcaaagggagagtgaggcatcttacgtggcgggagcaggaccgagagaggaggagagggaggacgtgctacacacgtttaaaacaacca

SEQ ID NO: 312229 - DNA, 451 bp, Homo sapiens
agaaacctcctattcttttcaaatcaaaactattatttatccatacatttattcattgcatgtatcaacaatttattggtatctaccatttatttgctaagcacctttgataaagagatgtaaaaataatctctatacttattgaactcattccagctgaagagacacatataaacagctagagatattttaaaactgctaaaagaattcagatccaagtattgcccaagcaggagcrctaagtgcttagcatattccaggttagcaaatagtctcacatggaagcactgtggtgtgtgccaatccatggagtggtggagggtgaatggaagggaagagtggcctagaagtctgtgtgctatgccaaggagcttagactttattctctaaatgagaatcatcaaaattgcttttcttcttcttttttaaagatgttttagaaagattgcct

SEQ ID NO: 312230 - DNA, 451 bp, Homo sapiens
agaaacctcctattcttttcaaatcaaaactattatttatccatacatttattcattgcatgtatcaacaatttattggtatctaccatttatttgctaagcacctttgataaagagatgtaaaaataatctctatacttattgaactcattccagctgaagagacacatataaacagctagagatattttaaaactgctaaaagaattcagatccaagtattgcccaagcaggagcactaagtgcttagcatattccaggttagcaaatagtctcacatggaagcactgtggtgtgtgccaatccatggagtggtggagggtgaatggaagggaagagtggcctagaagtctgygtgctatgccaaggagcttagactttattctctaaatgagaatcatcaaaattgcttttcttcttcttttttaaagatgttttagaaagattgcct

SEQ ID NO: 312231 - DNA, 591 bp, Homo sapiens
tcaacaaatggtgctgggataataggcaagccacagttagaatgaaagtggatgctcatctctcaccttacacaaaaatcaactcaagatagatcaaatatgacctgaaaccatgaaaattctagaagataacattggaaaaacccttttagacattggcttaggtwaagacttcataaccaagaacctaaaagcaaatgtaacaaaaacaaagataaataaatgggacttaattaaactaaaaaaagagaatgttttgattgaagggaggctatgtttccttgagagacaccttgagggactgacatccacatttatggttaatctgtactctcaccttcccaacaagacaattggctttttgacatgatggctgtgactttgactggagaaatggacttatcaggaccttgctgatattttttggacagttgccttgagctgaaatgaaaatcaaaaggcaatacgctcccaccagtcagagagaagacttatagaaatcaatggggttttggtccaagtctatctcttgcatagatgtggttttgcagtggatctgcaaaaccatagtggttatattctctgtttctg

SEQ ID NO: 312232 - DNA, 554 bp, Homo sapiens
tagaagtaagctttacgatcagttacagaaggaaggactttagtaactatgcttatattctttcttcacattatatatatatatatatatatatatatayacacacatataatgtatttatcttagccaaattcttattctactttcttttctattagcttatataaggagtattgttagtcattaaaagtatgtctctgtctgcaaaattataggacattgggtagagattgtgaccaagacagaaaaagaatgaatatccagaaatgaatgcagtggcattaggattattgtcttgccttttgagggagagattgagcacaactttattagattgacagatagttctcacatgttagttaaaagtgtaatattattgttgtttggaaatttaaatatatgtgtatggagagctaaactagatattgtgtcttgatatgtaatatgatccctgctcttttaaactctgtcttgttacatggggcttgacagtttggaagctacattaagcagatttactagccagtagggaatctggtttaaattctgccagt

SEQ ID NO: 312233 - DNA, 596 bp, Homo sapiens
actacctttcctttaaaaattacccagtstgttgtattttgttatagcaacacgaaatagactaagataggtattaaacaaattgtacagtatagctcacatctgcaccaccaagattactattagaagagcttgtccctgctagctactgattcttcagcctggttctcagcataagacaattgggacagatatgagcctaagctaaggccaaacacaactgaacttcagcccaaaccaaagtcacttcagccaatcctcagacctgtagttgacaaaagtaaatgctctgttataagccattgagtttgggggtgtggattgttacagggcattagttgacaactgactatcacacctaacttcttcttattgcactgcatatacaaaaaatatttgcttaagaacatacatggagaaccagaagcccccagtgatagtttttaagtagtcttttatctcctgcagactcggggcagatacagtgagcatcaagctatggtttgaatgcttgtgttcccccaacattcatatgttggaatctaaacctccaggatgatggcattaggagatggcattttcagaaggtgattaga

SEQ ID NO: 312234 - DNA, 596 bp, Homo sapiens
actacctttcctttaaaaattacccagtctgttgtattttgttatagcaacacgaaatagastaagataggtattaaacaaattgtacagtatagctcacatctgcaccaccaagattactattagaagagcttgtccctgctagctactgattcttcagcctggttctcagcataagacaattgggacagatatgagcctaagctaaggccaaacacaactgaacttcagcccaaaccaaagtcacttcagccaatcctcagacctgtagttgacaaaagtaaatgctctgttataagccattgagtttgggggtgtggattgttacagggcattagttgacaactgactatcacacctaacttcttcttattgcactgcatatacaaaaaatatttgcttaagaacatacatggagaaccagaagcccccagtgatagtttttaagtagtcttttatctcctgcagactcggggcagatacagtgagcatcaagctatggtttgaatgcttgtgttcccccaacattcatatgttggaatctaaacctccaggatgatggcattaggagatggcattttcagaaggtgattaga

SEQ ID NO: 312235 - DNA, 662 bp, Homo sapiens
tttgatgattcaatttgtccacaggagtaggagacagactggaaatgtaggctgagttagcgcataaatgatcctgtgggtcgtgctatggatttaggattttattctgtagggagctattgaaaatgttgaccagtgcatggcacgatcagatttgccttttggaaagataattctggtggtgtgtgaaagctgagtttgagggggttcacacagagcagggagcagctaatacgctattcaaacaattaagttcaggctttaatgtggcattgaaactgaagaagagaggatagactcaaaaactatttaagaggttcaaaacctagcacttgttgttttgtaaagrctctttcaattctcactgataccttctccccccgttcatagaacttgtgagcgtgtggcttgggagaagcatctgcatgccaaaacaggatcctcatgttctctaactcttgtccacctctgaacccattgctacacagtctctattgaacatcatcttccctcagaatgaattctctaagacttacattacatgggttaaagtcatattcatttaatgttctgatagttaatcctcttctctatgaaatatcagttgatacttaggaagaggaaagcgtgttttgtgttaaagtaaaaaaatggcaaacaca

SEQ ID NO: 312236 - DNA, 527 bp, Homo sapiens
gaggttgctggtctttgtgctgtagtgggttgaatagtggtccccaagaagactgtccaagtcctaacaccctagaacctgagaatgtaaccttatttggtcaaaatctttgcaaatggaattaagcatctccagataagatcatcctggattaagagtgggccctaaatccaatgtcaggtgtcctaccagaggaaggcagagggcaagctgacacacagagatgcagggaggatggccatttgattaaaatgaagtcagagattggcctgatgccaccagaagccaatgaacaccaagagccaccaaaaactgcaggaagcaaggaaaatcctttcctcgtggcttcagagggagtgcggccctgccaacaccacaatttcaaatgtctggcccccagaaccatgagagaataaatttctagtattttaacccacccagttgtttgtggtaatttgtcacggcagcccttagaagctaatataggtacaaaayataagagagtgccaaaaaaccctgtaatcaac

SEQ ID NO: 312237 - DNA, 605 bp, Homo sapiens
taatataatattcctggtctatgcagattctatctcttagaattaagattcttakgtttataatgggaaaaaaaaacaatatgaacattatcttttcagacttacctccttgaaagctatatttgatatgtaggttcatcaacacagtctgaaacataatcagaatttggtaagtatctaatgtctaagttcattcaaatacagttttgttttgttttgttttgtttttggctggggttgggggggtggggattcaagtctaaagtgaatgaattactgggaataacaagttaagcccgaatcttaaacataaaaggtttccaccatctatatatagataatacatctttctcttttaactaaaaaacctaatactgagtctatgcagtattgagaagtcagttgtttaggaaattggcaacttgttattcactttgcggtaaacataattttaacgtagtgaccaaaattttatcacttccagaaaactctaaaatttgagcaaaataaccttttatttcaaacatttatgagattctctatatctagtttaaatcagtcttgcagcgttttaattcttcttacaaattcacttaacagaaagt

SEQ ID NO: 312238 - DNA, 605 bp, Homo sapiens
taatataatattcctggtctatgcagattctatctcttagaattaagattcttaggtttataatgggaaaaaaaaacaatatgaacattatcttttcagacttacctccttgaaagctatatttgatatgtaggttcatcaacacagtctgaaacataatcagaatttggtaagtatctaatgtctaagttcattcaaatacagttttgttttgttttgttttgtttttggctggggttgggggggtggggattcaagtctaaagtgaatgaattactgggaataacaagttaagcccgaatcttaaacataaaaggtttccaccatctatatatagataatacatctttctcttttaactaaaaaacctaatactgagtctatgcagtattgagaagtcagttgtttaggaaattggcaacttgttattcactttgyggtaaacataattttaacgtagtgaccaaaattttatcacttccagaaaactctaaaatttgagcaaaataaccttttatttcaaacatttatgagattctctatatctagtttaaatcagtcttgcagcgttttaattcttcttacaaattcacttaacagaaagt

SEQ ID NO: 312239 - DNA, 579 bp, Homo sapiens
gtttaaatcagtcttgcagcgttttaattcttcttacaaattcacttaacagaaagtggtttctagagttggaaatagtgttagaagtgaaagccaatagaaacttcaaatgaaatgaaaaagcaacaaacgtcaaataaagtttagacttatagaaattgctcactaagtttcaaaagagttgacaggcacagaatttatcttgatatagttaatgtccagctcttacctccttgaggaaaaactgccaaataacccaataaaccctggactgcttaccagaggcagcttaaagatttgcaactgcaaagttagataaacatcttagataaaaagcaagagctttaatcctttctgcaggtttaggccccccaattaggacactggcttaataacatctgacctaaatgtgtgactattttgcaaggggaatgcamtaaactttagaataaaagttggttttattctaaaactggttgttcagttttacagctgccagtcacctttattctgcagaggaaaaaagtacagtttgctttgtggcacaatgagtgtcaaaatgtggattgtaagtggaat

SEQ ID NO: 312240 - DNA, 204 bp, Homo sapiens
gtgtagtcatcccactcctttctcactctagctctgcagtccctaggttatacaaatgcttcttaaggtagagtcaggtcagatcaggacyattgaggagtctgcataccctcccagccatataggcagtgtagttgtatcaggcagaaagctttggttctccttgctggttagcactgctagcaccagaatcatgctacaaat

SEQ ID NO: 312241 - DNA, 593 bp, Homo sapiens
ctattgatttgattcatttaaatgttacaaagatactaaaggttttgtttttgttgattcagctttgataagttatattttcccaagaatgtgtatattttatcaaatattcaaggccaataaacattcaaaatgttttctctttttttgactatatatttttttaaatagtacaatctacaggaaatacccatgatgtctaaggcaggtaacctgactctaacattaacaaaatactgcctagcatcaggaaaataactcatgccaagtatcaagaagtcagaatattagaaaagaagaagacaaggtagataaagtacagtcaaaaacaaaaggaatgtaacataacaaaatcaaaattgctaaacaggaagagaatataaaatctgtagtttccatattaaaaacagaaattataaaagtaaatatgcattacattttaaaataaggcawatatttaatttattagtaaaaatgaagactgaagggtgggaaacattatggctaaatgtatatttttaaattgattatgaaattgggcttttacatggaattatcagtttggtagatgctaaataactgtgtgcctcact

SEQ ID NO: 312242 - DNA, 351 bp, Homo sapiens
agggagggccgcccccggtgtggctctctggttgctaaatcctgtgaaatgaagtgtggcaacatgacatcatcgaggactttgtttactgtcaatgcacgttatgctggagtaactggagaaagagatttggaggcttcgacaagttcagaaaatggtgtgctgggaggaaaaccaccaagaggtctggcccgttactccctggctctgtgggcaccaaagtcattagtcatttcttaagtgcctgcactaacaaactcctaagagtccgataagwtatatatatgatacacaagatatatatcatatatgatatatgtgataaacaagatatatatgtttgcatatata

SEQ ID NO: 312243 - DNA, 565 bp, Homo sapiens
tcataaacatttaaaaaaatcataccgttgtgataatttaaggctagtttgctaaagtgaatagcatgttgaaagttgtgaaattcagtgggtagcaaataaatgcccrgagttgattttatactttttgctcctgaagcaaagtttttcataccttagataatcctcaaaatgtatgcacttccttgacatggtgtgtaaatgcagagagttcacctaatcacctgacttggtgctatggaattaaagatgcttataataacccctgcctacttacctccctttatgcaaagagtatggaccctgaaatcagacaatcccaagcaaaaatagtggacttctatcatgagggtaatcttgggtaagtgccacaaaagcactgagatccagggtcctcaaagttgagagagatccaagagtaactatttcagagagttattgtgagaattagatgaaatcaaatatctggtggctcatgcctgtaaaaccagcactttgggaggccgaggaagggaggatcactttaggtcaggagtcaagaccagcctttgccaacatggtgaaa

SEQ ID NO: 312244 - DNA, 565 bp, Homo sapiens
tcataaacatttaaaaaaatcataccgttgtgataatttaaggctagtttgctaaagtgaatagcatgttgaaagttgtgaaattcagtgggtagcaaataaatgcccggagttgattttatactttttgctcctgaagcaaagtttttcataccttagataatcctcaaaatgtatgcacttccttgacatggtgtgtaaatgcagagagttcacctaatcacctgacttggtgctatggaattaaagatgcttataataacccctgcctacttacctccctttwtgcaaagagtatggaccctgaaatcagacaatcccaagcaaaaatagtggacttctatcatgagggtaatcttgggtaagtgccacaaaagcactgagatccagggtcctcaaagttgagagagatccaagagtaactatttcagagagttattgtgagaattagatgaaatcaaatatctggtggctcatgcctgtaaaaccagcactttgggaggccgaggaagggaggatcactttaggtcaggagtcaagaccagcctttgccaacatggtgaaa

SEQ ID NO: 312245 - DNA, 565 bp, Homo sapiens
tcataaacatttaaaaaaatcataccgttgtgataatttaaggctagtttgctaaagtgaatagcatgttgaaagttgtgaaattcagtgggtagcaaataaatgcccggagttgattttatactttttgctcctgaagcaaagtttttcataccttagataatcctcaaaatgtatgcacttccttgacatggtgtgtaaatgcagagagttcacctaatcacctgacttggtgctatggaattaaagatgcttataataacccctgcctacttacctccctttatgcaaagagtatggaccctgaaatcagacaatyccaagcaaaaatagtggacttctatcatgagggtaatcttgggtaagtgccacaaaagcactgagatccagggtcctcaaagttgagagagatccaagagtaactatttcagagagttattgtgagaattagatgaaatcaaatatctggtggctcatgcctgtaaaaccagcactttgggaggccgaggaagggaggatcactttaggtcaggagtcaagaccagcctttgccaacatggtgaaa

SEQ ID NO: 312246 - DNA, 565 bp, Homo sapiens
tcataaacatttaaaaaaatcataccgttgtgataatttaaggctagtttgctaaagtgaatagcatgttgaaagttgtgaaattcagtgggtagcaaataaatgcccggagttgattttatactttttgctcctgaagcaaagtttttcataccttagataatcctcaaaatgtatgcacttccttgacatggtgtgtaaatgcagagagttcacctaatcacctgacttggtgctatggaattaaagatgcttataataacccctgcctacttacctccctttatgcaaagagtatggaccctgaaatcagacaatcccaagcaaaaatagtggacttctatcatgagggtaatcttgggtaagtgccacaaaagcactgagatccagggtmctcaaagttgagagagatccaagagtaactatttcagagagttattgtgagaattagatgaaatcaaatatctggtggctcatgcctgtaaaaccagcactttgggaggccgaggaagggaggatcactttaggtcaggagtcaagaccagcctttgccaacatggtgaaa

SEQ ID NO: 312247 - DNA, 592 bp, Homo sapiens
ccccacccactgtgacaatggttgcttgagtgtgactgatattagactagctttacataggcttattcatatacattgcattttaattctcacaattacgttgttagataggtgttattatctccaattttcaaaggggaaaatgaaagcccaaagagattgaacaaattgcgttggggtcacatagacagtgtcagagtagacrttcaagacaggatgtagggccgtagactgagaacaccttccctcctccatgatgtctccttttcctaagacaatgtaacagtgatgctttatacaaactcttccacacattaaaaatgctgagattggccgggcacggtggctcacacctgtaatcccagcattttaggaggctgaggagagtggatcacttgaggtcaggagtccgagaccggcctgggtaacatggtgaaaccccatctctactaaaaatacaaaaactagccaggtgtggtggggcatgcctgtaattccagctactcagaaggctgaggcaggagaatcgcttgaacccaggaggtggagattgaagtgagccaagatcatgccactgtactccagcctggac

SEQ ID NO: 312248 - DNA, 547 bp, Homo sapiens
cttcctcccccttttcttcattttcttctttcctttttgctgtttattttattttatattttttgagacaaggtgtcactctatcacctaggctggagtgaagtgacacaatcaygactcactgcaaccttgatctcctgggctcaggtgatcctcctccctcagcctcccaagtagctttggactatagttgtatgccgccacatctgcctagtttctaaattttttgtagaggcaagatcttaccatgttgcctaggcttctttttgctattacaagcaatcctataacaaacttctttgtagctaagacaagttttaaataattttcggtttttcagtgttggtcaatgcggtgggtgaaatgtggcatcttgtttctttcatttgcatttcctcaatgaagaaatagtttagtctactggccactcatatttattttgtgaattgcttagacctgtgctgtctaatttgattatcaccagccaaatgtggacactgagcacttgaaaagtggacagcctaaattgggttgtgctgtcagtgta

SEQ ID NO: 312249 - DNA, 547 bp, Homo sapiens
cttcctcccccttttcttcattttcttctttcctttttgctgtttattttattttatattttttgagacaaggtgtcactctatcacctaggctggagtgaagtgacacaatcacgactcactgcaaccttgatctcctgggctcaggtgatcctcctccctcagcctcccaagtagctttggactayagttgtatgccgccacatctgcctagtttctaaattttttgtagaggcaagatcttaccatgttgcctaggcttctttttgctattacaagcaatcctataacaaacttctttgtagctaagacaagttttaaataattttcggtttttcagtgttggtcaatgcggtgggtgaaatgtggcatcttgtttctttcatttgcatttcctcaatgaagaaatagtttagtctactggccactcatatttattttgtgaattgcttagacctgtgctgtctaatttgattatcaccagccaaatgtggacactgagcacttgaaaagtggacagcctaaattgggttgtgctgtcagtgta

SEQ ID NO: 312250 - DNA, 547 bp, Homo sapiens
cttcctcccccttttcttcattttcttctttcctttttgctgtttattttattttatattttttgagacaaggtgtcactctatcacctaggctggagtgaagtgacacaatcacgactcactgcaaccttgatctcctgggctcaggtgatcctcctccctcagcctcccaagtagctttggactatagttgtatgccgccacatctgcctagtttctaaaktttttgtagaggcaagatcttaccatgttgcctaggcttctttttgctattacaagcaatcctataacaaacttctttgtagctaagacaagttttaaataattttcggtttttcagtgttggtcaatgcggtgggtgaaatgtggcatcttgtttctttcatttgcatttcctcaatgaagaaatagtttagtctactggccactcatatttattttgtgaattgcttagacctgtgctgtctaatttgattatcaccagccaaatgtggacactgagcacttgaaaagtggacagcctaaattgggttgtgctgtcagtgta

SEQ ID NO: 312251 - DNA, 604 bp, Homo sapiens
atttttcaatttaaccaagaagttgctcatatcattgaccaacaagtgaagttcaggcaagttgtttcactttaatttyaagttgttccattttaattttaagttgttcatatataaataaaaccatcaaccaacattcatactggaaactacactcagaaccagttgtttatcatatatcatcataccactgattttacagcatataaataatgaaagtctctctttcaaatattacatcttatcttattttttgcatctactgcatcggctagggctctaatacaatgtggaataacagcagtgtttctcgacattcttgatttgatcctaattttaatgtttctattttgttattaaaaatgatgttgttctggatttctggtagatattagtgagagttctggaatttcatttgaatactttccttcctacatactaataggaaacttctgctgctggttctaggaaaatttcctattaaaaaaaattcttccattttctacaattctttattttccttccaaattgtatgaccatatggattccagagacctagcaacacttggcacaacatcacacttaaacaaaacacctcttgtgg

SEQ ID NO: 312252 - DNA, 604 bp, Homo sapiens
atttttcaatttaaccaagaagttgctcatatcattgaccaacaagtgaagttcaggcaagttgtttcactttaatttcaagttgttccattttaattttaagttgttcatatataaataaaaccatcaaccaacattcatactggraactacactcagaaccagttgtttatcatatatcatcataccactgattttacagcatataaataatgaaagtctctctttcaaatattacatcttatcttattttttgcatctactgcatcggctagggctctaatacaatgtggaataacagcagtgtttctcgacattcttgatttgatcctaattttaatgtttctattttgttattaaaaatgatgttgttctggatttctggtagatattagtgagagttctggaatttcatttgaatactttccttcctacatactaataggaaacttctgctgctggttctaggaaaatttcctattaaaaaaaattcttccattttctacaattctttattttccttccaaattgtatgaccatatggattccagagacctagcaacacttggcacaacatcacacttaaacaaaacacctcttgtgg

SEQ ID NO: 312253 - DNA, 604 bp, Homo sapiens
atttttcaatttaaccaagaagttgctcatatcattgaccaacaagtgaagttcaggcaagttgtttcactttaatttcaagttgttccattttaattttaagttgttcatatataaataaaaccatcaaccaacattcatactggaaactacactcagaaccagttgtttatcatatatcatcataccactgattttacagcatataaataatgaawgtctctctttcaaatattacatcttatcttattttttgcatctactgcatcggctagggctctaatacaatgtggaataacagcagtgtttctcgacattcttgatttgatcctaattttaatgtttctattttgttattaaaaatgatgttgttctggatttctggtagatattagtgagagttctggaatttcatttgaatactttccttcctacatactaataggaaacttctgctgctggttctaggaaaatttcctattaaaaaaaattcttccattttctacaattctttattttccttccaaattgtatgaccatatggattccagagacctagcaacacttggcacaacatcacacttaaacaaaacacctcttgtgg

SEQ ID NO: 312254 - DNA, 569 bp, Homo sapiens
cctgaaaaaacatgcctatactccttgtttctactccctagcccatcattactcttatgtcaatttatgccactcttatgccatatgtgcttttgttccctgtacccaccccacaccactaaaactcctcaagttgaagttatcagagacctctattgtgccaaatccacttggtaattcactgtcctcatctcagagcattacctattwttatccacttgaccatctttccttcaatccctctctctgcttggcatctggggcatcatgctcttttggccttattccctcttcattggccactcctttttagttttctttacttgctgtgttggtctgttcttgtgctgctatgaagaaataccagctcctgggtaatttataaagaaaagaggtttaatatgctcatagttctgcaggctgtgcaggcacggtgctggcatctgctctgcttctggggaggcctcaggaagcatttactcatggcgaaaggcaaagcgagaatgggtgcatcacatggcaagagtaggagcaagagagggagtaagagagagagaagaaggaggtcc

SEQ ID NO: 312255 - DNA, 588 bp, Homo sapiens
caaatacatactcctatatccatttggatatctcagagacatctcaaccttaatgaagccaaaatcatactcttaattctgagccctgcctccaagtctactccgttttcagcattcctttcttagctaatgacactattattggcttataccacaatctataactcacacaggattctgttcttcctctcgcttccacagtgggtttgtataaaccaarccctacagccaagtaatgtgatacacttaatgaagcgttggtagctatagccccttggtcaaatccagtttgctgcctgtttttgtaaataaagttttattggaaagcaccatacaattcaattgtgttttgtctataacttcttttgtgctataatggcaggctgagtagttgaacagagatcatatggaacagagatcaaaaagcttaaactatttactatcttgtgttcgctatagaaaatgtttgccaacccttcttttaatcggctggaataccgctgacccaacctgaactatggttgggtcatatgtttatgttgcaacatttatttgctgacaacttctacattttttgtgacaatgttt

SEQ ID NO: 312256 - DNA, 588 bp, Homo sapiens
caaatacatactcctatatccatttggatatctcagagacatctcaaccttaatgaagccaaaatcatactcttaattctgagccctgcctccaagtctactccgttttcagcattcctttcttagctaatgacactattattggcttataccacaatctataactcacacaggattctgttcttcctctcgcttccacagtgggtttgtataaaccaagccctacagccaagtaatgtgatacacttaatgaagcgttggtagctatagccccttggtcaaatccagtttgctgcctgtttttgtaaataaagttttattggraagcaccatacaattcaattgtgttttgtctataacttcttttgtgctataatggcaggctgagtagttgaacagagatcatatggaacagagatcaaaaagcttaaactatttactatcttgtgttcgctatagaaaatgtttgccaacccttcttttaatcggctggaataccgctgacccaacctgaactatggttgggtcatatgtttatgttgcaacatttatttgctgacaacttctacattttttgtgacaatgttt

SEQ ID NO: 312257 - DNA, 588 bp, Homo sapiens
caaatacatactcctatatccatttggatatctcagagacatctcaaccttaatgaagccaaaatcatactcttaattctgagccctgcctccaagtctactccgttttcagcattcctttcttagctaatgacactattattggcttataccacaatctataactcacacaggattctgttcttcctctcgcttccacagtgggtttgtataaaccaagccctacagccaagtaatgtgatacacttaatgaagcgttggtagctatagccccttggtcaaatccagtttgctgcctgtttttgtaaataaagttttattggaaagyaccatacaattcaattgtgttttgtctataacttcttttgtgctataatggcaggctgagtagttgaacagagatcatatggaacagagatcaaaaagcttaaactatttactatcttgtgttcgctatagaaaatgtttgccaacccttcttttaatcggctggaataccgctgacccaacctgaactatggttgggtcatatgtttatgttgcaacatttatttgctgacaacttctacattttttgtgacaatgttt

SEQ ID NO: 312258 - DNA, 575 bp, Homo sapiens
gttcctttcattttaatttttaattaaattaaatttattttttgagatggagcctcactctgtcacccaagctggagtgcagtggcgcgatctcagctcactgtaacctctgcctcccaggttcaagcaattatcctgcctcagcctcccgagtagctgggattacaggygtgcaccaccacatctggctgatttttgcatttttaatagagatggggtttcatcaggtgaaaccaggccaggctggtcttgaactcctgacctcacgtgatccacctgccttggcctcccaaagtgctgggattaaaaggtgtgagctaatgcgcctggccctagctcctttcaaatacatgttagaacttacactggagaaaacccttaccaatgcaaacactgtggtaaagcattcatttcttcaacttacctttggacatatgaaatcagagctcatgttctcgagaaatctcatgaatgtaaggaatgtgggaaaagacgcaattgttccagtttcctttgaagacacaaaaaaatgcatagtgcaggaaaccttcatgaatgtaaaaaatgtggtgaag

SEQ ID NO: 312259 - DNA, 575 bp, Homo sapiens
gttcctttcattttaatttttaattaaattaaatttattttttgagatggagcctcactctgtcacccaagctggagtgcagtggcgcgatctcagctcactgtaacctctgcctcccaggttcaagcaattatcctgcctcagcctcccgagtagctgggattacaggtgtgcaccaccacatctggctgatttttgcatttttaatagagatggggtttcatcaggtgaaaccaggccaggctggtcttgaactcctgacctcacgtgatccacctgccttggcctcccaaagtgctgggattaaaaggtgtgagctaatgcgcctggccctagytcctttcaaatacatgttagaacttacactggagaaaacccttaccaatgcaaacactgtggtaaagcattcatttcttcaacttacctttggacatatgaaatcagagctcatgttctcgagaaatctcatgaatgtaaggaatgtgggaaaagacgcaattgttccagtttcctttgaagacacaaaaaaatgcatagtgcaggaaaccttcatgaatgtaaaaaatgtggtgaag

SEQ ID NO: 312260 - DNA, 615 bp, Homo sapiens
ctttgttcttctttgatactgtgttgactattctgaatcttttgccttgtcatataaactttataatcagtttgtcatatccacaaaataatctgctgggattttgattgggactgtgtattctatggctccatttgtgaagagatgacatcttagtaatattgtgtattcctgaccatgaacatggaatattcctcaatttattgagatcttgtttgatttcttttaccagagtttgtgttttccttatttagattctctgcacactatattttgttagatttatacctaaatgttttattatttttggtgctatggctttggagtggtattatatttttaatttcaagtttcagctgttcagcactggtatacaggaaagcaattgatttttggatrttaagcttctgtcttgcatccttgctataatcgtttgcttgtggccaaggtcttttgctgttgttgattctttgggattttctcatctgtaaacaaagacagttttgtttatttgttctcaatctgtatatatctttttttgtcttatagcattagctaggaattctcatatagtgttgaatagctgtggtgaaaacagacatcttttctttatac

SEQ ID NO: 312261 - DNA, 548 bp, Homo sapiens
ttgtgcagcaaaaagagtgatacttctccttttcttcctgctttgaggtaaaataaggataaatgagacaattcggtgaggtgctrttaatagcttcccaacaggtaccacatagcatctaccaaacacacctgccaatactcactaacaagaatactacttgcagagttttcatgttggtaatagtggagtaccttatatcagctgagcttcctttcaacgacaactataaatgctgaaatagtttttgaaaatgatttgaaggcactggagggtgactaaaatcaggtcaaaactgaactgtgcaatggcacacacctgtaatcccagctgcttgggaggctgaaggagaaggatggcttgagcccaggagttgggaagagaagaaattccaaaatgtctaaaataggctcaaatagtacactgtgatcacacctgtgaatcgctactgtgctctgacctgcccaacttagcaagatctcatctttaaacagaatagattttttattaatttttagactttttaaaaaaagcaggaagagactggg

SEQ ID NO: 312262 - DNA, 548 bp, Homo sapiens
ttgtgcagcaaaaagagtgatacttctccttttcttcctgctttgaggtaaaataaggataaatgagacaattcggtgaggtgctattaatagcttcccaacaggtaccacatagcatctaccaaacacacctgccaatactcactaacaagaatactacttgcagagttttcatgttggtaatagtggagtaccttatatcagctgagcttcctttcaacgacaactataaatgctgaaatagtttttgaaaatgatttgaaggcactggagggtgactaaaatcaggtcaaaactgaactgtgcaatggcacacacctgtaatcccagctgcttgggaggctgaaggagaaggatggcttgagcccaggagttgggaagagaagaaattccaaaatgtctaaaataggctcaaatagtacactgtgatcacacctgtgaatmgctactgtgctctgacctgcccaacttagcaagatctcatctttaaacagaatagattttttattaatttttagactttttaaaaaaagcaggaagagactggg

SEQ ID NO: 312263 - DNA, 504 bp, Homo sapiens
aggcatgagccaccgtgcctggccctatttgctttgtacagaggaaaccatgtcaagtgtccaacagctgatacacacatctaagatttgaatccattcatgtctggggacacaggctatgcttatggcattgtgagaattctacttaactttaacctaatgtgttaaaatttcaatattctggaatacactattctaattctttttatttatttattttttaagacagagagtgtcactctgttgcccaggctggagtgcaatggcacgatctcagctcactgcaacctccgcctccctggttcaagtgattctccctgcctcagcctctggagyagctgagattacaggcacccgccaccacacccagctaatttttgtatttttagtagagacagggttttgccatttggccaggctggtctcgaactcctgacctaaggtgatccacccatctcagcctcccaaagtgttgggattacaggcgtgagccactgcgcctgg

SEQ ID NO: 312264 - DNA, 372 bp, Homo sapiens
aatagtagccaagggggccggctgcggtggctcgtgcctgtaatcccagcactttgggaggccaaggcgggcggatcacttgaggtcaggagttcgagatcagcctggccaacatagtgaaaccttgtctctactaaaacaaaaaatacgaaaaaattagccargcattgtgtcacacacctgtagtcccagctactcaggaagctgaggcaggagaattgcttgaacccaggaggtggaggttacagtgagccaagatcatgccactgcactccagtctgggtgacagagtgagaccttgtctaaaaaaagaaaaaaaaaatagtggctgagtcatcaaggaggtgagatgaaggagaaaatgaaagatga

SEQ ID NO: 312265 - DNA, 654 bp, Homo sapiens
ttaattgtattcaaaatgttttatgatcatcaccactatctgcttcctaaacattcttttcaccccatacagaaactcagtaytcattaagagtaacttgacctggccgggtgtggtgggtcactcctgtaatccagcactttgggaggccaaggtgggtggatcacctgaggtcagaagttcgagaccagcctgggcaacatggtgaaaccctgtctctaccaaaaatacaaaaattagctaggcatggtggtgtgcccctctaattccagctactcaggaggctgaggcatgagaatagcttgaacccgggaggtggaggttgcagtgagccgagattataccactgcactccagcctgggtgacagagtggggctcaaaaaaaaaaaaattaactttacctgtccctctccctccagcccatgtcaatcaccattctactttctgtctctagaatttgtctattttagatatttcatgtaagtggaatcatagagtatttgccttttttcttcactgacttattttacttagcataatgtttttaaggttcatctgtggtgtagcatgtatcagaaattaatttctttttatggtggaataatattccattgtatgtatatactgcattttgtgtatccatttatcagttg

SEQ ID NO: 312266 - DNA, 654 bp, Homo sapiens
ttaattgtattcaaaatgttttatgatcatcaccactatctgcttcctaaacattcttttcaccccatacagaaactcagtactcattaagagtaacttgacctggccgggtgtggtgggtcactcctgtaatccagcactttgggaggccaaggtgggtggatcacctgaggtcagaagttcgagaccagcctgggcaacatggtgaaaccctgtctctaccaaaaatacaaaaattagctaggcatggtggtgtgcccctctaattccagctactcaggaggctgaggcatgagaatagcttgaacccgggaggtggaggttgcrgtgagccgagattataccactgcactccagcctgggtgacagagtggggctcaaaaaaaaaaaaattaactttacctgtccctctccctccagcccatgtcaatcaccattctactttctgtctctagaatttgtctattttagatatttcatgtaagtggaatcatagagtatttgccttttttcttcactgacttattttacttagcataatgtttttaaggttcatctgtggtgtagcatgtatcagaaattaatttctttttatggtggaataatattccattgtatgtatatactgcattttgtgtatccatttatcagttg

SEQ ID NO: 312267 - DNA, 654 bp, Homo sapiens
ttaattgtattcaaaatgttttatgatcatcaccactatctgcttcctaaacattcttttcaccccatacagaaactcagtactcattaagagtaacttgacctggccgggtgtggtgggtcactcctgtaatccagcactttgggaggccaaggtgggtggatcacctgaggtcagaagttcgagaccagcctgggcaacatggtgaaaccctgtctctaccaaaaatacaaaaattagctaggcatggtggtgtgcccctctaattccagctactcaggaggctgaggcatgagaatagcttgaacccgggaggtggaggttgcagtgagccgagattataccactrcactccagcctgggtgacagagtggggctcaaaaaaaaaaaaattaactttacctgtccctctccctccagcccatgtcaatcaccattctactttctgtctctagaatttgtctattttagatatttcatgtaagtggaatcatagagtatttgccttttttcttcactgacttattttacttagcataatgtttttaaggttcatctgtggtgtagcatgtatcagaaattaatttctttttatggtggaataatattccattgtatgtatatactgcattttgtgtatccatttatcagttg

SEQ ID NO: 312268 - DNA, 482 bp, Homo sapiens
ggttcatgccattctcctgcctcagcctcctgagtagctgggactacaggcgcctccaccacgcccggctaattttttgtatttttagtagagacggggtttcaccgtgttagccaggatggtctcaatctcctgaccttgtgatccrcctgccttggcctcccaaactgctgggattacaggtgtgagccaccgtgcccggcccctatttttcttttttgtagagatgggtcttattatgttgtccagtctggtcttgaactcctggctcaagcaatctgcctgtctcgacctcccagagtgttagaactacaggggactgcttaatgaaacaatggaggcagaaggtgactttgagatgatgtacagaactgagcaaccccaatctcaccaggtcttatcaataatttaacacaaataaaatcatattaacacgtgggtgctcctagctttcccctcacacagctgctaaaggaaacttt

SEQ ID NO: 312269 - DNA, 562 bp, Homo sapiens
ttacgtgaaatgctctaagtgtagactttgagtttgaatctagctgtgtttgatccacacttttgctttttctgtaacgatatgattaataacagtaataattatgacaatagctgaaacttactgagtttcatgtgaaatgtattgagtactttttatgtgacagggactgttctaaggtattgagtcatttaatcctcctgacaacttttatcatgtaaattatgtcacagttgaattagtctccttaattaaactgtaagtcatgttaccaaggaataggtaattatttttacaactccccaaatcaataataaaataatgaaatttcaccctttctttacataatttcacattttgacttccraccttaaccactgatcttggccattgttgattactttcatatatataatgaaacctgtattattatagattgagttaggctgagataccttacaaataattttactaaactgtaaataagagctggtgtaggcagaatgccaggattttaagggaatagatgtaaaataccaagaatacttcagaatgtaattga

SEQ ID NO: 312270 - DNA, 583 bp, Homo sapiens
aactacatatatatttgagatgtcagcttttctttctggtttctaccagccccattaaggtttcaaaccttttagatccaagtcttggcctgagctagggctctgggagtgaggaactgcctatctccccggtggggaggaagcttctccaagcaccgcgcattgtcagagtgggcatggggcctgagcatgtcctgtgccatgcatagctctgggggacactctgtctgcccctgaattgcctcactgttacagttaagaagatgaacctcgtcaggggctattaccagtgctgccttttgttccaaaccactgcaaaggaacaaaaaaaaaaaacaaacaaaaaactgcactagttttaaaaattggaagtggcaaaataggagatgtaggcttgatgtagatattaagtaattattctaaattagtgaaaactgacaactgaacaacactgattatgaaacaaagattttggaccgcccaccctgaataatgaagagttatgtcaagcaaaattgatatgaaacgatgtgtagtgatttcmagttgaccccccttccactgttgataagtactcggtcac

SEQ ID NO: 312271 - DNA, 569 bp, Homo sapiens
atttggcgtcttaaaatacctgcatcaaaatcaatgattctctattatatttaaaatttctgaacattccatagcatgagtttttcaattattaattgcttctgctctgttggttttccagcttcaataattagaggcttattttcctggagctttaraaggtgtattttaactcatctagttaaatatggtttaaatttcctgaaaattaattcattatttggttccattcagaatacaagggcatctagttttgatgtataaaggaaatagtttctcgttattgtggaaataattttaatggttgaacaaataaccaaataaccatgaaatagaacacacccctaatactgttttgttggcatttaaaagatgtggctttccaatatgtgagtagagttgtggctcctgccgtctttgacttacgatacatctgtaaagacttgtcttgcatgaatgcccatcgtatttatggaggctctgtgggctagctgctttctcaggcagttaacacttggctctcattaaattcttacaaaaaatatgtaacacacacataattactgtgt

SEQ ID NO: 312272 - DNA, 547 bp, Homo sapiens
cagggtcggccaatgcaagccctgacctctgtcctcaccagcccacgctcctgctggaaacccccctggatatcagaggatggaggagttgaggaaggaggatgtgggcgtgcagaagcatggagagtgaatttggagggcagatcaagaatggccgatgcaracagttgctgaatttttactttggtctgaggtcttactttatcttttcatttatttatggcatctgtgatatacagaggttatatgaaactttaggcagccaaaatgattatttttcttctcccagtttctacttttgaagttctactaatgaggtttttatcagcataatgttacatacctattaataaatgtaagtttctacttttttttaacaaattggtatttttctgaaaattagtttggtgtatggtggaagactggtatagttttcttgaaagaattgaccaggttttagacgaatttttattgaaaaagcattccaacacacagtgtggtaactttttgagagtttattttccaccttagcttgcctgtgactagt

SEQ ID NO: 312273 - DNA, 547 bp, Homo sapiens
cagggtcggccaatgcaagccctgacctctgtcctcaccagcccacgctcctgctggaaacccccctggatatcagaggatggaggagttgaggaaggaggatgtgggcgtgcagaagcatggagagtgaatttggagggcagatcaagaatggccgatgcaaacagttgctgaatttttactttggtctgaggtcttactttatcttttcatttatttatggcatctgtgatatacagaggttatatgaaactttaggcagccaaaatgattatttttcttctcccagtttctacttttgaagttctactaatgaggtttttatcagcataatgttacatacmtattaataaatgtaagtttctacttttttttaacaaattggtatttttctgaaaattagtttggtgtatggtggaagactggtatagttttcttgaaagaattgaccaggttttagacgaatttttattgaaaaagcattccaacacacagtgtggtaactttttgagagtttattttccaccttagcttgcctgtgactagt

SEQ ID NO: 312274 - DNA, 569 bp, Homo sapiens
tttatttcataaatacctatgggaaagaaagataggaaggaggaaggaaagaataaaataaggagagagattctgttagaaaatacggaggaagggatctccatrtagaaagaattaaagttaaaaccaggcagtgaatcttgggtaagaatgtcaccacttttctagtgagataggatttaggattaacctttgagacacacactataaaggacacttggataaacaatcttgtatttaaaaaaaaaggaaaactaacataaagaaactaaattaatctaccttttcgaataagatgaaccaattgttgctgaatgcaagctaaaaaaatttttttttgaaaaaaagtatatctgttggaattttgtaggtcagtgtcagagaatgccacccaaactggaggaatctcaaagtgaaatgtttagcacacgatgctaatgaaggaaattgaacttcttcgtcagaaaatacttgaactattggcttgcacaatggtaccagatcctggcctctctctccatgtcttaactagccttctgtgttgggcccatttttaagtgagctcaacc

SEQ ID NO: 312275 - DNA, 385 bp, Homo sapiens
aactaaattaatctaccttttcgaataagatgaaccaattgttgctgaatgcaagctaaaaaaatttttttttgaaaaaaagtatatctgttggaattttgtaggtcagtgtcagagaatgccacccaaactggaggaatctcaaagtgaaatgtttagcacacgatgctaatgaaggaaattgaacttcttcgtcagaaaatacttgaactattggcttgcacaatggtaccagatcctggcctctctctccatgtcttaactagccttctgtgttgggcccatttttaagtgagctcaacccttaygttggtaacattgctgcttaaggtcctgcttcagatttcctcacgttagtttctagccaaaaagagacaaaacattt

SEQ ID NO: 312276 - DNA, 495 bp, Homo sapiens
cgggttcaaaattttaaaaaatccatatgagtttgttcttccctttgtaattgcttgtgttacaaggtagcacagttcattaaatgaccctgcagggggaattttcctagacagaatgctacacgcttttctatttgagttgggagccaaatcttyagttatagaactagaggaaggtaaagcctgtttacttgggcttgacttttccaattacaataggccgcaatgttcaaacaagtcaaataaaatattcattttgtaagaacaaacttttacttgagtacataaatatgaatcaggcaactgacttattctgtgtacccttggctatcttctaataaatgtcaagacatagagaaccaaatcctatgacaatccctcaaaaatatgttaaagtttacaaattatcaaatacactttttttatccataattttcactaatcgtactgattaattgtagccatgcacctcatccaatctgtgggaacttttaa

SEQ ID NO: 312277 - DNA, 495 bp, Homo sapiens
cgggttcaaaattttaaaaaatccatatgagtttgttcttccctttgtaattgcttgtgttacaaggtagcacagttcattaaatgaccctgcagggggaattttcctagacagaatgctacacgcttttctatttgagttgggagccaaatctttagttatagaactagaggaaggtaaagcctgtttacttgggcttgacttttccaattacaataggccgcaatgttcaaacaagtcaaataaaatattcattttgtaagaacaaacttttacttgagtacataaatatgaatcaggcaactgacttattctgtgtacccttggctatcttctaataaatgtcaagacatagagaaccaaatcctatgacaatcyctcaaaaatatgttaaagtttacaaattatcaaatacactttttttatccataattttcactaatcgtactgattaattgtagccatgcacctcatccaatctgtgggaacttttaa

SEQ ID NO: 312278 - DNA, 495 bp, Homo sapiens
cgggttcaaaattttaaaaaatccatatgagtttgttcttccctttgtaattgcttgtgttacaaggtagcacagttcattaaatgaccctgcagggggaattttcctagacagaatgctacacgcttttctatttgagttgggagccaaatctttagttatagaactagaggaaggtaaagcctgtttacttgggcttgacttttccaattacaataggccgcaatgttcaaacaagtcaaataaaatattcattttgtaagaacaaacttttacttgagtacataaatatgaatcaggcaactgacttattctgtgtacccttggctatcttctaataaatgtcaagacatagagaaccaaatcctatgacaatccctcaaaaatatgttaaagtttacaaattatcaaatacactttttttatccataatkttcactaatcgtactgattaattgtagccatgcacctcatccaatctgtgggaacttttaa

SEQ ID NO: 312279 - DNA, 600 bp, Homo sapiens
tgtgttctttgcctttttgctcattcttacctacaatgttgtgaaaatcttcttgatcttaacttctattacttgaactaatttagatctgagaaggaaaaataaaacacccccaaaaaactgagaaatgactccagatgtaaactggtacactcagcacacaagaaagaggtcatgatattgtcttagaaattagcacagaaggagactatatgcacctaacggcacttaaaacacaacacattgcattgtgcttttcctaaataacctattgtgaactgatgtgctaagtttacaaaaaaaggctatattatgaataagcatccttgtacggtgaaaattgagaaagcattsaaatgtgctgatttgcttaaatgtttacacatagtcttgttaaaagcaatctaattccaataactaagtgtacaatttttaaaattgttcttagtatgtatgaagtaaagatctttacaaaaacaggccacttgtactcctttaacggtttgctctgtatttcagagaggtatgcattttttcacaattgtttgttacctgtagattttaagttaattctgttgcccatgaataccactctccttt

SEQ ID NO: 312280 - DNA, 526 bp, Homo sapiens
aaggccactaaatagggaatatgactgagctgaacatttgtgaagtttacagtaaggtaaaattcctccataaaatatctagttctgtcaactatggctatgctctgttaatctgtaggagttcyaagtgaaattgctgcattgctatatttacagagctgaacttggcaggctcaacaacataggattgctttaatagatagaattattgaacaaatacacgggatctaaaatgagctattaggaagtaaagtgtgtgtatgcgtgtgtgtatgttcacatgtatgtgtgtgtgcacgtgtgtatgttcacatgtatgtgtgtgtgcacatgtgtgtgtttaaaaagaatatatcagttactcacactacattcctttaacttttaacttgttttagcatggaagacttaagattattttcccaagagaaggtatattattcaagcccttcaaaattttggacattgccttctaacacatacacacacacacacacacacacacacacacacacaaacacacaga

SEQ ID NO: 312281 - DNA, 526 bp, Homo sapiens
aaggccactaaatagggaatatgactgagctgaacatttgtgaagtttacagtaaggtaaaattcctccataaaatatctagttctgtcaactatggctatgctctgttaatctgtaggagttccaagtgaaattgctgcattgctatatttacagagctgaacttggcaggctcaacaacataggattgctttaatagatagaattattgaacaaatacacgggatctaaaatgagctattaggaagtaaagtgtgtgtatgcgtgtgtgtatgttcacatgtatgtgtgtgtgcacgtgtgtatgttcacatgtatgtgtgtgtgcacatgtgtgtgtttaaaaagaatrtatcagttactcacactacattcctttaacttttaacttgttttagcatggaagacttaagattattttcccaagagaaggtatattattcaagcccttcaaaattttggacattgccttctaacacatacacacacacacacacacacacacacacacacacaaacacacaga

SEQ ID NO: 312282 - DNA, 603 bp, Homo sapiens
tagaattattgaacaaatacacgggatctaaaatgagctattaggaagtaaagtgtgtgtatgcgtgtgtgtatgttcacatgtatgtgtgtgtgcacgtgtgtatgttcacatgtatgtgtgtgtgcacatgtgtgtgtttaaaaagaatatatcagttactcacactacattcctttaacttttaacttgttttagcatggaagacttaagattattttcccaagagaaggtatattattcaagcccttcaaaattttggacattgccttctaacacatacacacacacacacacacacacacacacacacacaaacacacagaattttaagtataatagatgactatatgtagttcctaaataagcaacctgtgtattttttctattctccatctgtagttgaactcagacaggggcatccatcttatttgtttattgtatcaagcttaatcctgtattcagaaatgcataccattaatcattatgwtacagcaaatttaattaatatatcaatgaaaatttatataatatactgattttttttactttgtcaaaaaatgacagaaacgatgctgttggaaaatgtaattatatttaaaa

SEQ ID NO: 312283 - DNA, 578 bp, Homo sapiens
atgtgtatatcttcatgttgcttccatctttcctcaagctttactttcgtagtgctcaaaaatggtaagagacacaatctgcacgtagtcattagaatgtctcagatcgcacggcttagattgctccacaccaagaagaacaatgtggaggggaaagagatcttccttaagtgtaaaaagataccagattgatacttaagatctcggttgtatcaggcaagacgccsaaacttctctgagtcacagatcctctcttctctgtaatcacgtcactgtgacattcaggtcacgtcatggaaggaaaaacattcttacaattataaaggattattacgcagactccagttcaaattgaggcaaatatgaataggctgggaacatgtgccagtataatccaatccatttaagaatccgttagtcagagaaactttatccaaatagttaaatagctccaaagaggtgcgtttatccccataaagcaaacctagatttttcttcttcagtgttttgatagaaaattaaggtaaaaatctcatactacgcagtaagacagtacagggaacgcacttttctcatat

SEQ ID NO: 312284 - DNA, 514 bp, Homo sapiens
tattcattttggttgaattccaagcaaaatggatgttcttgtgttataagtgatgttacctttcctaacactatattgatgttacaactctctagcaattgggtacgtgtaactaaataaaagccaacaaactcagatcagaaaagctgagcctgtccccactgcctccacacgcttctgctctagcccagctgtaaaatgtgtgtaatcacatttgcttgcctgcttcaggtatttttaaataatctaatcgaataaagcttctcagagaatactaygtaaaataaagttcctctgtaatgcaatgacttctgatgtcatcactactatgggaattattacattccctctttcccttttctattctcttcctttcttttcgggttcagtaaaaaaattaccagaacattcacatgcttcctatcttccctttttgaaagttaaatgttataagcctctgaatttacttctgtgactgtgcattccagcaaagtaaaataaaattgtgtgtgat

SEQ ID NO: 312285 - DNA, 514 bp, Homo sapiens
ctgtgactaatattttgttttgataatttattcggactttgcctctgatgatcccatctwgcaaccatttgggaaatccagtaattatttgtatttcacaatttgcagttctcattccatcactgtgtctgtgaaatgcatttttgccactctgtccactaaatttattttaagtgatgtcttgatacagcatgaatatactggtgtcaaactgaagctactggatgctttatgcagcaatcgtcacaactgctggttcctgtcagatctgtttaagcctaggttcttattaggtttaatccaaatgtctaaactctttaattgcctaattcttatgcttgtgttttccaatgttgaaactcttggaattaaaaacaattaattattttttccagattttagttctgtgatgacttagtttttaaaatgtattacaattacaattacactctacaagtatgactttgaaaaaaaatcaaagtagttcattaacttttcttacttttcagctaca

SEQ ID NO: 312286 - DNA, 626 bp, Homo sapiens
caagacagtctttcaatttcaaaggaattagttgatgaggtctgtgtatgtgtgtgcgaacacacccaacagaaggaatctcataacgaaagtgacaatttttgcgtacacatttctatccactgaaataactgctgacatcatggaattacttggaataacactgctggaacttgtcactcaaagacaaaagctaacaagagtaataattagtattttaatgtactcggaggaaatgaccaggtatatagcctatatttaagaaacaatctgtatctccaagtgaaatgtcattgtaatagaacgtggccacagggtaatgggctgttactgctacacaaatgctaacgtaaagccaagacatttctcgggaatcaaagtagaagcaatcaaagaatctctttggaaagtgagcgaacctgaatgcactgccatgtttatgacacttaggtttttatcctttttgaagtcaagcttctctgcagtttattctctcccattttaaataytgcatacatttataacttgatgaacaacacaaatcaaggtaattttagatttcaacattttctacctgaagaagtgggataaatgtgacttatctgacatttttgaagagatgtaat

SEQ ID NO: 312287 - DNA, 626 bp, Homo sapiens
caagacagtctttcaatttcaaaggaattagttgatgaggtctgtgtatgtgtgtgcgaacacacccaacagaaggaatctcataacgaaagtgacaatttttgcgtacacatttctatccactgaaataactgctgacatcatggaattacttggaataacactgctggaacttgtcactcaaagacaaaagctaacaagagtaataattagtattttaatgtactcggaggaaatgaccaggtatatagcctatatttaagaaacaatctgtatctccaagtgaaatgtcattgtaatagaacgtggccacagggtaatgggctgttactgctacacaaatgctaacgtaaagccaagacatttctcgggaatcaaagtagaagcaatcaaagaatctctttggaaagtgagcgaacctgaatgcactgccatgtttatgacacttaggtttttatcctttttgaagtcaagcttctctgcagtttattctctcccattttaaatactgcatacatttataacttgatgaacaacacaaatcaaggtaattttagatttcaacattttctacctgaaraagtgggataaatgtgacttatctgacatttttgaagagatgtaat

SEQ ID NO: 312288 - DNA, 553 bp, Homo sapiens
ggtaatgccaccgttgccctgtttagaggccttctgatgtagaaagaaaacacacacaaaaattttgcttacaaacatatcggacagcttgtctttccgtgctctcgtgatgaactgcctgtccttctctaaggcactaatcacaaggacttatacctgtgcacgtcctgcctaggccagggatacccaggtactgaagagctacattctkggaaactcagttctgcaaaggccctgaatcactcctgagaaatctgacagtacaagaagagtcttgtttacagcaatgggattgtgaaacagacaaagtgcttctaattttcagcctcacctcaaccctatgccacaacacccaaatgaattcaagcttggtaaagaaaggaaccatgaggtttctatttcctttctttttcctacatttctcactgccagcatctaccaagatttgacacattagagataattgatggctgtgaaaaaataacacttatctgtaaaataattgacaataactgaacttgtatgtttggaggaacacttaccgtttcagata

SEQ ID NO: 312289 - DNA, 461 bp, Homo sapiens
cgtttaggaaactggactgtcatgatgaactcaccactgttcttcaacwtggtcgggtcagaaaaaaaccaagtgttacttttaaaaatatggccagtatgcctgaattgatgagttatggtgtttctggaaatcttcaatatttaaaactttctcaattttgcatgatggcaatgtgattttatactagctcttttctgtataacccatttcatcatcatgatgccctatattatgctagatgttaaatagatcaacagttttccagaaatgtgtgtgcaattatagaattcataaagtttaattgatacagaatatgcttactatatactcctgtgaaaaagaattttttggaacatacatagaataaaggtctttgttttaaaaaggttggagatttagcatttgtatttgtgaactacacaattagcaaatgacttaatactcacacatactaaata

SEQ ID NO: 312290 - DNA, 487 bp, Homo sapiens
tgctttctgagcccaggctttgtctctgtatactgcgctatataatggggctttggctctactgcatattctagaactaattaggacattaagcaggtgtgatttaaaaatcagtggaactcaaggcagttcattctgattgatcagtcgatctgtctgtctgtctgtctgtctacctacctacctacctatcatctctctctggctcctttatatagcccttttaaccttttatctgaagaaaagagaaacgaacctgccttgatgttttgtgcccaaggtcctattgtaattattattatttatatttatttttttccataagttattggggtacaggtggtatttggttacatgaacaagttatttagtagtgatttgtgagatcctggtgcacccatcacccgagtggtatacactgcaccatgtatgttgtcttttatttctsacccccttcccactcttctctaccaagtccccaaaatcc

SEQ ID NO: 312291 - DNA, 577 bp, Homo sapiens
tatcaaacttattttattttattatttgttttgagactgggtcttgctctgtaccccaggctggagggcagtggcacaatcacagctccctgcagcctctacctccctggatcaggagatcctcccacttcctcaaagtacctggtatgacaggcacatgccaccatgcccagcatatattttacattatttttgtacagacagggtctacctatgtagcccaggctggtctcaaactcctgggcttaagtgattctcctgtctcagcctcccaaaatgttgggattacagstgtgagccaccatgctaaaccatacaaatctatcaaaattttaaaaaacatatataacgatttcttatattaacaatcaattatcactattggtaaaattcacctaaatatacataaattggagtcaacttaacatgataaaacacatctagttcaccactaaaaccaggctgattcttaagcaggaatgaaatcttagaaacatcactcctgaagacaggaactagaaaagaataactaatattcccgctgtcaattaatattttacattaagtactagctaag

SEQ ID NO: 312292 - DNA, 577 bp, Homo sapiens
tatcaaacttattttattttattatttgttttgagactgggtcttgctctgtaccccaggctggagggcagtggcacaatcacagctccctgcagcctctacctccctggatcaggagatcctcccacttcctcaaagtacctggtatgacaggcacatgccaccatgcccagcatatattttacattatttttgtacagacagggtctacctatgtagcccaggctggtctcaaactcctgggcttaagtgattctcctgtctcagcctcccaaaatgttgggattacagctgtgagccaccatgctaaaccatacaaatctawcaaaattttaaaaaacatatataacgatttcttatattaacaatcaattatcactattggtaaaattcacctaaatatacataaattggagtcaacttaacatgataaaacacatctagttcaccactaaaaccaggctgattcttaagcaggaatgaaatcttagaaacatcactcctgaagacaggaactagaaaagaataactaatattcccgctgtcaattaatattttacattaagtactagctaag

SEQ ID NO: 312293 - DNA, 485 bp, Homo sapiens
taataattgtagtctcaaaacaaaatattaaccttgcagttttaagaacagtattatcaggctggctaatgaatactgatatataagctatgtcaaattgtgtgtaaacatagggttatctatatcactactgattatatgaagagctaataatgcccattaaaatataataagattttctagttttcttataacccatgtggcataccataaagtaaaatcagacttaaatatacaaataacagattcaaatataatatttacattacttataagtagytgggagttcatctttataagtactaatatagtagctctttatatatatatgtgtgtgtgtgtgtgtgtgtgtgtgtgtgtgtgtgtgtttatactcccagtgaaattctgttgaagaagaattgacataatatattatgtgatattatttggaaaaaataaatgtaagtttcacacagacattgaataaacttgctttgtatttt

SEQ ID NO: 312294 - DNA, 544 bp, Homo sapiens
aactgccttggaatcctagctccaccacttactaatcttacttattgaagcaaatcatgtaaacatgtcccctatgcttaaactaaatgtagtctcaacttagtttcccttagccacatccccaaaatgcccacagccacttgaacatactaggggaatatgtgagagaaagtaagcaagaatagaaagagacagggaatttaatcaactgcaattaaartgtcttatttttgcaaattttataaaaatatgtgacaaggtgaacagatagggctttgctaggcttggaaggagactgggcaagtgagagtccctgaaatttaagcttcactatcgtattgatatattaatctttgaggtaacaatattgattagccttaaactttgatatgcttaatattcatgttatgatttctagagaaatcaccaaagaataaaaacagggcatataattaaatgatatgggttattagattgaaaaagtgaataaaaatagctcacatcaagcacatcattatatcatttcagagaagcaaagaaagat

SEQ ID NO: 312295 - DNA, 544 bp, Homo sapiens
aactgccttggaatcctagctccaccacttactaatcttacttattgaagcaaatcatgtaaacatgtcccctatgcttaaactaaatgtagtctcaacttagtttcccttagccacatccccaaaatgcccacagccacttgaacatactaggggaatatgtgagagaaagtaagcaagaatagaaagagacagggaatttaatcaactgcaattaaaatgtcttatttttgcaaattttataaaaatatgtgacaaggtgaacagatagggctttgctaggcttggaaggagactgggcaagtgagagtccctgaaatttaagcttcactatygtattgatatattaatctttgaggtaacaatattgattagccttaaactttgatatgcttaatattcatgttatgatttctagagaaatcaccaaagaataaaaacagggcatataattaaatgatatgggttattagattgaaaaagtgaataaaaatagctcacatcaagcacatcattatatcatttcagagaagcaaagaaagat

SEQ ID NO: 312296 - DNA, 595 bp, Homo sapiens
tttttacatgtgctactgctaatctatgattctcctatcctgttgcagttaattttctgaaaaatgttaattcaaggccttatattttgtgccaatcacatttgatgttgcttaaattcctgtttttattcaaaaatatatcttattagtctcatctaatttttccttgttaaaatgtttttggattgtagtttggtcacctggtattttaactaccagaagaaggtgtaataaatccttgcgtatattcgtttaacaatgaatatgtaaaatctgataagaattatgctgagcaggacaagactggttacacaatgaagtagagttcatatttttccatgctatagtttaatttaccgtagatcaaagcaaaaccagtgttgcttagaactagttttgagtagctaagactcatatgcgactttaaaccaccacagatttgaaaaagattcttagactaacattgcactctggattgtctctcaagtgctaccagtgaakctctgtgctggattagctgatcagatgaatgagtgagaatctagggatatgtattaaagacaaatcatgctagtactttttatcctagagttaa

SEQ ID NO: 312297 - DNA, 523 bp, Homo sapiens
gatcaataagtacatataaaaatgctcagcattgttagtcattctgcaaatgtaaactaaaatcacgttgagataccatctcataaacactgggatggctatcgtgaaaaggttgcaaaatgacaaatgttggtgaggatgtggagaaattgcaactttcacacattgctggtgggaatgtaaaatggttcagccactttggaaaacactctgrgaggtccttaaaatgattagcatatagttatcatgtgacccagtgattatactccttagtacactccttagtatatatccaagagaaataaaaacatttgcacacataaaaatgtgtagatgagtatttatagcagtgttacctataacatagaagtagaaacaacccaaaagtccatcaactgatgaatgactaaacaaaatgcagtatatccatacagtgaagtattacttgacaatcaaaagaaatgaagtactgatacatgatacatcatgaatgaaccctgaaaaacatgctaggtgaaataag

SEQ ID NO: 312298 - DNA, 606 bp, Homo sapiens
attttctcatcacccaaatccatcagtattaacataatgccacacttgctttctttttcccctctatgtgtgcatgtctttatgtacttctttgtgtacatgtgtgggtttttgttgttgtaccatttagaataagttataaatatcatggaattttatctctaaatagttcagcaaatatttccaaagaacaggatctttacctgtgtaaccacaatgccatatgactttcaaaaaatttagcagtaaagcaaaaaaaaacaaacaaaaaaaaaacaaaaaaaacaaacaaaaaccgggaggcatcatattacctgacttcaaactatactacaaggctaaccagctgggtgctggtacaaaaacagacacatagacccatggaacagattagagaactcagaaataaagctgcacacctacaaccatctgatcttcaacaaagccaacaataacaagcaatagggaaaggactccctatttaataaatggtgctggcataartataactggatagccatatgcagaagattgacactggacccctagttttaccatatatgaaaatcaactcaagatggattaaagaattaaatgtaaaaccta

SEQ ID NO: 312299 - DNA, 606 bp, Homo sapiens
attttctcatcacccaaatccatcagtattaacataatgccacacttgctttctttttcccctctatgtgtgcatgtctttatgtacttctttgtgtacatgtgtgggtttttgttgttgtaccatttagaataagttataaatatcatggaattttatctctaaatagttcagcaaatatttccaaagaacaggatctttacctgtgtaaccacaatgccatatgactttcaaaaaatttagcagtaaagcaaaaaaaaacaaacaaaaaaaaaacaaaaaaaacaaacaaaaaccgggaggcatcatattacctgacttcaaactatactacaaggctaaccagctgggtgctggtacaaaaacagacacatagacccatggaacagattagagaactcagaaataaagctgcacacctacaaccatctgatcttcaacaaagccaacaataacaagcaatagggaaaggactccctatttaataaatggtgctggcataagtataactggatagccatatgcagaagattgacackggacccctagttttaccatatatgaaaatcaactcaagatggattaaagaattaaatgtaaaaccta

SEQ ID NO: 312300 - DNA, 604 bp, Homo sapiens
tgacatagtgaacacctggtttcctagggtcatggtcaccttcttgacaaatcttgacaggtgcctttgggaatgcaagtggcagtgaaaacagccaaggagaagaaagaccctatgaaaatgtgatatatgatccagtcaagaataggctttttgttttcatttttattttgtttatttatttagagacaaggtctccctctgttgcctgggctggagtgcagtggtgagatcacagctcactgcagcctggaccttctgggctcragtgatcctctcgcctctgtctccagagtagctgggaccacaggtgtgtgccaccacacccagctaatttttaaattattttctagagacaaagtctcactgcgttgcccaggctggtctcaaactcctgggctcaagcaatcctctggcctcagccttccaaagtgttgggattgcatgtgtgagccactgcgcccagccaaggatatgtgtttgttggatccttgattcatttgttgattcactcactgacatcttcagtatagtatgctggtgctgctcaaagcagtcctccactgtcaggatcatcatgacttgagggcttgtcagaaataca

SEQ ID NO: 312301 - DNA, 604 bp, Homo sapiens
tgacatagtgaacacctggtttcctagggtcatggtcaccttcttgacaaatcttgacaggtgcctttgggaatgcaagtggcagtgaaaacagccaaggagaagaaagaccctatgaaaatgtgatatatgatccagtcaagaataggctttttgttttcatttttattttgtttatttatttagagacaaggtctccctctgttgcctgggctggagtgcagtggtgagatcacagctcactgcagcctggaccttctgggctcgagtgatcctctcgcctctgtctccagagtagctgggaccacaggtgtgtgccaccacacccagctaatttttaaattattttctagagacaaagtctcactgcgttgcccaggctggtctcaaactcctgggctcaagcaatcctctggcctcagccttccaaagtgttgggattgcatgtgtgagccactgcgcccagccaaggatatgtgtttgttggatccttgattcatttgttsattcactcactgacatcttcagtatagtatgctggtgctgctcaaagcagtcctccactgtcaggatcatcatgacttgagggcttgtcagaaataca

SEQ ID NO: 312302 - DNA, 589 bp, Homo sapiens
gctagcgaccacattttagaacgattttacctggtgtgaacagagagtaaagaagggccacccctttcccttaataacaggttcttagctgttagtcccaggaagtaaagcaaaggcaaatgaacttccatgataaatatttaagaaaaataatctttaattgagttagaatgaaagtaaatgtgcaaactgctatttgagataactgtctcgataagcctcttgcaaatataatatgaagcagaaaacctgttaactctttttgtctcgtctttattcaccagggttaggtgstcttacatggtagggggaatctggactagtaatatctcgatgaagttgcaaaaagaacaacaaaaaaaacccatttggttgagcactgtgagctgacatatgcacctgtaagccaagataactacagagctgctctgcaaatttggttagggtttaggggataatcttagactaataaaataaaccatccttgaatgttctagtcaccaggtagcagaagcctgcttaggtctcagtggattccttctttctggtctcattggcagttagatattgatgttataaactctcatgc

SEQ ID NO: 312303 - DNA, 595 bp, Homo sapiens
ttctttgaatgcaagcactgcagtgccacaacagttgatctgatagcccagatgagtacaaagcgactaacatgggtggcacagacagtgtagacatgctagacaaatgtctgattcacatcccaggtggaacagggcgggacagtgcaagatttcatcattgtactcagaaaggcacacatttaattgttaatttctggaatttttcatttaatatttcagaccaagattgactttgcrtaactgaaatatactgatctttattagtctgccattgcttacgacatagatattacattaaaaacactgtgtattagtctattctcacattgctataaacaaccagagactgggtaaattataaagaaaagaggttgaattgactagttcctcatggttagggaggcctcaggaaacttacaatcatggtggaaggtgaaggctaagcaaggcatgccttgcatggcagcaggagagatgggggagggggaagtgccatacttttaaaccatcagatcccatgagaactcattcactatcatgagaacagcataggggaaactgcccccatgatccaatcacctcccaccaggtc

SEQ ID NO: 312304 - DNA, 595 bp, Homo sapiens
ttctttgaatgcaagcactgcagtgccacaacagttgatctgatagcccagatgagtacaaagcgactaacatgggtggcacagacagtgtagacatgctagacaaatgtctgattcacatcccaggtggaacagggcgggacagtgcaagatttcatcattgtactcagaaaggcacacatttaattgttaatttctggaatttttcatttaatatttcagaccaagattgactttgcataactgaaatatactgatctttattartctgccattgcttacgacatagatattacattaaaaacactgtgtattagtctattctcacattgctataaacaaccagagactgggtaaattataaagaaaagaggttgaattgactagttcctcatggttagggaggcctcaggaaacttacaatcatggtggaaggtgaaggctaagcaaggcatgccttgcatggcagcaggagagatgggggagggggaagtgccatacttttaaaccatcagatcccatgagaactcattcactatcatgagaacagcataggggaaactgcccccatgatccaatcacctcccaccaggtc

SEQ ID NO: 312305 - DNA, 637 bp, Homo sapiens
gcaagcactgcagtgccacaacagttgatctgatagcccagatgagtacaaagcgactaacatgggtggcacagacagtgtagacatgctagacaaatgtctgattcacatcccaggtggaacagggcgggacagtgcaagatttcatcattgtactcagaaaggcacacatttaattgttaatttctggaatttttcatttaatatttcagaccaagattgactttgcataactgaaatatactgatctttattagtctgccattgcttacgacatagatattacattaaaaacactgtgtattagtctattctcacattgctataaacaaccagagactgggtaaattataaagaaaagaggttkaattgactagttcctcatggttagggaggcctcaggaaacttacaatcatggtggaaggtgaaggctaagcaaggcatgccttgcatggcagcaggagagatgggggagggggaagtgccatacttttaaaccatcagatcccatgagaactcattcactatcatgagaacagcataggggaaactgcccccatgatccaatcacctcccaccaggtccctcccttgatacatgtggattacaataggagatgagatttgggtggggaca

SEQ ID NO: 312306 - DNA, 605 bp, Homo sapiens
tatgatcatatgcttgatttttttgtgttagtgtttatagtatatgatcattaaatactgcctcctgctccctagaatttaaaggaaacatgactaagccttaactttcttattttacccagcattagttctttaaagagatgtttgggtgctgtgtagctcctgttcgttgtttataatcacttttgtctttttctcctccagacgttactatttttataaccactagacaacgcaggttgccgcatacttctttatttgtgtagacctcgctcttgccctgtttgaagagcctgagttgcttcccctgcctttcttggtaagcaagccatagcagatggctagccagatttggtcatagatgattgggccttgtgcctcttctttttttcccctcaaatttcaacaaatatgaattagatgttatttattttttttgctgggggattagagaagttctrtctactcaccaaacacatgcttccttcataacgcattttaagtgcagtgggagattttggtcttctgtgcacacacacacaaaatcagagatggttcaatgatgttttcaaagccaatttacttactgccaagtagatgatgtt

SEQ ID NO: 312307 - DNA, 549 bp, Homo sapiens
ctcaagagtccttttattctatcttcttgtctagctcttgaccttcctgagtttttattaaagctctgctgtgctgtaggttacatcaaagagtgcctcctccatgaagcccctcaaatatcttaacccttggtgatccacctgtcctcgctcccctgggacagccacactggtttcctccagtgcggcagttgtgaaccagcctcatttcttagctgtttcccccgcctgtgggcggcaagccactcaggtgccaaggcaagagactgaaggcaaaaactgttccagtataataaagaaaatatacagaataagaatagttatactagaaatagattatagatatgattatatatgaatatcattaatcattagtttgttaacattactctttattccaatattataataatctttgttctacaattataacttaggaaaarccaggccatacagagataggagctgaagggacacggtgagaagtgactggaagacaagagcgtgagccctctgttacgcctggaaaaggccactagagggctccct

SEQ ID NO: 312308 - DNA, 542 bp, Homo sapiens
taacgccagcacctgggaagacgccccttacgtagcggacctcggtctagcggtagcgtcagtgccaatgsaaggcactatggagtctccctttccttgggggagttagagaagactgctgtaccacctcttgtggaaggcctgacaccagtcagccccgcccacagccatctggagcccggaacgtctccctgtgatgctgtgcttcagcggtcacgctcctggtccactttcatgttccaccctgtacacctggctctgccttctagatagcagtagcagaattagtgaaagtactaaaagtctttgaaatgcatagaagaaataatggcataagctgtcctctctctctgccttactgccaaacagggagggccccctgtccggtggacacgtgactcatgtgaccttatcaatcattggagatcactcacactccttaccctgccccttttgccttgtgtccagtaaataccaacacagccaggtatttggggccactataggtctccgcgtctaggtggtagtggtctcccgggccc

SEQ ID NO: 312309 - DNA, 596 bp, Homo sapiens
catctctactctactctgcagctactaggtagtttcagctgggaaaatgaacaaagtccatattcagcctgagaattccacccaattctatttgccagttatcccctagattccacaggattttgtggaattctttttaaaacactgcaatgtgacaatcaagaggtagggrcaaagtcaacagtggtggttgaaaatagaggccaaaccttctccaatgccttcacaaggcagggcacgcaggagccctgctgtctttggctccatctccttccccttcccctcactcactccactccactccagcctcaatggcttcctttatgctcctcaaacattccccagggcctttgctctagctattcccttagcctggatgatgcattccccagacacccaagtgtttgctcagatcgtaccttcttagggaggcagaccctgatccccaccctactgaactcttcagcccaccgctgccctcctgctcccctcccccttgatcttttacttccttgcattgcccttatcaccttctgccacacgatatgattctttatatcttccatttattcttaactatctgtgtactcctgata

SEQ ID NO: 312310 - DNA, 298 bp, Homo sapiens
ccaccgctgccctcctgctcccctcccccttgatcttttacttccttgcattgcccttatcaccttctgccacacgatatgattctttatatcttccatttattcttaactatctgtgtactcctgatagaacacaatctccacaagggtggagatctttaatttgtgcacaggtatttcccaagcacctaaaatagtgtccagaaaacagaaggttttcaaaaactgtttgttgaatgagactttctgtaagtggtgtggaatggtttccaytaagaggggactggtgggaaaaagt

SEQ ID NO: 312311 - DNA, 541 bp, Homo sapiens
gaccttgtttataaacaattctggtccttttatctttggtgataaggtgtataaaagagccccacctagatgactggagcaatgtggatgcagatacctaacacctctgtcatctggtactctaaatgctagagcagtcactgcactccagcctgggcaacacagtgagatccccatttctttaaaaaaaaaaaaaggtaagaaaaagaaaagatgtagaacatctccttccccacagggatccctcacactgccctttttggccaaacccacttctctcctgttcytcctctccttaacccgtggcccactaatctgttttttatttctaaaattttgtcacttcaagagtactatttaaattgaatcacaccatatataacattttaggactagattttttttttttttttgagatggagtctcattctgtcacccaggctggagtgcaatggtgcaatctcagctcgctgcaacctccacctcctcctgggttcaagagattctcctgcctcagcctcctaagtagctgggattacag

SEQ ID NO: 312312 - DNA, 604 bp, Homo sapiens
ttcaagaatttgaaaaagtttctaaattgaggaaaaatttacataagattaagcactttaaagtgtatcattyggtgacatttaggacattcttaacactctctagttccagaattttttttcttttttgagaggggtctcattctgtcccttatgctggagtgtggtgatgagattttgactcactgcaatctccacctcccaggctcaaacaatcttcccacctcagccttctgaatagctgggaccacaggcacgtgtgccaccacgcccagctaattcttcgtattttttttggtaaacgtggggtttcaccatgttgcccaggctggtcttgaactccttagctcaggtgatccacctgccttggcctcccaaagtgctgggagtttttatagttcgaagtcttacatttaagtctttaatccctcttgagttaatttttgtatatggtgataagtaggggtctagtttcattctggcatctagatagccagttatcctggaatcatttattgaataggaagcccttttcctattgcttatttttgtcacctttgccaaagatcagttagttgtagacgtgtggcttcatttctgggtt

SEQ ID NO: 312313 - DNA, 604 bp, Homo sapiens
ttcaagaatttgaaaaagtttctaaattgaggaaaaatttacataagattaagcactttaaagtgtatcatttrgtgacatttaggacattcttaacactctctagttccagaattttttttcttttttgagaggggtctcattctgtcccttatgctggagtgtggtgatgagattttgactcactgcaatctccacctcccaggctcaaacaatcttcccacctcagccttctgaatagctgggaccacaggcacgtgtgccaccacgcccagctaattcttcgtattttttttggtaaacgtggggtttcaccatgttgcccaggctggtcttgaactccttagctcaggtgatccacctgccttggcctcccaaagtgctgggagtttttatagttcgaagtcttacatttaagtctttaatccctcttgagttaatttttgtatatggtgataagtaggggtctagtttcattctggcatctagatagccagttatcctggaatcatttattgaataggaagcccttttcctattgcttatttttgtcacctttgccaaagatcagttagttgtagacgtgtggcttcatttctgggtt

SEQ ID NO: 312314 - DNA, 604 bp, Homo sapiens
ttcaagaatttgaaaaagtttctaaattgaggaaaaatttacataagattaagcactttaaagtgtatcatttggtgacatttaggacattcttaacactctctagttccagaattttttttcttttttgagaggggtctcattctgtcccttatgctggagtgtggtgatgagattttgactcactgcaatctccacctcccaggctcaawcaatcttcccacctcagccttctgaatagctgggaccacaggcacgtgtgccaccacgcccagctaattcttcgtattttttttggtaaacgtggggtttcaccatgttgcccaggctggtcttgaactccttagctcaggtgatccacctgccttggcctcccaaagtgctgggagtttttatagttcgaagtcttacatttaagtctttaatccctcttgagttaatttttgtatatggtgataagtaggggtctagtttcattctggcatctagatagccagttatcctggaatcatttattgaataggaagcccttttcctattgcttatttttgtcacctttgccaaagatcagttagttgtagacgtgtggcttcatttctgggtt

SEQ ID NO: 312315 - DNA, 604 bp, Homo sapiens
ttcaagaatttgaaaaagtttctaaattgaggaaaaatttacataagattaagcactttaaagtgtatcatttggtgacatttaggacattcttaacactctctagttccagaattttttttcttttttgagaggggtctcattctgtcccttatgctggagtgtggtgatgagattttgactcactgcaatctccacctcccaggctcaaacaatcttcccacctcagccttctgaatagctgggaccacaggcacgtgtgccaccacgcccagctaattcttcgtattttttttggtaaacrtggggtttcaccatgttgcccaggctggtcttgaactccttagctcaggtgatccacctgccttggcctcccaaagtgctgggagtttttatagttcgaagtcttacatttaagtctttaatccctcttgagttaatttttgtatatggtgataagtaggggtctagtttcattctggcatctagatagccagttatcctggaatcatttattgaataggaagcccttttcctattgcttatttttgtcacctttgccaaagatcagttagttgtagacgtgtggcttcatttctgggtt

SEQ ID NO: 312316 - DNA, 548 bp, Homo sapiens
gttcacttggttgtaggtgtgtgactttatttctaggttctctattctgtcccactggtctatgtatctgtttttgtaccagtactgtagtgttttggttatgtagccttctaatatagtttaaagttggatagtgtgatgtctctggcttttttcttttttcttctttttttttttttttttggcttargattgctttggtgattcctgctctttttttcattccatatggattttagagtagtgtttttcctaattctgtgaaaaacaacattggtaatttaataggaatagtgttaaatctagagattgctttgggcagtacggccgttttaatgacactcattcttcccatccatgaacatggaatgtttttccatttgtttgtgtcatctgtgattttattcagcagaaatttttgttattcttgtggagttctttcacctccttggttagatatattcctaggtatttttttgtgtggccataataaatgggatagcattcttgatttggctctcagcttggatgttattggtgtatacaac

SEQ ID NO: 312317 - DNA, 548 bp, Homo sapiens
gttcacttggttgtaggtgtgtgactttatttctaggttctctattctgtcccactggtctatgtatctgtttttgtaccagtactgtagtgttttggttatgtagccttctaatatagtttaaagttggatagtgtgatgtctctggcttttttcttttttcttctttttttttttttttttggcttaggattgctttggtgattcctgctctttttttcattccatatggattttaragtagtgtttttcctaattctgtgaaaaacaacattggtaatttaataggaatagtgttaaatctagagattgctttgggcagtacggccgttttaatgacactcattcttcccatccatgaacatggaatgtttttccatttgtttgtgtcatctgtgattttattcagcagaaatttttgttattcttgtggagttctttcacctccttggttagatatattcctaggtatttttttgtgtggccataataaatgggatagcattcttgatttggctctcagcttggatgttattggtgtatacaac

SEQ ID NO: 312318 - DNA, 591 bp, Homo sapiens
ttgttcttgtttttttaggtcctttaggtgtgatgttagattgataatttggtatcattctagctttttgaggtaggcaaaccacttaagcactataaactttcttcttaatactgctttttctacattccagagattttggtaaattgtgtctctgttttcatttattttaaataattatttgatttctgctttaattttgttaactcaaaagttattaagaaacaagttctttagtttccmttttattgtgtgattttgaagtatcttcttgatattgccttctatttttattctccgtggtccaaaaatatgcttggtgttgtttcttcattaaaaaaagttattgagacttgctttatggccaaatatgtgattgatcttagagtatatgccacgtgcaaatgaaaagaatgtatcttctgtggttgttgggtggaacattttgtcaatttttattaggtccaattggtgaagtgttgaatttaagtcagaatttccttgttagttttctgcctcactcatctatttttctaattagtatgattcagttttttttctgacattgcagttttctgcacctatcacaac

SEQ ID NO: 312319 - DNA, 378 bp, Homo sapiens
ggaggctcctgccagacagaagtagccgggggagcaggggccagagggcgcagccaggccagaggcaccacagaaatggccagggggacaggacaggccctcagagaccatggagagaaacattctggggagacagaaagaaacccaggagatgagccagggaggggagcaggcgggaggaaggggctgtgggaccaggcctctctgaaagggtggacccaggcgcaccctggcagrgaccacctttccgcgatttccttttcatctctcctctctcaggctccctgtgactcctgcctacactggctccaggtagcatttccggcaggtgcctgagggaaagtgtggcagggctcttctctctgtctctctttcccc

SEQ ID NO: 312320 - DNA, 271 bp, Homo sapiens
ggagagcagcttggaaccttcaaccyagccaagacccagtgccttggactgggggagaaaacatgcagccattcctctctctctctgctggctagaggggattctggcttttcctgccagagccacccctttccctcctcctaaagttgatggtggttctttaaggaaagggagaagtgcacggtgtgatagggcaggaagagaagaaaacggaggagaagaggggactttcccataagcaggcagaagaaacggcagctgtgttgtgtga

SEQ ID NO: 312321 - DNA, 271 bp, Homo sapiens
ggagagcagcttggaaccttcaacccagccaaracccagtgccttggactgggggagaaaacatgcagccattcctctctctctctgctggctagaggggattctggcttttcctgccagagccacccctttccctcctcctaaagttgatggtggttctttaaggaaagggagaagtgcacggtgtgatagggcaggaagagaagaaaacggaggagaagaggggactttcccataagcaggcagaagaaacggcagctgtgttgtgtga

SEQ ID NO: 312322 - DNA, 271 bp, Homo sapiens
ggagagcagcttggaaccttcaacccagccaagaccyagtgccttggactgggggagaaaacatgcagccattcctctctctctctgctggctagaggggattctggcttttcctgccagagccacccctttccctcctcctaaagttgatggtggttctttaaggaaagggagaagtgcacggtgtgatagggcaggaagagaagaaaacggaggagaagaggggactttcccataagcaggcagaagaaacggcagctgtgttgtgtga

SEQ ID NO: 312323 - DNA, 271 bp, Homo sapiens
ggagagcagcttggaaccttcaacccagccaagacccagtgccttggactgggggagaaaacakgcagccattcctctctctctctgctggctagaggggattctggcttttcctgccagagccacccctttccctcctcctaaagttgatggtggttctttaaggaaagggagaagtgcacggtgtgatagggcaggaagagaagaaaacggaggagaagaggggactttcccataagcaggcagaagaaacggcagctgtgttgtgtga

SEQ ID NO: 312324 - DNA, 541 bp, Homo sapiens
acacaaagttggagtaggctaaatttattaatgttggcccactaaacagagattctggattcagggttgtaggtcaaagytttagaaagggctccaagggttggtttgatcggttacttggttggttggttggttgcttgcttgcttgcttgcttgtttggttggtttgttgcttgcttgcttgttggttgattggttggctgtttgcttatttgttttgttacttggctggttggctgaaacagaatcagagtttacctaaagtacataaagttgagatgtcacaacttccttggtttatgtgtataggaaggtatgcaaaaactcagggagactggatttattatgtcagacctgctcactcacactggagggtctacagaacatacttctcacaacgatcatgagaaagaatattgtgagaggagcccagtatcctggaagagctttgagctcgtgctctcagtaggcaaaatgttacagcagaaactgcagccactggactgggatctttaaataaaatgaggataattgaatcctg

SEQ ID NO: 312325 - DNA, 560 bp, Homo sapiens
tgcaagccagctgatcccttgggaagtctagctgtatgaatcaataaatgttccrtttttacttcaaagaaaagagttgacagagggagaatgaaaggaaacaggccctttataacagtacaaccatcactatgtagagactacaatcctctaaagaagtcctgccttagggggcccggtctagggaccttttgccactcatcaatccagagggagctgactgagtgacagctctccagtgggagcagggttgggggtgctgactgggaccacagtgggggcctggcagcatgatgaagcaagaaagcaaagctgggctctagtaccaaatccacgtcctaggaaggaactccacttctgggactaatggcagaagctcagactaagacgtaatacgtgtttgtccagagttgacagcagactccaaacaagttatcagaaatgtggaagtaggaaagtatagttgaagatgatgaaggattaggatgctcccctacccataaatgcatcaagaccccgaaagcagaatccagggaagggtacttggaaagaatggcagc

SEQ ID NO: 312326 - DNA, 560 bp, Homo sapiens
tgcaagccagctgatcccttgggaagtctagctgtatgaatcaataaatgttccgtttttacttcaaagaaaagagttgacagagggagaatgaaaggaaacaggccctttataacagtacaaccatcactatgtagagactacaatcctctaaagaagtcctgccttagggggcccrgtctagggaccttttgccactcatcaatccagagggagctgactgagtgacagctctccagtgggagcagggttgggggtgctgactgggaccacagtgggggcctggcagcatgatgaagcaagaaagcaaagctgggctctagtaccaaatccacgtcctaggaaggaactccacttctgggactaatggcagaagctcagactaagacgtaatacgtgtttgtccagagttgacagcagactccaaacaagttatcagaaatgtggaagtaggaaagtatagttgaagatgatgaaggattaggatgctcccctacccataaatgcatcaagaccccgaaagcagaatccagggaagggtacttggaaagaatggcagc

SEQ ID NO: 312327 - DNA, 584 bp, Homo sapiens
gattttatatttggaaaaacctaaaggctccaccaaaaaactattagaactgataaataaattcataaagttgcaggatacaaaatcaacatagaaaaaccaacagcatttctattatgtatgtcaacagtgaacaatctgaaaaagaaatcaagaaagtgatcccatttaaaataactacaataaaataaaatacctaagaataaacttaaccacagaaatgaaagatttctacaatggcaactataaaactttgatgcaagaaattagagaagatgctgaaaacatagaaagatattccatgttcatggattkgaataatcaatattatattgttaaaatgttcatactacctaaaccaatctacagattcactgcataccctatcaaaataccaaggacattcttcacagaaatagaaaacaatcctaaaatttatacggacccataaagacccagaataaccaaagccattctgagcaaaaagagcaaaactcacatgactgagctcaaattatactacagaattacagtaaccaaaacagcatggtactggcataaaaatagatatgtagaacaatgga

SEQ ID NO: 312328 - DNA, 516 bp, Homo sapiens
tatctggcatcttagctggtatattagtcagttgttgcactgctgtaaataaatacctgagactgggtaattttacaaagaaaagagttggcccacagttctgcaggctgtacaggaagcatagcagctttggcttctaaggagacctcaggaaacttacaatcatggcagaaagtgaagagaaagctggtacttcacatggctgagagcaggaggaaggtggcaggggaggtgctacccacttttaacaaccagatctcatgagaactcacttactattcagtatcaaggrggtaatggtgcaaaactgttcatgagaactctgcccccataatccaatcacctcccaccaggccccacctcctacactggggattacaattcaacatgagacttaggaagggacacagatccaacccacatcagctgggatggttggaagagctgggagatgacttggcctcactctgcatagactgtcataattcagtagtctagcctgaacttatctatagg

SEQ ID NO: 312329 - DNA, 639 bp, Homo sapiens
gaaacgcacacactaagtcccttcctgtctcatggtcattgtttttgctgtacgttccaacaatcatgtttttaccctggctctagttttaatcacctccttctcttaccacarctctcagctaacttgttactctatcagacttttctctaatttccttaattcctatctgagttttctctaaccatcctaattaaataggtccaacccaaccatctccaccaaattatggctcttactatatctgaaatttgtttcacttattttctgtctaaaaacccaccctcactttaacaatcgcttacaaaatgattagcgtatgccaaatgaaaaagcctagatattcttccctgtatgtaacttcctggaaagcaggggcctcctcatgttgtcctttgccgcatcccaatgcagtcacattgcctcagcaatcaattctgagctttcaatagttattaacggaatagactgcaagccactgactggtaatcgaaggccagcattagaaagaggataccgacaaacctacaaatagagggatctgtttccgtcactcgcgccctaacgcaaagggtgggacaacccgcgcgcatgcgtcgttgtcctctgctctccagggtaaaccccgcccctttcttt

SEQ ID NO: 312330 - DNA, 639 bp, Homo sapiens
gaaacgcacacactaagtcccttcctgtctcatggtcattgtttttgctgtacgttccaacaatcatgtttttaccctggctctagttttaatcacctccttctcttaccacagctctcagctaacttgttactctatcagacttttctctaatttccttaattcctatctgagttttctctaaccatcctaattaaataggtccaacccaaccatctccaccaaattatggctcttactatatctgaaatttgtttcacttattttctgtctaaaaacccaccctcactttaacaatcgcttacaaaatgattagcgtatgccaaatgaaaaagcctagatattcttccctgtatgyaacttcctggaaagcaggggcctcctcatgttgtcctttgccgcatcccaatgcagtcacattgcctcagcaatcaattctgagctttcaatagttattaacggaatagactgcaagccactgactggtaatcgaaggccagcattagaaagaggataccgacaaacctacaaatagagggatctgtttccgtcactcgcgccctaacgcaaagggtgggacaacccgcgcgcatgcgtcgttgtcctctgctctccagggtaaaccccgcccctttcttt

SEQ ID NO: 312331 - DNA, 613 bp, Homo sapiens
tgaaacaggaagcctggggttggcttaatcgtcaggaatcagccacgctcacctgcgctgtgccttttaagctctgttgtcatctgcctctgaatcccttagacccagttttccttcctagggctctgacctgaagcttggaattgaggcttggacaaaaatgtatcttgggaggtgggggtgtcgcatggattccttaacataagccaaatgctaaggtgaaattgtgaaattgagtcctcctccaacaagagagaggaaaggatgtcttgtgacatacccagatagctggtggctatagttatgctgcaaagatttgggtgttattgtgcttggctttggttagctcccttggtcttactttcccaaaaagaaaccgccaagtgatgggcaccctatttattcccatgacctggcaggatttgcaggatcattggtcagaactagaatattgatcaggatttgtacattacccatccctcgtgttctttctgatctacagccagaggttgctgcttggttcacaggaacaagcagggttagcctaaaatataggcaaaaayttaagacaactagtgagtttagaatttaatgacaaatatataagtttgaa

SEQ ID NO: 312332 - DNA, 490 bp, Homo sapiens
tactctgtctgttctctagaaatggaataacaagacctggatgacagaacatctgtttacagcatgatttactgaatattttaagcccattgttgagaactaaaagaaaaaaatttatttaaaaatatcactgctcattgaaaatgcccttagtcatccaagagttctgataagagatgtgcaaggggattcatgctttcatgcctgctaacacaacatccattgtgcagctcatggatcagggagtaatttcaatgttcaagtatttttatttaagaaatacattttgtaaggctgtaactgtcatagatagtgattcctctggtgagtgtggacaaaataaattttctttaaaggtgtcactgttctagacgtcattaagaatattcgtgatttatgggaaggggtcaaaatatcaacataaataggtgtttggaagaaattsattccagtcctcatgcatgactttgaggggtccaagactttagtg

SEQ ID NO: 312333 - DNA, 590 bp, Homo sapiens
agcatggcttctaatcaagacagcctgaaggctgaaccttggatctcctacttagtagttatgcctcagtttcctcagctctgaaatgaagatagactaatttttgtgtctacctcataagacgttgtgtggattcaatgtggtaatgcttgtaaagtgtttaaaacggtggccgacacatgataaatgttatataagtataagccagtaacaaagaatggctggatatgactttgcaaagatgacccmaagcaagaactgttacgtacagaatcccatgcaaacacatgtgtataacaaaggcgtccagttctttggtgatctgtctgcagtcctagtcatagcatacctgagaaatacaactgagcacgaaatgatttcaaaataatgttttgaaggttttaagacacaagacattttatgcaaatttactgctgcctactccgaccacttttacttctcctctttcatcttcattttccctatctcagttatttagactgtttctgcagtttcatgatttccttgctattgtaggataaatgtttaggaaatgtttataaactttcacttttaggaactctctataa

SEQ ID NO: 312334 - DNA, 590 bp, Homo sapiens
agcatggcttctaatcaagacagcctgaaggctgaaccttggatctcctacttagtagttatgcctcagtttcctcagctctgaaatgaagatagactaatttttgtgtctacctcataagacgttgtgtggattcaatgtggtaatgcttgtaaagtgtttaaaacggtggccgacacatgataaatgttatataagtataagccagtaacaaagaatggctggatatgactttgcaaagatgacccaaagcaagaactgttacgtacagaatcccatgcaaacacatgtgtataacaaaggcgtccagttctttggtgatctgtctgcagtcctagtcatagcatacctgagaaatacaactgagcacgaaatgatttcaaaataatgttttgaaggttttaagacacaagacattttatgcaaatttactgctgcctactccgaccacttttacttctcctctttcatcttcattttccctatctcagttatttagactktttctgcagtttcatgatttccttgctattgtaggataaatgtttaggaaatgtttataaactttcacttttaggaactctctataa

SEQ ID NO: 312335 - DNA, 369 bp, Homo sapiens
acccaagtcatacactttcatttatcatcattgagagtacaattacttcctaaaatctgtccctgttctgagtttargaaattttagccactgatgtggacatctttttaaaacataaattagatattctgtgctcccaaactccaggacattcatgtaatatggctgacgccctaagaatttatacctaaatcaacatgactcattgaaatactgtgtaaagtcaacatggaatcaacagatcttaccaggaaaaagaagttgtatcatcagactgcagtgggtttgaatccacaacccctaccaccagtccctggtattatgtgggttgtgtgggaaagacaagttactcaactgcattgaatttca

SEQ ID NO: 312336 - DNA, 515 bp, Homo sapiens
tagctctcttttcaaatgaaaagccagattaaaatacaaaatcagtgaaaatgagccaatttcagcaactctgctttttctgactcgttcatttacccaaaagttttcagcaatattttaggtagaaagtgttgttagaaatagagtatttgcctttaggggaatacattgatctacttaatagcacagaaaaataaatggtgaactgaatgctcagaaccataatttatctataatttagaaagggtcaaaactcaagaaataaagttgcatataatttttctcagcctgaaagctgtagggaaccatatttaggacagcatttcagatatgaagatgcctaaatgaactcaaatcactcaaatgtagcaactgaagagcaaaagtctagcaaattggtagctaacgcttagagtaaccacattttgaaacaacattgcttgaaaaactattgtctttcaaaaamtaagatgttgaaagcaaactgtttaacattcaaacgtgtttcagaagta

SEQ ID NO: 312337 - DNA, 661 bp, Homo sapiens
ttttgctttcacaatgccctgctgatagattatcaatgtgtggtcactaaattaattaatgaatccgaagcttattttaaaaaatctttttctatggaataacgggtagagtttagtataaatccatgcatttggacmctattcctaaatataatcatatctctgtagatataaatagtataaattttctacttgtagttgttaaaaatgtaaatttaaaaaatacagcattaatcattgtgatactactagcatgattttaattcatctacttcagtcaatcattttttgtttgtttgtttgttttgcttttttgagatggcgtctccctctgttgcccaggctggaatgcgatgacacgatcttggctcactgcagcctccgcctccagggttcaagcaattttcctgcctcggcctcccgagtagctgggagtacaggtgcgcactagcacgcccggctaatttttgtatttttagtggagacggggtttcaccatattggtcaggctggtctcaaactcctgacctcaggtgatccacttgccttggcttcccaaactgctgggattacaggcgtgagccactgcacccgaccctgaaattttctttaccatgtgctgaagcttaatcaaatgaaacaaacttgtaaaagtttatgg

SEQ ID NO: 312338 - DNA, 661 bp, Homo sapiens
ttttgctttcacaatgccctgctgatagattatcaatgtgtggtcactaaattaattaatgaatccgaagcttattttaaaaaatctttttctatggaataacgggtagagtttagtataaatccatgcatttggaccctattcctaaatataatcatatctctgtagatataaatagtataaattttctacttgtagttrttaaaaatgtaaatttaaaaaatacagcattaatcattgtgatactactagcatgattttaattcatctacttcagtcaatcattttttgtttgtttgtttgttttgcttttttgagatggcgtctccctctgttgcccaggctggaatgcgatgacacgatcttggctcactgcagcctccgcctccagggttcaagcaattttcctgcctcggcctcccgagtagctgggagtacaggtgcgcactagcacgcccggctaatttttgtatttttagtggagacggggtttcaccatattggtcaggctggtctcaaactcctgacctcaggtgatccacttgccttggcttcccaaactgctgggattacaggcgtgagccactgcacccgaccctgaaattttctttaccatgtgctgaagcttaatcaaatgaaacaaacttgtaaaagtttatgg

SEQ ID NO: 312339 - DNA, 575 bp, Homo sapiens
tctctttccttatctcctaagcagaaagacctcacatgtggtattggctcagcagtcaccctagcaagggatcatatatcaaaactttaaagattggagatctggctgggtgcggtggctcatgcctgtaatcccagcactttgggagtctgaggcaggtggatcacgaggtcaggagtttgagatcagcctggccaacatggtgaaaccccatctctactaaaaatacaaaagttagctaggcttggtggcgggtgcctgtaatcccagctactcaggaggctgaggcaggagaatcgtttgaacccggsaggcggaggttgcagtgagccgatattgtgccattgcactccagcctgaacgacagggtcagactccatctcagggaaaaaaaaaaaaaaaaaaggttggagatacttgtaacagcatggcaagaatctggtaagacggttgctagtgataacttggaaggcagatcagtcacctgctgaactttcagctgaagaggataaagattagaaaagataatgtttacagtgggtttgctacaattagctgccttttattgtaggtat

SEQ ID NO: 312340 - DNA, 557 bp, Homo sapiens
agacttggggaaaaatggagatgaatgtctgcctcccaagcctcctgtcccgtgtcatcacatagtcacccattactttagcaaaggaggcatcgaatagtaagcaaagaaataaagcatgtctaagaattctaggaaagaaatttgggtgtggtcgctgacacatgaaattaaacaaaaacaagtagatcacatgcctcctcctatcttgagggaatttcactgccaaagaaactaactttaatattggatattccaactgctaaacaacctctggactcctgatgtgggcwgtattgtaccccccattccccaaattcacatgttgaaatcgaaccccagtaatgcataatgagactgtatatggagatagggacttagaagatgcagttaggtcaaaatgaggcctttcattcagggccaattcaatccgactagagtgcttgtaagaagaggaaatctggacatgcaaagagatatcagggaggtgcacacatagaggaaaggtcagtgacacagtgagaaggcagccacctgcaggtccagtaagaaaccaa

SEQ ID NO: 312341 - DNA, 590 bp, Homo sapiens
ccacttataagtgagtcaatgacagttttacaaaacacaatattgtaacttttgtcttttacttttcattctatgtcccgggaggatttcaaagaacttcatatacaataagaatatttaacagttaccaaaagaataaaattctcttagagaaaattgtcaacattactaaatgtccatggcaatagtatatattgatgatgacaagaaactgactaccaacagacagtcttaacatttaagtttggcaagtttttggaccctatcccaccccactcccccaaataagacagggctgaaaaagactcatcaaaaatttcattattattatctacttatggcatcttctttagaattcaattttatatttaatcaataacttaaaagtaaatcataagagattaatttattaaacatatttttattcctttttcatttcatttattttattttatttaatgcaggcatgggagtaaggagagatgtcccattaactaactgcytaaaaacaagtttcaaataaaaatcatgtgccaataaacagaccagaaacagaaatcattttctattttatgctatcatttattgtc

SEQ ID NO: 312342 - DNA, 496 bp, Homo sapiens
tttagctacccgttatgtgtaatggattcatttatctcctgtacatctaaaattgtactaattatatattattcctggaagtattgagactgtagtctctcaaatgattttctcttttctttggtttagatgagaaactctggttaagttattgacggccattgagcaaaatctttgtaccattggacagtttcataataacctctgatttctttgaggcttggagagtccaaagcgggtcaccaaatttgcaaaaccctttcctctacccaggagactggagcagtggggttgttgacaccayctgctatgaactttcttggtctgggaatcactatagcagtcaggagattattagtcagtttatctgatataggtacttaggagggtgtaggtatttttgctctagacaatactagtgttcttaatagagacattaaacaaaaaggacttctttgtgaataagatatgtactctggagcaacttcaatgaaat

SEQ ID NO: 312343 - DNA, 537 bp, Homo sapiens
tttttttaaaaagcaaagatatctcaaaggagtgtgatttatattctctctgttttctactcgccgtgccttctgattttctcaagttgctgaaaagataatggcttttcattgctcttctgtcgtgtttcacaataagttgcctccacctgttttgacatctgtagtttggagcttgcaaggacctgcttttactcagtagatggatattttaccagtaagcattggctgttctaacaccttgtttctccaggttatgtgtttatttcctgttaattttcttccacgtactgtactcgagcatcctgyaccactgccttctttctaagcctaagattcttctcagcttgaaacttccacttatccttgtttttacatatttttttctgacccttagttcatcatgttttaactattcctgccttgctttgttcttccagtcttagtaaaggaacctgtttcctgtgattcagcaattatgaagtacatttctaacagcttgacatctttattattagaagtcctgtcactttcatg

SEQ ID NO: 312344 - DNA, 547 bp, Homo sapiens
gtcaataataaaaaaaaataagaataatggctcctttccagcctggtttccagagcctctgacctgctgtggggaaggaccaccggtgattgcatcttcaaaacagggacacttaacagacacttacagaattccctccttttgctttctgcagcaggaaaatcaattctgtgtagtgtcctgtgattttctttgctttggctcacacagcagtatatctgtgatacgtgtttgcttttactcctgatttcagtgctcgtgcagtattattccctgttcttgcttttctttggcctttcagtcagtcttttgtcgactatgacagtgtgaggggcaagtggtaataygattctttcactctcctctttcctggcagttaatatgttggaatttaattttgttatggcaacccacatccaatttttgtatcagcttgtgtctgaaattcagttataagtcaagcatccaggcttgcttggagaactcgtatcagtgtcacctgagaaacttgaaagggtgaagcatcttctgtcttcacacctattag

SEQ ID NO: 312345 - DNA, 592 bp, Homo sapiens
tgacctgctgtggggaaggaccaccggtgattgcatcttcaaaacagggacacttaacagacacttacagaattccctccttttgctttctgcagcaggaaaatcaattctgtgtagtgtcctgtgattttctttgctttggctcacacagcagtatatctgtgatacgtgtttgcttttactcctgatttcagtgctcgtgcagtattattccctgttcttgcttttctttggcctttcagtcagtcttttgtcgactatgacagtgtgaggggcaagtggtaatatgattctttcactctcctctttcctggcagttmatatgttggaatttaattttgttatggcaacccacatccaatttttgtatcagcttgtgtctgaaattcagttataagtcaagcatccaggcttgcttggagaactcgtatcagtgtcacctgagaaacttgaaagggtgaagcatcttctgtcttcacacctattagccgtagtataagtgagactcaacaatatcgtaaattcaggggttgtattaatcaagcaaaaataattgatggtaactagacagaggatatttaggacaatgggg

SEQ ID NO: 312346 - DNA, 547 bp, Homo sapiens
gtcaataataaaaaaaaataagaataatggctcctttccagcctggtttccagagcctctgacctgctgtggggaaggaccaccggtgattgcatcttcaaaacagggacacttaacagacacttacagaattccctccttttgctttctgcagcaggaaaatcaattctgtgtagtgtcctgtgattttctttgctttggctcacacagcagtatatctgtgatacgtgtttgcttttactcctgatttcagtgctcgtgcagtattattccctgttcttgcttttctttggcctttcagtcagtcttttgtcgactatgacagtgtgaggggcaagtggtaatatgattctttcactctcctctttcctggcagttaatatgttggaatttaattttgttatggcaacccacatccaatttttgtatcagcttgtgtctgaaattcagttataagtcaagcatccaggcttgcttggagaactcgtatcagtgtcacctgagaaacttgaaagkgtgaagcatcttctgtcttcacacctattag

SEQ ID NO: 312347 - DNA, 587 bp, Homo sapiens
tttaaacttcaactcagtcctacctatttaattatacaaaatgactctaaaatattaaaggtaaaacaacccagaagaaaaatattaaacttttatctacccacgcttaagggctcagattgctggatttgagatttagctctcattatacaaccctgggccaaactaaatctcagttttctcacctgtaaaaattgcataaaagtagtacctacatcaagggaatgtggtgaagattaaatgagttaatatttagcacttcataattagagctactattatattcccagtgtttttacttctgttatggtaacccctcccccagtaatgggaatattcttacaccaaaatactattggcttttgtgctatttctttattcatgtaaaattttgttcctgaatccccctccctgtgtagatagttgccctggtgacattcttttattcctttcaacagcccaaatccctgaagatgatgtaaacacagctttagctacttcggaacattgttttgatgagtaatgtgggaagaaattttaagtacgcayacaaatttttcttaaaatacacctgaattttaaaatca

SEQ ID NO: 312348 - DNA, 596 bp, Homo sapiens
tctggaattttccagttatacttctgttattgatatctactttggacaattgttaatcaataattccatttttatctgacagtacacattatataatttctattctttcaggtttgttaaggtgtgttttataggctagttgtctatctcagtgaatgttccatgtgagcttgagaagaataagtatgtgtgaaaaaacaagtaaaaacggaataaaaacttcaggtagatcctagtttctgacgtatatatattttctttctctcaaagaatggcttttatcatttcctgcaatgcaagtctactggcaaaaacttttggttttgtttatctgacacagtctttatttctccctcacttttggaagatactttcacaaaggtacagaatttttgcttggtgattttctttttctctcgatactttaaatatctyactccactgacttttgattacatggtgctatggagaagttggatcgttgttcctctcagataatgtgattttttccttttgctgtttttcacaattttttctttatctttgattttctgtagtttggaaatgatgtatctatacacagtttgtgtgtattt

SEQ ID NO: 312349 - DNA, 590 bp, Homo sapiens
atgagttaatttattgtaaatagtatttatgacagtgcttcatagtgaggaaatagactcaaaatcacataaagaactttttattataataataacttttaggcacatttctccttctcactagctttgtccccacaaaatcaaaacccataacttattaacttaaaaaattatttctatttctaaatatcaagataactatagccataaggttttttaaaaaataagctcttcgtgagtttgattatggactattataaaggattttttttccaattcaagtgctttctccaaatgtagcatttaaattccaagtaaactatgtgaatttattttataaaacaaaaataaactcaccaaatactatttatgaaaatgattaaggaataggagaaaacttatctgttgctgtgggtgagtaggggggtgtatgatatccgtatttgtgtatgatacaataattacattttattgaaacatatatgtaacaacttacacattattctttttatggatacatatattaatgtatgctygtttaattttaaccatgtctacataataatctccattttccaatggattcaaat

SEQ ID NO: 312350 - DNA, 605 bp, Homo sapiens
  misc_feature (1)...(605): n = A,T,C or G
ttagaaaatatgataaacaattttagatattgtcttggcatttggacacattatgagactttcctcaagctgttactctcatgtagtagactaaaaaactacrtattatatccatggacataaaagtataaagagttgttttgctgggaacaaaccttcangaaaaaagaaataagactaaaatagtaaattttaatagtctagagatatcaattaaataataattaacctgtttaagtaaagattcttattaattgatgaagatcaaataataaaataatgaaagttaatctcagtagatctttcttcagatagagggaatgaggatggtgtatatgaatagtgaattatctcttcgttagacttcttttccttagcttgttctctttagctgaaaataacaaagttaaagaaaaaactgagaatacagattttgtattttctggaattatttcacagaactttacagttttgacataaaactacgtaagatgtatcatcaacaaccactgaaagtaggcattaaagggttttcatgatctcaagatgttctgataattacaaaccaggaaaccaaaaataacaagtaattttcgttgtttcag

SEQ ID NO: 312351 - DNA, 587 bp, Homo sapiens
  misc_feature (1)...(587): n = A,T,C or G
acaaaccttcangaaaaaagaaataagactaaaatagtaaattttaatagtctagagatatcaattaaataataattaacctgtttaagtaaagattcttattaattgatgaagatcaaataataaaataatgaaagttaatctcagtagatytttcttcagatagagggaatgaggatggtgtatatgaatagtgaattatctcttcgttagacttcttttccttagcttgttctctttagctgaaaataacaaagttaaagaaaaaactgagaatacagattttgtattttctggaattatttcacagaactttacagttttgacataaaactacgtaagatgtatcatcaacaaccactgaaagtaggcattaaagggttttcatgatctcaagatgttctgataattacaaaccaggaaaccaaaaataacaagtaattttcgttgtttcagtaatgtgaatagtttacaattcatgctgggaaatgcattatttcacattataaatggcacaaagcatggtacacagtcatcagttttggaaataatttatgactgaaaaagaaaatgagtactgttttggt

SEQ ID NO: 312352 - DNA, 587 bp, Homo sapiens
  misc_feature (1)...(587): n = A,T,C or G
acaaaccttcangaaaaaagaaataagactaaaatagtaaattttaatagtctagagatatcaattaaataataattaacctgtttaagtaaagattcttattaattgatgaagatcaaataataaaataatgaaagttaatctcagtagatctttcttcagatagagggaatgaggatggtgtatatgaatagtgaattatctcttcgttagacttcttttccttagcttgttctctttagctgaaaataacaaagttaaagaaaaaactgagaatacagattttgtattttctggaattatttcacagaactttacagttttgacataaaactacrtaagatgtatcatcaacaaccactgaaagtaggcattaaagggttttcatgatctcaagatgttctgataattacaaaccaggaaaccaaaaataacaagtaattttcgttgtttcagtaatgtgaatagtttacaattcatgctgggaaatgcattatttcacattataaatggcacaaagcatggtacacagtcatcagttttggaaataatttatgactgaaaaagaaaatgagtactgttttggt

SEQ ID NO: 312353 - DNA, 587 bp, Homo sapiens
  misc_feature (1)...(587): n = A,T,C or G
acaaaccttcangaaaaaagaaataagactaaaatagtaaattttaatagtctagagatatcaattaaataataattaacctgtttaagtaaagattcttattaattgatgaagatcaaataataaaataatgaaagttaatctcagtagatctttcttcagatagagggaatgaggatggtgtatatgaatagtgaattatctcttcgttagacttcttttccttagcttgttctctttagctgaaaataacaaagttaaagaaaaaactgagaatacagattttgtattttctggaattatttcacagaactttacagttttgacataaaactacgtaagatgtatcatcaacaaccactgaaagtaggcattaaagggttttcatgatctcaagatgttmtgataattacaaaccaggaaaccaaaaataacaagtaattttcgttgtttcagtaatgtgaatagtttacaattcatgctgggaaatgcattatttcacattataaatggcacaaagcatggtacacagtcatcagttttggaaataatttatgactgaaaaagaaaatgagtactgttttggt

SEQ ID NO: 312354 - DNA, 570 bp, Homo sapiens
gacaatccttgaaaaaatagaggaaaacattttattcattccgaaattcatggaagagtaaatatcttgaagtagactcctctatctagcaaaatamatttttcatcatcacataaaactaaatatgtgtacctgatatttcacaaatgtttttccagatgccaataatatccttaattcttaggttaactgaccaaaaaatacaacaaacctagattatcaaactataattcactaaaatatagattagcattatactaaatataatgcagtcatgtgccccttaacaatgggcatacgttcctgaaaaagcatcattaccgattttttcattgtgaaaacaacatagagtatacttaagcacacacctagataatagatcctactacataccaaagaataaatggtacagcctattactcctaggctacaaacatgtttagcatgttactacactgaataccagaggcaactttaactaaatggtaggtatttgtgtatctaaacataaaaaggtacagtaaaaatacagcataaaagatttttttaagtggcacacctgtataggac

SEQ ID NO: 312355 - DNA, 530 bp, Homo sapiens
gacatgaacagacacctaccaaaggaaaacatacatgtggccaacaatcacatcaaagaaaagctcattattactgagaattagagaaatgcaaataaaaaccacagagagataccatctcataccagtcacaatggctattaataaaaagtcaaaaaataacagatgctggtgaggctgtggagaaaagggaacgcgtatacactgatacactgttggtgggaatgtaaattagttcaaccattgagaaaagcagtatggcaattactcaaagagctaaaagcagaactaccattcgcctcagcaatcccattactgggtatatacccagaggaatgtacatcattwtaccataaagacacatgcacacaaatgttcatttcagcattattcacaatagcaaacacatggaatcaacctaaatgcccataaatgacagatgagatggaatactatgcagtcataaaaaagaatgaaattgtgtcttttgtgggaacatgggtgaagctggaggctactatcctcagcaa

SEQ ID NO: 312356 - DNA, 596 bp, Homo sapiens
aataatctgaataagctcaaaaggaagtttgacatagaaaatatacctgttataacagaaaatgtatgttgggtagtttctcaattttaatacaagtttttcaaaaactctataactcttaaaggaatatggactggtgaatgtctgtcatttcctttgtttgcttagcctgctttcagatttctccaaaatcttagaaacactgaatgtaaatttcctactctctgatagttttatgtgtctactaaatattattttcctctgttaagaaagagtaataaaacagcaaataaaacacattggaaaacagatacagtgagaaataatgcctttcaaggccaaaataagttccctgaagaatgtgtaaagagatcaaagacagtaatcctcagggtttgctggaaaacgatgatgaaagcattcatcagaaccaggctagtgatgccattgattattcccaatataggtatggcatattatagcaaaaaaaaattatcatcaatgacggstatgatttaagacataacatctgactaacgcatccaaataatatgctggtaatctgttctaatgactcttttatatttaattattag

SEQ ID NO: 312357 - DNA, 262 bp, Homo sapiens
tttagaaccccacatccagcatttcaatatctttgcctcctttattccctcagtcttctattgcctttgcctagaaatcttggatcaatccaactgtccaaattttcccctgcaacacccaggcttctctctctmtatatatagatatatacatatatagatatagatatagatagatatagatatacatagatatatagatagatatagatatagatatatatagctatatctagatattgatgtatctatacctacacag

SEQ ID NO: 312358 - DNA, 573 bp, Homo sapiens
tgactctatgacttattttttaccttcctgcgctttcttgytgaggaaatcaatctaaagtcagatttaggtatcaaggaaaagcataggtttgcaggctaatggaagagctccacaaagagcactttgattcaatgttgtttaattcttaacacatcaagtaactgaaattttatcttgtaaattctaccatatgagagtattaatacagtgattcgtttaaaacatatttcatgactttcctctgccaaaactaggtaccaaaacttcataaatttttaggaacatcaacttcggatagaaatgatacccgacattctaaaagtttgacagaacttggaatgacatttcattttcattcgttctttcattcctcatgtcttcattaacttaacaaacatttcttgaatgactgccatgtgtaactgcattgttaatcttttacaagatgtgtgtgatctcagtgatagcagaaagcagcaaaaatctgaagctcactttcagtctagaccatagaagcaattccctcaaccattaaagtaatttaatcccccattaaatacagaatttatt

SEQ ID NO: 312359 - DNA, 573 bp, Homo sapiens
tgactctatgacttattttttaccttcctgcgctttcttgctgaggaaatcaatctaaagtcagatttaggtatcaaggaaaagcataggtttgcaggctaatggaagagctccacaaagagcactttgattcaatgttgtttaattcttaacacatcaagtaactgaaattttatcttgtaaattctaccatatgagagtattaatacagtgattcgtttaaaacatatttcatgactttcctctgccaaaactaggtaccaaaacttcataaatttttaggaacatcaacttcggatagaaatgayacccgacattctaaaagtttgacagaacttggaatgacatttcattttcattcgttctttcattcctcatgtcttcattaacttaacaaacatttcttgaatgactgccatgtgtaactgcattgttaatcttttacaagatgtgtgtgatctcagtgatagcagaaagcagcaaaaatctgaagctcactttcagtctagaccatagaagcaattccctcaaccattaaagtaatttaatcccccattaaatacagaatttatt

SEQ ID NO: 312360 - DNA, 353 bp, Homo sapiens
agtgcaaatagaaaggaaaataaatgaatggccaagacctcttacagcctgccgttcggaaagtcattttcaaaaatgcatatgatttascagtgcttcaagatcaataacctccttgtccatcaaaggaaatatccaagaaataacactaaaatgatgtaaaaataaatgaaataactataattttgcagtttaattacacaatttacaaacaattcaaatggattcatttattctactttatgtgttatatagcttttgcctcaaaactagtttttcttttttaataaactccttatgggactacgtttatgtaagaaacaataaaacatttctcatattattgctttatc

SEQ ID NO: 312361 - DNA, 535 bp, Homo sapiens
aaatatttagtaggctcttagctcttatagatttaaagtttgcatttttaactattttgaagtaaaccrgaatgtgcatgaagagatgtgaagtgttgaggcatgtccactgaaacattatgcaaataaccaacaaatatcaaccaacggtaatttgacccaaaactaaaataagtcactatgaataaggatactagttaaaaaaaaaaaaaaaaactgtaatgtgaaccactactttgcaacaagattaaatactatgatggtagctcaaatactgtcactcttcttggaaattagagtattagagaaactcagtgaaaaatctctaccatcagacgttctttaagatttccctggaattttggcctatgtataatagcacaggatttggaaatagaggacatgaatttaagttcttattctactatctgttaaccttgtgatcctaggcatttcacttgatttttctgagtctccattttggtacccataaaatgagaagataatattcagcagaaaatcttgttttgatgtt

SEQ ID NO: 312362 - DNA, 535 bp, Homo sapiens
aaatatttagtaggctcttagctcttatagatttaaagtttgcatttttaactattttgaagtaaaccggaatgtgcatgaagagatgtgaagtgttgaggcatgtccactgaaacattatgcaaataaccaacaaatatcaaccaacggtaatttgacccaaaactaaaataagtcactatgaataaggatactagttaaaaaaaaaaaaaaaaactgtaatgtgaaccactrctttgcaacaagattaaatactatgatggtagctcaaatactgtcactcttcttggaaattagagtattagagaaactcagtgaaaaatctctaccatcagacgttctttaagatttccctggaattttggcctatgtataatagcacaggatttggaaatagaggacatgaatttaagttcttattctactatctgttaaccttgtgatcctaggcatttcacttgatttttctgagtctccattttggtacccataaaatgagaagataatattcagcagaaaatcttgttttgatgtt

SEQ ID NO: 312363 - DNA, 519 bp, Homo sapiens
gattttttgatgtttcttctttaaagtaaacaccagggcaaaatccagagtaaagtttatacattcattggagagagaaacagagatcaaagggaaaagaacacacacattctttggatgagaactctctcccttttcaacactgatgtgtttcatcaggagtttgtgggcagaatagaagatgaaacayacttaccttcattagcaagttttacacacataactgtatttcagttttccatcaaataaatcctttaacatgcatattgtttagttttaatgataatggcagcaatagcttaacaattagagcttatctttagtttaaaagcttgcaaaagaaaacactattgacactgcacagcacattttaaaaaaccaatgtttgcacacccagcacagcaaaaaataaaaaaattgttgttaaaatctcaaagagaaaatagtttatcccaaataaagataaattatcagaatctttctttcttaaaacctgaggtaagcagcttcacctaacaa

SEQ ID NO: 312364 - DNA, 519 bp, Homo sapiens
gattttttgatgtttcttctttaaagtaaacaccagggcaaaatccagagtaaagtttatacattcattggagagagaaacagagatcaaagggaaaagaacacacacattctttggatgagaactctctcccttttcaacactgatgtgtttcatcaggagtttgtgggcagaatagaagatgaaacatacttaccttcattagcaagttttacacacataactgtatttcagttttccatcaaataaatcctttaacatgcatattgtttagttttaatgataatggcagcaatagcttaacaattagagcttatctttagtttaaaagcttgcaaaagaaaacactattgacactgcacagcacattttaaaaaaycaatgtttgcacacccagcacagcaaaaaataaaaaaattgttgttaaaatctcaaagagaaaatagtttatcccaaataaagataaattatcagaatctttctttcttaaaacctgaggtaagcagcttcacctaacaa

SEQ ID NO: 312365 - DNA, 613 bp, Homo sapiens
ttcaagaataccacataaaatgagcttttaaaaatgcatcttaaaagctttaatttacacatattttgtgaaatcatactacatattataatatacaaggcactcctccatttaatatgcaattaaagacactcatgtaataattctctacattcagtgagccctagatatgtgccaggtattatgttataggctttatagaaactgtctcatttagtcataaatggtgstatcatcatccatttttatagatgagaaaactgagacttaaataagttaaacgttgctccagtgggtacagtgtttcaaaattgcacgatgaaaaattcctggagatctgtttcacaataatgtgaatatttttaaaattactctactgtacactttaaaatggctaagatggtaaattccatgttatatgttttttattacaatacattttaaaaaattgctaaaggtcacacaaatagtaagtcaggcttacagtggcaagcctgggcttttcaatactggatttactgcctttttcttaagtctgcacacaaccccttagactacagtgagaatttaaaagtcgaggacttatatgtttgaatgttataattagtgaatt

SEQ ID NO: 312366 - DNA, 566 bp, Homo sapiens
tgcattggaaacaaccacccrcttcccctgattttcctggaggatgttcggagttgttggtctgccaggctaatgcatcccttactgagctgagcgcagctctggcctccatcacaactccctgtcccctggaagcaaatcccatcatgcctcaccctggcatcacatggaaacagacggggaaggggaagcatctcctccttccttctgtctgcagacttcctaatcattcagactccacccagcaagagccattagagctaattaacgaccctcctttcagtaggtgtctcttcactatgattaattctgggtcagagacagaaagcttgttccattatggttctttttaaaaattattattattcaagcttctaatactagcatgaactgcgggtgaatttctgaagtcatgttacatagctgtcacaactagtaatcgaaaaattcaatttataaagaattaggagaggcaggagaggcaggagaggcatgctcttcggtctagaacaaaggagatcaatcctgacacaatggcagcatgacattcgtggactttgaagatt

SEQ ID NO: 312367 - DNA, 568 bp, Homo sapiens
aaacaaagatatactacaacatcatgtagcaataggtgctataaagcaaaatacagcagggttggaaaatagagagtgcgtagggcgccatttctgatggggtggccagggcttgctaaaaggagatgacactttcttaggagcctgaacgaattcctgaatgaaatgaggggacagyaagtcaaacaggcagaagagctctgtagagtcagtgctgatgcccaaggcagtgccatagttggagggtacagggtatctaatggaccactgtaagaactgtggattttattctagtgcagtggcagcttgggctttatttcactggccaagggttgttgaaagtttcggagcaggagagtaatggagtaatgtgatatgagctgttgtttttgggcagtgacttaccagctttgggggaaaaaaatcacatagaggcatcatacttgattctaatgtcccattagacatgcttaaatgtcccatctcagtgagggctttcgaacccattctacctccttgacagttcctatttcccttcccagtattttttttctccttagcacattgt

SEQ ID NO: 312368 - DNA, 615 bp, Homo sapiens
tcaggaatgctcatcaacaaaacgctataaaaaccttcctccctctcatgcagtaattaaagttttaatgtgtagaatcaaataaaatcacacagcaatccttcactgtatcagaatgcacgccattttttcgaatccaatactctcaacagtgttggccactaacatcatcggagaaactaagcagattagaaaacactraattgtcaaaaatatttccccctccagtaagagcagccgccatgcctctgcttgctctgccagaggttatggctcactttaagatcccaaatacttcacgcaacttacagggtagttgaaatcaaggcattaaacatttgaattaaatcttctgtccttgttttactatctcagaaatactaagaagtgtctattattcttaaatgaaacaatcttgcactggagttattattggagctttatgattcacagggcaaagtctgtaatagatcctggcactagttcaaattatttttctactgttatttttaaatgtatgctaaaaagaatttaaaatatgggaacacatagactgaatttctttctagtctataaaaagagagagaaggaaagagaatatattgagagaaaaca

SEQ ID NO: 312369 - DNA, 528 bp, Homo sapiens
ggctgatatgtttttctcttgagtggcagactacacatgctttctttcctgccacaaaacctgactctcacatctatttctcaattcagagggtctactgtgtggatgcccatttgactgtagatgtcaaaatctagttactgaagtttaatttccttaatctgaatttcagatttttattttctgcactaagtagaaattgttraccacaatacaagatttctaaaattaatgtcctagatatgaaagagaaattgaatttggttttttgtattaaataagcacatactttaagggttagcttctaataagatgtgctggaattaatcgtcattcatctgtaattctaaagcacctagttcataccttgattgttaacacttttcactatttgagttgttgctgtgtttatctcccttgcatagatagtaaatttcttgagggtggggcccagtctgtttcgcctttttctctttgttgcctgatactcaacaattacttcttgagtgggcaaatagaaattgtttc

SEQ ID NO: 312370 - DNA, 522 bp, Homo sapiens
tgtggattagagcatggatcctcattaatacaggcttttaaataaaagatcactatttatagaaaagtacatttccaagaacatcatccaagaattaaggtactctaaagacatctatagagcaaagtaaaatttagaccctgaattaatcttgtgctgaaaatcactttacaaatagattgtgcttgttgtaattcaaaaactgcaaaagttttcttactgtggacacacatgctgtctctgtctcctctggccatggaaatgtatgctctgctaagtgcttgaaacaccccacccgcacccataactcagcaaatctcagctgagactgcacttccttaggcaaaccttcactaaaccttagaccaatcagttcctttgcagtggaagcctcaggatttttccacaggaagggcaacctatcaggcagtggggaaggttttactgtggaagttgccttggcattgcaaatacattgcatttttctagattgtwtatttatttggagtggttttgaagggg

SEQ ID NO: 312371 - DNA, 617 bp, Homo sapiens
cttttctctttgtctttaagcaccgtcatcaaaagacaagaaaaaaatgagaaaaaaagtatgtgtgtgaggggtgcagtatgagtgtagatatattgtatcaaatgtgtcttgctaattgtgcatacttagatctggtctcctaactgaagatccacttgcktactttatgtttgtaaaccataaataaaaatataagcctctcagccaactgaatggacccctcctctcagccaagggcattctaaactaaacctgaaacactagtccaggccgtgatgagagtgggtggtccgacatgccttattatatacccttctccctttggaattcaggcacagctgaccaacattaacaagaagacagaaaccttaagactgacaaagcagactctttgtagcaataagataccaacatgatagatagcaggtcctgaaagtaaagtattttaccccaaaatatatttctttgatatattttgaaatggcttgaccaagctgtctcttgtggggaatatctacattctgcagagaatccccttttctttccagatcttcttcctgatccaagagagcattaactaagaatctggaaccttttttaagtcttctaggaaa

SEQ ID NO: 312372 - DNA, 555 bp, Homo sapiens
gtattaggtatgaggatataaaattaaataagacaaggtcattgaacttataatttagtataggaggcaggctaatgaatactactactaataaatatacataggggaatagtttccaaattaaactggagatttgagggtttccaaaggaagtaatgcttgagctaaatttgaaagatacgggtagacaatacaaaaaaaaaaaaaggttctatgcatttcaggaatacatgtggaatcatgtgacctgcttaatacccatagaactttcctatggatacagccaaagttgcatatggagtgtggcaggtggggaaatggaaaggataacaaaaagtcagaaatcagaccatgaaaagccttattggctgaaggaagagcttctatcctgaaagttttgtctagacattttttagcatcagtagacagggtcaagctacagacagaaaaatcaggagtagaggcaagaagatatgagaccatgaaccaaggcggtgcccatgggagcagcaaggaaagaatatatattcgggmatggaatgctcagggtgtggg

SEQ ID NO: 312373 - DNA, 578 bp, Homo sapiens
gttcacttttggccctgaggagctcaaggggcctgtgggacatcctagtaggaggctgaatatatatatgggcctgaagtttggggtttgggatccrttagggaaaggtggtacttgaagctgtcatggatcaggtcatctagggcaagcaggtagagtgagaaaaactctggagagcttcaggacttaaaatgtgatcagaaaaaaggatccttatagaagagactgagaggtaggaagggaacagaagtgatattgcagaggcctgaggcagacactgttaaagagggaggcacctggacacttttgctgtagacaagtagcccatctaatcctaaagagcccctttgatatggccacttaatgacgtatgaaatacttcaaaaatgattttaaaagtgtttaaaataatgggcttctgtgtcatttccataatattattctgggtgcctgccatgcgcaagacactaacataggtgttggatgtttcaaacaaataacatttatttgcaaactctcgtaactgatacttttcttcaaaaaaaaaaaaaaaaaagaaatgtgcattaggcattttg

SEQ ID NO: 312374 - DNA, 554 bp, Homo sapiens
gttctttttggaatcttgggtgtcctagtaacacagttgagcctgggggtaaacttttgcataatactggaagccctgcatttactgataatgaacgtgagaaccagcagaataaaaccccacaagaatgaaagacctcacgggaagaaagccttctgaagaaggactcatttcagcaaacccagtccgcccctagctctggaagaagcacatggctccataaaagcgaggttttgccagcaaagagctgtttttctttgaccagataaatagcacaatacattcccctaggattttttttttttttttttttttgcctctstgcttttgctacttcctacatttctttcaaaatgtagcctttgagtttgaaagtcattacagccacaatgctttttctccttttctttttgctctgggtagaaaagtgctctataatctctaaatccttataataagtgttctataatctgtaagttcatatatagacataggcatgtgtatatatacagcattattatcttaaatttctaataagattcccaccctcactt

SEQ ID NO: 312375 - DNA, 554 bp, Homo sapiens
gttctttttggaatcttgggtgtcctagtaacacagttgagcctgggggtaaacttttgcataatactggaagccctgcatttactgataatgaacgtgagaaccagcagaataaaaccccacaagaatgaaagacctcacgggaagaaagccttctgaagaaggactcatttcagcaaacccagtccgcccctagctctggaagaagcacatggctccataaaagcgaggttttgccagcaaagagctgtttttctttgaccagataaatagcacaatacattcccctaggattttttttttttttttttttttgcctctgtgcttttgctacttcctacatttctttcaaaatgtagcctttgagtttgaaagtcattacagccacaaygctttttctccttttctttttgctctgggtagaaaagtgctctataatctctaaatccttataataagtgttctataatctgtaagttcatatatagacataggcatgtgtatatatacagcattattatcttaaatttctaataagattcccaccctcactt

SEQ ID NO: 312376 - DNA, 608 bp, Homo sapiens
ttttgttcagctatgccctgcctacagtggtggagtctagaggcagcaggccctgttgagctgtggtgggctccacccaatttgagcttcctggctgctttgtttacctactaaagcctcagcaatggcagatgccccttccccagccaggctgctgtctcgcagatcgatctcagactgctgcactagcagtgagcaaggctccgtgggtgtgggagccacttagccaggtacgggagagaatcactttgtctgccagttgctaagaccttgggaaaagcacagtatttgtgtgtgaatgtcccgtttttccaggtagtctgtcacggcttcccttggctaggaaagggaaatccccctgaccctttgcacttcccgggtgasacaatgccccgccctgcttctgctcaccctctgtcagctgcaccctttgtccagccagtcccaatgagatgaagtaggtacctcagttgaaaatgcagaaatcacccatcttctgcgtcgatcatgctgggagctgcagatcggagctgttcctattcagccatcttggaagtgttcaactctttttggtaaattccaaagagtttgatcactggatcatatag

SEQ ID NO: 312377 - DNA, 608 bp, Homo sapiens
ttttgttcagctatgccctgcctacagtggtggagtctagaggcagcaggccctgttgagctgtggtgggctccacccaatttgagcttcctggctgctttgtttacctactaaagcctcagcaatggcagatgccccttccccagccaggctgctgtctcgcagatcgatctcagactgctgcactagcagtgagcaaggctccgtgggtgtgggagccacttagccaggtacgggagagaatcactttgtctgccagttgctaagaccttgggaaaagcacagtatttgtgtgtgaatgtcccgtttttccaggtagtctgtcacggcttcccttggctaggaaagggaaatccccctgaccctttgcacttcccgggtgacrcaatgccccgccctgcttctgctcaccctctgtcagctgcaccctttgtccagccagtcccaatgagatgaagtaggtacctcagttgaaaatgcagaaatcacccatcttctgcgtcgatcatgctgggagctgcagatcggagctgttcctattcagccatcttggaagtgttcaactctttttggtaaattccaaagagtttgatcactggatcatatag

SEQ ID NO: 312378 - DNA, 584 bp, Homo sapiens
tgttaaccacatgtcacatgcttcacagccctttgtgacatatgtttatttgaaaaggtaagtccgtaaaccagtgccttccttgtattttacaagtttcccctgactcagggaaacaaaagggggtcctccatcatcaggcagcaatgtgggacacaaagtaaggtaaggactgttacctggattactgcccacagccccctcaataataaaacagtgtcaaggcagagcagcatctcacactgttaagagttcagattttaccaggctcagtggctcacacctgtaatcccaacactttggaaggctgaggtgagagygttgcttcagcctaggagtttgagctacagtgtgctatgatcaggccactgcactccagcctgggcaacagagtgagaccttgtctctaaaaataaaaattaacaacaacaacaaaaataattagatttctactgacttcaaacttcaacacaatcgtgaccactgaaataagaggaacattagaaaccctcaaatcaaaaccaaaacccatttttccacacaggtgtagaaagcttggactcacccagggacccacttctagc

SEQ ID NO: 312379 - DNA, 498 bp, Homo sapiens
aagtcagaatcatctattggtctgtttctattttctgatttttttcccttcagcctgtttccctgtgggggaataataatttttatttgaatatgaataaatatttatattcaaataaatatttatattcaaataaaaaawttttatttgaatataaataaatttgaattgaaataataattttgatttgaaagtcaaatatttggtttgaaaaactgcggaggatctgcgtgatgttctcaacctcaagagaagatttaacccatcctctgacatgtcaaaacagtaggagcagatcacctcaatccaatgaggttttgactcagtgctaaatttaagactttgtaaggctctgtctacctctgggtctccttcaaaactaagatgtagcttttcaggagtccccttaagaaccttggatatttagcagagtacctccttcttaatgcataaattcaatatcaaattttgtgtcattatgagactaccaaaagttct

SEQ ID NO: 312380 - DNA, 594 bp, Homo sapiens
tctaataaacatctccaatcttatttattttctcgagcatattaacacagttaaattaattgatagctacaagtcagaatcatctattggtctgtttctattttctgatttttttcccttcagcctgtttccctgtgggggaataataatttttatttgaatatgaataaatatttatattcaaataaatatttatattcaaataaaaaaattttatttgaatataaataaatttgaattgaaataataattttgatttgaaagtcaaatatttggtttgaaaaactgcggaggatctgygtgatgttctcaacctcaagagaagatttaacccatcctctgacatgtcaaaacagtaggagcagatcacctcaatccaatgaggttttgactcagtgctaaatttaagactttgtaaggctctgtctacctctgggtctccttcaaaactaagatgtagcttttcaggagtccccttaagaaccttggatatttagcagagtacctccttcttaatgcataaattcaatatcaaattttgtgtcattatgagactaccaaaagttctcctgagcttttcaggtttttttctat

SEQ ID NO: 312381 - DNA, 581 bp, Homo sapiens
aaaatattttaaaaatcacatatgtagctcacattttattttatttgggcatgctggttgagagctttctattaagacagacgtggctttgagtcctggctctgatccacggaagtcatttaatttcaataagtctcrggttccttcttgaataataatagtacttaccatagtgtttttatgaggattaatggagataatgttcgtaaggtacttggtaaattacctggcacaaaggaaataaacatttaaataaaagcctaagactaatattctggagatctagattcttttgcctactaatcactcaggcagcattgaaggagtcacttattctctctggcttacccatgtataaaattatgtcactttaaccatgtataaaatgatgggtttgtgtagaatatttacaatatttacagtatctacttgggtaatttgcatcacttctttgtgaatcagtctcctcatttgggaaatgatgaggtggattacattatctctgtggtccctttcagcttgaaattctgcaattttataacttaaatcaaatatgaaaactttgtcattgctgacaaagc

SEQ ID NO: 312382 - DNA, 613 bp, Homo sapiens
tcttttgtttgttttgggggcatttatttgtcaactatctattccacttatttcatgtgcaaagcaccgtcctagactcttggaatttttattaatgagtaaggcaagcgaagatccttgccttcaggtaccttgccttctagtggaagagacaaacacaaaacaataaaaatagtaaataactatgtcacataggtgagaaaaaaatgtgaaatacagcagagttaagaaaacccctcagtcctggggctgcaatttaaataaggtggtcattgtaagcctcattaagatgatgatgtttgtgcaaaacattgaagaaagtragagttcagttaagtggttacctggaggaaaagcattccagatagaggacattgctggtgcaaaagtcctggggcagaggagtaacagggaggtcacaatgactccaaagtgatgtgaacaagaggatcagttgggaaagaaggttatggggtcagcacgggccaccttagggactcttaaaaattttgaatgagatggagaacaatgaatttcagaattctgagaaggcagtgacatgatttgtcttacctgacaataaatcagccaagatataatggtgctttggatc

SEQ ID NO: 312383 - DNA, 457 bp, Homo sapiens
ctggttgtaatttctgttttcttatgaacctagtactcatcaggaaaaatgagtttaattcttatgaacacatttcatcgtaattcttgggctagatattgttatagcttatggtccattccagggagcaaatttagatgctaaaacttatgaatgttttgttttaaaatttctttgaattagaaattagagaaggtttttctattttcatcatttgatagtataaaataaataactttaattgcttgtagcaaayaaaaatatttaattttggatataatatttcatgtattttgtatgtaatatattttgaataaaaatataccttaatttttattttctttatgagaataataacaattataattttctaaaatatagaaagaaaacatttatctttttggtatcaatattgaatcactgtgattcttgtctccactatgaaatatatgatata

SEQ ID NO: 312384 - DNA, 457 bp, Homo sapiens
ctggttgtaatttctgttttcttatgaacctagtactcatcaggaaaaatgagtttaattcttatgaacacatttcatcgtaattcttgggctagatattgttatagcttatggtccattccagggagcaaatttagatgctaaaacttatgaatgttttgttttaaaatttctttgaattagaaattagagaaggtttttctattttcatcatttgatagtataaaataaataactttaattgcttgtagcaaacaraaatatttaattttggatataatatttcatgtattttgtatgtaatatattttgaataaaaatataccttaatttttattttctttatgagaataataacaattataattttctaaaatatagaaagaaaacatttatctttttggtatcaatattgaatcactgtgattcttgtctccactatgaaatatatgatata

SEQ ID NO: 312385 - DNA, 457 bp, Homo sapiens
ctggttgtaatttctgttttcttatgaacctagtactcatcaggaaaaatgagtttaattcttatgaacacatttcatcgtaattcttgggctagatattgttatagcttatggtccattccagggagcaaatttagatgctaaaacttatgaatgttttgttttaaaatttctttgaattagaaattagagaaggtttttctattttcatcatttgatagtataaaataaataactttaattgcttgtagcaaacaaaaatatttaattttggatataatatttcatgtattttgtatgtaatatattttgaataaaaatataccttaatttttattttctttatgagaataataacaattataatttwctaaaatatagaaagaaaacatttatctttttggtatcaatattgaatcactgtgattcttgtctccactatgaaatatatgatata

SEQ ID NO: 312386 - DNA, 535 bp, Homo sapiens
cttaagtactaagtgggagttttgtaaaaacggaagtaagctacaagtttaccaaagctaattgatacctttcatgtaaatctatttatatcatagctttaagtggctaacatggtgaaaccctgtctctactaaaaatgcaaacaattagccaggcgtggtggcaggcacctgtagtcccagctactcaggaggctgaggcaggagaatggtgtgaacccaggaggcagagcttgcagtgagtcgaggtagcgccaccgcactccagcctgggcaacagagcaagactccrtctcaaaaaaaaactaaataaataagataaaaataaataaatcaaattcagtacaacttcttaaatgttgtctttaataaagaaaattaaaaaccaatcaaagccaagttataaacaaactagataaaatccacacactcaaagtatgtactggccttaacatacctggattcaaatccaacaggatgactttgtctttggtcactagctgttaatatattctgtatcctgtgactattcagc

SEQ ID NO: 312387 - DNA, 579 bp, Homo sapiens
aggcttagtagctgcaggggggctttgcactgtacttggtgcccagaagcctcagtctcatcctaatccattcctcttctgatttctggcatgaagaggtagggaataaggagaggtagaccactctccaataaaaaatttgcatggtttttttttgtacagaatcagaattattctactattacttcctacttcaaagcatttcagattgatagcaagttttatcaatttttatttacagtgaagtttgtatttttggaaaaataaacattaaaraggcaaaattggtggctttatccctttatttatcatgcatattaaatatactcaatgcttactagcctttgggcacattaacacatatgccagagagaaagacagactctgccattacagtttacactttggtagacaataaaaaaccaaatcatagtcatagacctctcctaggaattctttcttacttctttctgtccatcagtatgtgaatttctataatattagctctataatattagcagcaagttgtagctccctgagaagaagggcccctattgttcctccaggtggagatgatga

SEQ ID NO: 312388 - DNA, 619 bp, Homo sapiens
acatcaaaaagcttatccaccacaatcaagtcagcttcatctttgggatgcaaggctggttcaacatatgcaaatcaataaacataatctcacaycaatctgaatggctactattaaaataatattagttataggcagggctatggagaatagggaatacttatacactcttggtgggaatgtaaattagtttggccactgtggaaagcagttcagagatttctcaaagaaattaaaacaactaccattcaacccagcaatcccattattgcaatatatacccaaaagaaaacaaattattctaccaaaagatacctgcactcacatgttcatcacagcattcttcacaatagcaaaggcatggaatcaacccaggtgcccctcaatggtggatcaaataaagaaaacggggtacatatacactgtggaatcctaagcagccataaaaaagtatgaaattatgtcttttacagtaacatggatggatctggaggccatgatccctagcaaattaatgcaggaacagaaaaccaaataccacatattctcacttataagtgggaactaaaagttgggtacttatggacacacacatgacaactggagacactgaggacaa

SEQ ID NO: 312389 - DNA, 437 bp, Homo sapiens
aaacttaaaaaaaaatctatgatacattagtgtaaaagaaattagacttcctagctcacagaagcatgcgccctagaaagttatatggttgctataaaacatagctctgacctctcctatgsacgttatttgtccttttctccaataatctttcctagcatatcagttgttatattattttagaggtaaggcccatgattgaaaggattacactgggattatactatcagtgacacgagttcctcaataatcattgatttaccagtgcattctagagaatttaacatacctctacaacaagcacatgcatttggaaatatgctatttcaaaataataaaaatgacaactcttaggctgctgacaatacttccactttcaggaataaaggcattattttgaccttcttcaaggcagtaagtaccccaattttgtatcc

SEQ ID NO: 312390 - DNA, 502 bp, Homo sapiens
gttttaatttgcatttccctgatgattagtaacattgagtatttttttcatatgtttgttggccatttgtatatctttttttttttttttagaaatgtctgttcatctcatttgcccactttttgatgggattatttatcttcttcctgctgatttgagttccttgtagattctrgatgttagtcctttgtcagatgcatagtttgcaaatattttctcctaatctatgtgttgtctgctttctctgctgattatttctttggccatacagttcaattaggtcctatttatttatttttgtttttgttgcattttcttttggggtctgagtcatgaattctttgcctgggtcaatgtccagaagagtttctcctaggttatcttcttgaatttttagggcttcagccttcagatttaagtttttgatcatcttgagttgatttttatataaggtgaaagacaggtatccagtttcattctattatatgtggctatccaattt

SEQ ID NO: 312391 - DNA, 599 bp, Homo sapiens
tgcaatatgtgtacttttgtttctaggtactcttaggtgatagagctacaaagtatatgtatgccaacccatgcatgacacacatctttatttatttctatatctagctgtgtatatawagtaaaaaaccatgagtttatactgatatctatctttgatttaaatctaataccacagggtttgttcttcatttcccatatccttatttttaacttcattcttcacttgtgagaaacctagccctctacaaaatatttacttatttgtttatttctagcatacatgtgaggtagttttagaattgctaagccatatctctttaagaaacacatttactaattcaagtacagtgtgtctgtgtacagttcttttggtctttagtcttagagcacccagataagatactgttgcctcagttatgtaggttagttctttttctttcctgttctcagtatggttatattattcacttgaaatacaattatacaattaggtttatttgctacagcttatattcttttgggggttatctctgcaacctaattggttttaattatcattttggaatgtgaagtaatattatggttctaaaggtcaga

SEQ ID NO: 312392 - DNA, 633 bp, Homo sapiens
ggggctgtgatttgctaagtcatgactatcaaatcagtgagaaggacttcaatttgcagcaggtgtactgagtgatctcttggaagtgcatggcattagactccaggactaacagtggtcagtctagcggtgttgaagaccaaggcttcctgtttcctaaccctttccttgtgattctctttaaagagccaacaaacccagagagaaattttggatttctgagtaatgcaatttgggtaggaatataaggaagactagtgaaccagaagtttgtttcctttacttagaattgaacagattttgaattatccaaaaatggctgtatttggccattcccatattgctataaagaaatacctaagactgggtaatttataaagaaaaggggtttaattggctcaaggttctgtggcgtccactttttgggaaccttcccatcatggcagaaggcaaaggggtacaaacatcttttttttttaatatactttaagttttagggtacatgtgcacattgttcaggttagttacatatgtatacatgtgccatgctggtgcgctgcacccactaactcgtcatctaacattaggtatgtctcccgatgctatccctccccmctccccccacaccacaac

SEQ ID NO: 312393 - DNA, 584 bp, Homo sapiens
agtgagtgagttctcaggagatctgatggttttgtaagtgtttgatagttcctccttcacaagctctctctctggcctgttaccatgttaagawgtgcctgcttcctcttctgccatgattgtaagtgtcctgaggcctcccagccatgcataactgagtcaattaaatctcttttttaaataaattacccagtctcagggaaatcctttatagcagtgtgaaaatggactgatacaggctgtgaatcagatctaacttataagcagtgaaaatgttattcttgacctttagacttaaaagcttttggatactatatgctaaattgtatatagtatattgtactatttacagtagtcaagacaaagactattttgtcattatcagaatatatccccatatatataacagagtgatgagaactttctggttctcaaacccattctcagtcagatcttgctctggaacacagggtaatgcaaagttttcataaagtacatttacgggatatttttgcctagattgtctatgtttaggaaagtggcccattatttgcagctgattcattttaaagttttgccaaagt

SEQ ID NO: 312394 - DNA, 584 bp, Homo sapiens
agtgagtgagttctcaggagatctgatggttttgtaagtgtttgatagttcctccttcacaagctctctctctggcctgttaccatgttaagatgtgcctgcttcctcttctgccatgattgtaagtgtcctgaggcctcccagccatgcataactgagtcaattaaatctcttttttaaataaattacccagtctcagggaaatcctttatagcagtgtgaaaatggactgatacaggctgtgaatcagatctaacttataagcagtgaaaatgttattcttgacctttagacttaaaagcttttggatactatatgctaaattgtatatagtatattgtactatttacagtagtcaagacaaagactattttgtcattatcagaatatatccccatatatataacagagtgatgagaactttctggttctcaaacccattctcagtcagatcttgctctggaacacagggtaatgcaaagttttcataaagtacrtttacgggatatttttgcctagattgtctatgtttaggaaagtggcccattatttgcagctgattcattttaaagttttgccaaagt

SEQ ID NO: 312395 - DNA, 392 bp, Homo sapiens
ctatggtcccagttatgtggaaggctgaggtgcaaggatcacttgagctcaggaagttgaggctgcagtgagccatgatggaaccactgcactccagcctgggcagcaaagtgaaaccctgtctcaaaaaataaataaataaataaataagaaaactcttaaaaattctggaggatgttcatatccttcrcccactttttgatggggttgtttgtttttttcttgtaaatttgtttgagttcattgtagattctggatattagccctttgtcagatgagtaggttgtgaaaattttctcccattttgtaggttgcctgttcactctaatggtagtttcttttgctgtgcagaagctcttgagtttaattagatcccatttgtcaattttggc

SEQ ID NO: 312396 - DNA, 577 bp, Homo sapiens
agagtacttgcatttactgtcccctccatcagtaatattcttccaccactcttcatctggattgttcatttccatttttagagtcttagctcaaattttgcttcttccacctttttttttcttgacatttgctttataacaccctgttttctgcatgatacttatcacagcctataatcactttttaaactattttattgtctatcttttccactaacatgtaagctgaggatagtsgtcccacttgtattgtttattaagttttcttcacctcaaaggggctcatttttttctgagccaataacacacttactgacatagaacatttggatgacagctaccttccctgattgaatggaccctaggagttgcatgagaaagatcttgaaccatattaggaattgaggttcataacattcccccacagccattcatacaaagacaattgtccagtagactagaggcaagaaggtgtgcaggagataaccctaaccagaatcacaaatggaaatgatgtgtcccctgtaataaatttaccacagaaatgggagaagcctgaaaggttagccagactgag

SEQ ID NO: 312397 - DNA, 462 bp, Homo sapiens
tccattttaacttttcagcaatcatatgaatcaagtacaattattatcaatttttagatgaaggaaatgaagcttgtaatgataatgttacttatctaaactkataagttttggagctaatagaatccagacagtccagaggtcacctgcttcatcactgtgctcactgacttcctaacagtactgaggaaataaacctattaaacattacagtcacaatgcagtttctagatattccctaaccacaattaaacctgaagttgccccttgaattcctgggggcagagcatggctaccacacacagaatattgaggcggtatctctatagaagggcttcattagctagtggatgcttggccacccatctccaagaggcaaaagaggaaccaatgcttggagcagggctgcagctgatttggtggtgtaggaaatacaagtttccatgggaatgcccatgtttg

SEQ ID NO: 312398 - DNA, 489 bp, Homo sapiens
taaattgatatttggtaaaacaaatgatttatgaactaagtggctccgtttttagccattccattgagcactgctacytacaccaaaagcaagttgcaagctgattcatgtgatttcaaagcaattaatgggctatggaatcccactaggacttcagagaattattctgtttcaataaatatatttggtaatgtaatcaagagaatttaaaggaaattaaccaatttcctataatagttatatctggcgtgaaaaattcaaccatcatcagtatctaatacatgaattacatgtagctatagtttaaaactcagaggtaagatttgaggcagttaaagttttttggtttgtttggtctattttcctgttaatatttgggtagcacacaaggagactcaggagctaccatttagatggagactatttccaaaataataaagggaaggatatttaacacacactcagggaaactgctaactactactgtac

SEQ ID NO: 312399 - DNA, 642 bp, Homo sapiens
gcacctgcttaattcattaatttagattattagtatatggagcattttaaaatgatcaacatcatttaaaaataatcatgattttggtgaacctttggcaacaatgactttttttcatgctcataaatacctgtagctttcacttcttgaaaacaaaataaaataaaacttaggttcccaaatatttggaagtgttactaagttatttaacagcgtaagcacttagtcagagttaacacagagcaacatgggaattatttgtggtcaygattttggtgttaacctgcttttctaaggtccaaagagtggtgaaacactgcaccatccattttcttgatctaagagaatattagtgccagttgaagacaaagctcctccctgaagtctatccccttgaccaatctaaaattgaagcagtgatcctataatgacaaccaatatgctttcccttgtacattcaatgccacctatttttggaacatagcacataataaatgatgaagcatgtagaggaaaaaactttacaccgtggcaatttcagctctgatctcacagaactgtggtttcccttctcctttcaaccccatcaccacagctttcaaatgccatcgatagcataagcataaaaaggcctgagcaatg

SEQ ID NO: 312400 - DNA, 660 bp, Homo sapiens
tcctataatgacaaccaatatgctttcccttgtacattcaatgccacctatttttggaacatagcacataataaatgatgaagcatgtagaggaaaaaactttacaccgtggcaatttcagctctgatctcacagaactgtggtttcccttctcctttcaaccccatcaccacagctttcaaatgccatcgatagcataagcataaaaaggcctgagcaatggagcatgaaaaatagagaaatttctaatgtagtcattttaaaaattgtatgttgatttgtatgtgtattagctcrggatgccagaagaaaatatcataaactgggtggattaaacaacataaattcattttctcacagttctggagagttggaagtgcaaaatcaaggtgcaggcagattcactttctggtgagaacttcctggcttgaaatggctaccttcttcctgtgtcctcacatggcaaggggtaggaaggggagcttttaggtgtttcttattataaggacaaagagcagtaatcccatcacactacgggtctcacccctacgactttatttaaacttaattaccttctcctatgatttgaatatcccctgcaaaacatgttgaaatttaatccccaaagtggcacaattgagcagtggaacttttaagagg

SEQ ID NO: 312401 - DNA, 660 bp, Homo sapiens
tcctataatgacaaccaatatgctttcccttgtacattcaatgccacctatttttggaacatagcacataataaatgatgaagcatgtagaggaaaaaactttacaccgtggcaatttcagctctgatctcacagaactgtggtttcccttctcctttcaaccccatcaccacagctttcaaatgccatcgatagcataagcataaaaaggcctgagcaatggagcatgaaaaatagagaaatttctaatgtagtcattttaaaaattgtatgttgatttgtatgtgtattagctcaggatgccagaagaaaatatcataaactgggtggattaaacaacataaattcattttctcacagttctggagagttggaagtgcaaaatcaaggtgcaggcagattcactttctggtgagaacttcctggcttgaaatggctaccttcttcctgtgtcctcacatggcaaggggtaggaaggggagcttttaggtgtttcytattataaggacaaagagcagtaatcccatcacactacgggtctcacccctacgactttatttaaacttaattaccttctcctatgatttgaatatcccctgcaaaacatgttgaaatttaatccccaaagtggcacaattgagcagtggaacttttaagagg

SEQ ID NO: 312402 - DNA, 569 bp, Homo sapiens
ggaaaaaactttacaccgtggcaatttcagctctgatctcacagaactgtggtttcccttctcctttcaaccccatcaccacagctttcaaatgccatcgatagcataagcataaaaaggcctgagcaatggagcatgaaaaatagagaaatttctaatgtagtcattttaaaaattgtatgttgatttgtatgtgtattagctcaggatgccagaagaaaatatcataaactgggtggattaaacaacataaattcattttctcacagttctggagagttggaagtgcaaaatcaaggtgcaggcagattcactttctggtgagaacttcctggcttgaaatggctaccttcttcctgtgtcctcacatggcaaggggtaggaaggggagcttttaggtgtttcttattataaggacaaagagcagtaatcccatcayactacgggtctcacccctacgactttatttaaacttaattaccttctcctatgatttgaatatcccctgcaaaacatgttgaaatttaatccccaaagtggcacaattgagcagtggaacttttaagagg

SEQ ID NO: 312403 - DNA, 626 bp, Homo sapiens
tattaattttttttttttgtgggggagacacaattcagtctatgacaatatggttacaatatatatgcaaacaagacacacagatgtttccttactcttaatgttytaacatgaaaatgcctgcctccaagggattttaaaagtttatatctaaaagacagatattaattaataccattaaataaaacaaatgttctctaagttctagaagcaatatgtcccagtgcatcaaaatgataccttgatgttaattgagctcccagctaattctagacagatttacttactgggaatacagtggtgaacaagacagaaatgttcctgctttcatggagcttacattctagagtggagagagacagtaaatcaatatataaatatgtaaacaagaaaatatatggtagtgataactgctatgaaaagaagatgatactgcaatagcaacagtgtcacggggcccctcaaaattgtgttgtttagggcccctgtctcagcaggtcacaatgtgatgataaggagaaggtggctgtacgaagagcaatcccaatcaccagtaataacaaaaatcagtacaatttggaggttgctttcattcgttatcatattaaaatcattattcttaaata

SEQ ID NO: 312404 - DNA, 626 bp, Homo sapiens
tattaattttttttttttgtgggggagacacaattcagtctatgacaatatggttacaatatatatgcaaacaagacacacagatgtttccttactcttaatgttttaacatgaaaatgcctgcctccaagggattttaaaagtttatatctaaaagacagatattaattaataccattaaataaaacaaatgttctctaagttctagaagcaatatgtcccagtgcatcaaaatgataccttgatgttaattgagctcccagctaattctagacagatttacttactgggaatacagtggtgaacaagacagaaatgttcctgctttcatggagcttacattctagagtggagagagacagtaaatcaatatataaatatgtaaacaagaaaatatatggtagtgataactgctatgaaaagaagatgatactgcaatagcaacagtgtcacggggcccctcaaaattgtgttgtttagggcccctgtctcagcaggtcacaatgtgatgataaggagaaggtggctgtaygaagagcaatcccaatcaccagtaataacaaaaatcagtacaatttggaggttgctttcattcgttatcatattaaaatcattattcttaaata

SEQ ID NO: 312405 - DNA, 369 bp, Homo sapiens
aggacaatgctaggcatatagtgtgtgctcaataaatgcttgttattgttttataaaaatctgcagtcagcatcagacacagataatttggattctagggccccactcttaattttgcttttatttttctgtgcaatgtgataatgtccattcctggggtggggggaagtgataaaatgaatgaaacacagagagctctttggaagaaaggtgatctatctatccatatctgtatatctacctatccatctatyatctatctatctatctatctatctatctatctatctatctatctatctgtaatatagtggatgagtacaggtaaatttagagcacattaataagatgagcaactcttacactgtg

SEQ ID NO: 312406 - DNA, 369 bp, Homo sapiens
aggacaatgctaggcatatagtgtgtgctcaataaatgcttgttattgttttataaaaatctgcagtcagcatcagacacagataatttggattctagggccccactcttaattttgcttttatttttctgtgcaatgtgataatgtccattcctggggtggggggaagtgataaaatgaatgaaacacagagagctctttggaagaaaggtgatctatctatccatatctgtatatctacctatccatctatcatctatctatctatctatctatctatctatctatctatctatctatctgtaatatrgtggatgagtacaggtaaatttagagcacattaataagatgagcaactcttacactgtg

SEQ ID NO: 312407 - DNA, 557 bp, Homo sapiens
ttatcttaagtggaataactcagaaacagagagtaaaataccacatgttctcacctataagtgggaactaaataatgggtacacactaccatacagtgtggagtaatagacattggaggctcagaagggtgggagaatgggacrgagataaaggataagaaattacttaatgggtacggtgtacattactcaggtgatggttacactaaaagcccagacttatccactatgtaatgtaaaataactgctcttgaactccttaaatttatccaaatctaaataataataataatggcaaactctctggatattaaggcaggcactggtttgaacactgggatcaagaatattttaatatctatgtgtcaacagcaatgcaaatattttcagggacagatgaataattttaggagtggaaaaaagaaactgacattggcatgctgattgcttttgactaaagtgatttattcaaaaatctgataaacttccatacatttttttttcactgagaacacataagaatattgtaggaaactttgtgatattacatatgccca

SEQ ID NO: 312408 - DNA, 625 bp, Homo sapiens
gattcttctgcctcagtctcctgagtagctgggactacaggtgtggaccactacacctggctaatttttgtatttttagtagagacagggtttcaccaaattggccaggctggtctcaaactcctgacctcatgatctgcccgccttagcctcccaaagtgctgggattacaggcgtgagccaccatccccgaccaccacgttttaacatattattcctaatccttacctaaaggccacayagtacgtgatattattgtattatccaactagaaactgagtctacaaaagattaaattatacgcttaagactatatcaatgggtgagttaaaatttgtatccaggtgtatggctgtcaagcttgtattctttcaatggtattattaatgttcatatttttaagccagtaacttttctttgaatttgccttaaaataatgtaaatatttaaaaacccatcacagatacttgaaatagcataggctataataacaatactgtaaataattaattggcattgcaatagtgtattgttaagtaatcttgatatatctacttagtggaatactagccaacattttttatagactgatgtgatgtggaaaagtttgtatgagttagtattc

SEQ ID NO: 312409 - DNA, 572 bp, Homo sapiens
ataacattgtgcttcttatatttatcgatggaataaaaagcaattaaaaggtcagctcagagaaggagcrgaattttcatgggtatttcaattcacatgttgataaaatgtgtaaatagcattataattagttctcctaaaccctcgcttttattgaacagtgatagagtagtatggtaaatagagttgtttgtttttaaagtaataacctgaagtcatctctgttatcactaatctaagaagtggaaaaataccagagctgttctaaccgtaagccttaagggactaagtagcatttcccactctccaccaaacctccccaccctctgaataaaataaccattgcagaatagcacttttctcttgcttaaatttggttttaaagtgaagcgtaactttctgaataattattttcagcttgtaaatggtgtctctctaaaaccaaccaagcatataacaagaagatgaagatgagacttattttcacttcatttcacttctttgtaattgacaagctcttgctgggtgtcaactttaaaagatgacaaatcctaaatcttagaggacccaat

SEQ ID NO: 312410 - DNA, 702 bp, Homo sapiens
gcattttcaggattatcaattgttcttccaatcacccagctacataccttcctctcagttctgtcttaaaggtaagatctggtcaagaaaagttatgaaagtatctaayatattaagtcacattttcttactctctcctgagactttcagggttgggacatagctccttaaaatgctgatacacaggcacagcagccattttgcaaagcagctgcatctaattctttcctttcactgagagactttctggattgataagaaagaaagaaaatggggttatctaaggaagcaaagacactaatgtttattgattaaggtttttgattatccacgctgtagccttcctccattgccctgataaatacttggttgctcacgtcattatcaccaccaaatacttgcacttggaagatcattaaaatacctagttaagagggtcattcatagatcaatgcctagcagaatgcattacaatcataagaaactcaaaaaaaattaaatatctgaaagagagaacatgattatgggtttgttttctaattctatatttcctctattgctctgatcaatagtactgttaattactcttcagtgaaagatgttgtgaacaatcatgcatctactttgacataaatttgtttgatgctcagagctttctcatggtttccagattctatctcttctatctttcatagtatacac

SEQ ID NO: 312411 - DNA, 702 bp, Homo sapiens
gcattttcaggattatcaattgttcttccaatcacccagctacataccttcctctcagttctgtcttaaaggtaagatctggtcaagaaaagttatgaaagtatctaacatattaagtcacattttcttactctctcctgagactttcagggttgggacatagctccttaaaatgctgatacacaggcacagcagccattttgcaaagcagctgcatctaattctttcctttcactgagagactttctggattgataagaaagaaagaaaatgggkttatctaaggaagcaaagacactaatgtttattgattaaggtttttgattatccacgctgtagccttcctccattgccctgataaatacttggttgctcacgtcattatcaccaccaaatacttgcacttggaagatcattaaaatacctagttaagagggtcattcatagatcaatgcctagcagaatgcattacaatcataagaaactcaaaaaaaattaaatatctgaaagagagaacatgattatgggtttgttttctaattctatatttcctctattgctctgatcaatagtactgttaattactcttcagtgaaagatgttgtgaacaatcatgcatctactttgacataaatttgtttgatgctcagagctttctcatggtttccagattctatctcttctatctttcatagtatacac

SEQ ID NO: 312412 - DNA, 535 bp, Homo sapiens
ccagtgtcattttcaacaatgttgtactagtctttcagatccagaacaaatatacaattgtgattccaattccaagcacttaaagtactgtaatcttctattataagtcacatgaatactcagccttagaggtcacatctgtggagtaatagcaatatgtcctttctacctcttttgtgtagatgaaactattgtatgtcaaagttttctttttttaatcacttgtgygtgtaaagctagtgtaggattattttggaggcctttgaatctgtgaaattattaagatcaaaagttcttaaacaattggtcttagaaatgtaattattaaatacaaaaaaatggcatttatgaggtttttaaaatgtgaccatatcaaggtggacaaaacacatgcttaatgtattagttcattctcacactgctataaagaactacccaagactgggtaatttataaaggaaagaggtttaattgactcacagttccacatggctggggaatcctcaggaaacttagaatcatggcagaaggggag

SEQ ID NO: 312413 - DNA, 547 bp, Homo sapiens
acactttttacttttagaaaagttataatccatgaggactttagaataatttttatttattaggcatctattaaatgcctatgtaaatgtatacctattttatgcccaggtaaattttcttccttttttttttttttcccagacacatggtctctttatgttgtccaggctggtctcaaactcctggcctcaactgatcttcccacttcagcctcccaaagtgctggaattataggcatgagccattgtgccttacccaacctacttatttggggatgattgtaacataccaaaagttagcaaaaatttcatttagatatttttatataytcaagtgaaagtgctgccatataagttgaccagactattattttttttagagatgggggtcttgttatgatgtccaggctggtctagaactcctgacctcaagtggtcctcccaccttggcctcccaaagatttgggattacagtcatatgccactgtgcctggtctgttgcaacttttgggcagcagaattacaaaattacctgattattttaatg

SEQ ID NO: 312414 - DNA, 529 bp, Homo sapiens
cgcgtgttcacaaagctcccgcttacccctcattaataaacagatgcactaaaaagatgtgcccaaacatctgctcttgatggtgacatcttatttttcaattttaatattaacagcgtgacaatctaaatattatttataatttttacatgagcaatcaacagctaaacaattcctaagtactttattcatgggccaaccagcttgacaaaatgggctgttttctggagaggttcaaagagaggcagtcaggggatagcagatcttaccagtcaaggrgaacaatctgaagacatgagtcctagcatgctggagttatgcatagaatcagactaagtagggcattatttttagtcctacgtcttgttgcaggtagagagagactgatgaagagggtcaaatgaagaaatcagctctaccagcagctggtgatgagagagagaaacagggaggttgtggggagagattcttatgaataaaaaaaaaaaacctatgaagatccccattattgctaagtcaaagaaatggg

SEQ ID NO: 312415 - DNA, 523 bp, Homo sapiens
tacatatgttcaaactcatcatatgtatacacatgttcaaggtgtatacatatgttcaaactcaccaaggtttcacatacattaaatatgtacaaggttttgtttatcaattatacctcaataaagttttttttaagtgccaaagtcacacattttctgaggctttagctaaaaatggtctcttggcttttgagcaccttccccacatctcaggaacttaggtatacaagctttagagattgttgggagggaggattttagaggataacttgtgaaatgttttataaataccttcccatatgactacaaagaagaaagatgtgttgcagatggaggatactagctcctcactttacatctgctgagggatgcttcatagggacgacttgtacaacttaatacgtatctcttgaagatggtcgacacaatgaacttaaagtcttagtcctattatttttaatggtctaataaatacaatagagacaaaarttaaattaaacctgaaaggtagaagataatttaa

SEQ ID NO: 312416 - DNA, 559 bp, Homo sapiens
acttattgggaactggagtaaagatcacccttcttatgctttagcaaagagactggcagcattttgcccctgccctggagatctgtggaactttgaacttgagagagatgagttacagtatctggcagaagaaattcctaagcagcaagtgttcaagaagtgacctggctgttcctaacagtgtacagtcatatgtatccacaaatagatagtctggagttggaacttaagtttaaaasggaagcagagcataaaagtttggaaaatttgcagcctgaccatgtcataggaaagaaaaacgcattttctggggagaaattcaagccgctggctgcagaaattagcataagtaaagagaagctgaatgttaataaccagacaatggggaacatgcctcaggagcatttcagagatcttcatagcagcccttcccatcagagacagggcggcctaggagggaaaaatgattttttggcacaggcccagggccctactgctctgtgcagcgttagggacctggtgccttgtgtcccagccactccagctctaggcattgcta

SEQ ID NO: 312417 - DNA, 539 bp, Homo sapiens
cacatcctgtaaattctacctcctaaatagttctccaatctattcatgcttctccaatcatttatttcatttatttattaaatcatttatttgagatttattttaaattctcagaattacatgcttttttatatttttataccaggttattttattatctatttttgtttaccacccrtctgtgaaatttttcaataaaccctgtgacagggagggaagtgtggagagaaaggagaggaggaggaagagagaaaatgaaggcttattttgttcactgtacttccataatgtgtcacattgcctcacatgtagtgggtgaacaaaacatgttttgaatacacatatgcgtggatgaataaaaggctacatgggtaattggaaagaggtattcaggttcactatcctacaggctgttgccacagtgattttacaaatgtaaatctaagcatgttactttcaatcttaaacttttttactccatggccttaaatatgaggcctacctgatgtgggatttatgaacatcttttaacttagctt

SEQ ID NO: 312418 - DNA, 539 bp, Homo sapiens
cacatcctgtaaattctacctcctaaatagttctccaatctattcatgcttctccaatcatttatttcatttatttattaaatcatttatttgagatttattttaaattctcagaattacatgcttttttatatttttataccaggttattttattatctatttttgtttaccacccatctgtgaaatttttcaataaaccctgtgacagggagggaagtgtggagagaaaggagaggaggaggaagagagaaaatgaaggcttattttgttcactgtacttccataatgtgtcacattgcctcacatgtagtgggtgaacaaaacatgttttgaatacacatatgcgtggatgaataaaaggctrcatgggtaattggaaagaggtattcaggttcactatcctacaggctgttgccacagtgattttacaaatgtaaatctaagcatgttactttcaatcttaaacttttttactccatggccttaaatatgaggcctacctgatgtgggatttatgaacatcttttaacttagctt

SEQ ID NO: 312419 - DNA, 545 bp, Homo sapiens
tggtagtctgttctaaactatttgagaaatcttcagactcttccacagtggctgtgctaatttacatttccaccaataatgtataagcgttctcctttctctgcagcctcaccagcatctgttgttttttgactttttaataatagctattctgactggtgtgaggagggtatcatcttattgtggttttgattttacgtttctctaatcatcagtgatggtcagcattttttgtatatttgttggctacttgcatgtattcttttgagaagtgtctgttaatgtcctttgcccatttttaatggggtttttggagtttttttgcttgttatttgcttggtgaattctctattgattctggatgttagacctttgtcagatgtatagtttgttcacatttttttcccatactgtagcttatctgctctgttggtaatttcttttgttgtgcagaagctcttcagtctaattagrtcccacttgtcaatcgttgtttttattgcaattacttttgagacctagccaaaaattattttccaaggcca

SEQ ID NO: 312420 - DNA, 585 bp, Homo sapiens
tttgtagtgggagggcagtgcagagctccaggaactatataaggtaaattctgggtatttgccatggcatttttaactgtcatggtgctggtgggagggtcttatgcaaatgcattataattcctaatccttgctggttttggctggtttctttgctatatcctgtctagatcagctgggttgtgaaaacatgtcctgctgttctcttacctcaatttcactaatatgaggtatctaaaatagtcaaattcatagaacagacarcagaatggtggtttccaggggctgggagaagggacaaggggaatttctagtcaacagggtggaatggggtgtctaaaattttacttaggcaagatgagtaagccctagacatttgctgtgcccacagctaacaatagtacattgtagatgatatggtttggctatgtccccatccaaatctcatctcaaattgtaatccgaattgtaatccccatgtgtcaggggagggacctggtaggaggtgattgcatcatagggatgatttcccccatgctgctcttgtgatagtgagtgagttctcatgagatctgatagttttat

SEQ ID NO: 312421 - DNA, 521 bp, Homo sapiens
tttgttctttttgcttaggattgctgtggctatttggctcttttttggttctatatgaattttctaatagttcttcaaattctgtgaaaaatgacattggtagtttggtaaaaatagcattgaatctgtaaattgttttgggcagtatggccatttttatgttattgattcatctaatccatgagcatgaaatgtttttctatttatttgtgtaacctcagacttctttcagccatgttttgtagttcttcttgtaaagatctttcactttggttagctgtattcctaggtatctcattttctttgtggctattttaagcaagattgtgttcttggtttcactttcagcctggactttggtggtgtacagacatgctactgattttygtacttgattttgtatcctgaaactttactaaagttgttgaacaattgtagcagccttttggcagagtctttaggattttctagatgtagaatcatattgttagcaaagatagtttaacttcttttttttccta

SEQ ID NO: 312422 - DNA, 539 bp, Homo sapiens
aacagctttttttttttttttttttttttcgccagaaaaataacggatttaagcttttgaaaaatacctcctttgtatgtgtgtgtaataaatcccaataaatcctaattataacaraatattggtttgttggttgattatctaatttaccaaaaaattcttaatatactctacttaaaaagaaatattatttttaaaacgggctgattttgtttcactgtaccacatatatttcagtataggtaacactttctagttttattgtcaagtggatgttaagtaacactttttgtgatgtgtataaaatagtttaaaccaaattatctctaaattatcttggcaggattcatgtatctttgtggaactgggcaaccaaaaaaaggaaattcagaggctggtctgattttcccatcgtttgtcatgggggttgtggcattttttcttcatttgacgtggacattgctttcttcaaacttccaggagccatcctcaaaacatgttttggatatctttgaggatctttgtcaggatgtaaaatc

SEQ ID NO: 312423 - DNA, 539 bp, Homo sapiens
aacagctttttttttttttttttttttttcgccagaaaaataacggatttaagcttttgaaaaatacctcctttgtatgtgtgtgtaataaatcccaataaatcctaattataacaaaatattggtttgttggttgattatctaatttaccaaaaaattcttaatatactctacttaaaaagaaatattatttttaaracgggctgattttgtttcactgtaccacatatatttcagtataggtaacactttctagttttattgtcaagtggatgttaagtaacactttttgtgatgtgtataaaatagtttaaaccaaattatctctaaattatcttggcaggattcatgtatctttgtggaactgggcaaccaaaaaaaggaaattcagaggctggtctgattttcccatcgtttgtcatgggggttgtggcattttttcttcatttgacgtggacattgctttcttcaaacttccaggagccatcctcaaaacatgttttggatatctttgaggatctttgtcaggatgtaaaatc

SEQ ID NO: 312424 - DNA, 539 bp, Homo sapiens
aacagctttttttttttttttttttttttcgccagaaaaataacggatttaagcttttgaaaaatacctcctttgtatgtgtgtgtaataaatcccaataaatcctaattataacaaaatattggtttgttggttgattatctaatttaccaaaaaattcttaatatactctacttaaaaagaaatattatttttaaaacgggctgattttgtttcactgtaccacatatatttcagtataggtaacactttctagttttattgtcaagtggatgttaagtaacactttttgtgatgtgtataaaatagtttaraccaaattatctctaaattatcttggcaggattcatgtatctttgtggaactgggcaaccaaaaaaaggaaattcagaggctggtctgattttcccatcgtttgtcatgggggttgtggcattttttcttcatttgacgtggacattgctttcttcaaacttccaggagccatcctcaaaacatgttttggatatctttgaggatctttgtcaggatgtaaaatc

SEQ ID NO: 312425 - DNA, 539 bp, Homo sapiens
aacagctttttttttttttttttttttttcgccagaaaaataacggatttaagcttttgaaaaatacctcctttgtatgtgtgtgtaataaatcccaataaatcctaattataacaaaatattggtttgttggttgattatctaatttaccaaaaaattcttaatatactctacttaaaaagaaatattatttttaaaacgggctgattttgtttcactgtaccacatatatttcagtataggtaacactttctagttttattgtcaagtggatgttaagtaacactttttgtgatgtgtataaaatagtttaaaccaaattatctctaaattatcttggcaggattcatgtatctttgtggaactgggcaaccaaaaraaggaaattcagaggctggtctgattttcccatcgtttgtcatgggggttgtggcattttttcttcatttgacgtggacattgctttcttcaaacttccaggagccatcctcaaaacatgttttggatatctttgaggatctttgtcaggatgtaaaatc

SEQ ID NO: 312426 - DNA, 622 bp, Homo sapiens
aataggcatagtatgagtgggcaagttgtcttgttgcagtttttaagcagaatggtttgagctcatttagtatagtgttggctgtgggcttgtcatatggcttttattattttgaagtatgctcctgtgatgcctactctgttgggggtttttaatcatgaagggatgtgaaattttattgaatgttttcctaaatctattgagatgatcgaatggtttttgcttctaattctgtttatatggtgaatcgcatttattgatttgtgtatgttgaaccagccttgcattctggaaataaagcctacttgattgtgatgcattaagttttgatgtgctgctagattcaatttgctagtattttgtcgagggttttgcatctatgttcattaaagacatgcatccgaagttttattwttttgttgtgtctctgccagattttggtatcaggctgatgctggcttcatagaatgagttaggaaggagcctctcctcctcaattttttggaatagtttcagtaggagtggtatcatttcttctttgtatatctggagaattcacctgtgaatccatctggtccaggactttttttggttggtaggttacttattactgattcaattt

SEQ ID NO: 312427 - DNA, 610 bp, Homo sapiens
agaaagtctttgaagaaaaaacaatttgtggactgcctattctccatccatctacaagtaatatagaaaaaacaatttagtcttctcgtactttctgcccagtaattcagagaaacatattaataccagtgagaaagctgagtagtcatccttctatcctggagggaatagttccatgtcacccttcgttaccttccctcacaacactctgatgcccaagattgccaaactgatttctccagttgctgcctcattgtggaaattgraactcccagaaagtctccattaaggtccagtagatctgtgggagatgcagctggctagatactagaacttgccaagccattgagaataatacttgtgctccagctgtaaatctaagaacacaattttatcaggttccaagtggacaaggagtgggggccacatgcaaaccgtatttcctctcagctggcaaattctgaggttagatcacctatctttgaagaaaagtaaacaagaaacaacaacaaaatgggtgaaattttggaattacccagtacaacaattctaaaagttattaggaagtaattagaataaacttcaaaagctggacttgtaagttaatgaa

SEQ ID NO: 312428 - DNA, 637 bp, Homo sapiens
gaaccattctgaaaggcaaggtacaaatactaaaagaatatgactgcctcattttaaaatattcaggaacaagatatgtaaactcttctttagcgatgtaaaactaaaaaaaaaatgtttcacaatctaacctactattaagtagaatatcttctgtatccattaaggcaatataaaataggaaacaatgaactgttcgttaatartcaatgcccattattcccaacagtgaactctgaaaatacgaagtggaacaaatggctgagctatagtagccaatgggcttctaacgtttctcaaatttaaatcttaatactaaccagataccaaaaactcccaatcacctaacaacttgtgtgagaaaagttgttaggaaatatgctcattcaaactctgcccagcgagacagttttgggctcagctttctcaataagccatatcagtgtgcagaaaaactctaaggtgaccatactcaaaaagagtatcatttaataaataataattctaccaatgtaaagttggtctagcaagtgctcagaatgtgactaaatcaggtatttcctcctagatgtggatgtaagaagatgtagatagaatgacccccataatgttagatagtaaagttgtatatatgcaa

SEQ ID NO: 312429 - DNA, 546 bp, Homo sapiens
tgctgtcatgtctgtctcatctcttttctcagggtgtgactaagagactcaaaccacatcaactgttgccaggattgctccaggcaaaatcatgaaatcatgatattaacagcattaatgcacaaactgactgctcagtaatcatttcttaacatgtccttctttattcagggtaaaatcaagtaagtttaagtcactaggccacattcaaagtatgtgatctactgaggtgagtgagaactagtttgtctcctttgagcatcatgtgaaatccataaagcyatgccttttttaggagtaggaatactcaatctgaggaacagcttaagtgaacatatacttagcgtgaagtgaacattctgcacttacccaattattggtctcatttctaaaaacccacctaggattactatgttaagttgcatctccattatggtcacccggttgtgttctttccaaaattctgtctgccactgcactgtcaactgcccacgcaaataattgtggccaaaagggaattatgtcattattcaattaagaagtaca

SEQ ID NO: 312430 - DNA, 572 bp, Homo sapiens
cctccacctgtaaactctcacaataataatttgacagtcagccaccaaatcaaagtgccttgtgggagctttgggatccaggtaggagggtgcaaaacccaggtgagtccaagaatgaggaaggtcgatttgagaaggtaggcctgtgtccaaatggcagacttgctgatgatggccttggctgcagacacaaaaacagttctgtccccatgtgaactcagatgtagccttaattttccgtgctctgccacmagcaacctccaataaaagaccttggagaagctatacctgcccatgtcttgggtaacaggtccaccaaactctgttctggccatagaacacgaagcagctcgtgactctggttcagtccttctcagctgcagcctggatgcagccctgctcatccagagacctgaatggagatgcactcattcataactctacacctaagccccacagacctctgcctacagaagcagccctctgacccaccaccagccccattcagccattgtctgggggaagtcctgtttcccctacccatgaacctgccagaagtcctgcctgtctcc

SEQ ID NO: 312431 - DNA, 572 bp, Homo sapiens
cctccacctgtaaactctcacaataataatttgacagtcagccaccaaatcaaagtgccttgtgggagctttgggatccaggtaggagggtgcaaaacccaggtgagtccaagaatgaggaaggtcgatttgagaaggtaggcctgtgtccaaatggcagacttgctgatgatggccttggctgcagacacaaaaacagttctgtccccatgtgaactcagatgtagccttaattttccgtgctctgccacaagcaacctccaataaaagaccttggagaagctatacctgcccatgtcttgggtaacaggtccaccaaactctgttctggccatagaacacgaagcagctcgtgactctggttcagtccttctcagctgcagcctggaygcagccctgctcatccagagacctgaatggagatgcactcattcataactctacacctaagccccacagacctctgcctacagaagcagccctctgacccaccaccagccccattcagccattgtctgggggaagtcctgtttcccctacccatgaacctgccagaagtcctgcctgtctcc

SEQ ID NO: 312432 - DNA, 548 bp, Homo sapiens
tgcttgaacccaggaggtgaagattgcagtgacccgaaattgcaccactgcactccagcctgtgtgacaaagcaagactctgtctcaaaaaaaaaaacaaagttccctataaacaaaagctaagggagttcatttccactagacctgccttaaaacaaaaggatgctaagtaacaacatgaaaaccatgaaattataaaaatcattgttaaacataaacgtatactcaaatttagaataatagcgtaatagtgttgcataaatcaattttaactctagcataaaaattaaaagwcaagagtattaataataactgtagctgcaataatttgttgatggatacacaatatgaaagatatatggtgtgacagcaacagcataaaatgtggggaggagtaaaagtgtcaagcttttgtatgtgattgaagtttagctgttttcagtttaaaataaactctgtaactataaaatgctctatgtaagcctcatagtaatcacaaagaaaacttcaagcagatacagaaaagataaagaaaaaagaattaaagt

SEQ ID NO: 312433 - DNA, 548 bp, Homo sapiens
tgcttgaacccaggaggtgaagattgcagtgacccgaaattgcaccactgcactccagcctgtgtgacaaagcaagactctgtctcaaaaaaaaaaacaaagttccctataaacaaaagctaagggagttcatttccactagacctgccttaaaacaaaaggatgctaagtaacaacatgaaaaccatgaaattataaaaatcattgttaaacataaacgtatactcaaatttagaataatagcgtaatagtgttgcataaatcaattttaactctagcataaaaattaaaagacaagagtattaataataactgtrgctgcaataatttgttgatggatacacaatatgaaagatatatggtgtgacagcaacagcataaaatgtggggaggagtaaaagtgtcaagcttttgtatgtgattgaagtttagctgttttcagtttaaaataaactctgtaactataaaatgctctatgtaagcctcatagtaatcacaaagaaaacttcaagcagatacagaaaagataaagaaaaaagaattaaagt

SEQ ID NO: 312434 - DNA, 551 bp, Homo sapiens
gaagtgtaaagttaagtagcattgataaaattaccattaatttttctgccttctaaatttagatatacttttcagaagtctatgggcttccaggaacatctattaataattccagctattccctacaacagtcctctcaactatttcctctaatcrttaatttcaacatattttatttcaatttcaagactgtattttatattttaatcaaatttttatgttatgaagaaaacattcacattgtcaaaaactaaaaaaatacacaaatttcaagtagaatatttaaacaatttatgcttctttaaccaacataaaaaaatttcaaaatttgacatatttcctctcttttgtatttgttagtgctttatttatactttatatgttatattatagtttgctatttttattttaacactttttctgagtatttctcatgccaaaatttttttatgaacagcatgcataatgtcagcataagcttcttattaaatgaaaagaccattctttgaggatttttttattgtttatttttgttgagaagaaatttcata

SEQ ID NO: 312435 - DNA, 551 bp, Homo sapiens
gaagtgtaaagttaagtagcattgataaaattaccattaatttttctgccttctaaatttagatatacttttcagaagtctatgggcttccaggaacatctattaataattccagctattccctacaacagtcctctcaactatttcctctaatcattaatttcaacatattttatttcaatttcaagactgtaytttatattttaatcaaatttttatgttatgaagaaaacattcacattgtcaaaaactaaaaaaatacacaaatttcaagtagaatatttaaacaatttatgcttctttaaccaacataaaaaaatttcaaaatttgacatatttcctctcttttgtatttgttagtgctttatttatactttatatgttatattatagtttgctatttttattttaacactttttctgagtatttctcatgccaaaatttttttatgaacagcatgcataatgtcagcataagcttcttattaaatgaaaagaccattctttgaggatttttttattgtttatttttgttgagaagaaatttcata

SEQ ID NO: 312436 - DNA, 553 bp, Homo sapiens
gaatccatacctggtgattaattgcaaatttttgaactacaacacagagggctacatttcacaatatgacataggaaacattatagaagcaataactttagaggatttcagactaagaaatcacttaatgtcacaagccaggaaagcctatattccccatcccattgttgcagctcacagtagaagcaagttgtccaaagatggcattcactgatgagaactgtagcctacaaagacattcttctcctaacaggtggctgtaytaaatatccttttcctttttgaagagtcatgattgttttttagtataatatagcatcagttaattggtaatatatttaaaacagagatagagtgacaaatctacaactgataaagttaataatttaattatgcttttcacacaatggtaggtataaattgatacttgtgtgaattttggaaagttttaacttattggagctatcttattgtagattaaatgttatatgaacactatggagcatgcctcagtgagaaaacaaaatgaaaacatcgtcctttagtcattttg

SEQ ID NO: 312437 - DNA, 519 bp, Homo sapiens
caaagagaatgtgtaagagagaaaattataggagataatacacctgaaacaggaagcaagtcatgtagggcctttaagtcttgaaaggatttaagaataagagtaatatgatctggattatgttgttaaaaagccattctgattaattcattatagaaatatacatgtatttttatgtgcataatatatttaaatattgtttcatgtattaacaayacaataatgtataacattatacacacatttttatcttttatattgaaagatactgctgactatatatctccttgtctttcatcttcaactcaatataaataagatctctatcgagggtcagccaagatggctgaataggaacagctctggtctacagctcccagcgtgagcaacacagaagacgggtgatttctacatttccatctgaggtaccgggttcatctcactagggagtgctagacagtgggtgcaggacagtgggtgcactgcaccatgcacgagccaaagcagggcgaggcgttg

SEQ ID NO: 312438 - DNA, 559 bp, Homo sapiens
ccaacagctcaggcagagaggcagcttctcataaaatgcagaaagaaggatgacaacttttccaaaggaaatactcagtggaaaaagcacaagagccccaggagagcaaaggatgctttctctatcaaaaccctagaacattgattaatgatattctaggagatgcagtcaccttgtgacatctgaaatactgttgtgcatttagtttgaactgtgtagagacctcagctccctcctgagacatatttactgcccaatcttctttctracaaaagattcactttccagaaaatcgtacctcgtattattatcattagctcattttaaagttatgcggggtttgtctagaggaaatttaattggtgagaggctactccaagcccctttagactcatacatcaaagctttatccaacaagcactcttagtcacaatatcatgttaagggatgaaaaaagaaagaaaacaataatttagtgcttttaataatttctaaagatgattcaattccaaaattgttatacttctagagaacaagttacaaataacattgcctcctc

SEQ ID NO: 312439 - DNA, 490 bp, Homo sapiens
tggtatgtctcctgcatactctggatgctcaataaactgttgattatgcattggtagtgtggttttcaagaaagggccaagcacaatcatgtctcttccagcctctggattctgaggatctgkgaaaggatgggcccaaggctacccaggatgtgaatggactttttggctctttgttgggttatgtttttcctgccaaataaattgttagttcttttcctttaggcttccttctttaattctggtaagattcctgactctcctgatcctcccttggtctctaaatttgctctttatcttgaatttttttctcaaacctatctgtattaggccattcttgttgtgctataaagaaatacttgaaactggtcaacttataagaaaataagtttatttggctcatggttctgcaggctgtagaggaagcatagtgtcagcactgcttctggtgaggcctaaggaaactttcaatcatggtggaagatgaagg

SEQ ID NO: 312440 - DNA, 490 bp, Homo sapiens
tggtatgtctcctgcatactctggatgctcaataaactgttgattatgcattggtagtgtggttttcaagaaagggccaagcacaatcatgtctcttccagcctctggattctgaggatctgtgaaaggatgggcccaaggctacccaggatgtgaatggactttttggctctttgttgggttatgtttttcctgccaaataaattgttagttcttttcctttaggcttccttctttaattctggtaagattcctgactctcctgatcctcmcttggtctctaaatttgctctttatcttgaatttttttctcaaacctatctgtattaggccattcttgttgtgctataaagaaatacttgaaactggtcaacttataagaaaataagtttatttggctcatggttctgcaggctgtagaggaagcatagtgtcagcactgcttctggtgaggcctaaggaaactttcaatcatggtggaagatgaagg

SEQ ID NO: 312441 - DNA, 490 bp, Homo sapiens
tggtatgtctcctgcatactctggatgctcaataaactgttgattatgcattggtagtgtggttttcaagaaagggccaagcacaatcatgtctcttccagcctctggattctgaggatctgtgaaaggatgggcccaaggctacccaggatgtgaatggactttttggctctttgttgggttatgtttttcctgccaaataaattgttagttcttttcctttaggcttccttctttaattctggtaagattcctgactctcctgatcctcccttggtctctaaatttgctctttatcttgaatttttttctcaaacctatctgtattaggccattcttgttgtgctataaagaaatacttgaaactggtcaacttataagaaaataagtttatttggctcatggttctgcaggctgtagaggaagcatagtgtcagcactgcttctggtgaggcctaaggaarctttcaatcatggtggaagatgaagg

SEQ ID NO: 312442 - DNA, 606 bp, Homo sapiens
  misc_feature (1)...(606): n = A,T,C or G
tctgattggattagtgtctttataaaaagagacactggagagctcactcttgctctgtcatgtgaggacatgatgagaaggtggccctctgcaagccagggagagagccctcaccagaaactgactgtgctrtcacccagagctttctgtcatttaagtcaccaagtctatattttgttatggcagcccacactgactagagttgaatttgcttcttacctttcccttaacttgtggtatatttccttgtattacattccattctctctggagctcttagaatgttctttcacctcctcctcctcctcctctttgtcctcctctttcttcctnctnctnctnctcttcctccttctcctccccttggctggcccctnncntgctnngctccctnngangtttannactggaacttgccccnngatctaattggacatcaaaatctgggttcttaaaagctacactgtactttctagattgttgcggttgtctgaagagatttgaggagcagccaagggaataatatgaaagaggctctgtttgattaatgacactaagagggatggaaatggaaaaaagtttcaagttttcagtggttctaaatgt

SEQ ID NO: 312443 - DNA, 613 bp, Homo sapiens
tctaatttgacaggcagagcaactgagcattaaagaagtcaactacccacctgaatgtagaaaatttgttagctgagtcaaaattctatgcctggatttcaaaacccaaaaccaaaaccttttcatcattatattttgcataatcatgctattagaggctgttacttgtctccaacttgtctgccatttgatgtctttgcatatttctacatataaaggatttgttttgtatgtattctgattatatatcacctgaaatgcagactattttgacatatctgtggattgaatttttaaaaattcttaatgacctttctttaaatattaygatattaatacggcaaccactgcattttttattgtattgggtttatatgtctttctacaactttttactttcaatccctctgagccaataaatttggctatgttttataaataatatattttggttttatttttgacacaatctaagaatcttcaagttatcttttttattccacatatctatttcatatattttcttagcataaagtgcatatttgttgtagaaagtttagaaacatcaaaaagtataaaaaaaattaacacatgtaatgtcatcaagatataa

SEQ ID NO: 312444 - DNA, 620 bp, Homo sapiens
ctggctcggctcaacaggtagaaggttcattccaagggtgaacacgtgtagttacatatgtttgcwgttttgtctattaaagtataaagtagaaaagtcatgggtttgatataaaaaaagcctgggtttattatgcccaaacttctgcaaaaaaatggtgttaaaaataatacctgcatgtatgtttgttatgagaaatcatggattaattacaggtgatgtgcttagaagagtacctggtaggtagtaaactcaacaatggtcactactgctatgagctgcttggatttggacatggccatctgttttagtccatttgcgttactctaaaggaatatccgaggctgggtaatttatgaagaaaaatggtttaattggctaacagttctgcaggctgtataagcagcatttgtgctggcatctgcttctgctgaggtttcaggaagcttacaatcatggcagaaggcaacggggagccaatatattacgtgagagttctcgagcaagagagtgaggtgggagatgccacacatttttaaacaaccagatctcatgagaactcactcactgtggcaaggacagcaccaagttattcatgaaggttccgcccccatgaccca

SEQ ID NO: 312445 - DNA, 560 bp, Homo sapiens
cgctatggcgccggcagcaccaaggacagcgcccaggtcggcgagtgggaggtgcagccacccggggggcttgtcacccagcctggcctgtcaggttggcagggggcagggggttcccttccccctcttctctccgagtaaatacaatttaaacctgcctgtagtgactatctttgcaggagcgaagctggaatcacaggctaagacttccctgcaatgcagggttggcacaatggacagatcgcagattttgaaaacaaccaaaattcattaaagtcagttaacagaaatatatacttgtagcccagtttgagttttctaacatatggtggtataggaaatgaagagatacagggcctgaaatgtgaaggtcaaatactccttggaaaggagaatttgaaatctgttgggatgaaaagtccagggaaatatagtttttcttaagtttggacacagacaattgccttgtcatctttcggttcagtattccctatgtgtaactgcaatgattgaaaaggcayctgaattaactttaaattgatttaaaagttgcggaacag

SEQ ID NO: 312446 - DNA, 551 bp, Homo sapiens
gtgttgcaattacatctttcgtgctcctttaaattttgcagtggtaacaaatgtgtaataccaataattatgaaaaccacttgctatgtgcagctaatttaaaatctaggttcaggattctatatttgaaatgtgaaattcaaccctgtcaaatttccatcaacacttaaatctaaatggttcttctgttcacaatgtcagaaataagaagtgacaaagttaccaaaggcaaagactaagactctgggaatcagtgaacaggacagcatcagaaggttccgtgaccttgaacttcccttggccttagtttgctcatctgcctaatgggagatgatatctattctacttaaatgaaactgctttttcaaagactaagtgagatcttgcattagttgggtaaaaaggctaagctgattaacgagagacccaatattacagtggctaaaagaacaaagaagcttattcttcttttgtgtrctgatcctggtggggaggtggcctgttttgtactgtgtggtcatcttggggttctagttggaaatgcgtccact

SEQ ID NO: 312447 - DNA, 544 bp, Homo sapiens
cctaataatatttcctaaacacttattctgacaaggttttatgaggaccagaagaaataaggaaaggcaaagctttgtaaatcggagatgcctcaccagcactatcattcctgtgacttccgatcaccaaggagaagggaccagcttttagcacacagagcctgggatggtagaatgccagacatttcacagtccattgggggtgatctatggcagatggtgttcctrgcacctttttcaaattggctttactgatctaatcacattatggaggcagccacttgctcagccagaaaggcaacattaatactcaagacaatgctgactcagttacaggcttaagcatgcttagcaattatagctgttacttattgagtctttcaaaggtggcatacatggtgccaagcacttgacatgcattatttcatagccaggactgccatgtgaacaatttcagtgtgtatgaatgttctctggagttgtgcagtgcccagtatgcttgactgttcatggaagtcctgctcacagaaaccctatgaggtat

SEQ ID NO: 312448 - DNA, 553 bp, Homo sapiens
aaggtcaagcatctatgacacatccatacagagaggttgatggaacgagaactgttaagatgcacattcttgtgatgcataaggagagacataatgatttttacagcacaatcatcatgaaagataaaatataagttgaagaaatggaagccatctgagcaaggagctaccctattgcsgcagggattggggatgagatagtgagaaattcagcttttagtttatttttagagatgatgtgcccaataaaccatgggcttaatttatctgtggcttcaagatagtttgtcttagggaagtgaaggcaggtgaacatcagccataaaataaattaagtgaattaaataaagttcccaagtgcttctaaatgtggcagccagacaggaacatatttagctagggccacactctaaaacagttgtctggtctgcccactcgaaacaccaaatccttactgcaattgtcagcagtcaccttgatctaaaatataacaatagttagttttttttaacttagaactttagaaatatgacaaaagatttcatagaataag

SEQ ID NO: 312449 - DNA, 561 bp, Homo sapiens
cacttgggggttcccagttaacagtgarcagctgaagctatgggaaggctgagctctacatttttctaggaagagtggcatctagatgggattgaatgaatggctccccattcatgtaaacttattttctacttcattttattccttgtgattattctaaaatactgcttctgactatagcattttgagattttactatttaacatatcttgcttattatcactgaagttattcctgcatattccacctcttgtaaattgtaaaagattcttgtcttctaggtctttcagccacctgcagagaagaggattagttagaaagcctaggcttttttggatttgatttttagtttaccaacacaaccttttagcataggtaagcataagtagggtagtttagtaggaagaacactaattttgtgatcgtaggttaatgaaaatctcccagagtacagtttacttattaataaaattataaagtaacatgtggaggaattgagtgaggtaatatgaaccatagctgttacacagtaggctctggataaataatagttctgttagg

SEQ ID NO: 312450 - DNA, 577 bp, Homo sapiens
tacaattatactatcaagcaaagtagtttaattgccttaaaaatcctctgctccacctccctcttcactgacccttgatcttcattcctccctccccactgaccccgacctttttgccgtctccatagttttgccttttccagaatgtcatatagttggaatcatacggtatgtagttttttcagattgacttctttcacttagtagtatgcatttaacattccttcatgtcgttgcatggcttgatagctaatctccttttagccctgaatattctattgtctgggtgtaccacattttattattcacatactgaaggacattacaattgattccaaattttggcagtgataaaaaagctgctataaatgtgtgcaggcttttgtgtggacttaagtttttaactccgttgggaaaataccaaggagcacaatttctggatcctatggtaagaatacatttggtttctgtaagaaaagctcctgtcttccaaggtagctrtaccactttgcattctcacaagtaatgaatgagagttcctgttgctctatatctttgtcagcatctgatgttttca

SEQ ID NO: 312451 - DNA, 549 bp, Homo sapiens
gaaaacccacaggcagataatttgcacaccaactctttaggaaattcatagattgttattsttaggcagggttctcagaatttataagttccttaataaacccatcccccagcttcctgagaagagactttaggttttatccagcttctgaaacttgctgaccatggacaaatacaggaatttatgcaagctggtagtgttaagtttttaatatacagatcgtagtcattaagtgctgttagaagaagatgaatatgcaatttagagagaaacttgcatctaattaccagcttaattaatacggggggactgcagcagtaaaaaaattatttcttcttcaatttgctaacgtgtattgttgcttcctcctctccaggctcagggacctgggcttcaagggtaagcagatgatgatgagcaggcaggctgatcctgagcaggcagtgaggtgggtgtcactgtcacatgggggttatgccactgtgcattcatggagtccaggctttccctccctcctggataactgcctctgtttctccccttttatcg

SEQ ID NO: 312452 - DNA, 556 bp, Homo sapiens
tttaatgtctcattttatagggcctagaatctttaggatttggcaacagagacctgatcaagaatgtctctccttgttttttttttttaaacataggaagtcatttttttaaaagtcaaagtgccatcaaatctatggtctaatgctttttatatgcaaggagacacctgcttgcatagagatgagactattgagagtattaatatgttttccattttttaaaataaagtgaamtaatgtaacccaacatctcattaatggacagagttagggccatatataagattagattctacaaaattctggctcatatatggttacctaaatgactgtttctttgtattttccaaactagacaagttcattgagttgtcatctcaataggcaattaaatatctaaggtcaatgcttcagtgtttttttggaagatagacttcagtttgccataaagtgtcaaagaggaaccagctggatctgagtaatcttagatacccgtggcccaggctggatctactcttgaagctttcttgaagtgtgagaagttttcctaagaaga

SEQ ID NO: 312453 - DNA, 580 bp, Homo sapiens
ttcagtgggctaacaagtctacattcagaattcagccgagttcacaacatagttctatattcctactactgaatttctttagtcaattaattttcccatgctccttggtgactgtattaaaccttttccattctcttcatccaaacctgttactgatgaagggtgtccaggttcttggggttttgaacaaagaatcggacaaaacacaccaatgaatgaaagaaaagcacagatctattgaaacaaaagtacactccacagggtgggagtgggctcaaataagcagctcaagagccccattacagaattttctggggttgaaatattctctagaggtttcccatttgttacttggtgtacaccctatgtaaatgatgtggtggcccacgaccattctggttggttgtgggaggggaccaattagaggctgaagtgaagttacactcctakgcaaatgaaaacttggcctgtgaccagtctgattggttgcaggagggaaccaatcagaggtactttcaatttttcacctgccacgcagagaaggggggatggggctgttgcaaagggtgtagcctatggt

SEQ ID NO: 312454 - DNA, 602 bp, Homo sapiens
gcagctctgcccctccggcagaccctgaagttgctgactgctgatggctatctgcagcctgccttccsctgggctggatagcaagtccttccctgaagggggaactcggtggcacatttcttcacctaccacaatatctcataggcactttaactacaaaacaaaattgagctaattccctcaaaactcactttcttccaactgttcctgacctctggaaatagcaccctcatctatgcagttgcacacaccagaaacccaactctgatcctaatgccgcttttccctcgcaccctgcccttagcctaaccttagtactgtctctgctcagtgattgaaataatcttccaactgccctccccacatcctctcagccccatctagacctttctttacactcaaacagagggaatgacccttttaaaacacaaatatatactatctcttagcctggcttcccattactcttagaataaagatcaaaatcttttactgtcccagcctataggaggacaaggcaggtgtgtcacttgagcctaggaattcaagaccagcctgggcaacattacaaaaacccatctctacaaaaaatacaaaaatta

SEQ ID NO: 312455 - DNA, 602 bp, Homo sapiens
gcagctctgcccctccggcagaccctgaagttgctgactgctgatggctatctgcagcctgccttccgctgggctggatagcaagtccttccctgaagggggaactcggtggcacatttcttcacctaccacaatatctcataggcactttaacyacaaaacaaaattgagctaattccctcaaaactcactttcttccaactgttcctgacctctggaaatagcaccctcatctatgcagttgcacacaccagaaacccaactctgatcctaatgccgcttttccctcgcaccctgcccttagcctaaccttagtactgtctctgctcagtgattgaaataatcttccaactgccctccccacatcctctcagccccatctagacctttctttacactcaaacagagggaatgacccttttaaaacacaaatatatactatctcttagcctggcttcccattactcttagaataaagatcaaaatcttttactgtcccagcctataggaggacaaggcaggtgtgtcacttgagcctaggaattcaagaccagcctgggcaacattacaaaaacccatctctacaaaaaatacaaaaatta

SEQ ID NO: 312456 - DNA, 602 bp, Homo sapiens
gcagctctgcccctccggcagaccctgaagttgctgactgctgatggctatctgcagcctgccttccgctgggctggatagcaagtccttccctgaagggggaactcggtggcacatttcttcacctaccacaatatctcataggcactttaactacaaaacaaaattgagctaattccctcaaaactcactttcttccaactgttcctgacctctggaaatagcaccctcatctatgcagttgcacacaccagaaacccaactctgatcctaatgccgcttttccctcgcaccctgcccttagcctaaccttagtactgtctctgctcagtgattgaaataatcttccaactgccctccccacatcctctcagccccatctagacctttctttacactcaaacagagggaatgacccttttaaaacacaaatatatactatctcttagcctggcttcccattactcttagaataaagatcaaaatcttttactgtcccagcctataggaggacaaggcaggtgtgtcacttgagcctaggaattcaagaccagcctgggcaacattacraaaacccatctctacaaaaaatacaaaaatta

SEQ ID NO: 312457 - DNA, 498 bp, Homo sapiens
gaggaagagcaattagcagaatgtgcacattacccagggtcatggtctcatctttcattatatatttgacatacttattactgtataggatttaacatacaaattcctgtatataagtctttcacattatttaatgatattcaagaacaattttgactacacatgaattttcccctaacattatacaagatgaaactgtcccgaagttaacagatgtttgaatatttctattagaagacaattctctctgcatctctggcacttttkcaggctgtgggtgttttgagcaaagacatttacagccaactggacaatgattatataagaagatactccaggagagtgaaacttcccttctttccctggagtagatttgtttatattccagagcaataaagatagagtctggaggggatgatggacatatttgctaagagtcctttataaaatgaggagtttcctaaactgagtttccctcaggtgggatacagatatact

SEQ ID NO: 312458 - DNA, 438 bp, Homo sapiens
agcacctcatatcacagggaatcagagcccaggctgagctgcaccatcttcaatctcctggctgaacagccatagtgctctgcctacctggaactggacttcaccccccgcacaacagtccaagctgctgaggtgccccaccaatgaatagagtcactgttgcaytgttcccctctccctgcagcccgagcaacagtggcattttgccattcttggatccttactattgctgcatctggcctcacagagcctgggctacgactgtgccccaccatcccaaggtccagagtcactagtacatggtacctcatcccctggagccagagctcccactgtgtcctgttggttagttctgagttccaaactgcagctgtgccctgttccccaggacccaagcctctgaagtgccctttcttctcctgagccataccaatgctg

SEQ ID NO: 312459 - DNA, 438 bp, Homo sapiens
agcacctcatatcacagggaatcagagcccaggctgagctgcaccatcttcaatctcctggctgaacagccatagtgctctgcctacctggaactggacttcaccccccgcacaacagtccaagctgctgaggtgccccaccaatgaatagagtcactgttgcattgttcccctctccctgcagcccgagcaacagtggcattttgccattcttggatccttactattgctgcatctggcctcacagagcctgggctaygactgtgccccaccatcccaaggtccagagtcactagtacatggtacctcatcccctggagccagagctcccactgtgtcctgttggttagttctgagttccaaactgcagctgtgccctgttccccaggacccaagcctctgaagtgccctttcttctcctgagccataccaatgctg

SEQ ID NO: 312460 - DNA, 547 bp, Homo sapiens
ctagtaactgatcccaaagatagaaattaacaaattgcctgaaagggaattcaaaataatgatcttaagaaactcagtgagayataagagaataaaaatggataattcaataaaatcaggaaaatcattcaatatctgaaggaaatattcaataggtattttaaaaagaaccaaacagaaatctttgagctaaggaagtaagctaatgaaatttaaaaatatacatatatatatatatataagagcttcagcagcagactagatcaagtagaagaaagaatctgtgaacgtgaagatagatagtaattttgaaattatttagtcagagggaaaaaaaagaataaaaagaacaaagacagactgtgggacttattggctgccattaagtgaacaaatagtcactttataggatttaaagaaggcaaagagacagagaaaggaacagaaagcatatttaatgaaataattgctgaaaacttcccagaaattgggagagagatggacatgcaggtttatgaagtccaaattttcccaaatagatagaacc

SEQ ID NO: 312461 - DNA, 594 bp, Homo sapiens
taaaatttatctacctgtagttgatattttgcatcacatttggaaaaatgttggccactgcttcttccaacattttttctgcccctacacttgccccagttgttctcctttctaagattataattacatggatagactgtttttgctcataggtcaataaatctctttaaattttttttcagcctttcattatctctrtgtttcagttagggtaattttattatactgccttcaaattctctgattttttttttctttttcagcaccacatctgctgataagcctttctagtaaagtactaatttcagatattacctttctcaacacaaaaatcattttatatccttctgtcctctccttattatgtttatgttttccttgaaatccttgaatacatttattatagctgctttaaagtcccttttctgctaattctatcatttcttgatagatttttatcctggttattggatgtaattattgcttctttgcatatcaagtatatttttctggatgcagaataaatgttactctattgagtatctggattttaactgcttttaaaatgtgagttttttgttttggtgccccatt

SEQ ID NO: 312462 - DNA, 567 bp, Homo sapiens
atgtttactaatactattatcttattaaatcacacaaatatatgccccaagaattatgaaatatatggacattcttggcctccactgtaatttcaaggaggagagaacattgctcaagtttaagaacagattaagactgtatttttctggcagtgatgctttaaatggatagagtcctccatgttctcagccattgccatttttcactctctctcctttctttgaagccacgttggtccaagcacagcttcttctgaaatggcagaagatctactcatatgtttctctaattctctgtttcttccaagtagaacctatgcttggaaaagttacatgcgaccctgaatagctaaaggtggtagcctcagttaggtagcaggtctgsagacagttactgggaagaatgtatttatatattttttctctctttcttttctctctctctccgtctttctctcctctagcttattcaagcttatctggtaaaaagaatgtttctacatgtcccagaccatctgaagtacagagtcagaacccagctaaagtattatcttgcctcacactacc

SEQ ID NO: 312463 - DNA, 496 bp, Homo sapiens
ttatcttgcctcacactaccagttttcttttcctgcatgtgagaatataatttccctctggtattcttggagaagagatgtgatgaagtcaagcagaactgactcattcctgggtcccatattttaatagcaaagtaatagcttcccaacctgaacctaacttcttacaggtatttattttccatttctcactatttgaaattgaaatcaatatatttatattaaatctttgtatactactttaattatctcatggtaattgatttctggaagttgagttgtattgtcaaaaaatatgaactgagaattaaatttttcacaaaaacaccaaatttccctctaaaaaagttgtactgatatatgtycttatcactataaaatgtgttcatctttttattgttacctcatcaattcaggttagcatttataaaaaccaaaatacaaacactttgccgccagaatcacagaaaaaaatcttatttcatttaacttctat

SEQ ID NO: 312464 - DNA, 550 bp, Homo sapiens
tcaaaaaatatgaactgagaattaaatttttcacaaaaacaccaaatttccctctaaaaaagttgtactgatatatgtccttatcactataaaatgtgttcatctttttattgttacctcatcaattcaggttagcatttataaaaaccaaaatacaaacactttgccgccagaatcacagaaaaaaatcttatttcatttaacttctatatctttaattacttttcacacctattgagcatttgttctttcagttttgaattgtcagttcaaacttactattttttctattagggttttcatcttcttaatgattgtctatttttcataatttttcttactattattgattcagagtttktcatttgcttattaccttcatttagtgagcaatgcttttcttatgcattgaaattctgccatcaccctatttttccatcataattgaccatccgaactacttatagttccctttccaacacctgacttgttacatatcacaagatcttatgcacagttgcaaatttaaaatatatctagatacggtagt

SEQ ID NO: 312465 - DNA, 609 bp, Homo sapiens
gtcaatattaataaccaaaaatgagaaaatacatactacaataaggactggcagtgagcactgaaaatgctaaaatgtagaattaaatctaaaaatctcatatgttttattgtatataccataaataacatttgaagacatttaattttgtgttaaataatttttaaaggtgtaaggtaatattcataagccagtaaaaatttccaaatttttcagactttaaaaggataaacagaagaaaaaatagaggcagtaaaagtttactaattgatttttatgatacaagaaggagttttgtcattgatattgataaagaagcrtaactttaattatagttttcttcttaagggtaattacgacagctatataagaaacttctctttgaaatttaaaatatagtacttaaaatagaaaactcaacccaagattggaaagtaagaagaaaattagccattacgtgaagttaaaacacaaggagctctaaaatatgacagaaagtttaagagacatgaagagaccaaaaattcattgtcaacaggtgtttaaaaagaaaaattaaaatagaatggaatggaatagaatttgctagtactaaagaaagacaggaga

SEQ ID NO: 312466 - DNA, 263 bp, Homo sapiens
ctaggaaagaatcaactattaactaatagtgttaatacaagtgatgacatgcccaaaaamtaaatttaggtcccaactcatgtcatttgcacaaaacaaaaagctgaaacaattggatgagaatatatattatcctactaaaataggaaaggtcttcttaaccaagagataagcaaagaaaatttataaattaaaattgctaaatttggccacatcaaaattcaaaatcgctaacaaatgacttcattaaaaatatgtaaaac

SEQ ID NO: 312467 - DNA, 500 bp, Homo sapiens
atgttctaggaaccattcctgaaggatccctggaaagcctccacagagctctcttcagctactcccacaattttaagagtacataatatgttaaatgcctttattattaaaatagctagagtggtttytgttatctacaacagaactcaacattaaaaagaatttggtagcagggaagattataggcaacagaccaacaaggacaggaatctaaaactatcttccccccttcttggatttggaggttttaaagtttggactccaaatagtggcataacagcaacttaaagaattacttgtgatcatctgaattacagtgctttttgatgttatgatttaatcagactgaatatcaattgttatagcatagtgaaaagattgtcaggatgattagaattctgtgagtgaggtggctactctgcctccactgaaaagtttaaataaacaaaatgacatatttggcagtttaaattttctgctcaagacacagtaagaaaacc

SEQ ID NO: 312468 - DNA, 514 bp, Homo sapiens
tactcctagtacccagattgtgggatccaaataacatcttccaataaaaagaaccagaattacttggaggaacaatgagttccagtcttagaaaaaaattacaatatgtgcttgccgtatcagaaagtaaagaagcttagaaaactaagtcatgtcaagaggacaggcatcaacatgaaaaggttctgaaagtcaataatggagcattctgagtattaatcagattaacaatcacaatggatttgaacaggtcaaatatgttttgatccaggagcacataatgatactaaaaacaaaacaataaaaactccctgtcacctttggaggatgcttgggaaccaacacattatcttgaaacctagtcaatatgaggaaaawtcaagcattttttcctgtgtttcctatatgaactatttttcagtgcagtcaaatagttgtttaggggagattttctttattataaatgagaaggaaattttaaaccttaatgatttaatgaatctaggcaatgtta

SEQ ID NO: 312469 - DNA, 606 bp, Homo sapiens
ttgtttgtttagtacaattaactatcacttattattcctgaaaggcagaaaagcccgaggaaagttaaagggcaaggctgagtcctagaactttgtatattgagctcctccttgtcatccaaatctctgctcagatgtacccttgacaaagaccatctctggaatattcaatgttatctgctactctttgccatggcagtctctatcacactacctgttttatttccttcattatgcacattatttgaaatcaatagatatttatttgttcatttactatctgactctcccactccaatggaagttccatgatagattggacaaatttcttcaccactaaatccccaatgcctagaaaactgtgtgacacttggttaaatattactctgacacaaaatttgcagacagtattaattggataaataatagggatatcaaaatcacttaattactctcttcaaaaagtaatcacaccagaactatcacaaataaaaacatattgtaagtagatgataatacttctcaataaaccctctttctatttaccaattataaactacactaagagagcaaamccatatgttttgatgatttgcattgatttgc

SEQ ID NO: 312470 - DNA, 628 bp, Homo sapiens
ctgattctttattagagttttctatgtctgttgagctaattaaaatctgtacaacacatattaatgtttactagtaaataattttgtttgactttaatggtgttttgatttagaattmttaaagaacaaggctacaactagacctataacttaacactgatgaagatatatacattttaggaatacaaaccttgaacctgaactacctgttacaggaaaaactatataatttagtaatgctttggtcacaagagaatgcctgatagctttaatagaagatttgaaaagttctcttacaatataaaggaaaggtctttcattaactgcctctatttttctcccccttcctttacttttcatctcagattggattttatattaaagtaacaacctcttattttaaaaatttaggaggaagaagctagaagcaagattataaaataatctgtctgaaataaggcccaacaaaattccaaagccatgagagaaaaaattcatgattttctatgctttatgagttagtattaattttaaaagattcatgaccagagacaccaaaaactttcactaccagaaaatcccgtaaagtatgaaaagaactgtgactagttggattattgttcagcaa

SEQ ID NO: 312471 - DNA, 628 bp, Homo sapiens
ctgattctttattagagttttctatgtctgttgagctaattaaaatctgtacaacacatattaatgtttactagtaaataattttgtttgactttaatggtgttttgatttagaattattaaagaacaaggctacaactagacctataacttaacactgatgaagatatatacattttaggaatacaaaccttgaacctgaactacctgttacaggaaaaactatataatttagtaatgctttggtcacaagagaaygcctgatagctttaatagaagatttgaaaagttctcttacaatataaaggaaaggtctttcattaactgcctctatttttctcccccttcctttacttttcatctcagattggattttatattaaagtaacaacctcttattttaaaaatttaggaggaagaagctagaagcaagattataaaataatctgtctgaaataaggcccaacaaaattccaaagccatgagagaaaaaattcatgattttctatgctttatgagttagtattaattttaaaagattcatgaccagagacaccaaaaactttcactaccagaaaatcccgtaaagtatgaaaagaactgtgactagttggattattgttcagcaa

SEQ ID NO: 312472 - DNA, 617 bp, Homo sapiens
tcatccttccttacctcacaaaactgatttatgaaaaaacagtcctccctaccactcagaaactggctgtcccaagaagattggtacaaggcttctaattgaaccagatttgccattcctttttcctgtttttctcrgcttactgactttgatatcaaacttttcaattctagttgggacactgagctattcaagtcatttaatttatcaacaacatcagtaggctcatgctgggaactaagctgaatagttcctgcaataaaggaatcaaaatcaaatccctgcttcttttccctttcttttccagccagttgctgtgatgcttcctctagcgctatctgggctttaaccaatccattcctttcacattttgatttgcctttcttatcagttttttctttgctttgttctctccaattggaaagatctataataagcttgggttcatagtaatggttaacttcactctctctccaaactaagttatctaaatatgatgatgacctcgttttgcagttacaagtatggctacactccagatcacagtatttgttttcatgatgatctgagtatttccaacaaggctcagtagagtaactggtatcaaaagcaggatc

SEQ ID NO: 312473 - DNA, 583 bp, Homo sapiens
aataggaaactattcttatgtcatataatattctgaacagaaattagaaaaaatattttattcttgcttgattaactaagttttacaaatatattcaattcaatgaaatatttttcaaggtctacattcgttcctagaactggattagcttataaaaagtatttggaaaactattcatttataacttggaggatcatactcagtggttctcaattgaggatgattttattcctcccaggggacatttagcaatgcctgaagacacttttggttgttacaattgggggctgctactggcatctrgtaggtagagaccaggggtgtttctaagcatcccatgatacacaggatttccccaacataacaaagattatctggtccaaaatttcagtcatgcacaagttgagaacctttacaagggagagtcactgaaggttcctgaacaaggaaaagaaatgattgagttgaagcttaggaggtctcgtttttaccattcctccaaatataccccaaattccagccacagcagaagggatttgccagttctataatgtacacattcatgcatttagtcattcaacaa

SEQ ID NO: 312474 - DNA, 498 bp, Homo sapiens
agtttcttgatgcaaaagctgctgctcaaatctgcaatttcaattgtcctgttttctacatcatcccaacatyattattattattattattattattattattattattattattattatttttgagacagggtctgattctgtcaccgtggctggagtgctgtgggaccatcacagttcactgcagccttcaccttctgggctcaagtgatcctcccaccccagcctccccccacaagtagctgggactgcaggtgtgcactaccacgcccagctaatttttttgtttttgtagagattgggtcttgccatgttgccacagctggtcttgaactcctaggctcaagcaatcctcctgcctaggcctccctcccaaagtcctgggattacaggcatgagacaccatgcctggcccccaacactattttcaaaatgcatcagccagttcccaattcataactttagaaattcatatactctaaaaattgttgacatatg

SEQ ID NO: 312475 - DNA, 593 bp, Homo sapiens
ctttgttggtagtcacataggcagatgcaataccagaagtcgagccagccctgcctctgttaggtggcaaggagcatgaaaagtccataaacagaatgattatataccactgcttcatgcccaatttgctacagtccatctttatgaagcagaaatccttctcaaagggacatctgaggtacattttcaacaggaaggaatgattgaattaaacagtgaaataacaattttacttttgatgcctatcgcccttatgctatgaactcctccactgccacaggattttggaacattttattgatccttgttcttctgtatcaatcaagtcatcacttaccatatcattaaatagttctctttttagcctataatttgggatggctgaagggakgtggggatggttaatgggtacaaaaaatagctagaaagaatgaataagacctagtatttgatagcacaacagggtggctaaagtcaataataatttaatagtacatttaaaaacaattaaaatataatttgattgtttataacacaaatgataaaggcttgaggggatggataccccattttacatgatatgattattatgc

SEQ ID NO: 312476 - DNA, 446 bp, Homo sapiens
taaatagttctctttttagcctataatttgggatggctgaagggatgtggggatggttaatgggtacaaaaaatagctagaaagaatgaataagacctagtatttgatagcacaacagggtggctaaagtcaataataatttaatagtacatttaaaaacaattaaaatataatttgattgtttataacacaaakgataaaggcttgaggggatggataccccattttacatgatatgattattatgcattgcatggctgtatcaaaacatctcatgtaccccacaaatatatacacctaatatgtatccacaaaaaaaaactaaaaattttttaaaaattaaaaaatgtatctactgtgcactaatttcaagatgtattacatttgatggagttcatggattttctttaccctaaatgttgcaagacctttaaacaagaatatca

SEQ ID NO: 312477 - DNA, 446 bp, Homo sapiens
taaatagttctctttttagcctataatttgggatggctgaagggatgtggggatggttaatgggtacaaaaaatagctagaaagaatgaataagacctagtatttgatagcacaacagggtggctaaagtcaataataatttaatagtacatttaaaaacaattaaaatataatttgattgtttataacacaaatgataaaggcttgaggggatggataccccattttacatgatatgattattatgcattgcatggctgtatcaaaacatctcatgtaccccacaaatatatacacytaatatgtatccacaaaaaaaaactaaaaattttttaaaaattaaaaaatgtatctactgtgcactaatttcaagatgtattacatttgatggagttcatggattttctttaccctaaatgttgcaagacctttaaacaagaatatca

SEQ ID NO: 312478 - DNA, 614 bp, Homo sapiens
cctgtttgttgttcagtataaacatttcgatactggtacagtccaacatcaacaaatgcacttaatctrtactcctgcagcaagatttcaatatagtatctggaaaatagagtaactaatgaatataacttttttccagaacacttgccatgaaattattttaatgaataaaatatcaatattatcttaaaagcctgcctgttaaatgacttatattgtagtatctcatattttaaatattcaaatgttaaaattttcacagcattttgccaaaataaaatgaattatgtaagatatctgcattagtagaaagttgttctcattcataaccaattcattcagcttagtcaataaatatttatagaagacaatactatttcttatactcaacatcttgaaaaataaccctgtccctggtatataacacagacaacatgcagaggttaaatattttaatgtgttcaagaaaatggcaggcttagacatagcatatattttatatctgagtagttatatttgtcaggagtagaagttcctactttcacattccttaaatttggctccatttgtaacttggggaataaaacattgcctcaggaaacttttaccggtca

SEQ ID NO: 312479 - DNA, 608 bp, Homo sapiens
tagaattcataaattacagatagcaatttaaacttacacaaccagtttgggaagcaatcttgccacataagttgagtcataaaatgttactttgatttgatctgttagtttcatatttgtgaaactgtcctaacaaagtaaccccaaatacagaaaagtctaatgatcatagatgttcaatagagtattatttgtggtcataaaacaccagaagtaaataaaaacttatcagtagggagatggttatytaagcttggtaaacccaagtaataacactgcttagtcattaaaactagtgattacataaattatttaataaaattagtatttaatactaatatgtgaaaaactacatatgaaattaaatgtataattctatttataaaaaatagagagatgaattttatctcataaccaagttaatgtagaataatgaaatattttcaggtacgggaaattttcttgtaggctataggttttctatcatcttatatcttgtatcatatccaggataatagccaagagccaaaccacatgacatcatttctcatacattttaaaaatgttcattcgttttgatttagagtaagatacatataaatatcacc

SEQ ID NO: 312480 - DNA, 544 bp, Homo sapiens
gcaactagaaaaaatgcattttttgggacttaaaatatcattacttatttcttattttaactctctgtttctatttcaaaacaataatttagcaggcatgtctttcttatttattgttgactttttataggctcgctaaaatgataataaagttgtttgaacaaaggagcatatcttccaaaagttgtgtattggttayaaatttgttttgctttgcatatttataacaatgcttcataaatgtaatggaggaaatattgtaattatattaattttgcatattgaacatattccaaaataaataatgaatattttatactcagcctggctaaaatgagtttgctgctgagtgtagtttatcatgaagaaaccagttcatcccttgtgcattcacaggtgactgcccagccagttgaaaggtctgcatttcctgttcatcacgtggccttcgtgtcctcactcttagtgatcactcagccggtggcagcacagccaggacagccatttcctcagcagccttcggtaaaggcaacagattctgacg

SEQ ID NO: 312481 - DNA, 579 bp, Homo sapiens
tctataaacctaaagaattaagaaggaaaataattctggaaattaaatgctgttactttaattaccttcaagacgttctccactagaaaagttaagaaattcaaatattaagactcaaatctcattcatcataatyacactgaattagaatctaaaagaataatgtaaatcttgtcaccgagaccaacaattaatgctcctgtaaatctaacccaggcattaccatgttcatttgcaagactaaagagtctctggaaatattttatgctagattagttacttaagaaattcatactagatttcatatttttatgtcagaagccttttggctgatttcccaaagatctgaaacgatgctagctccagcgatactgtgtctggtcagatcctgcatctcaaaaattaactctgcttcttaagttagtggggaaattgcctcctgaaataaaatttgaatgtaatttattttggatgacactgaggttattttcactaattcattgataatgactaggcatttctcaattaaggcagcttcgtctgaaccttatcagttgggaacagctgttgtttgaactt

SEQ ID NO: 312482 - DNA, 579 bp, Homo sapiens
tctataaacctaaagaattaagaaggaaaataattctggaaattaaatgctgttactttaattaccttcaagacgttctccactagaaaagttaagaaattcaaatattaagactcaaatctcattcatcataatcacactgaattagaatctaaaagaataatgtaaatcttgtcaccgagaccaacaattaatgctcctgtaaatctaacccaggcattaccatgttcatttgcaagactaaagagtctctggaaatattttatgctagattagttacttaagaarttcatactagatttcatatttttatgtcagaagccttttggctgatttcccaaagatctgaaacgatgctagctccagcgatactgtgtctggtcagatcctgcatctcaaaaattaactctgcttcttaagttagtggggaaattgcctcctgaaataaaatttgaatgtaatttattttggatgacactgaggttattttcactaattcattgataatgactaggcatttctcaattaaggcagcttcgtctgaaccttatcagttgggaacagctgttgtttgaactt

SEQ ID NO: 312483 - DNA, 419 bp, Homo sapiens
ttaaaaactactcattaatttcagaatatgaatcaggacagaaattgttgctacaaccaaaatttctgtaaaataaaactatttcccagactttgttgaagatgtttgcataaaattttatayaacaataaaatattttataattaatttgactatgccctttaatattcctttaaaagactttgagatactgccaaatgaaataattgcttggtaaagatattgctcaaaacatcttttttcataaaaatctaaatagttcatatcatactatcttggagacctaactgtaaggtagcacctaactgtaaaaatgattgctaatgcgctatgtggaatattataatttatactgtattataaaccatttagctatgcagtattggtagcaattactatttaaatttagtatgcttata

SEQ ID NO: 312484 - DNA, 364 bp, Homo sapiens
tgctgggaatttctaaggaaaatatagcatgtctttccaaatcaaaaaatcaatggcaagaagcatttattcatcaaatctggtccccattggttgagggttctccctgggggaagtaactttttctgcactttcacactgcacataggtatatgctatataagttccaaagttcggagttactgcactagacaagtccttgaataactgacaaagacatggtgttagaactcagtcaagaagctggaagcataagttgagtcaaagtacacaagkaactatttgccacagctctaactagagttagaggtaagaaagagaggatgtaaagctgaatataaaaggcatctgatacagtctaccc

SEQ ID NO: 312485 - DNA, 596 bp, Homo sapiens
aactatttgccacagctctaactagagttagaggtaagaaagagaggatgtaaagctgaatataaaaggcatctgatacagtctacccactatacaacacatagctactcatggcctacatattaagcacaatccatcaccaagtttttgaggtggtagccagctgagagctctactaagatttaatacaagagtgttagaggtagccagctgagatctctgctaagatttaatacaagagggttagagggacaagctacaggctatactactctataattagtcctaaaactataattaattttcaccatgcccccttgctatcagccrttgtagatttcccttacctgcagccagcactgtagctaatagggtgacactaatgttcatcctggagaaatctgagcccctaactgccttgctcttgttaggtggtggttgctgcaattgcctgttctcagtaatcactggacatgaagccaagagatatccctatgaataccctgaattccagaccagctcctccttaactacattaagttaaagcaaccctatttctttatgataattagaactgattatctctagtcatatac

SEQ ID NO: 312486 - DNA, 484 bp, Homo sapiens
tttcaactcttttcttgtttgaaatttttcaaaataaaaagttcagtatccaaccccacctcccccaactgagactgatgcttctctactgctaggtcaagtacgaagggatgaaactgagattcagcaccctcacctctcttccctattgtccctcatttccaacagtttttgtccagtcctgggcactaggaaggggctctaagaagcaggtactgctgctgcagaaagaaaatctacccagcttccctgttgttcagttaatgggcagatagaactcttctaactctgagaccctgtctatacttgtctgtacttaaactaatttatttgactsaactttcaaaaatatttcatcaggatctatatagtgtttttcagtcaatgaaaatcaaatgggaacggtatgaaaacaagtaaaacataaaggaaatcaaacactatgatgctttttttttccaggaaaaaattataagattgaatt

SEQ ID NO: 312487 - DNA, 484 bp, Homo sapiens
tttcaactcttttcttgtttgaaatttttcaaaataaaaagttcagtatccaaccccacctcccccaactgagactgatgcttctctactgctaggtcaagtacgaagggatgaaactgagattcagcaccctcacctctcttccctattgtccctcatttccaacagtttttgtccagtcctgggcactaggaaggggctctaagaagcaggtactgctgctgcagaaagaaaatctacccagcttccctgttgttcagttaatgggcagatagaactcttctaactctgagaccctgtctatacttgtctgtacttaaactaatttatttgactcaactttcaaaaatatttcatcaggatctatatagtgtttttcagtcaatgaaaatcaaatgggaackgtatgaaaacaagtaaaacataaaggaaatcaaacactatgatgctttttttttccaggaaaaaattataagattgaatt

SEQ ID NO: 312488 - DNA, 583 bp, Homo sapiens
ctggctataatatttctctccatcgctacagccatctgcccgtcatggatcacatccactacgcaccagcagcacggggttgctccacatttatatttatcaaaagtcaaatcttgaagctggcaatgccttgccttgctttctacccccatagtataacatgaatccacggttaacctgataaatagaaataacaggatattcctacataatcccttctaagtaagcatctctcagaggaagcagtgattttatagtggaaaaaaaacttttcagtaacgaaataacactagtgagaataaataagaaagctcttggagctcccttaattagaaaaacagagctttaaaaatatgcttgcattgtgaattttttaaagatkcatttcaaatccatgattttgctatttattatactttgttagactgctaaattgtttcaagtttatccatcttctggattttatttttctcatccacaaagatgttatatcttaaaaataactttaatgttaaatgtaatatgctagctttacaatatcaacagtacttggaaataaatgaaatgagcctatttagccaac

SEQ ID NO: 312489 - DNA, 590 bp, Homo sapiens
taaagcacactcagcaggagctgttctatggaaataagtagttacgcttacatttttaagagtttccactgtgaacagataagagatttttaatgaagctacaattgacaaagaaaacaaagtaaataaaagcaagtagctatgcatggcactaaaatttacaatgactataacaagcagaaatcaatcaaatctcccaccagaacaatccgttttcttataaagcacaaaaatcacttgagctgaacagacaacaaatactaacccaagacacacacatcaactaattaaaggctgattttccagaacagggaaatgcygttccagtttattgatgtctaaaggcattttttttttcctctcaggaaaatgtatgcttaaagtggtttgaataaattctgatatatcatttctgtaaaaggaagtgaggagaaggtagggaaaataacattcctactccctaaataaattagctctgtttaaaagggcaagatgaattcactactttaatggtgacttccattaaggtggaatagtaatactaacccacttcaaactactggcagaatatgagtaaaccaagaacagtg

SEQ ID NO: 312490 - DNA, 531 bp, Homo sapiens
ttgcattatgaaaatgaaattactctattattctttttcaaaaattttaatttgtaatctacacaaccttgatatgcgatagttaaatacagttaatctgttatctatagtaattcaacrataaagagacaagtacacaaaataatagtaaccataataatcaccagtttcacacttcatcccgggctttccatacaggtaactttggtatcagataagaggaacataaaactatattacaacactagtttgcagcagtcataaaaagggctagctatggctgtttctcttccacattgtatcccacactctggtgactcaccaaattctagaaaccacgtgcaagaattagcgggttaaaggaaatgtccgctgtggagctcctttaacactgctgacattcagaacaaagttatgataccgagtgagatgtggtactagatgactcacatagaggaagagaaaagagaaaacagggggtctcgtcatgtaatacaatgctttgttccgtttcttttgccaggaactgga

SEQ ID NO: 312491 - DNA, 645 bp, Homo sapiens
gggatgtggccatccagccagttaatatagttccttgtttccctatattttaaagtttatttattatagtagctmatatttcccatagggatgaccacccacccaccctcccccccacacacaattaaaatacttcttaagaatgaaaggtaacaaagtagaacctttttcttttttaaatctttttaaaagtttatttaaaagggtttttaaaagcctggatgcttaaaaatcttccagtggctttccatctacttccagataaagtccaaatatctcagtttggtttccatctttatggttattcttccacacctgcactctgatggttttaatctatgtgcagctccctgacactgtcttccggctccagctttggacatgctacctactctgcaaaaccgacaccacatatgtccctagctcagctttccttctcttcattgctcaggtatcagcttaaacgtgatttcctccagtaggtctctatagaatcccctaaggtgggttagctgcccatcttctgtgctaccattgaatcctgtacataaaactgtataaaaccagtgtcatactctacaatctcctgtttccttgactgcatttctgaatcgactataaacaccttgagaacagggatgctgt

SEQ ID NO: 312492 - DNA, 645 bp, Homo sapiens
gggatgtggccatccagccagttaatatagttccttgtttccctatattttaaagtttatttattatagtagctcatatttcccatagggatgaccacccacccaccctcccccccacacacaattaaaatacttcttaagaatgaaaggtaacaaagtagaacctttttcttttttaaatytttttaaaagtttatttaaaagggtttttaaaagcctggatgcttaaaaatcttccagtggctttccatctacttccagataaagtccaaatatctcagtttggtttccatctttatggttattcttccacacctgcactctgatggttttaatctatgtgcagctccctgacactgtcttccggctccagctttggacatgctacctactctgcaaaaccgacaccacatatgtccctagctcagctttccttctcttcattgctcaggtatcagcttaaacgtgatttcctccagtaggtctctatagaatcccctaaggtgggttagctgcccatcttctgtgctaccattgaatcctgtacataaaactgtataaaaccagtgtcatactctacaatctcctgtttccttgactgcatttctgaatcgactataaacaccttgagaacagggatgctgt

SEQ ID NO: 312493 - DNA, 645 bp, Homo sapiens
gggatgtggccatccagccagttaatatagttccttgtttccctatattttaaagtttatttattatagtagctcatatttcccatagggatgaccacccacccaccctcccccccacacacaattaaaatacttcttaagaatgaaaggtaacaaagtagaacctttttcttttttaaatctttttaaaagtttatttaaaagggtttttaaaagcctggatgcttaaaaatcttccagtggctttccatctacttccagataaagtccaaatatctcagtttggtttccatctttatggttattcttccacacctgcactctgatggttttaatctatgtgcagctccctgacactgtcttccggctccagctttggacatgctacctactctgcaaaaccgacaccacatatgtccctagctcagctttccttctcttcattgctcaggtatcagcttaaacgtgatttcctccagtargtctctatagaatcccctaaggtgggttagctgcccatcttctgtgctaccattgaatcctgtacataaaactgtataaaaccagtgtcatactctacaatctcctgtttccttgactgcatttctgaatcgactataaacaccttgagaacagggatgctgt

SEQ ID NO: 312494 - DNA, 530 bp, Homo sapiens
aaacacacccccgtcatcaatgatatgatttgttcactacaacttccatcaagtcattctgttgagtaagttacactttcacaaaactgacccagaaaaaaaaaaattgatcagttttaaataagtaatatacaccaatagtagacacacccattctccattccacgaccagttttgtatttacataattwgataatcactgatatattttaaaaagaatattttttaaaaaataaccaactttcaaataagacggcaacttaggcataggcatctaacagtcttccgttctaatatgaaatgaaacgacttaaagataccaaaccagggggtaacctaccactaaaggagtcctcctattccagaaatagtgaggaatttctgctggatccacagcagttgtgactagtggaaggaaggtacctccaataagtgtgcactgcccatcttcagaagcccttgcagttcagaggacttatatgggggaaattttaatgaagcatgactaacatcaactcttttgaagagct

SEQ ID NO: 312495 - DNA, 550 bp, Homo sapiens
cccccccccccttacagcagtaagtcatccgtgtttggtgctttggtggaaaatggtgacagagtagtaagatttggagaatcttattagttgtgtggccttgggcaagccctccatctgtgctcatttataatggggataataatggggtctttgaaaagttgttcaaaaaagttgtaaaagttaaaactygtactagacataaataaaatgactacccaatacagtatctggtatatagcagatactcaataatgttaactaattttgctattatatttaaccaaaacagactcagtgctttctgtgtactaggcacaatgtttgatgttggatcatttcagatgcaaaagaaatgtgtgcctaagccacccagggattttcatatttttctccccaacttttacttcaaaaagaaacaaagtgtatcattccattattttagagataaaaggctgaaaactacctgtaaaaggtaacagactgctatgaaggaagtccagtgtgcatgtgatttatcattacctatgctgataaggggagtgagaaa

SEQ ID NO: 312496 - DNA, 628 bp, Homo sapiens
tactaataactatgactaggttttgataacttccttgatttgttttcagggttattattattttgctggaaaagggccttgtgagagccaatgattgtattggaaataaagccaaaacaaagttcaaagcttgctgagatgcctctaaggtagaaagggtagcaaggtgaatggcatgatgaggaaagtgaaaatgctgtcgcaaattggataaaagtgatgagttggtagcttccatacctttcacaccttgatgtttcccatcactaattcacagtagcatcaagaatgtatcaaaatgtagcttgtcttcactttattaaaatttctctaaaacgcaaattttgaatgttataaacaaggagttaatagatgttcattcaatcactcagcttagtcccttccaatgtttcctttaaaaacaacatacgcttttattctctttttaaaaaatgctctactaaaatctacacaccttctgcaccttctataaacattttgctctagtccaatcctgtttcctttcctgcttcaggttttgtcattttcctcctgatgccaacctgagattccaccatggtttatccccatacatggctgaatccacaraaaatggcaattatgacac

SEQ ID NO: 312497 - DNA, 596 bp, Homo sapiens
ttttgtcattttcctcctgatgccaacctgagattccaccatggtttatccccatacatggctgaatccacagaaaatggcaattatgacacagatacccacttatcctcccagtgatggtcatgcatgtagcaataagaatcctttttaagaaacagcacgtctcaatctgagccagagggtagagtttcctctacaaaatactttcaaatgctttgtcctctagaatttcttgattattaatggttttcacaagtatggggggttaggtgggccacaaactgcttccaggtggcaaaataactattaacccttctactcagatttaaaaaaaaatgtgtgtgtgtttatgcatgctatgtgctyatgtaatatattaaatgcaaatatgtattagtacatataaaacttcctaattaacaccaacaaagccttcaagagtaaaactgaggggtatggtgaacattttgaaactaattatgaccctctactaaaatattgccaattcattctccctgaggggaaaaaaatacacacttgtttttcgtcttgtgcattaatagtctaagaaattgacctattgagtagaaatcaaa

SEQ ID NO: 312498 - DNA, 581 bp, Homo sapiens
ttcttccgtaatatttgaaaaataaatccctaaataaacatccctggattttgttatgctatctgactaatgtgatgggtgatttgggttgccaacagttattattttctttcttcaattttaacagaacctcgatgttgttcaaagtattgtgggtaggcatatgaatcctccatttggaggaggttgagccctccttagcacttctatgtgatttctaattaagttatgacaatcatggcaattgggtttttttggcaatgattgatttagaaatcggcatgagactcaattctagccaatgaactatataagttctactagaaaaggagggtgttttgggcattgttgggtgacgtctggatctgctaaagctgtcttgcamccatagggctgaagccaacatacccatggtggcagagtggtaagatggaaaaaacagaacctagatgaatgtcattatgctgctgaattaaccaacactagaatttcccttcctccaggcttttaatttatatttaagaacattttagctgggttttctggtttctcgtactgacttatgttaaatcatataatcc

SEQ ID NO: 312499 - DNA, 581 bp, Homo sapiens
ttcttccgtaatatttgaaaaataaatccctaaataaacatccctggattttgttatgctatctgactaatgtgatgggtgatttgggttgccaacagttattattttctttcttcaattttaacagaacctcgatgttgttcaaagtattgtgggtaggcatatgaatcctccatttggaggaggttgagccctccttagcacttctatgtgatttctaattaagttatgacaatcatggcaattgggtttttttggcaatgattgatttagaaatcggcatgagactcaattctagccaatgaactatataagttctactagaaaaggagggtgttttgggcattgttgggtgacgtctggatctgctaaagctgtcttgcacccatagggctgaagccaacatacccatggtggcagagtggtaagatggaaaaaacagaacctagatgaatgtcattatgctgctgaattaaccaacactagaatttcccttcctccaggcttttaatttatatttaagaacattttagctgggttttctggtttctygtactgacttatgttaaatcatataatcc

SEQ ID NO: 312500 - DNA, 330 bp, Homo sapiens
ataattaaaataatatcattattttaaaataactataattgctttttatatttattaaaataattataaataaatgtttggaacactcattgatatamaatggcctctcttatggcgaattctaagaaacactaggttctttgactgcaaacaggtgttacttaaaaaaagaaaggttaagtaagtttaaggaaggataagataaaataagtcaacaggcttctgtaccatagcacttcttaaagcctttattatacaactacacacagtactgtgagagagagacagagactgaagaccctgacatcacactcatgcaaggacacacga

SEQ ID NO: 312501 - DNA, 594 bp, Homo sapiens
cctggcacaccttcctccatctcactctcctaggctccaatatggggggctctaagaagggaagraaataagggtacgtttttggttctttccttgttgttccttgaaggtaatcaaagacagcacatgatgtggaagaccctggtgcctccctagcatcctccacgcttcctcagattctgcctcctgtggcccatccaactgtttctggatgctggtctcttcccccagggacaaccccctagatactgtcatagtaggatggctcaagcccagctatgttctacatcatccagtccaccccccagaaacagcagcctcatcaaaccacctgtggcaggaaagggctgctacgtccactactgtgtcttctctaagcctgatcttctcacacacccggctctctgccccgacccttcatctcagagaaacttaggaacacatgagcaaatcttagccttatctgatgtccaactaaaaaacaagatataatttccccctcttggcagatatcgtatgcctgacaatagcttctcttggaacaccactcagtcggctttgggaagataaaaacatgttccacagaaaacagag

SEQ ID NO: 312502 - DNA, 567 bp, Homo sapiens
ctggctggctgcaaaggcaattgaggaacacaaaagtatagggtgtagggtggggaagtgaccaagggagcctggattgggaagattcgcaggcaccatgtttaggagtttaggcatttcatacacagaatgggaagtctctgaaggctttagttcaaggtaaagaaataatcagacttgccccccccagaaaacattctggaggccacttaaagtctggaacaaagtgaagcatggaaagatgggttaatgaagccaytccagacataaaaaagaaatagtgaaaacctaacttaaaaatctgattcccgttgtagattatcacgttttaccaaatgtcctcatgtccttcatgcaggaagaccatgtcctttctccctgttgacctcagcagtgaccaggcatattgctttgtccagtgtaatgtcacttacaggtagaagttttcagaggctgataaatcagccaaggtcctggaataacagagctgtagccaagtcacaatgccataggaccacaggacacgagcaagaaataaatctttctctttgtatgttgctgagattt

SEQ ID NO: 312503 - DNA, 366 bp, Homo sapiens
tggtgctcaggaggcagtgctgtccaaaccttcagtcttaatgtagataactaataaccagatcaggatttaccaaagtccctccaaggcagagacaggcatggaagacaggaaaccctattccagcagcattatgaagagccacagccaccatcatttaaagcacagggcaaattctactccagttcgatgttttattacagyatgtgttttcctttgttttgatagcagtatatttgtcttcttaattatgttttatgtaaatactgtaataaattagtttgcatctcccaagtgcatatcaacaactaattaaatgtcagcccctcaaaagacaaaagagaatctgctttgtaaatacatagt

SEQ ID NO: 312504 - DNA, 600 bp, Homo sapiens
tgctttaaaatctttaacaatgaaagcttaaaaatgaaaacaggaatttaaagaagtgattgactttgttaaagttattttagcaaaaatgaaactataggataatatcaatttaaaccrtcctgtaaaaaaagtcaaaaactggagatataaacatataatatttgaggcaatatagacacaaccatgttaaaaaatacttgcacaaagatttaacgtattgatcgatcccgcatttttagaccagtgtttatcatgtgctgtttctatgtcagtcctaaacaaggagtccactgtcagctgtgagaaagacacttacaacttcccaagaacagtaatgagttggtcaacaaatgattgcatgaggaagcattcaggaaatagatttcataataatgtcttcaaaaaatcctgatgcttacatgcttaccatcattagaaatgacaaatgataatgtagcttttaagattagattcttcatctaggtataaaaggaagtctctccctttgggttaatttttttcttatttgggaaatccttcaggaagagacaaaaagcctatctttcttttttagcaaatgaataaatagaagaaaat

SEQ ID NO: 312505 - DNA, 526 bp, Homo sapiens
gcggccctgctgaaaccttgatttctgatttttagactccagaactgtgaaaacgtttttaaataattgccgttgttttcagccacccattttgtggtactttgttatggcagccctagaaaactaactcctggaccctgcattgtgaaatttatcctgagttatccaggtgggcccagtgtaatcacatggatccttaaaactagagagactttccaggctgcagtagagagagaaatgtggcaatagaagcaggtttacagagacgctacattcccggccttgaatatgaatatgattcctggtattgaatatgaaggaaagagccatatgccaaagaatgcaggtaacctctgacaacyggcaaggcaagacagcagactctacctcagagcctctggaggggcagagccctgccgacgccttgattttagcccagtgagaactgtgttggacttttgacctctggaactgtaccataatatcatcaatattttgtgtgtaagctaccaagtttctgataata

SEQ ID NO: 312506 - DNA, 643 bp, Homo sapiens
gcacatataaaacatgtacacacacttgagttacataaatagtgcacatatgcaagcaatgcaggcacacaccggagttatacatgtagtgcacatacaggctcacacataagttacatacacagcacacacaggaaacacagacacacatcagagttacatacataatccatggaaaacatacagacacacacctgagttatacatgtggtgcacatatggagcacaaataggcacatgcctgagttatttaggtagagtacatatgggggacacacaagcaacgcctcggttacatatggaggacaaatctagccttttcccattaactcaagataaataaatagcactgcctccgtctmatcagattattaattcatcaaaagtgtgctacaaaaattgcatgattaaactgcattaggaggcccagataacccagacatgcatagattacttttttagggctataatcaaagtataattacaaaattgattattttcttggagaacacacaggcacagggaaaatgttcatatactcttgtttgagaaactctgctattgataacatgacctatgtccaaacattttaaaaagttttttataaaacagaatcctagaattcctgatttgaatagaactt

SEQ ID NO: 312507 - DNA, 642 bp, Homo sapiens
tcatgattctctgagttagggtttcttatggttttaagtgtgagtaaaagttatacaaatcctctttgcatctgattttcttcctyatgatagataactcttacagaataagaagagttaacatcatgggctttgactttgggtgcactgagagttgaagccttgcgttacaacttagtggttgtgtacacttttccaagttcattggtttttctgatatctactttatacctcatacagaaagaggaagtgataataacacttagctcatagatttattgtgaagttaagataatgtgtgtaaaacatttggtgtgatgcttagtacaaatacattattccataaatacttcaggtttattataattgtaataatcttggtctccagttttttctctctttttacttatgagacaaatggacttcagtttaagagtaaatatgaatgtgtagctatacaatgatcacaatattatcttttacatatatgtatatatatataatatgagtgaggcaggcatcctggtgcaatggaagagctgggcaagtcattaagaagtgagttctagtgtaactctgcagttctagtgaccctgcagttacttactcagcttgttacctcaaagcaaattgttctagcca

SEQ ID NO: 312508 - DNA, 642 bp, Homo sapiens
tcatgattctctgagttagggtttcttatggttttaagtgtgagtaaaagttatacaaatcctctttgcatctgattttcttcctcatgatagataactcttacagaataagaagagttaacatcatgggctttgactttgggtgcactgagagttgaagccttgcgttacaacttagtggttgtgtacacttttccaagttcattggtttttctgatatctactttatacctcatacagaaagaggaagtgataataacacttagctcatagatttattgtgaagttaagataatgtgtgtaaaacatttggtgtgatgcttagtacaaatrcattattccataaatacttcaggtttattataattgtaataatcttggtctccagttttttctctctttttacttatgagacaaatggacttcagtttaagagtaaatatgaatgtgtagctatacaatgatcacaatattatcttttacatatatgtatatatatataatatgagtgaggcaggcatcctggtgcaatggaagagctgggcaagtcattaagaagtgagttctagtgtaactctgcagttctagtgaccctgcagttacttactcagcttgttacctcaaagcaaattgttctagcca

SEQ ID NO: 312509 - DNA, 584 bp, Homo sapiens
ccacagtttaaagtttttcaaaagagataaacaaaaaacaataacagtgtgttgtgaaaccatatggttattctactttgaattattggaattccatgtagtttgctgaacttcagaaacttaacctggagaaattgaggtatgttctgaatactagagtagtgaaatagtatttctaagaataaaaggtaaaggaattatttttcaatatagagagaaggaaggtaaagataagaattttatataccatcataagcttttgttcctaaaatgaatgcagaagaatgtttgctatgaatatatataaataacaggaagatgaaacaagagtaaataggctcaagaacaagccagagatgctagagaargacaaaaggaaaacattggaagcctcagatcattaaaagcaagaaatgtgctggccctcctgctcctggatgaggagataaaaatccatctggcccatcagaggacttgaactcatgcctgtacagtacatatccagaactgtatccatactggtgcattctaagggtaaaagacatttgatgactttccttttgtttaaatctttaattttagtg

SEQ ID NO: 312510 - DNA, 584 bp, Homo sapiens
ccacagtttaaagtttttcaaaagagataaacaaaaaacaataacagtgtgttgtgaaaccatatggttattctactttgaattattggaattccatgtagtttgctgaacttcagaaacttaacctggagaaattgaggtatgttctgaatactagagtagtgaaatagtatttctaagaataaaaggtaaaggaattatttttcaatatagagagaaggaaggtaaagataagaattttatataccatcataagcttttgttcctaaaatgaatgcagaagaatgtttgctatgaatatatataaataacaggaagatgaaacaagagtaaataggctcaagaacaagccagagatgctagagaaggacaaaaggaaaacattggaagcctcagatcattaaaagcaagaaatgtgctggccctcctgctcctggatgagragataaaaatccatctggcccatcagaggacttgaactcatgcctgtacagtacatatccagaactgtatccatactggtgcattctaagggtaaaagacatttgatgactttccttttgtttaaatctttaattttagtg

SEQ ID NO: 312511 - DNA, 584 bp, Homo sapiens
ccacagtttaaagtttttcaaaagagataaacaaaaaacaataacagtgtgttgtgaaaccatatggttattctactttgaattattggaattccatgtagtttgctgaacttcagaaacttaacctggagaaattgaggtatgttctgaatactagagtagtgaaatagtatttctaagaataaaaggtaaaggaattatttttcaatatagagagaaggaaggtaaagataagaattttatataccatcataagcttttgttcctaaaatgaatgcagaagaatgtttgctatgaatatatataaataacaggaagatgaaacaagagtaaataggctcaagaacaagccagagatgctagagaaggacaaaaggaaaacattggaagcctcagatcattaaaagcaagaaatgtgctggccctcctgctcctggatgaggagataaaaatccatctggcccatcagaggacttgaactcatgcctgtacagtacatwtccagaactgtatccatactggtgcattctaagggtaaaagacatttgatgactttccttttgtttaaatctttaattttagtg

SEQ ID NO: 312512 - DNA, 588 bp, Homo sapiens
cgatatagcagaagctgttccctgacattcccgwcctcaatttcaaagacacgctttcaagtcttacggaagcatttgggtatgtacaacatatatactttagactatttttacagcaaaatacaagggtgtataaattaatataagtaaacatttccacttggatcaagtctataacacatagttattggcaacaaaatatgattacaaataaaaacttaattaaataattttcatgggacataaggttcccagggttaaactttttcttctgcatttagttttactatgcttattagtagtaaatgatgaatcaaatagatttttttttcaaaatatttagtaattgttaactataaaaactaattttctaaggtacacatctcttctggagatggatgggataaaaaatggtgaagagtatggtcccttgggcaaaggagattttgccaacacaaatattttgaacttccctttgataagattttccacctgtaggcaatgccccacagtaagattcctgaccactgagaagtatggctttcctttgtgaagtgagaagcccatttgtggaaggaagttgtgggc

SEQ ID NO: 312513 - DNA, 588 bp, Homo sapiens
cgatatagcagaagctgttccctgacattcccgacctcaatttcaaagayacgctttcaagtcttacggaagcatttgggtatgtacaacatatatactttagactatttttacagcaaaatacaagggtgtataaattaatataagtaaacatttccacttggatcaagtctataacacatagttattggcaacaaaatatgattacaaataaaaacttaattaaataattttcatgggacataaggttcccagggttaaactttttcttctgcatttagttttactatgcttattagtagtaaatgatgaatcaaatagatttttttttcaaaatatttagtaattgttaactataaaaactaattttctaaggtacacatctcttctggagatggatgggataaaaaatggtgaagagtatggtcccttgggcaaaggagattttgccaacacaaatattttgaacttccctttgataagattttccacctgtaggcaatgccccacagtaagattcctgaccactgagaagtatggctttcctttgtgaagtgagaagcccatttgtggaaggaagttgtgggc

SEQ ID NO: 312514 - DNA, 284 bp, Homo sapiens
tgttcaatatataattattgactataggtacaatgttgtacccccaatctctggagctattcatcttgactgaaactttatgcctcttgattagtaacttctcctctcccccttccctcagcccctggtaaccatcattccactccctgattctatgaatttgactgttttagatatttcagatgagtggagttgtgcagtgtttgtatttccatgactgagttwtattgcttaccataatgttctcaaggctcatccatgttgtcacatatcagaggattttc

SEQ ID NO: 312515 - DNA, 444 bp, Homo sapiens
gagccttttctgtcctaaaagcgcactagtcaatgtcccctgataggtcctctccaaaatgaaggagtaggggcacacccaaagcacacagacctcaggacttagttcatcccagttctgacctcctctagtctcagccatttctaataacattttaacctctcctgctttctgaacaaatgcttgcttatttcacagctcagtatctaaatgtaatcaaggcaattatcatgcacaacttatttgtataaatatttyaacaaaagttgcaagagtaaattattaatagctgtaaatagaacatcttccttaaactgtcacacactgccttagcataaaaacataaaaagtatatgaataataaaaaaattgatacttatattttactcacaaaaaaatgatagatcctttgtaagatacaaatcttaagagatcgtctaggta

SEQ ID NO: 312516 - DNA, 597 bp, Homo sapiens
ggcttcaaacactcctcagagtattgtctgacagatgtgctctgggaaaaatacaattttcctgtgtgtgaagggggcgaggttggcaatttgaaaatggaaaaatgacaaactcgttcagtcatcttatacccaccagagggtttttgtgtccccagtttggccctcagctccaaagttacttttgtgcgtctgagtgttactgcgtcagtctaagattttggactctttaatcacttggaccatgaagaatatggcaaagtgtcagccaagtctacttgggagacagaattgctscctgttaaaagggaaggtgataaatatgtctgatttgttactgtgatcaagtaggcaaaatacttcattaaaccataaatttgtctaaaagcatattggaaaactatttgtcccagacagcttcaccaagggatagtatatttctaacgctctctctgaccaaatgcttttataagtactgccctttctggaaatttgggaaaatgttgaattctggatctttctgctctaaaagccttaagtcattttagaataggaggcacatgaatatattttgaaagcaacatgctaaccaattag

SEQ ID NO: 312517 - DNA, 597 bp, Homo sapiens
ggcttcaaacactcctcagagtattgtctgacagatgtgctctgggaaaaatacaattttcctgtgtgtgaagggggcgaggttggcaatttgaaaatggaaaaatgacaaactcgttcagtcatcttatacccaccagagggtttttgtgtccccagtttggccctcagctccaaagttacttttgtgcgtctgagtgttactgcgtcagtctaagattttggactctttaatcacttggaccatgaagaatatggcaaagtgtcagccaagtctacttgggagacagaattgctgcctgttaaaagggaaggtgataaatatgtctgatttgttactgtgatcaagtaggcaaaatacttcattaaaccataaatttgtctaaaagcatattggaaaactatttgtcccagacagcttcaccaagggatagtatatttctaacgctstctctgaccaaatgcttttataagtactgccctttctggaaatttgggaaaatgttgaattctggatctttctgctctaaaagccttaagtcattttagaataggaggcacatgaatatattttgaaagcaacatgctaaccaattag

SEQ ID NO: 312518 - DNA, 420 bp, Homo sapiens
cttcaaggatatagagattttggcttttactttaagcaaaatgggacactatttcttcagtttcakaattttgaagaaataaatgaccaattgccttagatttaataatgaaaactccaaattctgccaaaatatttaaagaagtttattctgagtcaatgagtgactgtgacctgtggaaacagtttcaagagagcacaagaaagtgtgcccgcggcagttggcttacagtttagttttatacattctagggagattgcaaatgcaggtaaaatcataaatcgatacatgaaaggtatacattggttcagcctgaataggcaaagcatgttgaagcacggccttacaagttgtcagtgggttttagagcttctttcgttggcagttggttgtcagagctaagctttgtctaaagacttg

SEQ ID NO: 312519 - DNA, 615 bp, Homo sapiens
gttcatcttccatagtgcagttggatgagaagcctcccctgatacctgcttcattgggctagatgtcttcgtaagagtcctgtagcatcctgcattacgatacagattgcacatattcatagtattataatcacactttttagtcttttacttatcagtctttcctctagactgtaagtttttttattttttgtgtgtattgtttgacttgtttttagttgacaaataaaactgtatatttttatagtgtacatcacgctgttttgaaatatgtatacattgtggaatggttaaatcaagctaattaatatctgcatcacctcgtgtacttatatttgtggtgagaacttcttaaaatattttgaaattttcaagaatataatacatagttatcaactatagttaccatattggacaatagatttcttgaatttattttttctattgaattgaaattttgtgtcctttgaccaaaatcttctgagcccccacccygtacccctggaaaccactattattatgctctcaacctctgtggcttttattttttaagattccccataggaatgaggacatgcagtatttgtttttctaaacctcacttatttcacttac

SEQ ID NO: 312520 - DNA, 476 bp, Homo sapiens
tactattctagggtaacatttttttccttcagcactttaaacgtcatgccactctcctgtcctgtaaggtttccactgagaagtctgctgccagacgtattggagtgcyattgtatgttatgtgtttatttttttcttttgctgcattgggattctttctttgtctttgacctttgggagtttgattattaaatgtgttaaggtagtcttatttgggttaaatctgcttggtattctataaccttcttgtacttgagtattgataactttttctaggtttgagatgttctctgtaactatccttttaaataaactctccaccctaatctctctctctctctgtctctcctctttaaggccagtaagtactagatttgcctttttgaggtttttgtagatctagtaggcatgctttattcctttgtattctttgttattttgtctcccctgactgtgcatttttaaatggtcaattt

SEQ ID NO: 312521 - DNA, 603 bp, Homo sapiens
gatccttacctgataaaaaatgagttggattactgagaaaatcaaactagatgccttctttgtgggagaatgtgtttagattttatttccgtgttattcactttctgtatatgtcaaggaagtccttagaaaacaaagagattgttaataaaataatccttttttcggtatttgactacaatctctgcttatgtcagtagccatcacatccatataagcaggagacatgttgtggtggctgtggctgtcacaaagccttagcttctctgtagcaatgtttgattatagagactcatgtcctttgttacaagtgctaatgaaaataataaaagcttcacaggtttcaggtccatctgccttgaacatgttcttagcaaattacatgttctgagctggtggttgagacacaacaataataaagtaatgtgattatcagtggargaatttcacaggcttccacaaattaacaacaaagtatgcttagtgatggaaagtgatcccaacattcagcacttggagaaattaagacacttcaagaattaacccaaggtctaaaatattctattaattgaattgggaataaattccttacagtggttaaat

SEQ ID NO: 312522 - DNA, 606 bp, Homo sapiens
tcagtcactttatttatcatttatttatctattcctttattcaagaaatatttttcagtcagcactgaattatgcattaagaaattactgtcaacaaaaataagttcatggccacagatgattacaatgcactattcatgccataaatagctatttactcaacaaatatttattgcatgctccctatgtttcaaatactataatggtcactgagaatacagtattaaaaaataggtatggtccttgttctcatactaactatattctggttagggaagagatactttaaagtattaatcttgtaagaaaatattattattaatagcagaattactccatccaattgtggggcctgaggcaggactgcaaatggagaccatattccrtacacgtaaagagctaaagttatcaatcagactcactgttgactgaaatgtattctttcctatgctgacaaataagcattcatcataacaatttgtaaaatattcattaaactataagatttttatgactaaaatttagcaaagtactaaaggtgactgaatctagttatcattgcttatttttttcatattctgttaatgggtcagttatcttgtgttc

SEQ ID NO: 312523 - DNA, 606 bp, Homo sapiens
tcagtcactttatttatcatttatttatctattcctttattcaagaaatatttttcagtcagcactgaattatgcattaagaaattactgtcaacaaaaataagttcatggccacagatgattacaatgcactattcatgccataaatagctatttactcaacaaatatttattgcatgctccctatgtttcaaatactataatggtcactgagaatacagtattaaaaaataggtatggtccttgttctcatactaactatattctggttagggaagagatactttaaagtattaatcttgtaagaaaatattattattaatagcagaattactccatccaattgtggggcctgaggcaggactgcaaatggagaccatattccatacacgtaaagagctaaagttatcaatcagactcactgttgactgaaatgtattctttcctatgctgacaaataagcattcatcataacaatttgtaaaatattcattaaactayaagatttttatgactaaaatttagcaaagtactaaaggtgactgaatctagttatcattgcttatttttttcatattctgttaatgggtcagttatcttgtgttc

SEQ ID NO: 312524 - DNA, 623 bp, Homo sapiens
caataatacttatgagatttgatgaatggtttcatattggggatgaataaaaggagggataactctgataactacctagaaaatgyggaagcagtaacaccttgctctgtggtgggaggagaggtagaaaaggagagaaacataatgacttgtgttttggataccctaagttgaatttgagtttagacatccagatgcgatgtatagtagaaagttgaaggatgtagcaatacttggtatcagcagagggtggatagtagctgatgccacaaagagtctgagaaaacccagggaaagtccaaacacctgactctgtaattaaaattgacattaacactaaccaatggggaacagactgagaagaggttaagaaaacggactctttctaatcctgacagtaattctgtggctaagtatgcttcattcattgtcttataggggagatggccaaacagtggtatgggactatcttcctcacattacaaaatagctttagtaaagtgtaatttacatgtatagtctaaacattatgtccactataaaagaggagataaaattctaggaggggaactcctctaaatatattgattttttaaaagcactctttgtgatacattatgcca

SEQ ID NO: 312525 - DNA, 580 bp, Homo sapiens
tacttcttaaaactgcttttactataccccatacattttcataagttgtgtttacatttttgtttatctcaagacatttttaaattttgcttttaatttgttctttaattgatcggttgttcaggaacatgttgtttaatttccatatgtttgtgaattttctgaattttcttttgttatttgaaataatttctctattttggtttccatttgcaaggaatccttttttccatcccttaactttcagtccatgtgtttccttaaaggtgaagttagtctcttgtaggcagcatattgttggatcatgttctgtttcgttttccttattscttcagccactctacgtcttttgattggagaatttaatctctttatatttaaggtaattattgatatgtaaataccactgctattttgttattgtcttattgttttatagatcctttgttcctttcttgctatcttcctttgtgattaggtgatttttctctagtgttttgccaagattccttactgtttatcttttgtgcatctactattggtttttgctttgtggttaccataaggctttttgatgtta

SEQ ID NO: 312526 - DNA, 537 bp, Homo sapiens
gtttgccatcaatctcttttgttccttggattgtggacagctctctccagtctcttccttcatgttcacatgacattgtgtgtttgtgtgtttgtgtgtgggggggtgcgtgtgtgtaaatttcccctttttataaggatgctagtcatattgcattaggggcatattctcatccagtatgagctcatcttaatttaactaattatacctgtaataatcttatttccaaataaagtcacattctaaggtactggtggttagaaccttaatatatgaatgaggagagtaagatgcaaacagtaatgctcaggcaagcaaacaatgtttatttaatgatgatttggacttttggaaatccaattctgtctcctatttttttgttgttttgaagtgaacatattattagaagactcaaaatcagtaatcccattcaaaacaaaaagaagggtttcacagtracagtgaggcccaatgacactgggtgctcagtcctggaataatgattttaaagtcaataaaaatttgattttcagattt

SEQ ID NO: 312527 - DNA, 465 bp, Homo sapiens
agttggaatccagagtaatcaataagagaatcctctttttctccatagctggggaagcaaaggctaaataacataaggaatgtgcctgagtgaagacagcctcggttctggaattggrcacaaactctggctactataagtttccaaaggtcaatgtcattcttcccctgggaatgtcttcccagtgagttatttcaaatagcatgggcctgctccttctcacacaggtgcagcatcatcatccccagcaggtaacacttacgtggcactaagtattgcccagataggatgaggagtggaaacttaattctggatttggaactggaagactttcagatctgtcatacacgacagcgggcaagtcactgaacttctaagccttaagtgactccaactctaagatggaaattataatttacctccaaatgttgtgggcataaaacatggaatccaaagtgaaagatg

SEQ ID NO: 312528 - DNA, 601 bp, Homo sapiens
atttaaccctgggtagctatactcacttttcctatttgacgcaacatcatactcctgttttttgtggttccccakttaattcatgtttctttaaaatagtaataacatgtgagagcttttctcttagtgttctttatattaataaactcaaaaatattttctgacaataagcattaattttcccacatcattatgcacaagctttaatattaataatgtttatttgtaggtgcagttaactacaatctatctgtgtttataattctatgatattgatatatggttttcatgttaataattttagtggaattatctttccagaaatcagccccgtaggaattgactagagagaggcttaggaaaaaggagttagggggttgggtaactggagagtcagtgtttcctgcccaggcaagaataaaaggcatctcttttttcttgtgcaagaagtgggagttagaatagatcttgacattgacaaaagtccttaagaacatgccaaggatttaccacttctctaaccctcacaagatcaatcacttggtaattgctgtgataacaactcagcaattaccaagtgattggttttgtgagaatgctt

SEQ ID NO: 312529 - DNA, 601 bp, Homo sapiens
atttaaccctgggtagctatactcacttttcctatttgacgcaacatcatactcctgttttttgtggttccccagttaattcatgtttctttaaaatagtaataacatgtgagagcttttctcttagtgttctttatattaataaactcaaaaatattttctgacaataagcattaattttcccacatcattatgcacaagctttaatattaataatgtttatttgtaggtgcagttaactacaatctatctgtgtttataattctatgatattgatatatggttttcatgttaataattttagtggaattatctttccagaaatcagccccgtaggaattgactagagagaggcttaggaaaaaggagttagggggttgggtaactggagagtcagtgtttcctgcccaggcaagaayaaaaggcatctcttttttcttgtgcaagaagtgggagttagaatagatcttgacattgacaaaagtccttaagaacatgccaaggatttaccacttctctaaccctcacaagatcaatcacttggtaattgctgtgataacaactcagcaattaccaagtgattggttttgtgagaatgctt

SEQ ID NO: 312530 - DNA, 496 bp, Homo sapiens
ccttctcaatccacgaagggcaaaaataaggtcattaataagaagactgaaatttagctttcacttattaaaatagaaaaagacctacttaccagtacttcagtctcagtttatgtactatgtataatccttactgattcaatgataatgacataaaggtcagaaacctgcaaaccactattcaaaaatgtagctaccagagtatcatcagcaaattcaaaaaaaaaaacacattatgaattacatattaacactttgtcctcaatttctcccttcatttagccaattaaaaactttatggcaaaaaaagcttatttaccttccaaaaacatataacacctcactaaktgatttttctcctctacattctaaaaatttagataaaagttgcctcaatgtaacttggcttaacctgctaaataattctcatgtaataagtcatctgcaattataaaatcagtaaagttcatttagcattacatatccagtttgtata

SEQ ID NO: 312531 - DNA, 550 bp, Homo sapiens
tctcaggcacaagctccatgagaggcaggcaggcttctggtctagcctgtgatagtatgattctttgattaccatcaatttggtaattctcttagggctaaagaaccaagtgttaaatacatcaagttgaacaaaacaccctgagagagacacatatcccaaagtatttggcttttaagatgaatgtgaattcttatatttttaaatattgtatttcacatttttgggaagttcctctcaaactctcactgctagccacagaacaattccaaaacgatggctcttctttgatggcccaaagaaacggtttcagagaagcccccagtgctcagaactccatagtcaacatttatgggtgraattgagcttgcagagcaaatgtgccagctgcttattattgtgaggaggatgtatgggaaggagggtgatctctgtggctaatggagtcccggctacaccactgaacaatggactggaaaacctaaaatcaaagtctttctgttcctgccctgaaggactccaataaacttggtgtcccaggaaatcctag

SEQ ID NO: 312532 - DNA, 339 bp, Homo sapiens
tgcatgggttagggcttattctggggcaaatgcagactggaaacaaatccagcacctaccccaaccttggagtgaatagaatcatctccaaattccctctgagtgtgcaaatgcaaattctgggctcatttctggaaagtctgattgagcagatgtgaggtgaggcctggttatctgctataagcaccctcgggagcttccaagcagtaagccaaggcccargctttgacaaacactgtctaacagtaataaaccacccagctgactcacatggccaaaaattggaaacattttaattcctgtaagattgaaggtgaacatctgtacaccaagggttat

SEQ ID NO: 312533 - DNA, 600 bp, Homo sapiens
tatatggtcacctctttgggaaacgggggtagaggtagagagaggaggtgtgaaaaagcaattgtgcacagtggaggtcaagtttaccaggaaattgtagtaggattaccagatagtgctgagatagggtaatcatgaatacgtagagaatccaattgccttgttgtatgacttcttctctagcagcatttggctgctggggtgcaaatactggaaaaactaagttgtttcattcaaaacagacttggggatttttctaaatttttctatgtatggtaaaaagcagataagggacagagttgagggtactggtatgagtgctactgctagtaatatgatgtttgtggaatctcagctggaaacaaagacatgaagagaggcttatggattgggagaaagataggtgagagractgggagtctcatttaatgtaaaaactatggttggggcgatagttgaacaaacaagtatgtatttatctgcagacacaaatagtaagtatatacattcctttattagggtagcccttgcacttataaagaaaccttcctcaaaaaggaaatgtacaaaatgatgaagataccatagtttatttcaaca

SEQ ID NO: 312534 - DNA, 550 bp, Homo sapiens
ctccaggggtgagaggtaaattctacaaagatgcaggggaccaccatataagtgaagattctagattgatccagggcatgctgggacatcctctccaaaataaaatacaaatgtttgcatctcacaccttccatcattaagaaagaagcacatttggtaggtgttttggggttctggtacagcacatttggaatattgttccatcccatctattggatagcccagaggctgccagctttaagtggggccctgggcaagaaaagactctgaagtagattcaggctgagggccaagtagccctgcttcttgaaccatacaacccagtagtccctatggtgcttgaagtatctgtggtaagaaaagatgctgtgaggtgtttcatcacaagctataataggagcattgcattgtagacccctaatatttttsagcaggggcatgccatctgcagcagagaaccacgcactatgcatgacccaaaagcagctattagtacactactgagcctcagtagagaaaacatatctcatcttagtaaaaatagagcatg

SEQ ID NO: 312535 - DNA, 558 bp, Homo sapiens
aggttcatgcagagtggcaatggcttgacaagttggtcagaagcttggaaagagaaatggaatatcagggttaaaaagatctgagaggctgggtgcagtggctcaggcctgtaatcccagcactttgggaggccgaggcgggtggatcacgaggtcaggagatygagaccatcctggctaacacagtgaaaccccgtctctactgaaaatacaaaaaaaattaaccaggcgtggtggcgggcacctgtagtcccagctactcgggaggctgaggcaggagaatggcatgaatccgggaggtggagcttgcagtgagccgagattgtgccactgtgctccagcctgggcaacagagcgagactccgtctcaaaaaaaataaataaataaagatctgagaaagggacaaaagggacatatggatttataggatgggcaaaaatcatgtaacaaagtaaatatgatggaaaagaaaacaaggaattactttaattttaggttagtactgggtacaattagactttccttttgattttaggcaactttgttgtttttaaagg

SEQ ID NO: 312536 - DNA, 558 bp, Homo sapiens
aggttcatgcagagtggcaatggcttgacaagttggtcagaagcttggaaagagaaatggaatatcagggttaaaaagatctgagaggctgggtgcagtggctcaggcctgtaatcccagcactttgggaggccgaggcgggtggatcacgaggtcaggagattgagaccatcctggctaacacagtgaaaccccgtctctactgaaaatacaaaaaaaattaaccaggcgtggtggcgggcacctgtagtcccagctactcgggaggctgaggcaggagaatggcatgaatccgggagktggagcttgcagtgagccgagattgtgccactgtgctccagcctgggcaacagagcgagactccgtctcaaaaaaaataaataaataaagatctgagaaagggacaaaagggacatatggatttataggatgggcaaaaatcatgtaacaaagtaaatatgatggaaaagaaaacaaggaattactttaattttaggttagtactgggtacaattagactttccttttgattttaggcaactttgttgtttttaaagg

SEQ ID NO: 312537 - DNA, 578 bp, Homo sapiens
atatagcaatttacagtcatcagaaaattagaatctcaaaatctaaattataagggtataagtgagctagatacctatactttttcctaatagctcttattcacaaatacatgactgaaaggatggaagaagagtgtgtgtgtgtgtgtgtgtgtgtgtgtgtgtgtgtgtgwgagagagagagagagagagagagagagagattgagaattgaggaggagggcagacctacctagaaattcaataccttgtccagagagagagagagattgaaattgagaattgaggggaaggggagacctacctagaaattaaataccttgtccagcactggaagttcctaatacaacttgttagttctgccaggaaccaccatggacagttcccatggcacgcctttgcttcagagagaatcaccacgttcttggggtaagtacattctgcacaacccattaactccatgcaaaagtgaccatatttctcattgttgaaaggtgtgaagttctaggataaacagctagatttatcatcttttcaagtaaaaggaatatttgagtcatggaatgccacttgcagtt

SEQ ID NO: 312538 - DNA, 641 bp, Homo sapiens
caaaaatcagacattttgtatttcctccttggataaatttgcaaaaaaacctcatcactttgtagggttctcttgagggtgaaacttaaatccatccaaaaagtgttgccttctgaacttaattgctaccaaattattttatttgcataagccaatttttactgggtgaagcacaatttgtaggatgaagtttttctgaaaggcataatggggaaaaattaattatagtgctctagagttcacccaaaagcacagaaaatacacattaataaatgactttgtgtggatatctggagctcatagaggtatggctatttctctccctgagataggaatgactttttcccaggtactctggaagccatggtagctttggtagmcatattactgaaatatagcccaaaagtagacaggcactttaggcttgccacttcatttcaccaaaatgccgttctacatcaggtctctgaattgtcgtttcactcagagtttattaatctaaaatttgctttctcgcttgaagagatgaaaattagagatgctttcctcatgagctaccctctcttactatgaaaccccaagagagtactgttcataaatgaaccatacatgaaagaggaactatagctagagaacaaaaa

SEQ ID NO: 312539 - DNA, 579 bp, Homo sapiens
ttagtaacgccaggtattgctctcagcactttgcattcttattctyatcaatttattgtatttaattctcacagcagccctgccagtcagatgctttatcccatttaacaaatgtgaaaactgaggcacagaggttagacaattcccttatggtcacatagtaagtggtagagctgggatcctgatatggtttggctgtgtccacacccaaatctcatcttgaattatagttcccataatccccacatgtcataggaggaacccagtgagaggtcatagaatcatgggggcagttaccctcatgctgttctcatgatagtgagttctcctgagatctgatggtcttataaggggcttttccccctttgctcaacactcattctctctcctgccacccgtgaggaggtgccttctgtcatgattgtaagtttcctgaggcctccctagccatgtggaactatgagtcaattaaacctcttttctttgtaaatcaccaagtctcgggtatttcttcatagcaatgtgagaatggactaatacagatcccaagccagaggtttaacccacaccccttttcct

SEQ ID NO: 312540 - DNA, 579 bp, Homo sapiens
ttagtaacgccaggtattgctctcagcactttgcattcttattctcatcaatttattgtatttaattctcacagcagccctgccagtcagatgctttatcccatttaacaaatgtgaaaactgaggcacagaggttagacaattcccttatggtcacatagtaagtggtagagctgggatcctgatatggtttggctgtgtccacacccaaatctcatcttgaattatagttcccataatccccacatgtcataggaggaacccagtgagaggtcatagaatcatgggggcagttaccctcatgctgttctcatgatagtgagttctcctgagatctgatggtcttataaggggcttttccccctttgctcaacactcattctctctcctgccaccygtgaggaggtgccttctgtcatgattgtaagtttcctgaggcctccctagccatgtggaactatgagtcaattaaacctcttttctttgtaaatcaccaagtctcgggtatttcttcatagcaatgtgagaatggactaatacagatcccaagccagaggtttaacccacaccccttttcct

SEQ ID NO: 312541 - DNA, 579 bp, Homo sapiens
ttagtaacgccaggtattgctctcagcactttgcattcttattctcatcaatttattgtatttaattctcacagcagccctgccagtcagatgctttatcccatttaacaaatgtgaaaactgaggcacagaggttagacaattcccttatggtcacatagtaagtggtagagctgggatcctgatatggtttggctgtgtccacacccaaatctcatcttgaattatagttcccataatccccacatgtcataggaggaacccagtgagaggtcatagaatcatgggggcagttaccctcatgctgttctcatgatagtgagttctcctgagatctgatggtcttataaggggcttttccccctttgctcaacactcattctctctcctgccacccgtgaggargtgccttctgtcatgattgtaagtttcctgaggcctccctagccatgtggaactatgagtcaattaaacctcttttctttgtaaatcaccaagtctcgggtatttcttcatagcaatgtgagaatggactaatacagatcccaagccagaggtttaacccacaccccttttcct

SEQ ID NO: 312542 - DNA, 565 bp, Homo sapiens
ttgcaatgagccgagattgcaccactacactccagcctgggtcacagagcgagaatccatctcaaaaaaaaaaaaaaaaaaaaaagaaagattggcttgtcatgtggcaaaagactggaccccacagtacacaaaagactcttagtaaaaaatttagaaagaaaagagcaaaactaaagaggattcagtcttaccagggcttcagtctggctttgactcagcaccacccacaaattggttactatgattattcttcaccctgtctgcctagtgcagaaacgagtgaatccactcttaagaaaggtaagatcatcaataacctttacgtttttaaactagcatttgggattccatttaaaaaaatatgacacacaccaatagaaaaaaaaaaagactataaaagtagacttataggtgatcaagatattggagttaayggacaatgactttgaaataatatgtttaaatcaatcaagaaaaagatgaagaaaatagacagcaataaataattccacaagacaactggaatccttaaaagataatcaaatcaaaaatctagaactga

SEQ ID NO: 312543 - DNA, 653 bp, Homo sapiens
cttaaccacactctgttgctccctgggaaaagctcatggtaggttttcctctatgcatatatgttgacttcagagcgcaaaagctttgcccctggtcagttacactccttgtagcttactacaaggagtacctagaggcacattctcatggctaccatataaattcaactaaaacaggcaataaattaaatgtaaatttattaagtgctccaatttaaaggctaagattgtcagacttaataaaaattggtgaggactgtgaaatgcaaataatgagtctttaaatataagtacatataaagattgaatgcaacaataaggaaaagtagatactattcatagtataaagctggtatagcactattaagcaaaatagaaataaagcaagaaacattttgaattcttaagtacttgaatagaataaataaaattgccatcatttcaagataacatgaccaaataagtagaaatcctgaaataatcaacagccgcacaattagcattratttttgattataagattatttgagaacaggtctatttaaaacaccgaatttatcttttgatatgatttagctgtgtctccacccaattctcatcttgaattatagttcccataatcctcacgtgtagtaggaggaacctggtggaag

SEQ ID NO: 312544 - DNA, 627 bp, Homo sapiens
taattcattaaaaaataaaaacaaaaaataaagttcctcattacttatacaaagtcaatatggtgttttgcagtgaccaggtagactcaaagcattcctatggagacataaacaatcctcttcaatttccgccattccgtgtcagtagaattcactctatcatggaatgcatgtcctaccactgtgaatgcaggccagaagagcctgtggatatgatccacaccaacaaatcctagtcctattctgcttatagagtatccctttgaaacacttcattcttatatactttctttaatactttttgttttgttttgtttttggagacagggtctcactctgttgcccagatgagtgcagtggtgcaatcatggttcactgtagcctgggctaaagagatccacccgcctcagccccctaagtagctgagaytacaggtgcacgccaccatgcctggctaattttttttatttcttgtagagatggggtttcaccattttgcccaggctggtctccaactcctgagcacaggcaatttgcccacctcagccttccaagagtgcctggaggaaacacttgattatttaaaaaggaaagaagactataacatattccctcagagaatacagc

SEQ ID NO: 312545 - DNA, 569 bp, Homo sapiens
tttgtcagttatttgagtagtgaagagtgtgacaagtgaatatgaagattgtgaaagaagaaagggatatctacctcattagatttgtatgttaggtctacagcattttccttctagaagtaaaccacaaagttaggtataggagccaccggcaatcattactcagttgcttaaaatgcatgtttccagagtttgctcaaaagtagatactctggagttccactgagagctgatgttatyaacaacgttctatatgatttattttacatattttatgttagcttggtaagaactaccaatctcatgttaagacatgagacctactcccttatatttttaattgtatgatacattattattaactatagatgcaatgttgtacagcagatctctggagcttattcatcttgttttactgaaacttcattcctgctgatgaacaactcctcctttcctgctcctcccagcccatggtaaccaccatttcactcttcgattctatgaatttgactatttagagatttcatataagtggaataacgtagtgtttctctttctgtgactggttt

SEQ ID NO: 312546 - DNA, 543 bp, Homo sapiens
ttactatctcttttcctcctcagggagctgaaggcagctgtggttttcgttaattcgctctgtgctgagccagggtgggagtcatatagcatctacgttcaagtcattgtcttcattctctcctgggcagatggtgctagatctatgtgacttttaagactggtgagacacaygttaattttgggagaagccctagggaaagtggtgtgctagactcatggatcaactttttccatccccaggaggaagttcagatctgggatttttttatccttttgctctgtgctgagcaaggtagagaaagcaatgacatttgccagtccaaactgctgcctccattctaccctgaatagctagactgtgctagatcatcagaatttcaaggctgaaaggacaaaagccagtcctctaaggaacctcctcagagagatggacttgcaaatcaacccattcccttttctgggtaaaggtaggagctagggagtctctttctgatcatatggcactgcaccagtgtcaaggtctctggtgaaaagttgtcct

SEQ ID NO: 312547 - DNA, 535 bp, Homo sapiens
cactactttgactgcgcatttctgcttctgaggaaaatccaaaagtaaaccatccaatttgaatagattagtctccttttaaaacttctttaaaacttaagtttatcctgtgaaatggttgcaaaatcaagaagcctgatagttttctctttggagaaaytgaatcgcaggaactctagtgattaggacacaggtatgggggtgcagtaggaagaatctatatcaaaagcagatattaaaattctatttatgtaattggaagatcaccaagctccttcttctattcaactcatatttcagaagaatggcacctaaagtgatcatttctgaggtctgagtgtcaggattttatttagaaaaaataatcatcccacgaaaaaaggctcaaaattagatacgcaacaagtaatcataccctgaagccaaacccctcaacttctatttatttatattatttgtataaatgtaaagtgtataagtgcagttttgttacttagctataccgcatagtgaagtttgggcttttagggtaacc

SEQ ID NO: 312548 - DNA, 535 bp, Homo sapiens
cactactttgactgcgcatttctgcttctgaggaaaatccaaaagtaaaccatccaatttgaatagattagtctccttttaaaacttctttaaaacttaagtttatcctgtgaaatggttgcaaaatcaagaagcctgatagttttctctttggagaaattgaatcgcaggaactctagtgattaggacacaggtatgggggtgcagtaggaagaatctatakcaaaagcagatattaaaattctatttatgtaattggaagatcaccaagctccttcttctattcaactcatatttcagaagaatggcacctaaagtgatcatttctgaggtctgagtgtcaggattttatttagaaaaaataatcatcccacgaaaaaaggctcaaaattagatacgcaacaagtaatcataccctgaagccaaacccctcaacttctatttatttatattatttgtataaatgtaaagtgtataagtgcagttttgttacttagctataccgcatagtgaagtttgggcttttagggtaacc

SEQ ID NO: 312549 - DNA, 535 bp, Homo sapiens
cactactttgactgcgcatttctgcttctgaggaaaatccaaaagtaaaccatccaatttgaatagattagtctccttttaaaacttctttaaaacttaagtttatcctgtgaaatggttgcaaaatcaagaagcctgatagttttctctttggagaaattgaatcgcaggaactctagtgattaggacacaggtatgggggtgcagtaggaagaatctatatcaaaagcagatattaaaattctatttatgtaattggaagatcaccaagctccttcttctattcaactcatatttcagaagaatggcacctaaagtgatcatttctgaggtctgagtgtcaggattttatttagaaaaaataatcatcccacgaaaaaaggctcaaaattagatacgcaacaagtaatcataccctgaagccaaacccctcaacttctatttatwtatattatttgtataaatgtaaagtgtataagtgcagttttgttacttagctataccgcatagtgaagtttgggcttttagggtaacc

SEQ ID NO: 312550 - DNA, 532 bp, Homo sapiens
tgccataagaaagtattatgttggtgcaaaaggaattgtgttttttgccattacttttaatagactgggttgttaaacaacagaagttttcctatagttctgggctagaagttcaaaatcaagttctcagcagctttaattttttctgaggcctttgaaaaaakaattttctaggcctctctttatggtttatagatgctgttttcttttgttgtctcttcacatcatcttttttctatgtatatgtctgtgtccaaatttcacctttttataaggacatcagtcatgttgattacttctgtaaaggccctatctccaaatatggtcacattttcaagtattggggtttaggactttaacttatgaattttatttattttattttattttattttttgagatggagtattgctctgtcgcccaggctggagtgcagtggcacaatctcggctcactgcaagctctgccttccgggttcacgccattctcctgcctcagcctcccgagttgctgggactacaggcgaccacca

SEQ ID NO: 312551 - DNA, 631 bp, Homo sapiens
cagatgaagaaaaaactaagggaattttcmtcaaaagcctttgtttaagaaagactaaaaattttttgaaacaaaggaaaaggtagagaaaggaagcttagaacatcaaataggaagagaacaacagaaagaataaaagtatgagtaagcacatttttcttctcttgagtttttaaaattatttttggcacttgaaacaaaaacactttttattgtggttctcaatgtctgtacaaaaaatatttaagataattatattataaatgttaaaggtaaagctatataaaatgaggtaagattttcatacatcacttgaattgtaaaacagcaataccagaagttcatgataatttatgtaggtatggtgtcatatagaaaacaaccactaataaagctaaacaaagagatatactaaaatatactatataaaaccagtatggaactctaagaaatatttaagtagttcacaggaagacaagataaatgaaacagagaaacaataaaaaaatcaaatgactgacttaagctctaatacttcaataattacattaaataccaacagtctaaatatagtaattaagaaaaaaatgggtagattgtatttaaaaaaattaagcccaatcatatgttg

SEQ ID NO: 312552 - DNA, 616 bp, Homo sapiens
ttcaccatcttggccaggctagtctcgaactcctcacctcaaatgatctacctgccttgacctcccaaagtgctgggatcgtaggcgtgagccactgcacctggccgttagatgcctttcttaacttccaaatccattaagtctattctctttccaaatacttatcacttatacaactataagctaatctcagttctttttttcagctactggttataaaattattattacatttcaatagttgtcattgagtcattttgacagcttcatacataagtttgcagatgctcacaagtgttagttaccrgtaaaaaaaaatttcaggataactgaagtatattaacttatttatatgtaataactgaaaccaaattgggatattatttgctgaaataaagtcatctttctgggaagtcacttcttagagaatggttgtatattttatatataatatcagttactatatttccaaatgttagaattagagtccagaagtttttaaaaatacaactggattttaaaatacggccaccatttctgacatatcaatattagttaatgtttcttgctatgtacataaaaagtatgaaaaaatatgcacaataaataaacactt

SEQ ID NO: 312553 - DNA, 604 bp, Homo sapiens
gaagacagttcaatagtgctagggagcacctattccactttcaagcaggacagtgktaggttcaaaatgttaggactccagggaaaaatataaaacttttatattactgctgtcagtggtgtgctgaagccagttgctatggactgaatttttgtcccaacaaaactcacatgttgaaactctaatccccaatgtaaccatatttggatataagggatataaacagacaattaacattagattaggtcataagggtggggcctgatctgataggattagtgtccttatcaaaggagaaatgagaccgattgctctttctttccccacattcagaggaaaagccgtgagaggatgcaatgagacgccagcccatctgagagctaagaagagagccctcactagaaattaaaccctgccagactttgacctgagactttttaaaacttcagaattgtcagaaataaatttctgttgtttaagccactcaatctacagtattttgttatggaaacctgagcaacgtaagatactagttcatactgattcttgagagtcaatggttaaatatttaaggcttttgccatccccttttaaaatactaata

SEQ ID NO: 312554 - DNA, 604 bp, Homo sapiens
gaagacagttcaatagtgctagggagcacctattccactttcaagcaggacagtggtaggttcaaaatgttaggactccagggaaaaatataaaacttttatattactgctgtcagtggtgtgctgaagccagttgctatggactgaatttttgtcccaacaaaactcacatgttgaaactctaatccccaatgtaaccatatttggatatargggatataaacagacaattaacattagattaggtcataagggtggggcctgatctgataggattagtgtccttatcaaaggagaaatgagaccgattgctctttctttccccacattcagaggaaaagccgtgagaggatgcaatgagacgccagcccatctgagagctaagaagagagccctcactagaaattaaaccctgccagactttgacctgagactttttaaaacttcagaattgtcagaaataaatttctgttgtttaagccactcaatctacagtattttgttatggaaacctgagcaacgtaagatactagttcatactgattcttgagagtcaatggttaaatatttaaggcttttgccatccccttttaaaatactaata

SEQ ID NO: 312555 - DNA, 582 bp, Homo sapiens
cactctgcggtctaacgttcctaaatgttatgtattgcagactgaccaagccctggtgtggggtgtggtagagtgagaggctggttacctatggcagcagttctcaactctctcctgtggagaaatccatgatggatggtgtttacctgagtggcccactcccgcgagggtccctaggactccttggcaagcaaggtgtaacactaccagtcctttctctttaactctagagataacatattgtaatagatgtaaaagtgagagtgacactttttcagagatacgattgaatccacttcaaatgtatataaaacaactgtttgtgaacattttaatatttgtgaatattttaatattgatctacctaatagccaatcatgtcttgaactatctcagattatagtagagaactgtctactccaaacctcatccctctcttaatcctctcttattcctcttatyctatacaagcttgttaccttctacttcaagaattgaaatcattgtattccatgataaattgcatactattacagcgggaatactacacactcaataatttccaattccttcctcctcctt

SEQ ID NO: 312556 - DNA, 533 bp, Homo sapiens
gggaagctttgtcccagaggggcgctttcctgtatgaggtgtctgttggcccttactgggaggtgtctcccagttaggctacatgtgggtcagggacccacttgaggaggcagtctgtcagttctcagggctcaaatggagcyactgctctcttcagagctgtcaaacagagacttttaactttgcaggagtttctgctgccttttgttcagctatgccctaccacagaggtggagtctatagaggcagtaggccttgctgtgctgtggttggctctgcccagttcaagcttcctggctgctttgtttacctactcaagcctcagcaatggtggatacccctccccccaccaggctgcaacctctcaggttgatgtcagactgctgcgctagcagtgaggtaggctccgtgcatgtgggacccactgacccaggcatgggagagaatctcctggtctgctggttgctaagaccatgggaaaagtgcagtatttgggtgggagtatcccatttttcctggtacagcctggcaca

SEQ ID NO: 312557 - DNA, 584 bp, Homo sapiens
gggcagctatatagcacaccagatgggggcagcacgtattactataaattgatgagcttcctaaattctgtaaatttactattttttcctctaaagttaattctgagcttgacattctcaacagtatcaccatttttattatctttttcatttccatccttcatacctgaatatagcatagtagtttttaaagcaatttttctttctttttttttcaagatgcgatcttgctttgttgcccaggctggagtgcagcagcacaatcatgcctcactgcatccttgaycttctaggctcaagtgatcctcccagctcagcctcgcatgtagctgggaccacagacatgcaccactgctcctggcattttttttttcttatttatagaggcagggtttcactatgctgctcatgttgatctcaaagtcttgagctcaaatgatcctcccgttcagcctcccaaagtcctgggattacaggagtaagccaccacacccaccataaagcaatttcttatacattagcatggtgtttctactccaggaggatagaaatcagtatttttatagtatagagacattaaaata

SEQ ID NO: 312558 - DNA, 519 bp, Homo sapiens
ccataacacaaattatcattctcaacctctctctctcacttttcccacccctctttcttccctcctcccttgctcaaataaggccttgcttgtccctaactctgatgcctcagatatgtctgagcacgtaaccaaatcatacccccagatttccttgtgtatctatcatttcttcagggcttggaaaagccacttttcttccctttagagaggtatcaaatttggttaccattaytttttgtgccacttaaagccattgatagaatgttcgactcttttagcagaagtgtaatatcataatagcactgcaaagcatgtcaaactactggacatctttcaggctgagtgaattttgaggcagtgttcaatgtgaactgttatccatcttctgtagcagtatttctcttttcttacagaaaccccactcttttttcttcatagcactttttatatctcctctaattaacacaatgtcattctaatctctttgatgaaattagtgtgtttggtatttctata

SEQ ID NO: 312559 - DNA, 541 bp, Homo sapiens
ctatccttctgtgcctgatttatttcacttactataactttctctaattccatccatgttgtcacaaatggaagaatgtccttcctttcttaaggctgaatagtatttcattctgtgtatgactgaattttcttttttcttttattttttacattaagtagttttaatttcaagtagcctactgaactatgttaactgcttatataattgggataaactgtgtaagtgtatttytttaacttttgttttaagttcagggtatatgtgtaggtttgttatataggtaaattgcatgtcaaaagggttttatgtacagattatttcatcacccaggtaataagaatactaactaataaatatttttctggaatattttccacctctcaccctccaccttccaataggccccagcgtatgctgtgtccctgtgttctcatcatttagctctcatttataagtgagaacatacgatgtttagttttctgttcctgcattagtttattaggataatgaccttaagctctatccatgttgctgcaaa

SEQ ID NO: 312560 - DNA, 662 bp, Homo sapiens
attccaaaaactgacagagacatttgtaaacctgcccaaagattataagttgagaacccaaagaaattactgtaakttgaatatataaatatcattaatatataacaatgatttatatcattaagaaattcaggaagctaagtttgttataaataatactgggtttctgagacctgcttttgccatgagacagaaaaaattgagctcactgctcattggtcaaacaagcataaaataaattactgaaacctgaggatttcaggtgttaggttatgcaaaatgaggacttgtgactaagcacaattgtgttttccctccccaaagtgcttggcaatcctgacctataaatctctctaatagcccctggagggagattgtggcattatcccattttatgggtcaggactctataaaatgcaggcctgtgaatctgcccaaggctagagaaaaatttgttttagagtttttcataaggcttaagcggttgtgctgaagtagaaagaaaggtggacttggagcctgtttatgttacaaacttggttaaatctcttaattcagttttagccccagtttcttcaactgatacatagtttgtgtattttaatcctgtctccaagggaatgcttcaccattgagaacagaggagccataagattgattga

SEQ ID NO: 312561 - DNA, 662 bp, Homo sapiens
attccaaaaactgacagagacatttgtaaacctgcccaaagattataagttgagaacccaaagaaattactgtaatttgaatatataaatatcattaatatataacaatgatttatatcattaagaaattcaggaagctaagtttgttataaataataytgggtttctgagacctgcttttgccatgagacagaaaaaattgagctcactgctcattggtcaaacaagcataaaataaattactgaaacctgaggatttcaggtgttaggttatgcaaaatgaggacttgtgactaagcacaattgtgttttccctccccaaagtgcttggcaatcctgacctataaatctctctaatagcccctggagggagattgtggcattatcccattttatgggtcaggactctataaaatgcaggcctgtgaatctgcccaaggctagagaaaaatttgttttagagtttttcataaggcttaagcggttgtgctgaagtagaaagaaaggtggacttggagcctgtttatgttacaaacttggttaaatctcttaattcagttttagccccagtttcttcaactgatacatagtttgtgtattttaatcctgtctccaagggaatgcttcaccattgagaacagaggagccataagattgattga

SEQ ID NO: 312562 - DNA, 662 bp, Homo sapiens
attccaaaaactgacagagacatttgtaaacctgcccaaagattataagttgagaacccaaagaaattactgtaatttgaatatataaatatcattaatatataacaatgatttatatcattaagaaattcaggaagctaagtttgttataaataatactgrgtttctgagacctgcttttgccatgagacagaaaaaattgagctcactgctcattggtcaaacaagcataaaataaattactgaaacctgaggatttcaggtgttaggttatgcaaaatgaggacttgtgactaagcacaattgtgttttccctccccaaagtgcttggcaatcctgacctataaatctctctaatagcccctggagggagattgtggcattatcccattttatgggtcaggactctataaaatgcaggcctgtgaatctgcccaaggctagagaaaaatttgttttagagtttttcataaggcttaagcggttgtgctgaagtagaaagaaaggtggacttggagcctgtttatgttacaaacttggttaaatctcttaattcagttttagccccagtttcttcaactgatacatagtttgtgtattttaatcctgtctccaagggaatgcttcaccattgagaacagaggagccataagattgattga

SEQ ID NO: 312563 - DNA, 606 bp, Homo sapiens
ctcttatattttaccctggtttgtaagtatcatcaacatatcatatgctatttaggtgacaaatatatattcagttaaggtattgttaattttaggatgcatgctctatatcaataataagtctggcttggtcactgaattccagctggacactaatgacccaatttcttgatactcacactcagcaagtttgatttcagccctgatttttagatgaacacaaattcttagccctttcatatagggctccacatttaagccctgtgatatagataacttttggtcttccatagtcacttgagtcttacttaacctgcttccatcaattctaaacccaatatcccctctacaaatactttctttatctaatgtcttcactctttcaacttggttaactttaataaatctttaattcttttagttactttcttcttaaatgaatccawagtcgttccaatcttcttcttgcaagcagctttatacacagtatctcattccctatcattcatcccattagctttctgtctggtgcagcatagaattagtctcaccttacattcatttcagcatgattaagagagaggaagaaaggaagaaaaagagaac

SEQ ID NO: 312564 - DNA, 561 bp, Homo sapiens
agcttgatgttctttttagttttgtttaaatttggatacataaaatgtaaaactctctacatttggtaagaataggttttgatgcttcctcaggtcagaaaataatcaagactgaatgttgaggtgttgggagtaatgtagtagagaaaacagtgcctagagaaatatatcaaactgccatcctcaagcaataattttttattcattcattcmaacacaggttttacaagaaacagactattagggaggcaggataataaaaaagggattgtacatgagaataaagtccaaagcttctgaaattaagtaaactccaaaactctccatgaagaacctgtagcattaggagtttttctgcaagccaggcatccatttatctggtgtattaagcaaatctttacaccaaattgcagagttagaaagaaaatgttctgagaaatatgtagatcttctgagagttctatatccaacctttctactagaccagctctttgccagttattaagtggtcctaaaatagagccccataagtcataatcaggataaacagaaaacactgat

SEQ ID NO: 312565 - DNA, 587 bp, Homo sapiens
tagtgaaaagaatgcttttcaatatccttccttcttgggaaggctttccagatttttgaaaggacttgggtgttatggtctaagctctgttggccttatggggcaccccaagtccagtaatgctgttggtcttacagatttgtagagctaccaccctcatgacctcgggcaatatctggaagaattctctgtattaccaactaggcgcacttgttctcctctctactttctcccaaacaaatggagcctctctctctctgttatgaggcacctaaatgtgggggtagagtgaaacaagcactgcggtagcaaccatcagaagaactgcactggatcagaccygctgtcagtacagcactgagtcttgcccaagggctgctgtaatcactgcctggttaccgcctgtctgctcaaggccctggggctctacaatcagcaggtggcaaagccatccagacctgtgtccttcccttcggggcacccccaccacagtcccatggaaagttctgccagactactgccaatgttccttctagggccaagggctcttcagtcagcttgtggtaaatgctgcctggcctgggact

SEQ ID NO: 312566 - DNA, 436 bp, Homo sapiens
aagcatatggagtgaagtctagaggaaagaattagcaagccttcaagtatggagtcacatagaatgcacttaattctccccagtaaaaatgtgtgacaacacgtgggaagtattgataagaagggacactcttttgagcctgatttttcttggtttttattggcggtcagtcacataagcctrtactacctatgtggatgtttgttgcttaagttccagactcccagagagaaggtaggcactcagaatagatgacattgatataatgaactacctgaacaaactggcacagaatgcttcaaaaacactcttatcagacagctcagttcccaggagtcagctaagggcctgtcatggaaacaggacttttttggggaatgtgcagggtttgagcaacccaggcctgctgaattaattctttctcacatacatgtaa

SEQ ID NO: 312567 - DNA, 596 bp, Homo sapiens
gtaggcactcagaatagatgacattgatataatgaactacctgaacaaactggcacagaatgcttcaaaaacactcttatcagacagctcagttcccaggagtcagctaagggcctgtcatggaaacaggacttttttggggaatgtgcagggtttgagcaacccaggcctgctgaattaattctttctcacatacatgtaaaagtgctgtatttggctttttgattcctcttccaacgtgagcagcacttctggaaaaataatactaagtaacccaagtctataccttctttaatttgaaactagccacaaacaaaattctgagactaatcatgttgatgctgttggccccagattctcttttgtatcttttctccaccttcacaactcacttactttctcatgataggttcattataagttcaagttctttcttcttccygcataagccccattttcagagaggcttggagactgccactcaccacttaacagtgagccgaaatctctcctttgttttttcacagggagtttatacctcagtgtcagctctttctgtcaaatgaacaggtttgctccatggtaaatggagaaga

SEQ ID NO: 312568 - DNA, 595 bp, Homo sapiens
aaccggagggaaaaaaaggaaaaaacaaacaaagtaagaggaatatatcttggtttcatttgtgtcaaaacagcaataaagcagaaaaatatattcagccgaggtgctatttgggttttatttataaaggctacagtctctgccctaatgttcatgagctttgtccttgttgcctagttacagatttataatttttgtctctctggttattgatggctctaatggagagagcagtgactgcgggcctratgaaaacactttaaatctctattcagaaatgttaacgttttgtgtgtgtctggtgttgttgattacagtgatctggggaagggatggtcttaagagaaaattagtgagaagcaggtagtctcaaagcgggtctgagacagcctatcttgttctgttggctagggcatttttaaaaataagttattgtatgaaaagaatttgcttttgccaaagttattgagttggttagtaattctacctcagatgtatcacagatatttgaggtgctgtggttatgttattaaaggcgtctttatcagactcatgccagaatcacctgcagaacaagcaaattcaatgataatca

SEQ ID NO: 312569 - DNA, 595 bp, Homo sapiens
aaccggagggaaaaaaaggaaaaaacaaacaaagtaagaggaatatatcttggtttcatttgtgtcaaaacagcaataaagcagaaaaatatattcagccgaggtgctatttgggttttatttataaaggctacagtctctgccctaatgttcatgagctttgtccttgttgcctagttacagatttataatttttgtctctctggttattgatggctctaatggagagagcagtgactgcgggcctaatgaaaacactttaaatctctattcagaaatgttaacgttttgtgtgtgtctggtgttgttgattacagtgatctggggaagggatggtcttaagagaaaattagtgagaagcaggtagtctcaaagcgggtctgagacagcctatcttgttctgttgsctagggcatttttaaaaataagttattgtatgaaaagaatttgcttttgccaaagttattgagttggttagtaattctacctcagatgtatcacagatatttgaggtgctgtggttatgttattaaaggcgtctttatcagactcatgccagaatcacctgcagaacaagcaaattcaatgataatca

SEQ ID NO: 312570 - DNA, 579 bp, Homo sapiens
gatcaatggctctcaaaagtatagtacccagactagcagtatcaacatcaccagaacttgttaggaatgaaggttcgttgttcccatcctggacttcccaagtcaaaaattctgaaaggtggggcccagcaatctatgttttaataagtaatctaagtgatattgttgcactctaagctttgacaaccactgctctagaatgaggtttctcaacctcggcactattgacaatttgggcttggtaattttataaggggctgtcattcacactggcattgcaggaggtttagcggcacccctgaactctacctactagataacaatgaygcccattccatttgtgacagctaaaatgtcttcagacattgccaaatatctactgaagagaaaaattatgcctgggttcaaaaccactgttccagatctacaagttaaacttatttgcaatgtcttaaaatgaagatttctgtgcccaaactctttcagagtttgatttagtaagtctataaaacaaccctgtaatctgtattgttaactgggaccaggtaatggcccatgagccatactttgagtaacaga

SEQ ID NO: 312571 - DNA, 584 bp, Homo sapiens
ctttaccagagtgaaacactttggagacctactcttttgcttagtcattaatcaaatgaagactgaaaatttacctttatattaggcaaggggcaaattgtgtggtgctagtgcytgtagcaatgtaattataaaatggaactcatgctttcttcactccaggcaagtttcccagcatactcactctatttcatgtcactgtgaaatttgttggtttgttgttgtttcctgtcttttttctttggacttgatgctacaacaagagatcagaggctcagattctgcccctcccaggtctctgatcttttataaagttttctatttgtaaaatgaatggactgaactcagtcagtcttttattgtctttgttttaaataaatgtaatcccatttccaacaaaacttcactgaaaagtttaatgtgtgaaacattttaaagcacagctgctttgagcagattggactttccagagctttcatttgcccctgaggtgccttccgaaactcctggtctcaggttaatacaatttgaagagcatcaaactggatttttccctaactacttttagctccagaattattggc

SEQ ID NO: 312572 - DNA, 629 bp, Homo sapiens
aattatccatataaaacatatagcatagttctctgtgttttcaaattttacatagttggcctcttaaagatatttcatgcatatcatcattgcttatgagatatttttcatgttgatacatgcaatcctaatgtatttcttttactgaataatatatccttggatgattgtaatgtgtttatctatttatgttttgtcttctagggagacattgaaattttttctctaatattttgaaattagaactaactccctcaatggactctgttatccatgtctcttgggcacagctgtgagaactttrgagattacccataaggtacagttgacaattctgtaggataatgaaccttaagtgtcaatatcacaactcagtacttgtgctgtagtcctattttcaaatcagggtcatggatactgctacaggggttttcaatatcctcggccacacttcacatctggtaggagaggtttgatactcttctcttcattcactaaatgatattcatttttatgacttcaagaattttctatatgctgacgtcattctattcagtacctcagattcaaaattctgagctcaaagcagctgtttatttattaattcattcacttatttattcatgcac

SEQ ID NO: 312573 - DNA, 576 bp, Homo sapiens
aactgttcacatggacagactcaggacctccttgttagccagggtagtagaggccatggtgatagttgaggtcatgcgcaagttttccctttctttggtgcagtgttattctactgggagatgctgtaatggactgtgtcagtggcctccagccaggagatgatactttcagaagagtactagctgtagtaggagcagtgagatttgtgcttcccttatgttactgaagggaggtactctgatttctcaggtgatrggtagggccataaagcttccaaaagtttctgtcttttgtgtaaagccaccagggcaggcagagggatgtggaggttgggtcagcctgggtcaggcaggtccatgtggaggctggatcagggaggtccactctctggctctccttatgcatggcaagcagtgggccctgtagaagtcaaggggcagttccctggccactagagtaatgttctagagaggagtgtggctgcctctgctgcacagaagtgtttgcacagggaatggggagtagcaggtggcagtaagcctcacccagctcccacacacttggcaaggcagatc

SEQ ID NO: 312574 - DNA, 504 bp, Homo sapiens
atacatacatttgtttccaagcctctatactgagagcatctagaaagaataaaatccagtagcaatgagcatatctagtactctgatcttggttttccattatgggaaaccaagtstcctcaaataaatggctgattacaaggctgaggcatataccaagaatattttttttgtaccccaagtaaaatggggttcaaaaaattatagggacataccaaactgatataaggagacaaatcgaagagtctgccactggtcaaatataacacaattatgaacacatgtacttctctttaacatagcatcaagaaaaaatgtagaagtcataaagttagtgacataatttgactctgtgtctgcacccaaatctcatctccaattgtccccagggagacaaaatagctctgccattttcatttcccccaacagtatcctgagaattctgcatcatctccatcacttggtatagtgtcttgtaattttagtcattctaatagctatgta

SEQ ID NO: 312575 - DNA, 504 bp, Homo sapiens
atacatacatttgtttccaagcctctatactgagagcatctagaaagaataaaatccagtagcaatgagcatatctagtactctgatcttggttttccattatgggaaaccaagtgtcctcaaataaatggctgattacaaggctgaggcatataccaagaatattttttttgtaccccaagtaaaatggggttcaaaaaattatagrgacataccaaactgatataaggagacaaatcgaagagtctgccactggtcaaatataacacaattatgaacacatgtacttctctttaacatagcatcaagaaaaaatgtagaagtcataaagttagtgacataatttgactctgtgtctgcacccaaatctcatctccaattgtccccagggagacaaaatagctctgccattttcatttcccccaacagtatcctgagaattctgcatcatctccatcacttggtatagtgtcttgtaattttagtcattctaatagctatgta

SEQ ID NO: 312576 - DNA, 504 bp, Homo sapiens
atacatacatttgtttccaagcctctatactgagagcatctagaaagaataaaatccagtagcaatgagcatatctagtactctgatcttggttttccattatgggaaaccaagtgtcctcaaataaatggctgattacaaggctgaggcatataccaagaatattttttttgtaccccaagtaaaatggggttcaaaaaattatagggacataccaaactgatataaggagacaaatcgaagagtctgccactggtcaaatataacacaattatgaacacatgtacttctctttaacatagcatcaagaaaaaatgtagaagtcataaagttagtgacataatttgactctgtgtctgcacccaaatctcatctccaattgtccccagggagacaaaatagctctgccattttcatttcccccaacagtrtcctgagaattctgcatcatctccatcacttggtatagtgtcttgtaattttagtcattctaatagctatgta

SEQ ID NO: 312577 - DNA, 504 bp, Homo sapiens
atacatacatttgtttccaagcctctatactgagagcatctagaaagaataaaatccagtagcaatgagcatatctagtactctgatcttggttttccattatgggaaaccaagtgtcctcaaataaatggctgattacaaggctgaggcatataccaagaatattttttttgtaccccaagtaaaatggggttcaaaaaattatagggacataccaaactgatataaggagacaaatcgaagagtctgccactggtcaaatataacacaattatgaacacatgtacttctctttaacatagcatcaagaaaaaatgtagaagtcataaagttagtgacataatttgactctgtgtctgcacccaaatctcatctccaattgtccccagggagacaaaatagctctgccattttcatttcccccaacagtatcctgagaattctgcrtcatctccatcacttggtatagtgtcttgtaattttagtcattctaatagctatgta

SEQ ID NO: 312578 - DNA, 621 bp, Homo sapiens
ttaaccccataagaactctattacacaggtattattttaataatgttttatgttataaagccaaagctcagagaatttaattaacttacacaagattgcaaagtaacagaaccagtaatcaggcctagaaagtgtgataacagaacacttgtgttcaaccatccttctagctgatagatatcagttaaagaccctattaaaytttggaacagtttaaatagagaaaactaaaagcagaactggggagacatgtttatgttaaacttgttattttatgaccactgtttgaaaatccctagtttttcttttttttcctttttttttttttttttttttttttgacggagtttcactcttgtcacccaggctggagtgcagcgcacaatcttgctcactgcaacctccgccttccgggttcaagagattctcctgcctcagcctcccaagtagctgggattacaggtgcctgtcaccaagcccggctaattttttgtatttttagtagagacaggatttcaccatgttggccaggaatggtctcgaactcccaaccttaagcgatctgcccttctcggcttcccaaagtgctgggatttacaggcatgagccaccgcgcccggc

SEQ ID NO: 312579 - DNA, 566 bp, Homo sapiens
atatgtatttttttagttgagggtaattttaagaaatatatgtccttggtggaggaaggcagagaaaagctatgtggaaaaggttgaatatcaagagagacaaaagaataataatggaattttttccctaaagaggcacaatgttatgaaaacaagaagataatataagggtataaattaagatagattgaagaaactgtcayactagagaaataagaaattgagataaagatagacacaactgcagtgaggtttatatagaggtaaatcatttagaacatttttttctaattgctttatattccttgtggttaaaaaagagaagcaaaaacttttttagggtgattgagagttggtgaagaggttatgttctggttgtttttattgctttttttatagatacccaagtaaatgttggaataaagcaaattttttgtattggtctaagtgtgtggtttagtgcagggagatccaggaaattgtaaatgggcaagggtgtttaagttgcttgtaagtaataaatttaaaataatatactaaaaattctatgcttattaaacaagcat

SEQ ID NO: 312580 - DNA, 624 bp, Homo sapiens
aattacagtcattctttagtattagaattgatcttccttctgcctgaattcaccatggatcttccttcttggaagatcctgaaacccttttttgttctccaagttccattagaatactgagagctcaactccatttctgtaattatcaatctgagctattctcccctcagcttctttatatttcaactaccgctttctaatgagtcagaagaaaatcagcaacaatcagcctcactcctcagaattctctactttttcctgtcttgacactgaaaatcttaccttcttagatgtctttgtaatggcttcaaatactagatcttctagctgttctcagcatgaaggttagttattataagtgacttcttattggcagaatcagaatttcctttctctgcattattcttcttaatcactggtacttcactgaacctattttcctaaaccagaaaaaaaaartaggaatcatgttttggtttattttgccttcccctttattcctcaaataaatcaataaactctataagtttatttccttgatattctttaattccatcctccactccctcaacaacctcatggccactggctaaaactcttaatttctctgttggattaaggaaa

SEQ ID NO: 312581 - DNA, 576 bp, Homo sapiens
tggagagtttcatcccattcccgcatatcttagtactcagtggacaaagggaggaaactgtagttctcccaagctgtctttcrgtgcagttttgtcctcctggtattctgccttacgtattctagtaacctacaccactccaaattctgttttctatcacagtatcaaactctagtctcaagaatggttgaaataaactatcaaaaataaaatatgttcacattttcaactttttgagtgactcatttaaaactttaaagactttagggaataaattatgagtatagatagctctgcaatgcttctgcaataccattgtagcttaacatgaggataaaactataaaacatagggaaaaaaccttacaaactctttgttatcatgcataaagattttagaggttatataatatggcattttaacacatttagaataaagtactagatgtaagaactctataaaattatcaagtaggatttatttaaaattagaaaaatgagtcatattgagaattacactattaaaattcatcacattaataagataaaaacatatgatgctctaaataaatggcca

SEQ ID NO: 312582 - DNA, 576 bp, Homo sapiens
tggagagtttcatcccattcccgcatatcttagtactcagtggacaaagggaggaaactgtagttctcccaagctgtctttcggtgcagttttgtcctcctggtattctgccttacgtattctagtaacctacaccactccaaattctgttttctatcacagtatcaaactctagtctcaagaatggttgaaataaactatcaaaaataaaatatgttcacattttcaactttttgagtgactcatttaaaactttaaagactttagggaataaattatgagtatagatagctctgcaatgcttctgcaataccattgtagcttaacatgaggataaaactataaaacatagggaaaaaaccttacaaactctttgttatcatgcataaagattttagagsttatataatatggcattttaacacatttagaataaagtactagatgtaagaactctataaaattatcaagtaggatttatttaaaattagaaaaatgagtcatattgagaattacactattaaaattcatcacattaataagataaaaacatatgatgctctaaataaatggcca

SEQ ID NO: 312583 - DNA, 576 bp, Homo sapiens
tggagagtttcatcccattcccgcatatcttagtactcagtggacaaagggaggaaactgtagttctcccaagctgtctttcggtgcagttttgtcctcctggtattctgccttacgtattctagtaacctacaccactccaaattctgttttctatcacagtatcaaactctagtctcaagaatggttgaaataaactatcaaaaataaaatatgttcacattttcaactttttgagtgactcatttaaaactttaaagactttagggaataaattatgagtatagatagctctgcaatgcttctgcaataccattgtagcttaacatgaggataaaactataaaacatagggaaaaaaccttacaaactctttgttatcatgcataaagattttagaggttatataatatggcattttaacacatttagaataaagtactagatgtaagaactctataaaattatcaagtagratttatttaaaattagaaaaatgagtcatattgagaattacactattaaaattcatcacattaataagataaaaacatatgatgctctaaataaatggcca

SEQ ID NO: 312584 - DNA, 573 bp, Homo sapiens
tatatgtgaacacttcaaaattttataggagggtcttgagcactcacagattttggtatccgcaggtttctggaatcaattccctattgatacaaggaaggactacattgctactcttcatacccagtccccaaatttatacaatatactttctttgctcatcatttttttattctctttttcacaacatttaccaagtccccaacactattccttagatgtgaaaagtagttgtctctaaattctyatcagaaatgcaatttgtatctggatctagtcgagttaatagcactaatcaggaaagtgaacatggttgggtaattttcattagacctcagctactcttcaggtatacagcagatagaaactctcaataataaaggtttacaaatactgaagagataatttattccataagaaaaggcttaaatcttattgagatggaaaaaagacctcatttcatgctacaagaagaggaagctttaaaaagtgagtgattttaatatattatttaatatagtaataacatacttgtatagtaattcacagttcatagaaatattgaaactatag

SEQ ID NO: 312585 - DNA, 587 bp, Homo sapiens
aatactgaagagataatttattccataagaaaaggcttaaatcttattgagatggaaaaaagacctcatttcatgctacaagaagaggaagctttaaaaagtgagtgattttaatatattatttaatatagtaataacatacttgtatagtaattcacagttcatagaaatattgaaactatagataacattttaatctcttaatggttggaaaacaaaaccagcrttaatgggaaataatatctgaagtcacatttaaactattataggaaggtgtttctaccaggttctttttagttttcaatatgttttacagagaaaattattaagcttatttcttcaaatatcaacaaattatgctcttttcttatctgattgccttacattttctttatccccagcttgatgttacacattaaagcaagatgatatgtaggaagaacctaatttatagatcattgcgtttgtactcttctgggcatttggaccattgtaattattgtaactaacagaaatgcaatatagatgatcactactccaatttattattgagaatgtgatgagtcagtagtattaaactaggcagg

SEQ ID NO: 312586 - DNA, 602 bp, Homo sapiens
aaacctccccccaggaatgcattcctttcccagggtatcaattattaatattccttgctgggaaaagaattcagtgatatgtcttctacttgcatgttcatttataggctctctgcaagaagaaaaatatggctctattctgcccaaccccacaggcagtcagaccttatggttgtcttcccttgttcccagaaaatcgctgctattctgttctttttcaaggtgcactgatttcgtattgttcaaacacatatgttttacaatcagtttgtacaacagtggtcctgaggtgacgtacattctcagcttaggaagataacaggattatgagattaaagcaaagacaggcataagaaattataagagtattatttaggaactgataaatgtccatgaaatcttcacaatttatgttcagagattgcagtaaagacaggcatttcctgtatgttttaagttaatatttcaaacaatcgaaggcaaaacaacatattgtagtgggttacctgtgctgaacactgaatcatttttcctcttaagttgaaaatgattttmatgcaaagcaccttgtttgagcaggcagagtcatgcgtcctgcaggc

SEQ ID NO: 312587 - DNA, 620 bp, Homo sapiens
tacagaatcaacatacaaagatcagtagcatgtttacacactaacagtaaactagctgaaaaagaaattaggagtgcaatttcattctcaatagctccaaaaacatataaagtacctaggaatagatttaacctaaaaggtaaaacactactactacaaaaaaaaccacaaaattctgttgaaaattttaaagatgatacaagcaaatggaaagacatcccatactcatgggtcagaagtaatatcattaaattgaccatactacccaaagcaatctaaagatttaatggaaagcctgttaaaataccaatgtcatttttcatagaaatagaataaaggaattctatagtttrtatggaaccaaaaaagagccaaaataatcaaagcaacactaagcaaaaagaacacagctgaaggtattacactgtctgacttcaaaatatgttacaaggccatagtaaacaaaacagcatggtattagtatagaaaccgacacacagactaaaggaacagaatagagaaaccagaaatgaacccacattttagacccaaccgatttttgacaaagtaccaaaagcattaattgggataaggacagtctgttcaaaaaaatggtgctg

SEQ ID NO: 312588 - DNA, 448 bp, Homo sapiens
gggctcttctgtaatgagccatgatttaaagattttataacaatttttttatttgtcttgttcctgcgtgtgtatccaagcctaaagcaatatataataattaagggaggcgaaaaagggcagagagtcacagaatattaaggtagaaaggcgcttgaaatgtctcagtctaaccttttmctctttactggagcctaatcttttactctttactagagcctagaagaaggtggctcctggcaacattctggcttaaataaaacacaagaatatgtgcctctatgcagcagtcctaaaaaaaattcagaagagaaggactaggagttatctcccagaagggtgttcaaaggccaaaggtgagattaaaagtaacagagaatgagctgaaaaacagaaaatgaattctaaaatattctctttgttccagccctgcctgtttctctaccca

SEQ ID NO: 312589 - DNA, 544 bp, Homo sapiens
catcctccttcaggcatgttgttgctaggttactattaaatagaattactatcatgcaatatattcataaaggaagagtcttgatataagtaagaaaataattataataactttgtcatgtttatgcaacttgatgaattaatatatatccaaaggcattatttaggggagggaaacaaggtagatttattttccattttgaatattcttagtgattcattgaaagtctcttatatatcccaagcaccttgaaagcaattcaattaaagaggataattaatccacaattccaggatttctcataaacagtattgtagctgattggcacaaatgctgtcattaaacagaggaaagttacaaatgttagatttagagggtattttgagttatatttattctagtctataactattacaaagaaatgcaaaataccccagtttaggkattatgtgctttattattgaagagttccatgaaatatcacatctaccaatggtttggtggagctgatacttttacttacccttgttataaaaagcaatca

SEQ ID NO: 312590 - DNA, 536 bp, Homo sapiens
attacatgtaacttcagatgacctgggttggagttctgatcctagaacttattagtcagaattctgaccttgggtcatcatagagtcaccccaagatttaggttcttcattgacaaaatggaattacttatgttgcctctatttctcatacttaccacaatgcaaaaggatccctggtttggccatatctgtcgtgggactgtggaaaaatcacttcacctctgggtcctcagtttattcatgttcraaagttggatggttcaactagatctgtgattctcaatctctattctgagtcgagaccccaggggtgaagtaacctggggaaatggaatgtaacatgtaacaagaaataagatctctaatcctcttcccccacagaagccacagtgtcatatgttttcatactggatatttatgtgaggttctttttcagccatatatatcttaaagcaccaatcaaaataatctctgaggtcatatcagctcaaaattctttgaatctaattcccaagattatagagctcaaattagat

SEQ ID NO: 312591 - DNA, 592 bp, Homo sapiens
ataagaacataaatattcatgagtttatattgacacaagtaaatgattgaacaaaagaaataagtaaatggggcagaatagacaaatctctcatgcagaagaattctgaataatagaaatagatattctgcccttaagaaggtagagcataatttcccattcataaatgtgagctgactgtaaggggctttcttccaaagagtgctgtatggaaagaggaagaaaaaagagttactwcacaatggggaaacctgaccaacactacctcaaaccaggtgatcaaagttagcatcaacagtgattaatcatattgatagtaagtaccttgataagatatgaaaatatggcagtttactttggtgttcttcctcccaaaaacatattatcgcagtgtaactaggaaagagaaagataatcagacaaatcacaacagagggacattctacaagatacatgaccagtaattttcaaagctgtcaaagtcatcaaaaacaacggaagtctgtgaaactgtgacaaccaagaggagcctaaggaggtgggactattatgtgtaatttggtaattctagatgagactctaaaacaaaaag

SEQ ID NO: 312592 - DNA, 574 bp, Homo sapiens
atgcaatgcagtcaatagaaagataaaggtctgtatggtgtgttatgtagcatggggcatccttatctaatttgtatgctccaggtagtatcatggaaacatatgtttattcatgaaaactaaataagacttagccaaataaagagaattgggaagggttttatccactgagaaaasagcatcaactataaagcaggcaaaactacagtttgttattactaacgcataatatgtaaagtctgtgcagaatgactgaaaacatggttgaagaacaagaaagtgtcttggaaggagtttgtgctaacgttaaagcttttggactttattcagtaagttataagacaacccttgaagcgttttaagcagagacgtgatctacttccacaaattctgcttagttttacatatgtcttgaaatggtttgtttgggtaaacctctgcttctaatttgctatttacatttgcacatcaaaagatatttttaatggaaaagtacatgtaaattatatgagaccagtgctgtaaatgtaactactctgaaaacattttgcaattactgctgtggaatatgtta

SEQ ID NO: 312593 - DNA, 595 bp, Homo sapiens
cacctagcataaacaattattaatatccatatatagtttacctatactgcccttcaccctattatcctttttaatattcacaagaaccctgtgaaatgagtttatcatctcatttttacaaagtaactgatgatttgaaagatttaataattttgcagaggtaacatatagtgaatgccagatccaagaatcaaagacacctctgtctattccagagtcctttctctagcctgcttgtgtgtatyacatgaaagttagcagattctagagccacatgaattgctgtatcagtcagagcactgccataaaatagatggcacacttaaattgggtaatttgtggagaggttaataaagtgacaatttacaaaggattcatgaagttccaagaactagtaaaatcagaaaagagtataaccaatcctaggcccaaataggcaaaggaaatgagtggttactagaatccagattcagaaatgaccgtgtggtcacatgataggagccattattttcagttcaagaacaaagccagcctgggtgaatccacagagattggccgtggaatatctcaccctctcttttcccatttccctgct

SEQ ID NO: 312594 - DNA, 595 bp, Homo sapiens
cacctagcataaacaattattaatatccatatatagtttacctatactgcccttcaccctattatcctttttaatattcacaagaaccctgtgaaatgagtttatcatctcatttttacaaagtaactgatgatttgaaagatttaataattttgcagaggtaacatatagtgaatgccagatccaagaatcaaagacacctctgtctattccagagtcctttctctagcctgcttgtgtgtattacatgaaagttagcagattctagagccacatgaattgctgtatcagtcagagcactgccataaaatagatggcacacttaaattgggtaatttgtggagaggttaataaagtgacaatttacaaaggattcatgaagttccaagaactagtaaaatcagaaaagagtataaccaatcctaggcccaaataggcaaaggaaatgagtggttactagaatccmgattcagaaatgaccgtgtggtcacatgataggagccattattttcagttcaagaacaaagccagcctgggtgaatccacagagattggccgtggaatatctcaccctctcttttcccatttccctgct

SEQ ID NO: 312595 - DNA, 536 bp, Homo sapiens
ctgaaattcagaattgctggggtttgaaaagatgcagatgcttaaattcatcccagcctcacctattcaatcaacatcaccaagcaagggcttggcatatgcacttgttaaagcctcagacatcmttatcatgcatcaccagggtaaagacatcttcatttgtcttgaagtttttgctaacaaatacatgatgtatctaaagttttaatgtggagtgaagaaggaggaaatccaagaaaactttgctgaaatataatttccattaaggtagaaatttgtgtctcttttgttcactgatatattccaaatgtccagaacagtaccacagtgcctaccacagagtagtaggtaatctataataatttgttgataaataaatgatttaactcaaaaatgagataattaatacaaagaatttagcatggtgaccatcaaattatggcataacaattaaatctttttaattcttctattaattgattatatatatatatatatatatataatatatatgcttatattggcaaattgcccaa

SEQ ID NO: 312596 - DNA, 536 bp, Homo sapiens
ctgaaattcagaattgctggggtttgaaaagatgcagatgcttaaattcatcccagcctcacctattcaatcaacatcaccaagcaagggcttggcatatgcacttgttaaagcctcagacatcattatcatgcatcaccagggtaaagacatcttcatttgtcttgaagtttttgctaacaaatacatgatgtatctaaagttttaatgtggagtgaagaaggaggaaatccaagaaaactttgctgaaatataatttccattaaggtagaaatttgtgtctcttttgttcactgatatattccaaatgtccagaacagtaccacagtgcctaccacagagtagtaggtaatctataataatttgttgataaataaatgatttaactcaaaaatgagataattaatacaaagaatttagcatggtgaccatcaaattatggcataacaattaaatctttttaattyttctattaattgattatatatatatatatatatatataatatatatgcttatattggcaaattgcccaa

SEQ ID NO: 312597 - DNA, 535 bp, Homo sapiens
tattcttatgcctgtcaaagtgtaaaatatgccaggatggccaggtcataaggaatgttaatgcttcactagaaagagctcttcctcatgaaaattgagggtgttgcataactccaaaggcaccagttcagatgcccctttgtcagcttctagccacccgcctagtaaattcctaacaaggttagttaaccawccttccttcctccctcctttcccttttacaaagaggctttttcccatattttagagacaaaaataatgtggaatcctcagcatcgatcactatctaaccatttgagttttaacacatacaggaaaggaatatttatagaatgccacctacatatcagacattggatattccaaggtaatatttagtaaagcatattctgcctatcactattcttataggcttcaatttgtgctcagtgatcaaaagattccctgacccacatattgtacaattctattcatatgagatggtcagaacaaatgaatttatagagacaggaattagataagtggtttctaaggg

SEQ ID NO: 312598 - DNA, 535 bp, Homo sapiens
tattcttatgcctgtcaaagtgtaaaatatgccaggatggccaggtcataaggaatgttaatgcttcactagaaagagctcttcctcatgaaaattgagggtgttgcataactccaaaggcaccagttcagatgcccctttgtcagcttctagccacccgcctagtaaattcctaacaaggttagttaaccatccttccttcctccctcctttcccttttacaaagaggctttttcccatattttagagacaaaaataatgtggaatcctcagcatcgatcactatctaaccatttgagttttaacacatacaggaaaggaatatttatagaatgccacctacatatcagacattggatattccaaggtaatatttagtaaagcatattctgcctatcactattcttataggcttcaattwgtgctcagtgatcaaaagattccctgacccacatattgtacaattctattcatatgagatggtcagaacaaatgaatttatagagacaggaattagataagtggtttctaaggg

SEQ ID NO: 312599 - DNA, 529 bp, Homo sapiens
ttatttgacaagaactcttttaatgttcacaacagttcttcatgaaagtagttcttcccattttagcagatgaaatactgaaactcagagatgttaacaaatytgtccaagatatcacagacagtaagagatgaagataagatgtgaatctcagtttccacacacatccatgtaattgaatgctaggtaaacattaagaagacaatgcaatctatatgtattgatgtgtagacagagctacaaaaaatctaaagaaaaaagcaggcaaacacattgcttatgcagtttaaattttggaaaaagtatttatttacatgtgaaaatgactatattgtcagtgtgtacatatgtgtaagatatacactaacgagatggtaggcattacagactgactaaaaatggattcacaacttatgattatattctaattattcaaaaagacatgtgcattaatcgtaaacaaaaaatcatgataagtaattatttccttttaagtcccacccttttattttcactttcctgtaaggac

SEQ ID NO: 312600 - DNA, 444 bp, Homo sapiens
tccacacacatccatgtaattgaatgctaggtaaacattaagaagacaatgcaatctatatgtattgatgtgtagacagagctacaaaaaatctaaagaaaaaagcaggcaaacacattgcttatgcagtttaaattttggaaaaagtatttatttacatgtgaaaatgactatattgtcagtgtgtacatatgtgtaagatatacactaacgagatggtaggcattacagactgactaaaaatggattcacaacttatgattatattctaattattcaaaaagacatgtgcattaatcgtaaacaaaaaatcatgataartaattatttccttttaagtcccacccttttattttcactttcctgtaaggaccaaaagcatcgatgaaatctgtttaatatgatagagatgtagctatgaatcccaaatgtcctttttcaaaa

SEQ ID NO: 312601 - DNA, 545 bp, Homo sapiens
gagttctgacaccacagtgcctgtgttcccatatcaaggagtctcagaaacttatcttctaaccatttcacccagtgcaaagcgtttgggtccctaataaagtgttaagccaagagactcttgccattttgttaatttttatttagattaatctgcctgaccattggccaaaatgattacaggccagagttttcattgtaatatttgtctttcagcttttaaaatttcttctaacatgtgtaaatagtgtgaacttatttgaatccctttaatgttggaggagcagctagggcttcctttggctcatkcaacttttgggagtgttctatttaaactatagttttaacctcatcaatgtctgttttattcatcctgcttcttaataaccatccaaagattttctcactgctgggataagttttgttactctccccactcctccctgcctcattttcctctttttttttgcttctatcaatatttactgtattcatctattttttaataatcatttagccatctctaccctgctaagaccagtccct

SEQ ID NO: 312602 - DNA, 526 bp, Homo sapiens
tttcagcttttaaaatttcttctaacatgtgtaaatagtgtgaacttatttgaatccctttaatgttggaggagcagctagggcttcctttggctcattcaacttttgggagtgttctatttaaactatagttttaacctcatcaatgtctgttttattcatcctgcttcttaataaccatccaaagattttctcactgctgggataagttttgttactctccccactcctccctgcctcattttcctctttttttttgcttctatcaatatttactgtattcatctattttttaataatcatttagccatctctaccctgctaagaccagtcccttgactcaccttagcttttccccattctctcgttaactaatctaatatttttattagcrtctgtaagacccatgagggggagctaagacagcaaattccacaagtctcctgaactgttgtttggttttggagtgatatggttatatgggatgcccatgtaaacagggaccctttaaccatggcactcagca

SEQ ID NO: 312603 - DNA, 602 bp, Homo sapiens
gtgagggcaaaagagtgagagagagcaagagagggtctaactcacttttataagaagcccactcttgcaataacttactccaccaataatgacactaatctattcataagggcaaacatgacctaatcactttttattaggccctacctcccaaaacactgttgcattagggatttcatttccaacccatgaattttggggtacacattaaaaccatggcagtggtttaagccaagcaccagataaccttcaaacaagtctcaacacattttggcaaaataatacaacaaatatcaatgaaaactttaactaaggagcaataacaaaagactacatggacattacaatttatgaaatgagacttaaagatgaatttaattttactaggcaagaatcgtttaaagatacagggacctaggaagaataaacctcatgatcaatggcataacaytgagaacttcggaatgtcaggtaaaattcagcgtccaccttgttctgcatgttaagggaatagtaggagatacacctatcctggcaatcacacacacagcaatgactgtgggatcaaaaaatccaagtctcaatgctgctacttatgcacc

SEQ ID NO: 312604 - DNA, 604 bp, Homo sapiens
gctgctacttatgcaccagatgaactttgtcaaggtctttaatctctctgggtctcagatgggaatgaaaagtccacctaatattttatttgaaagattaagtgagagtgtaagtgttcaaattactattaactaaagctaggcctgagtgaaaaataggctaggacattattatggagagatgtgaatttcaggctgaggagatgccattgaagacctctgagaaggtaaataaaagagtagcatggttagaattgtytaaagttcaatccagtgctcagtatagaaggaggtataggatatacaggagtgtgatagggcagggatcaggagaagactgggaaatattaaaactggttgaaatatagtgaagacccatattctagttctggcatttggacctgaaataaagacagacatttcagaaacactacagaagcagataaaaataatttcacaattattttggatttaaaatggagggaaaaaaaaaccatcagtgattctgagacctcaagcctgagtgacttggagaataatcatgccaccatcaacaaaacaaaattttgaggaagaaaagccctttttggggaaaggataaatt

SEQ ID NO: 312605 - DNA, 441 bp, Homo sapiens
aattaaaattaaattttaaatagtttaattgagcaaagaacaattgatgaatcattcctctttttyacagcccagatattttatttcctacagcaccagcacataaagctgtgtcaggatatcagatttctttaagaggtagtaagaaaaaatatatttcaaaatacttaactacacccttcccaaggttataagaaaaagcacaataccattaattaacttatgaaagtcactttattagcaaatcccagtttttagccttattttccttcattctagaaaaacagcacatttctccttttcaaaccaacacagaagaaatttctatcccaatttagttactctcccactcatgccatctccaatctccagctccactcgagagcatgggtggaaccaaatttagccaatacttatgccaggaaatgtggtaagagagag

SEQ ID NO: 312606 - DNA, 540 bp, Homo sapiens
ggaggttgtggtgagttgagattgcaccactgcactccagcctggcaacaaagcgagactctgtctcaaaaaaaaaaaaaaaaaaacactaaagccaaattaaaattaaattttaaatagtttaattgagcaaagaacaattgatgaatcattcctcttttttacagcccagatattttatttcctacagcaccagcacataaagctgtgtcaggatatcagatttctttaagaggtagtaagaaaaaatatatttcaaaatacttaactacacccttcccaaggttataagaaaaagcacaataccattaattaacttatgaaagtcactttattagcaaatcccagtttttagccttattttccttcattctaraaaaacagcacatttctccttttcaaaccaacacagaagaaatttctatcccaatttagttactctcccactcatgccatctccaatctccagctccactcgagagcatgggtggaaccaaatttagccaatacttatgccaggaaatgtggtaagagagagag

SEQ ID NO: 312607 - DNA, 443 bp, Homo sapiens
gggcattattaggcatccacctatagtcctgatttggttckttctgacttctttttgtttcctaatctcaaaaaaatttttaaaagacagacacttttcttcagttaataatgtaaaaaagactgtgttgacatggttaaattatcaggacccctagttctttatggatgaacaaaatggctggtattaccacttttaaaagtgtcttaaatttgatggagcttatattgagaaataaaaaataaaatttatatttattatttttattttttaattccattttccatgaacttttcttttttttcttttctttttttttttcctgaggctaagtttcactctctcacccaggctggagtacagtggcacgatctcagctcactgcaaccactgcctcctagattcaagcaattctcttgccttagcctcctgactagctggga

SEQ ID NO: 312608 - DNA, 590 bp, Homo sapiens
tggttcgttctgacttctttwtgtttcctaatctcaaaaaaatttttaaaagacagacacttttcttcagttaataatgtaaaaaagactgtgttgacatggttaaattatcaggacccctagttctttatggatgaacaaaatggctggtattaccacttttaaaagtgtcttaaatttgatggagcttatattgagaaataaaaaataaaatttatatttattatttttattttttaattccattttccatgaacttttcttttttttcttttctttttttttttcctgaggctaagtttcactctctcacccaggctggagtacagtggcacgatctcagctcactgcaaccactgcctcctagattcaagcaattctcttgccttagcctcctgactagctgggattatagatgcctgccaccacacccggctaattttttgtatttttagtagagatggggtttcatcacattggccaggttggtctcgaactcctgacctcaactgatccacttgccttggcctcccaaagggctaggattataggcatgagccactgcacccagccttcatgaactttttgaa

SEQ ID NO: 312609 - DNA, 590 bp, Homo sapiens
tggttcgttctgacttctttttgtttcctaatctcaaaaaaatttttaaaagacagacacttttcttcagttaataatgtaaaaaagactgtgttgacatggttaaattatcaggacccctagttctttatggatgaacaaaatggctggtattaccacttttaaaagtgtcttaaatttgatggagcttatattgagaaataaaaaataaartttatatttattatttttattttttaattccattttccatgaacttttcttttttttcttttctttttttttttcctgaggctaagtttcactctctcacccaggctggagtacagtggcacgatctcagctcactgcaaccactgcctcctagattcaagcaattctcttgccttagcctcctgactagctgggattatagatgcctgccaccacacccggctaattttttgtatttttagtagagatggggtttcatcacattggccaggttggtctcgaactcctgacctcaactgatccacttgccttggcctcccaaagggctaggattataggcatgagccactgcacccagccttcatgaactttttgaa

SEQ ID NO: 312610 - DNA, 590 bp, Homo sapiens
tggttcgttctgacttctttttgtttcctaatctcaaaaaaatttttaaaagacagacacttttcttcagttaataatgtaaaaaagactgtgttgacatggttaaattatcaggacccctagttctttatggatgaacaaaatggctggtattaccacttttaaaagtgtcttaaatttgatggagcttatattgagaaataaaaaataaaatttatatttattatttttattttttaattccattttccatgaacttttcttttttttcttttctttttttttttcctgaggctaagtttcactctctcacccaggctggagtacagtggcacgatctcagctcactgcaaccactgcctcctagattcaagcaattctcttgccttagcctcctgactagctgggattatagatgcctgccaccacacccggctaattttttgtatttttagtagagatggggtttcatcacrttggccaggttggtctcgaactcctgacctcaactgatccacttgccttggcctcccaaagggctaggattataggcatgagccactgcacccagccttcatgaactttttgaa

SEQ ID NO: 312611 - DNA, 582 bp, Homo sapiens
catttatttgttagtgcaatacatttcctgagtttctactctgggtcaattacctagacaagaactggtgttaaaaggccaacaaaggagttttactggmctcatagcatttcacattttcaggaggaggcaatcaaacacagaaagtatgcagattaaggatatttgtgctgtttgtggttgtttctgtttgtttatttcagtcttatgattgagataaaaaatgtgatgcatggtttctggcttgtatattagaatctcactgtttctgtaatgaatatgtttcagctcaaaatatataatgagacaaaaattcatccataactttatgattgattaatctaatttccttaagaaaatgtagctcgatttaatcttcttcttttctcttctcgtcctccctccccctctcaagcaatacgccaactaaccaacaggctgccttgctgcctctgctctgacccgcagaaatggtccagggtaagttcaccataaattttcgtggcttgctcagagactggggcttctgtgatgaatttttcttccatccccgaggtgatggtgccctgttggtgggatgaa

SEQ ID NO: 312612 - DNA, 562 bp, Homo sapiens
tgactccatttatttcttcttaaattttctttctactgcttactttgagtctaatttgccatacagtttctgatttcttcagatggaagcttaggtcatttaagaacttcctgttttgttgttcttgttgttgtttctaatagagacatttggttctgtatactttgttctagatactgttttatcttcattctacacatttttgtatgctttgtttttatttttactgacttcaagatactctaaattctctttgatttagagaggggtcaattgtacgactcatttgtttcccctctctttgatttccttatgatttatgtggtcagagaacatgctttgtccaatttaaatcgtcttaaattgattgttacttatggcctatttaaaaatattgcttgttttggtaactgttccatgtgtacttgaaaataataygtgttattctttttgggggcgcagtgctcatattgtggtctcttattctttttgtgtttcattttggacaatttctattgatttctgttcaaatttattaatctttcatctacaatattccata

SEQ ID NO: 312613 - DNA, 385 bp, Homo sapiens
taaattcaagttcctgactactcaggcagatctgttatgatatccragccaagttccacccttgctgtagatattttcatgtttattcctattaccaattacttcagttactttataattcacaattcaagtatccaaaattgggaattccatctacccaattcatcttttgttacaagaccgcaccaaagttaacagttgagcttatgaatcgattgtctagtgatgaggtgtgcaaatatttaaagcttcaggatatggtcatatagataaccttagtaaatatataggtcagtgcaactttctttaaaagatgctgtaaactgagcaaacactgactttcacaagtctgatacttacatagatgagaaattagaggccagaa

SEQ ID NO: 312614 - DNA, 385 bp, Homo sapiens
taaattcaagttcctgactactcaggcagatctgttatgatatccaagccaagttccacccttgctgtagatattttcatgtttattcctattaccaattacttcagttactttataattcacaattcaagtatccaaaattgggaattccatctacccaattcatcttttgttacaagaccgcaccaaagttaacagttgagcttatgaatcgattgtctagtgatgaggtgtgcaaatatttaaagcttcaggatatggtcatatagataaccttagtaaatatataggtcartgcaactttctttaaaagatgctgtaaactgagcaaacactgactttcacaagtctgatacttacatagatgagaaattagaggccagaa

SEQ ID NO: 312615 - DNA, 600 bp, Homo sapiens
tgttattgtatttacttattaatttacttattcaccagcaaatgttaaccacaaagtaggtgccaaacactagaatattgttttaatactgtgtatttgaccttaattttcttctaaaaacattggctttgtagttccctctcctgacttgttgcagtttgaactatctttagaaggatgctctatcttaattaactctgcagaccccaactccatcccatttacctacatccaatggaatcagtccagtaatctgcaaagagtagatttggataaaataagattacacgcatattttaagtgaaatttccatcttcccaccaatgtgtttgacatgctattctaataagtttcaataatcagagaaagcatgtatgtatatataagtcaaactacgttagtaggaaacaatttcatgctaaagttcacacagatagtatatttgaaaatgtagaatcaaatagrtatatacactaaggaaatatataaaagtaaaaaattattttcagtttcataatattgtaaactaatattggtaatgtccctgggtttcctttgggcaattaggggaaaatttaagcaatttaaggttcaggtgtg

SEQ ID NO: 312616 - DNA, 591 bp, Homo sapiens
ctgccctcatgcactgaagccatttgcagaaccccaggacaattccatcyatggaaatccaagagatccccagggcatctggtagatcctactagaaagaggtatggtaggcagaatgccctcttcccaatgtttccactcttattcctgaaatctgtgaggatattacattccatgaccaaagaggctttgcagatgtaattacgattatagatgttaaaatagatagattaacctggagtatttaggtgaacacaacctgatcacgtgtgcctttaaaaacagaaaactttatggagtcacaaagacagaaggggaagttagagagaactgaagtgatgattgatgaaggttagaagggacctgacccactgtggctggagggaggctacatggaaagcatgaagaggaatgtgggtagcctctaggagcaagggtcagccctaaatgacaagtaatacaaaaatggggtcctcagtagcacaattgaaagccactagattataccgacaacctgaatgaattgattcttccacagtgtccaataagggacgtagcctagcctgacactgatttcaatattctgagacc

SEQ ID NO: 312617 - DNA, 591 bp, Homo sapiens
ctgccctcatgcactgaagccatttgcagaaccccaggacaattccatctatggaaatccaagagatccccagggcatctggtagatcctactagaaagaggtatggtaggcagaatgccctcttcccaatgtttccactcttattcctgaaatctgtgaggayattacattccatgaccaaagaggctttgcagatgtaattacgattatagatgttaaaatagatagattaacctggagtatttaggtgaacacaacctgatcacgtgtgcctttaaaaacagaaaactttatggagtcacaaagacagaaggggaagttagagagaactgaagtgatgattgatgaaggttagaagggacctgacccactgtggctggagggaggctacatggaaagcatgaagaggaatgtgggtagcctctaggagcaagggtcagccctaaatgacaagtaatacaaaaatggggtcctcagtagcacaattgaaagccactagattataccgacaacctgaatgaattgattcttccacagtgtccaataagggacgtagcctagcctgacactgatttcaatattctgagacc

SEQ ID NO: 312618 - DNA, 591 bp, Homo sapiens
ctgccctcatgcactgaagccatttgcagaaccccaggacaattccatctatggaaatccaagagatccccagggcatctggtagatcctactagaaagaggtatggtaggcagaatgccctcttcccaatgtttccactcttattcctgaaatctgtgaggatattacattccatgaccaaagaggctttgcagatgtaattacgattatagatgttaaaatagatagattaacctggagtatttaggtgaacacaacctgatcacgtgtgcctttaaaaacagaaaactttatggagtcacaaagacagaaggggaagttagagagaactgaagtgatgattgatgaaggttagaagggacctgacccactgtggctggagggaggctacatggaaagcatgaagaggaatgtgggtagcctctaggagcaagggtcagccctaaatgacaagtaatacaaaaatggggtcctcagtagcacaaytgaaagccactagattataccgacaacctgaatgaattgattcttccacagtgtccaataagggacgtagcctagcctgacactgatttcaatattctgagacc

SEQ ID NO: 312619 - DNA, 432 bp, Homo sapiens
cttttcttctctcactcccttggtgttacctcgtggttttaaaatagcatttatatgtcagtgactctcaaatttatctctcctacccagttcttcctaactccaagatcatatattcaacttccaaatcaatrgctactcttgaaatacattcaaatcgtaaaaatctgcacgtcccaaacttaactcttagtctttttctcaaatgctattccaaatgcaaccctctccatctcaattgatagcaactgcatattacttgcttcaagcgaaaaagcttttaattattctttctccctttctcccacagctcacatcctctcttttaggaaactttgttgtcttgattgttaatatatctagaacatattactacataccgcctgacctattattaacatttgtgctaaagtctttcctggataaactgca

SEQ ID NO: 312620 - DNA, 539 bp, Homo sapiens
gcttccaggcctctttgtttacactgtgagctactcaagcctcagcaatggtggacacccctcccccatccagctgcagcatttcaggttgatgtcagactgccacgctggcagtgagcaaggctctgtgggcgtgggacccactgagccaggcatgggaaggtatcccttggtctgccagttgctaagactgtgggaatagtgcagtatttggtcaggagtgtaccatttctccagatacagtctgtcacaacttcccttggctagaaaagggaaatcccccaaccccttgtgccttctgggtgaggcgacaccccatcctgcttcagctcaycttccatgggctgcacccaccgtccaaccagtctcaatgagatgaaccaggtacctcagttggaaatgtagaaatcacccatgttctgcgtcaatctcgctgtgagctgcagactggagctgttcctatttggccatcttggaagcaacttagatgggttacattttatatgtgttgaatctaagatccccatggagattttagt

SEQ ID NO: 312621 - DNA, 465 bp, Homo sapiens
tgacttctattcaaagaaaggacattggctgagtattcgacagtgagtgaaggtgtcaggcattagaaataattaggtktatttgatatatttaggttggtgcaaacataattgtggtttttgccattacttttgacttctcgtgagatctagttaatggcaaaaaccgcaactacattcgcaccaacgtaatagtttctgtggtaaacaaaagagaaacatggctaaagaaacacggaagttttatgaaagtttaagtctcatgggatgttgagaatcacaaattttagtggcaccaatctgagtagggtgctatttctgtactatgtttagcatcttggtgcagagaaggcagatagatgaaaactgagtgtcatgttttgtttaggggggttaggggaggggagggtaaggtagagtatgacaagtcaaataaatgaggtttctgagaatattagcaagaac

SEQ ID NO: 312622 - DNA, 548 bp, Homo sapiens
ttggagttagaagaaaagtaaaagaaattgggacacaaaatatttaaaaaataattgaaaacaaattttcaaattgtgatgaaaagtattagctcacgaaactaagaagtcaagcaaaatcaagcagaataagcaaacacacacaatacttagacacatcatagttttttttgagaactaaaaataaagcaatacattttaaagcctaagaggaaaaagaacactaagattccaactaagacattggagttcyaactaatacatctaaacaataagattaagaaatgaagctaataaattataactaaaaaccagaataaaaatcaatataaacattcacattatactctggggaaagtgataagaatgtccaatggtttctcatcagaatgcaagctattattcaacacatcaatattttttaatatgttgaaagaaaaaaattacaatttttaatctagaattctatatacattattgacatcctccaaaaataaaagtgaaatgaagacatttgcaggtgaatgctatgagcctttattaccaac

SEQ ID NO: 312623 - DNA, 624 bp, Homo sapiens
gatcatacactagtgcaattaccccttccattttccaagttataaaacattttcatgtgcattatttgatttggtcatcattactctataaagtagcaagggtgggcattaatgtccctgttttatagactgggcaacaaaggcttagatgagtcacatagctaattatgtgtaaaagcctgaattagaaatgcatatcacctgctttccatttcgggattcttagtcaaatgaagaaaaataggatatatttatcaaaataaagaaaagtatatatcaaagctataactattcaatactaaacacaccaccatgtaaaggaaagcaattttccaagacttcaaatgtttccaaacatccataagatggatatttatatataaagtatggagaaaattagctaatgttcccttttcaaacaggctttctggtattttttaagatctttatgccaggatgcaataaaaaattagaaaacactgatatccacatggagaaagtttacacttctttgcagagggttactgcttgaccttctgytttgcttcggacattctgtatttgttttggtggagatacagcagctgctccattctagatactcagtagatgtcagaagcgagt

SEQ ID NO: 312624 - DNA, 544 bp, Homo sapiens
catgtgtctctgctacatgccagacactatactagatctagggatttaaaaaattatatgattacacaaatatttatcaatactttacagaacaatcttttaaaaatcaaatatgatcatagaaactcttcgcctgaaacttcttactcagtcagcctttgcttagtatattagtttcctaaattgttgtaacarattactgtaattttcattttcctctgcctccactattgcctataaggttagatcacttcccatcactgtatctcctacattttattttagccctactggatttctgacaagtgagtaattttttcttctacgactgtgttttggaaattctattccttccaactaaaatggtcaatctcacttgtcaaactattaatcttttactcttcattcatattcataacaaactataaccacctcttctagtccctaaaacatctccttaatcaaactgaagaactccttttttcatatattcaggtttgctgagcatgttcctacacattctcatcaagtattaaaatcattt

SEQ ID NO: 312625 - DNA, 528 bp, Homo sapiens
tatattcaatttgaaattctagcttgctagtgatacttctaattcttaaatagtatagtgattctttcttgygcacacacatcaactgattgtttaatgatgatagtttagaaactggctaaaatatattattatagaatatttgaaaattgataactttttttattataaaactataattttattttaagaatcactacgtttttatagtataaattgtgaaaaagtaaaacaaagtatagcaactttcaaggaaagatgttcatataacctgtatgtcttcataattcaatgccacatatcatggggtcaaagcacattccaaaggataaaaccacacctttaaagttttctatatcaaatgcatgagaaagaaaatcattccttctgccataaaatttcaacttagttattcacagtatagcatcttcacagaacaacctggaaaagaaattttggtgaataatttataagtcaaaagtaaagccaagggagcaatccaatatatatatatatatatagggatat

SEQ ID NO: 312626 - DNA, 481 bp, Homo sapiens
tgatacatgcaatgaaaaaataaataaagagaaaaataaaggggaaattagaggctgggggccactggaagggagacaccttgccatattaaacaaagaggccagggcagacctttttcagaaagtgactggagcaaagacttaaaagaggtagaaacagcccatcatatgtttaggaggagaacttttcagtaagaagaagaaaaagctggaaaagaagcaccagtrtcaaatgtgacaagtatgttgaaggaacatccaggaagtcaaggtgagagcaggtcagagggtggaatcaggccatgatggttgagcagaccatcacctgcattctgctttcactctgggcaaggggctaatggtgaaagtgtgggagcacagaagagctgtgatctgggctattatgtataagaatccctctgatcatgctgggcacagacaataagagtcaagtgcagaagcacggagatctgttaatcat

SEQ ID NO: 312627 - DNA, 542 bp, Homo sapiens
aacagagtgaaaacaattatgtccaagctgtgctatcaacatagatgccaatcttgaatataaattaaggagataatgttactgcatgggtgaaaatctctgagaagatctcaatcatatcatgaatccccagtgactgtcacatatgtgaactcctagtagatgttacatatattttgtcatttttcttttgagcaagttatttgtatcatgattttacaaacccaaaaaacaggatgaggctaatatagcaaacaggcaacccattctattttacttcaatccctgaatgccagtaaagtttacttctcctttgacagctagaaaattgcaatttggaacggaaagcttatccctgcaataaagattggctagcaaagttttacaaagaaatgagaaatttggctgctggttgtatttgaaccttgttggaaaggaggctctcaccagaaaagattgtgcccttgatgtgttaagcagcctgtccacttaacccaaagktctattcaaacagttcaatcaaattgtaagctgtcacaaca

SEQ ID NO: 312628 - DNA, 652 bp, Homo sapiens
agctgccacaccctggctgtgtcattcacgttgcctcttcctttcwcttcaccagtgttctttattcctgctgtacacttgccatctgtgatgcaaatctttccaggcatctctgtcctttggctcaggcatggctcacctccctcagttttcctctgctccttcctctgctgtacctagctcacctccctcagttttcctctgctccttcctctgctgtaatacacatttcatcatgtgcaaacaatcatgtatcctcaaacttgttccttataatgatcatttaatttcctcaccttaatgaaatatgatagctccacttttctagcaattctcttctcactccacagaaaattcttggcgtagttctaacgtattctcttatttaggtcatcaatcatgctcactctaaagccttcctatttaaaaatgaatacagtgcaagcatgcaacctacttagatcctcctcttctttttttaaccattcactttacagtgtcatggggtacttttatttttaatctagtcttcatctcctgtgggtctccacactccataggcagacaaagttctctagtcatcagctccaatctacttttgccatatgtgacagtcaaactagctttcattttgttccttaacacatccctc

SEQ ID NO: 312629 - DNA, 652 bp, Homo sapiens
agctgccacaccctggctgtgtcattcacgttgcctcttcctttctcttcaccagtgttctttatycctgctgtacacttgccatctgtgatgcaaatctttccaggcatctctgtcctttggctcaggcatggctcacctccctcagttttcctctgctccttcctctgctgtacctagctcacctccctcagttttcctctgctccttcctctgctgtaatacacatttcatcatgtgcaaacaatcatgtatcctcaaacttgttccttataatgatcatttaatttcctcaccttaatgaaatatgatagctccacttttctagcaattctcttctcactccacagaaaattcttggcgtagttctaacgtattctcttatttaggtcatcaatcatgctcactctaaagccttcctatttaaaaatgaatacagtgcaagcatgcaacctacttagatcctcctcttctttttttaaccattcactttacagtgtcatggggtacttttatttttaatctagtcttcatctcctgtgggtctccacactccataggcagacaaagttctctagtcatcagctccaatctacttttgccatatgtgacagtcaaactagctttcattttgttccttaacacatccctc

SEQ ID NO: 312630 - DNA, 652 bp, Homo sapiens
agctgccacaccctggctgtgtcattcacgttgcctcttcctttctcttcaccagtgttctttattcctgctgtacacttgccatctgtgatgcaaatctttccaggcatctctgtcctttggctcaggcatggctcacctccctcagttttcctctgctccttcctctgctrtacctagctcacctccctcagttttcctctgctccttcctctgctgtaatacacatttcatcatgtgcaaacaatcatgtatcctcaaacttgttccttataatgatcatttaatttcctcaccttaatgaaatatgatagctccacttttctagcaattctcttctcactccacagaaaattcttggcgtagttctaacgtattctcttatttaggtcatcaatcatgctcactctaaagccttcctatttaaaaatgaatacagtgcaagcatgcaacctacttagatcctcctcttctttttttaaccattcactttacagtgtcatggggtacttttatttttaatctagtcttcatctcctgtgggtctccacactccataggcagacaaagttctctagtcatcagctccaatctacttttgccatatgtgacagtcaaactagctttcattttgttccttaacacatccctc

SEQ ID NO: 312631 - DNA, 568 bp, Homo sapiens
attgaataaggtatactcttgtgaacaaaatttggagcatatttgtttctctctgtctggtttcctcaaaacktagaaactattggtgaatattctcaacttatgacaatgtagttatttgcataagagcaataagaatccattttctttcgcaacagcacacaattggagaaactgacaaggctttgactggaataatgtgcttccctgtaaggaatcaagcttgacttgcagagtcagtaaaagccccttgggaaaactggcctcataccttgtttacacagttcctgtacggggttcctaactggtggtaagtaaagaatgtaatgttttacaggtccaggagccccaagttatcttgtgacctcaagaagagagaaatttacccaattcataggtatttgagactaaaacccacggctgggctcggctttaaaaattcttacctgatgttccttatggaacagacttccatccgagccaatttaaaaagcctatgtgaaaatatttattcttgctgcactttatgcaaataatcaggccaaatgtaagactaaagtttattttg

SEQ ID NO: 312632 - DNA, 568 bp, Homo sapiens
attgaataaggtatactcttgtgaacaaaatttggagcatatttgtttctctctgtctggtttcctcaaaacgtagaaactattggtgaatattctcaacttatgacaatgtagttatttgcataagagcaataagaatccattttctttcgcaacagcacacaattggagaaactgacaaggctttgactggaataatgtgcttccctgtaaggaatcaagcttgacttgcagagtcagtaaaagccccttgggaaaactggcctcataccttgtttacacagttcctgtacrgggttcctaactggtggtaagtaaagaatgtaatgttttacaggtccaggagccccaagttatcttgtgacctcaagaagagagaaatttacccaattcataggtatttgagactaaaacccacggctgggctcggctttaaaaattcttacctgatgttccttatggaacagacttccatccgagccaatttaaaaagcctatgtgaaaatatttattcttgctgcactttatgcaaataatcaggccaaatgtaagactaaagtttattttg

SEQ ID NO: 312633 - DNA, 568 bp, Homo sapiens
attgaataaggtatactcttgtgaacaaaatttggagcatatttgtttctctctgtctggtttcctcaaaacgtagaaactattggtgaatattctcaacttatgacaatgtagttatttgcataagagcaataagaatccattttctttcgcaacagcacacaattggagaaactgacaaggctttgactggaataatgtgcttccctgtaaggaatcaagcttgacttgcagagtcagtaaaagccccttgggaaaactggcctcataccttgtttacacagttcctgtacggggttcctaactggtggtaagtaaagaatgtaatgttttacaggtccaggagccccaagttatcttgtgacctcaagaagagagraatttacccaattcataggtatttgagactaaaacccacggctgggctcggctttaaaaattcttacctgatgttccttatggaacagacttccatccgagccaatttaaaaagcctatgtgaaaatatttattcttgctgcactttatgcaaataatcaggccaaatgtaagactaaagtttattttg

SEQ ID NO: 312634 - DNA, 568 bp, Homo sapiens
attgaataaggtatactcttgtgaacaaaatttggagcatatttgtttctctctgtctggtttcctcaaaacgtagaaactattggtgaatattctcaacttatgacaatgtagttatttgcataagagcaataagaatccattttctttcgcaacagcacacaattggagaaactgacaaggctttgactggaataatgtgcttccctgtaaggaatcaagcttgacttgcagagtcagtaaaagccccttgggaaaactggcctcataccttgtttacacagttcctgtacggggttcctaactggtggtaagtaaagaatgtaatgttttacaggtccaggagccccaagttatcttgtgacctcaagaagagagaaatttacccaattcataggtatttgagactaaaacccacgsctgggctcggctttaaaaattcttacctgatgttccttatggaacagacttccatccgagccaatttaaaaagcctatgtgaaaatatttattcttgctgcactttatgcaaataatcaggccaaatgtaagactaaagtttattttg

SEQ ID NO: 312635 - DNA, 634 bp, Homo sapiens
tttgttttagcttttttgcatactcacmaaccaatcagcatgcactccccaattctcagcccataaaagccctggacccagccatactgggggagaaaccatctgacgtcaggtgggggatcaccctctcatcccctctccactgagagctgttctgtcactcagtaaaatttttccctgtcttcctcacccttcaattgtcagcataacctcattcttcttggatgcaggacaagaacctgggacccgctgaacagctggggcaaaaggagctgtaagctgtagccctgccatcctttgccagtgccaggtggcgtccccatgagatgggaaacagaggtaaggccaggccagtctgggagctgcaggctggagtggggcaattaggaaaaatgagctgaggccctactggccacaagtttcctgctggcaaagcaggactgagaaacatcctgtatcaccaacatagtgaaaatccatctcaaaaaattaaaaattaaaaaataattaacctcaagtattccaatttttttaaagttctctttcatgttatcataataaagtcaatgcaagtaaggatgtattttttttatttccctgaaatctgaaaactatttaaatttgtgtctaatga

SEQ ID NO: 312636 - DNA, 634 bp, Homo sapiens
tttgttttagcttttttgcatactcacaaaccaatcagcatgcactccccaattctcagcccataaaagccctggacccagccatactgggggagaaaccatctgacgtcaggtgggggatcaccctctcatcccctctccactgagagctgttctgtcactcagtaaaatttttccctgtcttcctcacccttcaattgtcagcataacctcattcttcttggatgcaggacaagaacctgggacccgctgaacagctggggcaaaaggagctgtaagctgtagccctgccatcctttgccagtgccaggtggcgtccccatgagatgggaaacagaggtaaggccaggccagtctgggagctgcaggctggagtggggcaattaggaaaaatgagctgaggccctactggccacaagtttcctgctggcaaagcaggactgagaaacatcctgyatcaccaacatagtgaaaatccatctcaaaaaattaaaaattaaaaaataattaacctcaagtattccaatttttttaaagttctctttcatgttatcataataaagtcaatgcaagtaaggatgtattttttttatttccctgaaatctgaaaactatttaaatttgtgtctaatga

SEQ ID NO: 312637 - DNA, 630 bp, Homo sapiens
agttggattactggaaaactcagtaatgggcagacccctatgcttatatccactggaaaaagggtctgtcaattcgagcaaaataatggtgcaagttatgggatgaagaaatatgttttccaatatttattgtgaaattttcatttcatattaagaattatttttaaatgtagtacaatttcaatcctttgctcagtagctctctccctgaaaatattccgtttttattgttatttcattcactttgtttttacctrtttatatagaactctgatttactgctgtttgtaaaaataaactattgctctaagttcaatggaaatacctacattcaagaggtatagaataatatgtacacaactatttaaaagtaagtataaaaacattactgtacatattttttaaaaaagaaaaataaagctaaaataattgttacaaacagaaaaaaaaatcaggataaactgagcatttttttttagtatggttcttaaagaatgctcttaaagtgagtacaaaaagtatatatagattaaatctgttacaaatctcaaactaagcctactcactaaattagacctaggctcataaagatattaacaaaaatttggatcaaaaatagagaaattagca

SEQ ID NO: 312638 - DNA, 591 bp, Homo sapiens
aattgggtttgcagcttcattaacctcttttagtactttaggaaagtacatgtagtcttttggaggttaataaaagaagtctgcataggtgaaacaagcaagcaaacagaaagaccctgaagtagaattacaacccaagtgcaatcccatccccttctctgctttattttgtttcagtgactctatgaccaygtactgtattatacggtttatttatttattttatttattgtctctccttttaaactagagtatgagctcgaggaatgcaagggtttttgtttgttttgtttgatactatatctctagtgcttatatctgttcctggcacacaagagaagtttaatatcaatttattgaacgtaggaataaacaaaatgcttcatatgtgtttttctttctaccaagataatgtaagaaatgccatgactctaatcaactaatactatgtggtaattaggtccatcagtatttaattgtgtaaaaccatcagctgttgtttgtgatacgaagatgtgtaaacaggagactctttctccagaaactgtaatatagtttatccagacaccacagaatcacacgacaggaaat

SEQ ID NO: 312639 - DNA, 591 bp, Homo sapiens
aattgggtttgcagcttcattaacctcttttagtactttaggaaagtacatgtagtcttttggaggttaataaaagaagtctgcataggtgaaacaagcaagcaaacagaaagaccctgaagtagaattacaacccaagtgcaatcccatccccttctctgctttattttgtttcagtgactctatgaccacgtactgtattatacggtttatttatttattttatttattgtctctccttttaaactagagtatgagctcsaggaatgcaagggtttttgtttgttttgtttgatactatatctctagtgcttatatctgttcctggcacacaagagaagtttaatatcaatttattgaacgtaggaataaacaaaatgcttcatatgtgtttttctttctaccaagataatgtaagaaatgccatgactctaatcaactaatactatgtggtaattaggtccatcagtatttaattgtgtaaaaccatcagctgttgtttgtgatacgaagatgtgtaaacaggagactctttctccagaaactgtaatatagtttatccagacaccacagaatcacacgacaggaaat

SEQ ID NO: 312640 - DNA, 591 bp, Homo sapiens
aattgggtttgcagcttcattaacctcttttagtactttaggaaagtacatgtagtcttttggaggttaataaaagaagtctgcataggtgaaacaagcaagcaaacagaaagaccctgaagtagaattacaacccaagtgcaatcccatccccttctctgctttattttgtttcagtgactctatgaccacgtactgtattatacggtttatttatttattttatttattgtctctccttttaaactagagtatgagctcgaggaatgcaagggtttttgtttgttttgtttgatactatatctctagtgcttatatctgtycctggcacacaagagaagtttaatatcaatttattgaacgtaggaataaacaaaatgcttcatatgtgtttttctttctaccaagataatgtaagaaatgccatgactctaatcaactaatactatgtggtaattaggtccatcagtatttaattgtgtaaaaccatcagctgttgtttgtgatacgaagatgtgtaaacaggagactctttctccagaaactgtaatatagtttatccagacaccacagaatcacacgacaggaaat

SEQ ID NO: 312641 - DNA, 591 bp, Homo sapiens
aattgggtttgcagcttcattaacctcttttagtactttaggaaagtacatgtagtcttttggaggttaataaaagaagtctgcataggtgaaacaagcaagcaaacagaaagaccctgaagtagaattacaacccaagtgcaatcccatccccttctctgctttattttgtttcagtgactctatgaccacgtactgtattatacggtttatttatttattttatttattgtctctccttttaaactagagtatgagctcgaggaatgcaagggtttttgtttgttttgtttgatactatatctctagtgcttatatctgttcctggcacacaagagaagtttaatatcaatttattgaaygtaggaataaacaaaatgcttcatatgtgtttttctttctaccaagataatgtaagaaatgccatgactctaatcaactaatactatgtggtaattaggtccatcagtatttaattgtgtaaaaccatcagctgttgtttgtgatacgaagatgtgtaaacaggagactctttctccagaaactgtaatatagtttatccagacaccacagaatcacacgacaggaaat

SEQ ID NO: 312642 - DNA, 629 bp, Homo sapiens
aaatgtccctaaatgtgttattttgtatcatgtgtttgtagactatggatattggaagttacagctactagagaactattactaatattagcaaagttggggttttaacttattataaagatgatttgccaatcatgttatttaagtttacaaatactaaaagtcaagctatctgattttgtaagtattaaaacccaaatgaatttattgggtttcacttaattaatgagtgggcatgcctctagccagcttgctttctgtatgttcaggtaatctccatttcacaactccagcagaaagacaatatcttgcttttattattcatttatcaaacctaatataaccataccccaaaatattgtagcttaaaacaatatrgaatttattatatcttacaattttctaggtcatacatttaggcaagaattttctattaacaagaaagttatagaaagttgtgttaacacaggttatttggtagtgttcagctgactggtcccctcgactggagaatgcaagatgagttcatgcacatatctgctgtttttgtgaagatggctaggaggcttaatgttagaataggactggcatttgggtgcttccatgtggaatatctatgtggtgggggc

SEQ ID NO: 312643 - DNA, 578 bp, Homo sapiens
ataaacccaaattttcaaataaaatgaagaagagacttgctctcagcaatagatgcatatgaaataatggcatttgtgtgattataatcatgccaccagtactctaytattcttttcccaaaaaatatgtttgtaatcagagcttgactaccagttaaattctattagttttttgttggtggtggtagttcatatgtaaaacaggtactgtatgaacttttttcttttcctctttaattttctcacattcttttctaccttcttttatgcctcttaattccttactgatctttctatttctctatctatgtctcagctggctttgtgcctttgtgcctttttttctctgtttttgtatcttcttctttgtctctacctgtctttatttctctcattgacattggcttatttgtgccaaaacagaagagagcctaacaaaataacttacaaatacaacatcctcggtagattcagtagatgtttattgagtcaatgtccatacaggattcagtgcaagacaagattggtggatgtgcagtttataaggctaaagccagatgggcgagagatactgtgag

SEQ ID NO: 312644 - DNA, 602 bp, Homo sapiens
tggcacatttctttcttgaattagattctgcctgaaaggatcacaaaraaaggtaattaaaaaggtgaaaaatgctacaatgtggggaataaagtttaattttgacaaatttcatgatttgtcctggaatcacgatctagaggataaagatcaatatctgagccaaacagatccagaaatgaatctccgatcacattttgttgtgctgtcatcccagtcaagacatttgctacattttggcctccacatagttagactctatacataagtctattgctcacatataagtagatatagtagtccccaaattgatgaaaaattagagaaaattaatgaaaacacatgacagtgtctgctgcatagcaggcatgcaaagagagtaagcaaaaataaccatcataaacgtattagacttccagagtcttcatagtacacttgaacctagtcttgatatttggttgaggaaatgcattcatcctgtgtatgtcttttatttattcacctaaatattaaaatttaatttattctatttaaggtgggaaacttgaattgaggtaggggtaaaaccctcttagttcatgaatcttgtatattaattaata

SEQ ID NO: 312645 - DNA, 550 bp, Homo sapiens
ggtgacttacagagacacttgtggccaccactgagctaggcttgttgtcaggcagtagcatctgtagttctctatggaaacactaagatacagggcattttcttacaaaagagtaaaattcaaagtcactgtaactctagggccttgtcttattttataaagatgaacatcctaattcccctaacatttactttatgtctgaagtttgaggcattcatatttgcaagggaaattcacacacacagggaaattcacacacacacacacacacacacacacwctctctctctctctctctctctctctctctctctctctctctctcggagtgtcagaaataatagattgaatctgaatctactaaataaaaatatgtggagaagaaattaataatttccttataaagtacttttaggttcccatatttaattagcacatgcctaggtttacaactgtggtcctgatatgagaagtcataaccctggagtgttagtcctttaagttttttgggcattgctttaaataaccttaaatactgagtatgtactat

SEQ ID NO: 312646 - DNA, 578 bp, Homo sapiens
tcatttattcatttaatttgggaagactttgaggtttagggaaactaaacattttttccccaggtcacacagtgaatacaaggcaacataaggattgtcagagctgtcagacaaaagattcttacctcttaactaaatgggacagtagagagatcacagagatggtaatcaggaaacctggttgctctgcctaattttctccctacttatctacaacctcagacaagctagttattaactcttgcctccatttattcatctatcctaccttctagccaggattgaatgagtcccaagagtcatagaaaaagttaagactgtattacacatgttgatatcacttttatcaatgttagtctcagtgctgaaatcattccctaatcatacataactgggctctaaagcatcttgaagatactatgacttcacaagacctgcttacttctaactggagagcaaagagcagcacatctgttttaataytaaaatttaaaatggatcaaaaatcaactttctagactcacaggataactagcattcttctccagctagagacagccctgcccctatcatggacc

SEQ ID NO: 312647 - DNA, 577 bp, Homo sapiens
tttccctccacaattctttcaggagtccactgttgtttatggtattttggtaagagtttcattcacagacatttactcttggatattgatataatacaaaatcccgctccaacattaagagaacaaatataggattctttcagttgccacatatgtctcatgttaatatatatccaaaaactggggaaatatccacagggtgtattctttttacaagctccaggatacagaattagttcagaacaaaacttattgcttaacccataatgtcatattctcaccattgaaacacagtcatgttttgggtccctctgattaatattagctctaagatgatgtccagtaatctctgaaatctcatcttattattcctcagcacctagttacccttctacattgcttcagatccagttactgaaatccaggaggaatatgtgtagtaattttacatgtgtagcatctatggacctccataatttgcstgtatacgctattgatgtgtcctgggtagtacattttctagtttaactgggtacagaagtaactctctagctctctgtaaaatagactgacagta

SEQ ID NO: 312648 - DNA, 577 bp, Homo sapiens
tttccctccacaattctttcaggagtccactgttgtttatggtattttggtaagagtttcattcacagacatttactcttggatattgatataatacaaaatcccgctccaacattaagagaacaaatataggattctttcagttgccacatatgtctcatgttaatatatatccaaaaactggggaaatatccacagggtgtattctttttacaagctccaggatacagaattagttcagaacaaaacttattgcttaacccataatgtcatattctcaccattgaaacacagtcatgttttgggtccctctgattaatattagctctaagatgatgtccagtaatctctgaaatctcatcttattattcctcagcacctagttacccttctacattgcttcagatccagttactgaaatccaggaggaatatgtgtagtaattttacatgtgtagcatctatggacctccataatttgcctgtatackctattgatgtgtcctgggtagtacattttctagtttaactgggtacagaagtaactctctagctctctgtaaaatagactgacagta

SEQ ID NO: 312649 - DNA, 592 bp, Homo sapiens
ttttacaagctccaggatacagaattagttcagaacaaaacttattgcttaacccataatgtcatattctcaccattgaaacacagtcatgttttgggtccctctgattaatattagctctaagatgatgtccagtaatctctgaaatctcatcttattattcctcagcacctagttacccttctacattgcttcagatccagttactgaaatccaggaggaatatgtgtagtaattttacatgtgtagcatctatggacctccataatttgcctgtatacgctattgatgtgtcctgggtagtacattttctagtttaactgggtacagaagtaactctctagctctctgtaaaatagactgacagtaagtttctcttcttcagacctagagtggtttttaaaaaactgtattttctttatttctattttacaagtattattgcttttgaggatgctcatcaaattgtccaagcctctgtggatcagaacatgagggttagagcactagtccaaatcatattcrgtagttcaacacaaacatgtgtcttttaccactttggagtttactagaaccatccatgtagtaatag

SEQ ID NO: 312650 - DNA, 488 bp, Homo sapiens
aaatgatcgggtcgctgatgtgttgcttaaatgacagaacttccccacccctcttgctggttgtcgtctctctggcattggtcagtagcccatacaattgcaaaactattcatacaaagaattmctaaaactttttaaagagagttttattgttgaataaaccttaagcttagaaaacagagacttttattttctcagtcacaaatgaaaatcttcaggcgtccacactaatactaaaatgaagttatcttctatagcagtatattctccagcagaagaaggctcactaatgtctgtctggacaaaccatagagaacaatggacacagaaaaggcctccaagaaagaagaattaagaaatgctacttaggtggtctcaaaataaatcactccacctgcagaactcagagtctttgctcattcttcctttcacaaaagatgtcactgatgtttgctaaaaaatgaccattctagcctgtttctacttac

SEQ ID NO: 312651 - DNA, 575 bp, Homo sapiens
attgacattttacatattgaattacaagatgaaaagtgtaggcctacatgttgataagctggactgtaatgcttactcawcatccagagaaatcattatataactgcagtagctaattattttctataattaaacataagtttcaggataagtcagtatatgaccagtggtgtacctgaaatagaatatgcttatatattttcataacaaaattttcacccagttattagggcttctacagattctataaaacttaatctgaaatgcttgcatttaacaatcatgaaaattactgaaatatggagaaataaagtccaattttattttggactagatatgttcttctaaagcaattagaatataaatataatttgcaagcaaatagataaaatgtcaaaaccttcaaatacataatagttctttaacttagaaacaattaaaagtatacaactacattagaaaaaaatgtggaagggtgagattcttttcaggtatttgataaatgctgaaaaaaattagctacagttcaatagcaatcataataattattaaatagtctaactaggatgaatgaa

SEQ ID NO: 312652 - DNA, 575 bp, Homo sapiens
attgacattttacatattgaattacaagatgaaaagtgtaggcctacatgttgataagctggactgtaatgcttactcatcatccagagaaatcattatataactgcagtagctaattattttctataattaaacataaktttcaggataagtcagtatatgaccagtggtgtacctgaaatagaatatgcttatatattttcataacaaaattttcacccagttattagggcttctacagattctataaaacttaatctgaaatgcttgcatttaacaatcatgaaaattactgaaatatggagaaataaagtccaattttattttggactagatatgttcttctaaagcaattagaatataaatataatttgcaagcaaatagataaaatgtcaaaaccttcaaatacataatagttctttaacttagaaacaattaaaagtatacaactacattagaaaaaaatgtggaagggtgagattcttttcaggtatttgataaatgctgaaaaaaattagctacagttcaatagcaatcataataattattaaatagtctaactaggatgaatgaa

SEQ ID NO: 312653 - DNA, 573 bp, Homo sapiens
taagctaactccttgacggtgaggttgaggaaaaaggggaacccttatacactgcttctgggaatgtaaattagttcagtcactgtggaaggcaatctggagatgtctcaagtatcttgaaatagaactaccacttgccccagcaattccattactagctatctacccgatagaatataaattgttctaccctgaagacacacgcacaggtatgttcatcacagcattgttcacggtagcaaagacatggaatcaacccagatgctcatcaatggtggactagataaagaaaatatggcacgtatacaccatggaatactatgcagccataataatgaacaaaatcatatcctttgcagcaacatgcatctagctggaggttattatcctaagccaattaatgtcggaacagaaaaccaaacacctcatgtcctyacttatacatgggaactaaacatttagtacacaaggacaaagaagagaacaatagacatcacatcctacctgagggtggatgatgggaggagggtaaggattgaaaaactacctttctgatattatgcttactacctg

SEQ ID NO: 312654 - DNA, 599 bp, Homo sapiens
gaacctacaataacagtcagagaaaaaataactatttgatagagaaaaatataaataacatacaaagagaaactttcatcacaataatattttttgcattgatttcatccgatctcttactggtctagttaaagcacctaaaacatatttagattcatggtaaatctattctactgaataatataatataaatatactatayatattcatatataaatatataatataatataaatatatatattcatacataaatatatgaataatataaagcactcactccaaaaaaatcataaacaagttttaagtgtgtacagaaatgtaaatactatttaattgttaaaatattgttttcattctgttcacaaaattatttcattcatttcttaaaattcatagtattttcctttgtggctttgcacctgaagccaaagacattattttagggacaagctataataattcttccctttattatatctagaaaaggggatttctgaagcctccatgtaacacctaaagtgctgattatggcagcaagattccacagatgaggaaatacgtgacctacctgaggtaacttctgcaattaggaaatc

SEQ ID NO: 312655 - DNA, 599 bp, Homo sapiens
gaacctacaataacagtcagagaaaaaataactatttgatagagaaaaatataaataacatacaaagagaaactttcatcacaataatattttttgcattgatttcatccgatctcttactggtctagttaaagcacctaaaacatatttagattcatggtaaatctattctactgaataatataatataaatatactatacatattcatatataaatatataatataatataaatatatatattcatacataaatatatgaataatataaagcactcactccaaaaaaatcataaacaagttttaartgtgtacagaaatgtaaatactatttaattgttaaaatattgttttcattctgttcacaaaattatttcattcatttcttaaaattcatagtattttcctttgtggctttgcacctgaagccaaagacattattttagggacaagctataataattcttccctttattatatctagaaaaggggatttctgaagcctccatgtaacacctaaagtgctgattatggcagcaagattccacagatgaggaaatacgtgacctacctgaggtaacttctgcaattaggaaatc

SEQ ID NO: 312656 - DNA, 572 bp, Homo sapiens
taccttttaaatatatatgataataaagatagggtaatattaattccataaaaataataaagtaaaaccaggttttataatgcaatttacattggagaaattagaaaacgtgctgatttgaaggcaaactcaaaacaaaattaaaggtaaattgaatatttattttccctaatgataattccagtagctgtcctgtcatctaactagttattttgatcaaagccagtggtgacagctatatttggtattttgtttagatatataattaaagtgaagaattatgtctatgaatattgaatgtgattaaaaagaagtttccttatttttcttaagtatatrtgtatatatatatatccacatagttttgataatagtttccagtatcataaccttaaaagacttaaaagtgccacaatgcagtaaaatttctaccccaaaaaacacattctttttatatcattatagaagatatgagaaaagtgaatacaaaaaagaggaacctctacgtaaactagctgtaaggcttcacaaaaaaaagtcatagaagatcagagatcacagttttaggcagg

SEQ ID NO: 312657 - DNA, 572 bp, Homo sapiens
taccttttaaatatatatgataataaagatagggtaatattaattccataaaaataataaagtaaaaccaggttttataatgcaatttacattggagaaattagaaaacgtgctgatttgaaggcaaactcaaaacaaaattaaaggtaaattgaatatttattttccctaatgataattccagtagctgtcctgtcatctaactagttattttgatcaaagccagtggtgacagctatatttggtattttgtttagatatataattaaagtgaagaattatgtctatgaatattgaatgtgattaaaaagaagtttccttatttttcttaagtatatgtgtatatatatatatccacatagttttgataatagtttccagtatcataaccttaaaaracttaaaagtgccacaatgcagtaaaatttctaccccaaaaaacacattctttttatatcattatagaagatatgagaaaagtgaatacaaaaaagaggaacctctacgtaaactagctgtaaggcttcacaaaaaaaagtcatagaagatcagagatcacagttttaggcagg

SEQ ID NO: 312658 - DNA, 591 bp, Homo sapiens
tatttggtgtatgtgtattagatattttcagtgctggattttgacagtgtgtgtggtgtggccagtggtgtacatggctgaaatgaaagtgataccaaagctactagaatttatcaggtcaggaaatcataaggctaaggggcagtgatgtgaatgttgaaatccctcggtttcaaagctgaaattgggatggagtgaaaaaggtatcagattcacaagtgtgtggtgagtttttagttaatagactatgtaaactgatgactaatcttttgatcctggcaatggagatttagggaaaagcaactgttggtggtatatgggacatgatagaatgtgtgaaggtttcatttaagaaggytgcagaggtagcaaaattcttgggaagagctaggtttcaccaaatcaagtgtttggattataggttctgaaagagattgattgtgtatggtaatgtgtttataaaggataattggttcctaaaaacttaggtgtgacagttagtgggtaacatgacaagagaaaaataaattaagagggaattattcaagttaactgaataccttcctgtgcagttaagttagctagttaaca

SEQ ID NO: 312659 - DNA, 632 bp, Homo sapiens
tttcttgttctgttataaatatatgctgttctagtccttcaataagcctgtcacatttttatcatatctaaaggcactttttctgcagtgttaacaatgtcatcttcattgtcactaatgtcatgatcattttaattcagaacaatttttggctatatttcaataaatggacaactggagcctcattatcaatgttaaaacattttcagtatttacttattccagcttactgacagactctgaaggtatatttttgcatatgtagggtcatatttttttcttttgacatacagaattcttcaaaatcaccactttgtttatcatcaacattgaacataattgcaggccagagattgtgtcaggcatacactactctcttcagtcactgtgttccaagtgttggcaacaatatatacagaattttttatgctaaatttctttggaaaactttccacaaatacacccctgtccaatgtagctagcattttattcagaaagtatatatrttatatatatataattactcctcattgatgtaagaataccctgatcacatggctaaattgatgaaatcacagttgagggaaagtattggcaaaaactgcaattactttgcaccaacctaatacatg

SEQ ID NO: 312660 - DNA, 559 bp, Homo sapiens
tatatattatatatatataattactcctcattgatgtaagaataccctgatcacatggctaaattgatgaaatcacagttgagggaaagtattggcaaaaactgcaattactttgcaccaacctaatacatgccataaatattatatttgataaaaatgtcagctagagaaggagcagaagagtagttaagaagtaacaaaatctcacagttgccatacagttcattttatttgaagtgagcataaaccactggtagaaaatgtttgggcaggccgggcgcggtggctcacgcctgtaatcccagcactttgggaggccgaggcgggcggatcaygaggtcaggagatcgagaccatcctggctaacacggtgaaaccccgtctctactaaaaatacaaaaaattagccgggcgtggtggtgggcgcctgtaatcccagctactcgggaggctgaggcaggagaatggcatgaacccaagaggcggagcttgcagtgagccgggatagcgccactgcagtccagcttgggcgaaagagtgagactccgtctcaaaaaaa

SEQ ID NO: 312661 - DNA, 562 bp, Homo sapiens
aggctacttctcagtgtttcttttatatgtcttttccagagtaaagatctaaaaaattaaataattaaatttgataaaaatatttccctaaagtgtggtaaatagagattttagtttgaagacaaatttacatttgtactatgtagggctgtgtatacatgagcatataaacacacaagcatatgatttattaaaattactgcactctgctatcctagagaaagaagttcaaatttttccaacataattgtttaatatactcattgggattttaatcttaattacatgattcrtataaaaacatatttaatgtttaacattagtataaaacattaattaattagtgttactcaaagcaaagtgcacttatttcagataatccctagttaagcatcaagttttccttatgtgtttgtcattacaaaggaaaaaataaactatcaaagaatatgttcttgtcactaactcaaaaagggaagttaatcataacactcagaaaataacactcaaaaagcacatatgtacattcccagtaaacctggaaaggaaaatccagatagtt

SEQ ID NO: 312662 - DNA, 653 bp, Homo sapiens
atgaacagaagtcagcactgaagggatagcaggagaaaccggtggaggaataaggtgaagttggaaacacaggmtgaagccctagaccatagaggaacacgggcggtgctagagctgctcctgcaggctcctgctagctcaggacagccaaccgggcacgcccctttttaactccacgttcagtgaggtcacgttggttgcctgaaattgaacacgaaggacatatttacactgtgagatttaccaaagctgcaaatcactaacccaaccccacatcccaacacacacacacacacactccaggtttcccaatgtatcactagacaaatagaaaaagcaggctaccagtccctaccttgccagtaacagttttaagtataaatgaacactgtccaaaacaaaggcctgcacacttatttcaggctgaatattttagaattagggaaactgtttcttccacttcccttgcttgaggatcatcatgaagtttttgtgtgtttatatctgctcctctgagagtctgtgttgggccaataagtgtcactgtgctcccctggaacagggataggaccatggcaatcatacggctacgacacaggtagagacaagattttcagatgcaagatacgagtcaaccagtcacggctgaatgt

SEQ ID NO: 312663 - DNA, 653 bp, Homo sapiens
atgaacagaagtcagcactgaagggatagcaggagaaaccggtggaggaataaggtgaagttggaaacacaggctgaagccctagaccatagaggaacacgggcggtgctagagctgctcctgcaggctcctgctagctcaggacagccaaccgggcacgcccctttttaactccacgttcagtgaggtcacgttggttgcytgaaattgaacacgaaggacatatttacactgtgagatttaccaaagctgcaaatcactaacccaaccccacatcccaacacacacacacacacactccaggtttcccaatgtatcactagacaaatagaaaaagcaggctaccagtccctaccttgccagtaacagttttaagtataaatgaacactgtccaaaacaaaggcctgcacacttatttcaggctgaatattttagaattagggaaactgtttcttccacttcccttgcttgaggatcatcatgaagtttttgtgtgtttatatctgctcctctgagagtctgtgttgggccaataagtgtcactgtgctcccctggaacagggataggaccatggcaatcatacggctacgacacaggtagagacaagattttcagatgcaagatacgagtcaaccagtcacggctgaatgt

SEQ ID NO: 312664 - DNA, 564 bp, Homo sapiens
tacacaaatgagtatcccttagagtgtataaacaaaatcttctaaagtattatccaacaatctgcagcaacatttaaaaagaattatacacatgaccaaatgggatttagccaagaaataaaagattggtttatcatataaaaatcaracactataggccgggtgcggtggttcacacctgtaatcccagcactttgggaggccgaggtgggcagatcacgaggtcaggagattgaaaccatcctggctaacattgtgaaaccccgtctccactaaaaatacaaaaaattagccgggtgtggtggcaggtgccctgtagtcccagctactcgggaggctgaagcaggagaatggcgtgaacccgggagatggagcttgcagtgagctgagatcgcgccaatgcactccagcctgggtgacagagcgagactgcgtctcaaaaacaaaaacaaaaacaaacaaaccctataatacatcttatactagtagaaagaacgacaaaatccacattatcaactcaaaaaattgtcataatttattgaatgttaataatgtcaggcactg

SEQ ID NO: 312665 - DNA, 564 bp, Homo sapiens
tacacaaatgagtatcccttagagtgtataaacaaaatcttctaaagtattatccaacaatctgcagcaacatttaaaaagaattatacacatgaccaaatgggatttagccaagaaataaaagattggtttatcatataaaaatcagacactataggccgggtgcggtggttcacacctgtaatcccagcactttgggaggccgaggtgggcagatcacgaggtcaggagattgaaaccatcctggctaacattgtgaaaccccgtctccactaaaaatacaaaaaattagccgggtgtggtggcaggtgccctgtagtcccagctactcgggaggctgaagcaggagaatggcgtgaacccgggagatggagcttgcagtgagctgagatcgcgccaatgcactccagcctggstgacagagcgagactgcgtctcaaaaacaaaaacaaaaacaaacaaaccctataatacatcttatactagtagaaagaacgacaaaatccacattatcaactcaaaaaattgtcataatttattgaatgttaataatgtcaggcactg

SEQ ID NO: 312666 - DNA, 564 bp, Homo sapiens
tacacaaatgagtatcccttagagtgtataaacaaaatcttctaaagtattatccaacaatctgcagcaacatttaaaaagaattatacacatgaccaaatgggatttagccaagaaataaaagattggtttatcatataaaaatcagacactataggccgggtgcggtggttcacacctgtaatcccagcactttgggaggccgaggtgggcagatcacgaggtcaggagattgaaaccatcctggctaacattgtgaaaccccgtctccactaaaaatacaaaaaattagccgggtgtggtggcaggtgccctgtagtcccagctactcgggaggctgaagcaggagaatggcgtgaacccgggagatggagcttgcagtgagctgagatcgcgccaatgcactccagcctgggtgacagagcgagactgcgtctcaaaaacaaaaacaaaaacaaacaaaccctataatacatcttatactagtagaawgaacgacaaaatccacattatcaactcaaaaaattgtcataatttattgaatgttaataatgtcaggcactg

SEQ ID NO: 312667 - DNA, 472 bp, Homo sapiens
gtaaaaatatgtagtgaaaataaacattgataatataattttgacttaccttctccataaacattaaagactcaattatgattctgcagtaactactatctcaacaatgtacaaagtctgtcacaaagccacaattatgccatgaacatttatgccttaatgttgaattcaaaacagttacactaaccttattaaaacaaaaaagcatrctaatatttctcttactataataataaaaaaggtgacttgtcataacaagattaatattgtaccaaggataataataatgtgtgtgaactcttctaacacatatataaaattcacacctagtctatgtaattattaagtgctatttgctctaattattattgtttttcattcatattcctgagtttctctttagtattttgtttacatttgaattttcaaattaaattgtgtttataataaatggataccaatctaacactat

SEQ ID NO: 312668 - DNA, 472 bp, Homo sapiens
gtaaaaatatgtagtgaaaataaacattgataatataattttgacttaccttctccataaacattaaagactcaattatgattctgcagtaactactatctcaacaatgtacaaagtctgtcacaaagccacaattatgccatgaacatttatgccttaatgttgaattcaaaacagttacactaaccttattaaaacaaaaaagcatgctaatatttctcttactataataataaaaaaggtgacttgtcataacaagattaatattgtaccaaggataataataatrtgtgtgaactcttctaacacatatataaaattcacacctagtctatgtaattattaagtgctatttgctctaattattattgtttttcattcatattcctgagtttctctttagtattttgtttacatttgaattttcaaattaaattgtgtttataataaatggataccaatctaacactat

SEQ ID NO: 312669 - DNA, 472 bp, Homo sapiens
gtaaaaatatgtagtgaaaataaacattgataatataattttgacttaccttctccataaacattaaagactcaattatgattctgcagtaactactatctcaacaatgtacaaagtctgtcacaaagccacaattatgccatgaacatttatgccttaatgttgaattcaaaacagttacactaaccttattaaaacaaaaaagcatgctaatatttctcttactataataataaaaaaggtgacttgtcataacaagattaatattgtaccaaggataataataatgtgtgtgaactcttctaacacatatataaaattcacacctartctatgtaattattaagtgctatttgctctaattattattgtttttcattcatattcctgagtttctctttagtattttgtttacatttgaattttcaaattaaattgtgtttataataaatggataccaatctaacactat

SEQ ID NO: 312670 - DNA, 537 bp, Homo sapiens
ctgtaaatggggcaataacaatacttacataatgttctgtgaagattgagttggcaaacaagtggagagtagaatgttagataccagaggctggtaagggtatgtgagtgggatgaagaaaggttggctaatggatacaaacagagttacacagaagaaaaaagtctaatattcaatagcagagtaggatgactatagttagcaacaatgtattgtatatttcaaagtaggtacaagagaaaagttaaaatggtcccaacatatagtgatgctaaatactcaaggtgatggataccccgtatagcttgactcgatcattacaaattctatgcacgtaacagacaytcacatgtacaccataaatatgtaaaatattatgtatcaataaaataaactgagttgatacacataaaacactttgagtttctagcacaaagtagatattcaaataaagtcaaccaatattactaatatcagaaaactttattttctgattattctgtttaccaaaattttactggttatcaagagtttaat

SEQ ID NO: 312671 - DNA, 486 bp, Homo sapiens
caatgtcttctgtgacactcatttattatttcaaatctttaaaattcagtaactttcaacaatattcttgctagtatgtgaacatatctgtattcatccatgctctccctctctagtgctttgtaacacttggtcatagtgatraatatgtgcagtagctacagacataaacattagcattgctttggcaatgatggcattagaatatggcacaacctacctgctttcattgtgtcttatgatgttgacagacattgacatagatcacagttaagtttgaattattataatttttttctttttttgagaaggagtgtcactttgccttccaggctggagcacagtggggcaatctcggctcactgcaacctccacctgctgggttcaagcaattctacctcagcctcctgagtagctgggattacaggtgtgtgccaccacactcagctaatttttgtatttttagtagagatggagtttcaccat

SEQ ID NO: 312672 - DNA, 549 bp, Homo sapiens
atgtcttctgtgacactcatttattatttcaaatctttaaaattcagtaactttcaacaatattcttgctagtatgtgaacatatctgtattcatccatgctctccctctctagtgctttgtaacacttggtcatagtgatgaatatgtgcagtagctacagacataaacattagcattgctttggcaatgatggcattagaatatggcacaacctacctgctttcattgtgtcttatgatgttgacagacattgacatagatcacagttaagtttgaattattatwatttttttctttttttgagaaggagtgtcactttgccttccaggctggagcacagtggggcaatctcggctcactgcaacctccacctgctgggttcaagcaattctacctcagcctcctgagtagctgggattacaggtgtgtgccaccacactcagctaatttttgtatttttagtagagatggagtttcaccatattggctggtctcgaactcttgacctaaggtgatgcaactgatcacctgaggcctcagcctccca

SEQ ID NO: 312673 - DNA, 486 bp, Homo sapiens
caatgtcttctgtgacactcatttattatttcaaatctttaaaattcagtaactttcaacaatattcttgctagtatgtgaacatatctgtattcatccatgctctccctctctagtgctttgtaacacttggtcatagtgatgaatatgtgcagtagctacagacataaacattagcattgctttggcaatgatggcattagaatatggcacaacctacctgctttcattgtgtcttatgatgttgacagacattgacatagatcacagttaagtttgaattattataatttttttctttttttgagaaggagtgtcactttgccttccaggctggagcrcagtggggcaatctcggctcactgcaacctccacctgctgggttcaagcaattctacctcagcctcctgagtagctgggattacaggtgtgtgccaccacactcagctaatttttgtatttttagtagagatggagtttcaccat

SEQ ID NO: 312674 - DNA, 549 bp, Homo sapiens
atgtcttctgtgacactcatttattatttcaaatctttaaaattcagtaactttcaacaatattcttgctagtatgtgaacatatctgtattcatccatgctctccctctctagtgctttgtaacacttggtcatagtgatgaatatgtgcagtagctacagacataaacattagcattgctttggcaatgatggcattagaatatggcacaacctacctgctttcattgtgtcttatgatgttgacagacattgacatagatcacagttaagtttgaattattataatttttttctttttttgagaaggagtgtcactttgccttccaggctggagcacagtggggcaatctcggctcactgcaacctccacctgctgggttcaagcaattctacctcagcctcctgagtagctgggattacaggtgtgtgccaccacactcagctaatttttgtatttttagtagagatggagtttcaccatattggctggtctsgaactcttgacctaaggtgatgcaactgatcacctgaggcctcagcctccca

SEQ ID NO: 312675 - DNA, 585 bp, Homo sapiens
ctagtgttaaaagccacagttcacccaaatatacctttcccccactgtgtttcctgtctgctctcttccttgcttgaagtttagggattgggaataaaatacaaatatttcattctatgtttcttacccacaatctagactgcacgtacagarcgttatgtttgagtcatagataccaatttttcttgttgacaaagtgtttttttttctcagaaataagtttagaaaatgagagttactaaatgctatttcttcattatttgaaaagcagaaaagctaagaatataaatagataatctagaaatgtgctcctcactccttcctataaattaaaaagaagtataatctagaggcttgctgaaatcttttgcaagatactgtggtgtagtaaagaccacaaaatttagaatcaaagaggtcagggtactagactctattctgaatatatgacttttgttcaatgaacaccctgatgacattcgatttaccctttgtctctctcatagaattgttgtgaattcaatgccaagtactcatttccttcaagtcacacataataacttaaggattttttagtaatgtttt

SEQ ID NO: 312676 - DNA, 410 bp, Homo sapiens
tcttgcagacatgaaagaaaatagcttacattataattgtcatgatgacaaacataaataaaacaggttctgaacagctttcaggggaaaaattacatttttacatggtgatcatgagtgtgcattttttttctataacttcagctctcactcatagtcaaggaaggatataaacaaattcaatatagtactttatgttaacaggggtcaatgaggctgcctctcatccggcaattttgtcagtatcctayctgagaaacactgatctgttttcaaaatgctaattccacagtccagcacttgggcaagaaatccaacataacatgatccaagaaaaatatctggagagtataggtaccactcatcaattcttggtatccttctgttgttcactaaaaagattttgtcac

SEQ ID NO: 312677 - DNA, 410 bp, Homo sapiens
tcttgcagacatgaaagaaaatagcttacattataattgtcatgatgacaaacataaataaaacaggttctgaacagctttcaggggaaaaattacatttttacatggtgatcatgagtgtgcattttttttctataacttcagctctcactcatagtcaaggaaggatataaacaaattcaatatagtactttatgttaacaggggtcaatgaggctgcctctcatccggcaattttgtcagtatcctatctgagaaacactgatctgttttcaaaatgctaattccacagyccagcacttgggcaagaaatccaacataacatgatccaagaaaaatatctggagagtataggtaccactcatcaattcttggtatccttctgttgttcactaaaaagattttgtcac

SEQ ID NO: 312678 - DNA, 607 bp, Homo sapiens
aagtctgggaaacactgaagagcacgcctctgagttgccttgccttcccttggggcgaggaagctgaggcattgatctctaattattagccatcagctgtcattggctgagggctgctccttggaaagggcctgcctcctgggaagaggaagcaaagggcgaaagtcgcatattatgctataatacagcaaagcatggctggaatggtgagagcctaggggatatgggtggggcatcaacaattagctattgcagctaaaaatatttaaaatatttaaaaatattagttattaaatatatttaaaatactttttaaaactttatcatttttcattgttttcatcaggaatctcaatcagggattttaatttcctctagtgccagaaatagaaatgtaaacaattatattctgtagtttcatacacaaacttaaataaaaagtaaagttttgtatacttaaataccaaagtaaatgataatacatggcatgtttgattcgtttggagttaacaacacamaaactctataactagagaagtagtgcgtgttcttaaaataaagtcagagctgacattcatttgttacatttgttttacataaaaacctc

SEQ ID NO: 312679 - DNA, 565 bp, Homo sapiens
gtatctgaacacactgagagaatgaattactttcaaaaagacttcaataatattacagaaaattaatgtgtcccaacatttatctcagtcttctcaactccctggwtttaatctaaatgtaggtaggtatagcctgacttgagatagctacagcaagggttaaggagaaggagccaacaaaatgttcataacaaacagcacaggaagatgtgggagatctttaagagccaacaagccttgctgttaggagagccagtccttctctccttattttaatgaaattcttataattcccccaagggttgaattggctctgggttgacaggaccagaaggtcctcatgttttctccctgaggaattctgtaattttgttgccacaaacaaagctgaggataggaaagcatctccttttttgttttgttttgtttaatatgaaaataattgcctctactcttggagacctggcttaattagactaatctgattttccaccggcaaaaccaacactaaaatggtattgctccaagttctctaactatagagcaatcacacgtttcctcaaca

SEQ ID NO: 312680 - DNA, 475 bp, Homo sapiens
gacctatctctgaacttggaataaatggtatttcttcctatattcttgatttygttctattctaaatggggaaaaatcacaaatactttctacccaacttttaaagactgagcatgatggaattactttttaacttctgggtaaagaggattcaggtaacaatggattcagagaagccaatcctatatgtgtagttttggaaaatattctctttcagaatgattttcatggcaaagtgattgagctgagaattgaagccttgaagaactaccagaaggccaatgacctgaaattatcactgtatttgcagcagaattttgagccaatgcaagcatttttaaatcttcctgggtcccaaggtaggtagaatatcccaggtacacagtttgaggttttgttttgtttattttatattggagacctttacttgtaaagtgagcaacacaatgcctggcacacagtaagttaaatgtta

SEQ ID NO: 312681 - DNA, 479 bp, Homo sapiens
aagggacctatctctgaacttggaataaatggtatttcttcctatattcttgatttcgttctattctaaatggggaaaaatcacaaatactttctacccaacttttaaagactgagcatgatggaaktactttttaacttctgggtaaagaggattcaggtaacaatggattcagagaagccaatcctatatgtgtagttttggaaaatattctctttcagaatgattttcatggcaaagtgattgagctgagaattgaagccttgaagaactaccagaaggccaatgacctgaaattatcactgtatttgcagcagaattttgagccaatgcaagcatttttaaatcttcctgggtcccaaggtaggtagaatatcccaggtacacagtttgaggttttgttttgtttattttatattggagacctttacttgtaaagtgagcaacacaatgcctggcacacagtaagttaaatgtta

SEQ ID NO: 312682 - DNA, 576 bp, Homo sapiens
tttttagctccagaatcaaattaagtctaaattagtaaataagggttccattcaacttgattgtctcaggagatattttttctccttgcatgtaaaacattgaatcaactttgaattggaacagccacagatccacatcttcttttctctcctttccttttatgttcctggagaattaaatgatagggtactatacggcttagttaccacaaattaatgtagccacaggcaatggatcaatgtgttaaattgattctgcattcatttagcactaattatgggccagtttcattttctaacacatgtattcaaactctataggtttgtttgagcccaagtggatttgaaatctaatggagtcctatattttggttatgtggcctattttttcacctctagtatttgattatttaaaagmaaacaaatattctcttcataaaggattttaaaactaattatgtaaagaggttattaccaacctatttggtaataatttcttaatggtaggtgttgtagtattttccaactttgtgtatcacctggactattatttattcaatatttgttgtttacatt

SEQ ID NO: 312683 - DNA, 629 bp, Homo sapiens
ctatcttttcattttgactgcttaacacagtgcctagcattttaaagaggctcagtaaatgatatgtagaaggccacagaaagttaatttccaagtcccaggtctctcgatgtcttgccttgtgttaattaccackggattatatcatagttcctgagatcttcagatattttctttcactctaagttgtcattaatttcctatctcatgtcagtatagaagagttgatttgtcacaaaacacttcataatctgtaggaatccctcatactttctggtaataagcaaagtgagccagccaattcaaaatcttctttttctcaatgtcaatttaaatctttaaagatgcattttaaatatgaatttttaaatgtacttttgcactggaaacggtttacaagaaatcacagaattttggcattagaaggaactttaaataactataaagtttccttcactttccaaaaaaggatactggagttcagatacattgaaaaggtgtctaaattcctacagttaattggggccagggctggttaccagagcctaggtattaatactgccagttcatattccaatctaaattgtatctttcctctcctaaccacaaaaataatggcctctaaaacc

SEQ ID NO: 312684 - DNA, 589 bp, Homo sapiens
agtcactgcgtttttcctttgtaaggtttgtaaaaggttgctgaatttgagaaagatgaatacacttaagaaaaacggttgaaagacaagcattataatttagttcsattattattttttaggaattttaatacttacagtcagtaaaacataatgaatgttaataaacctccatatactttagaacaggggtccccaaactctgggccatggacaggtacccatctgtggcctattaggaaccaggccacacagcaggcagtaaccattactgcctgagctccgcctcctgtcagatcagtggctgcattagattgtcataggagcatgaaccctattgtgaactgcggatgcgtgggatttaggttgtggcttcttatcagaatctaataccttatgatctgcagttttctagaacagcttcatcccgaaaccatcaaccctccccatctccatccatggaaaaattgtcttccacaaaacagatccctggtgccaaaaatgttggggactgctgctttagaaaatttaattcatatccacccttcccacttaaattttaatgaatttaaccatcaccccttttatg

SEQ ID NO: 312685 - DNA, 626 bp, Homo sapiens
ctttgtaaggtttgtaaaaggttgctgaatttgagaaagatgaatacacttaagaaaaacggttgaaagacaagcattataatttagttccattattattttttaggaattttaatacttacagtcagtaaaacataatgaatgttaataaacctccatatactttagaacaggggtccccaaactctgggccatggacaggtacccatctgtggcctattaggaaccaggccacacagcaggcagtaaccattactgcctgagctccgcctcctgtcagatcagtggctgcattagattgtcataggagcatgaaccctattgtgaactgcggatgcgtgggatttaggttgtggcttcttatcagaatctaataccttatgatctgcagttttctagaacagcttcatcccgaaaccatcaaccctccccatctccatccatggaaaaattgtcttccacaaaacagatccctggtgccaaaaatgttggggactgctgctttagaaaatttaattcatatccacccttcccacttaaattttaatgaatttaaccrtcaccccttttatgaatgcagaaagttagtctcttgtcctcttattattgatttgtgaaataaagtg

SEQ ID NO: 312686 - DNA, 514 bp, Homo sapiens
agaactgagaataaattatgtaaccatcatattcccagccccagttgttaaccagttaagtcrtatttcctagaaaatttttctggccaattctatagcaatttcattactcattttgtatctttttgtttattcactattgtaatcagccccaggtgcttctaacatgaattttctgatatgaaataatattgatatgaaagactgcatacttggaattatccctatgttggtcatatgaagcctaattttttatttattttaatattcaaaggccatatccatatcttaattgtctaagtcaactgacctaattataatgtcatatttttaatgtttgtttaattattttcagtaaaagttgataattgtgtatgtccttgtcacacagttttaaaacaggcaaaggaacaatttcaacttctagtaatttagtgttggcctttaatggaacagtaaagaaaaagacaagcaaactcaacatcatgtgccatgatttgtcaactgtaaagca

SEQ ID NO: 312687 - DNA, 514 bp, Homo sapiens
agaactgagaataaattatgtaaccatcatattcccagccccagttgttaaccagttaagtcatatttcctagaaaatttttctggccaattctatagcaatttcrttactcattttgtatctttttgtttattcactattgtaatcagccccaggtgcttctaacatgaattttctgatatgaaataatattgatatgaaagactgcatacttggaattatccctatgttggtcatatgaagcctaattttttatttattttaatattcaaaggccatatccatatcttaattgtctaagtcaactgacctaattataatgtcatatttttaatgtttgtttaattattttcagtaaaagttgataattgtgtatgtccttgtcacacagttttaaaacaggcaaaggaacaatttcaacttctagtaatttagtgttggcctttaatggaacagtaaagaaaaagacaagcaaactcaacatcatgtgccatgatttgtcaactgtaaagca

SEQ ID NO: 312688 - DNA, 514 bp, Homo sapiens
agaactgagaataaattatgtaaccatcatattcccagccccagttgttaaccagttaagtcatatttcctagaaaatttttctggccaattctatagcaatttcattactcattttgtatctttttstttattcactattgtaatcagccccaggtgcttctaacatgaattttctgatatgaaataatattgatatgaaagactgcatacttggaattatccctatgttggtcatatgaagcctaattttttatttattttaatattcaaaggccatatccatatcttaattgtctaagtcaactgacctaattataatgtcatatttttaatgtttgtttaattattttcagtaaaagttgataattgtgtatgtccttgtcacacagttttaaaacaggcaaaggaacaatttcaacttctagtaatttagtgttggcctttaatggaacagtaaagaaaaagacaagcaaactcaacatcatgtgccatgatttgtcaactgtaaagca

SEQ ID NO: 312689 - DNA, 632 bp, Homo sapiens
aactctgtctcaaaaaaaaaaaaagtttaataacaggtcataaggccttgtattgcaccaactacctatcctaaaatatgtgtgttctaccatgaggaggaagtagaaaatatgtgtgtttgaaaaggaaatcttgagacccttcaggatcctcaaagtctctcattatatatttttttaattttgtcactttttagcaattatagctttaaaaataatataaacatatttggatcacagtcttctaaaatcttaaaacccactaaagattgcaaattgcataaaaacagttccttctttaacaaaaagtatggaaaaatatataaaataaactctaggctaacagatgcagataagcaaatggaagccaaaatagaagtatctttgaatttgttctctcaaaaattttatgaaaattctccaattttttagacaacgtaactttctcaagctttactcagaattttttgggaaagacattgtcccacctcacacccaatttaggtgattctcataagagtagtttccaaggtgccatctcttcatctcattagacttaacygagtctagtaacccagagttcaacaatagctccacctctaattgaccttgtaatttctctgagattccat

SEQ ID NO: 312690 - DNA, 618 bp, Homo sapiens
atatctaacttatagaatatcaggagaagagtaaacatcagtcaagaactttaccttctcttccarggatggtattagtgtgttcctggttgtgcaaaggacagttgtctcactttaggtggaattatgaccttgttattgtctttgattggaaattataatttaacaagatgcatatagatggtaagttgataaggggtggactatacttaaccatcattaatttgagacttcaacctgaccagattgagtgatgcctgcagggctggtgaagcattgtttctaggtgtgtctgtgaagatgtttccagtagactgaaagaggaagacctgccctcaatacgccagttggctgggggcctagctggaacaataagaagacaattggctctctctactctttctctcccttagggagcagaatgcttttcctcttcctgcctttggacatccaactccagcttcttcagcttttggactctggaacttgcagcagtggcctcttgagggttcttgggcctgactaagggctgtactgttggcttccctggttcaggggcttcagacttggactgagacatgctaccagcttctctagttcaccagtttgcagttggct

SEQ ID NO: 312691 - DNA, 618 bp, Homo sapiens
atatctaacttatagaatatcaggagaagagtaaacatcagtcaagaactttaccttctcttccaaggatggtattagtgtgttcctggttgtgcaaaggacagttgtctcactttaggtggaattatgaccttgttattgtytttgattggaaattataatttaacaagatgcatatagatggtaagttgataaggggtggactatacttaaccatcattaatttgagacttcaacctgaccagattgagtgatgcctgcagggctggtgaagcattgtttctaggtgtgtctgtgaagatgtttccagtagactgaaagaggaagacctgccctcaatacgccagttggctgggggcctagctggaacaataagaagacaattggctctctctactctttctctcccttagggagcagaatgcttttcctcttcctgcctttggacatccaactccagcttcttcagcttttggactctggaacttgcagcagtggcctcttgagggttcttgggcctgactaagggctgtactgttggcttccctggttcaggggcttcagacttggactgagacatgctaccagcttctctagttcaccagtttgcagttggct

SEQ ID NO: 312692 - DNA, 596 bp, Homo sapiens
gagtccttaggcagtatgtatgtattttattattcatctatcagcttcacctttaagaatgtgtagattatctttctgacactttcttgggagtgggaaagtctaagctatactgctcctgaactaactttaacattatctgtatcaaagttatataatttcctaagtttactagaagttggtggcccatcaatgtgcattttactaattctttcacagaaacctggtaatagctcctgtttctgcttcatgttggagtctattcagttttaaatataacaattaacaaggtttgctttagcttgttttacagaatgtctgtttactatgtcactaattttgggctttgtacaaatgttttatacttcaccaagagaaataatccagcttcatgttttgtaccytttcacataatatttccccttattaaaatgactatataaaagtttgtttataaagcttttgaccaacacctatgttgaaaaattattaaaagatggaattttgcaatatgtttttatgctggtggtaatgatcaagtaaggagagagaagctggccatgcaggaaagataatgtgaaattgttgaagtgttg

SEQ ID NO: 312693 - DNA, 567 bp, Homo sapiens
agctagtgtaagtgataggcacatgtcacatagaattggaacmcaaatgtgccttgctcttgtgactatactgtttgcacaatagcatcaccaaagacaataaagagttttcttcctgagctctctcctgtctcctatgattatgaaacagtcattcaatgaatatttgactctttgctacagtcaaggcattgtgaattttattaatataacacttagagaggaaaaaataagtcaagcctaaaattagactctaaaacaagcagtagttataaaaatggaaagtatgactcaaagcatattgagctatttgtgctcactgccacggggggcattgctgacttataagtggaagaacaggtgaatagattgcacactggagaaattccataaggtgaatataattttaaactcatccacaacaccacataggaaaaaaatattaggtaaaaacctaagacatacagaaatgcatttagctgcaatatggcagggggcaagctatagattaggatttttatttctatattcctttgtaaccctattacatctgaccactcaaacctt

SEQ ID NO: 312694 - DNA, 567 bp, Homo sapiens
agctagtgtaagtgataggcacatgtcacatagaattggaacacaaatgtgccttgctcttgtgactatactgtttgcacaatagcatcaccaaagacaataaagagttttcttcctgagctctctcctgtctcctatgattatgaaacagtcattcaatgaatatttgactcttygctacagtcaaggcattgtgaattttattaatataacacttagagaggaaaaaataagtcaagcctaaaattagactctaaaacaagcagtagttataaaaatggaaagtatgactcaaagcatattgagctatttgtgctcactgccacggggggcattgctgacttataagtggaagaacaggtgaatagattgcacactggagaaattccataaggtgaatataattttaaactcatccacaacaccacataggaaaaaaatattaggtaaaaacctaagacatacagaaatgcatttagctgcaatatggcagggggcaagctatagattaggatttttatttctatattcctttgtaaccctattacatctgaccactcaaacctt

SEQ ID NO: 312695 - DNA, 567 bp, Homo sapiens
agctagtgtaagtgataggcacatgtcacatagaattggaacacaaatgtgccttgctcttgtgactatactgtttgcacaatagcatcaccaaagacaataaagagttttcttcctgagctctctcctgtctcctatgattatgaaacagtcattcaatgaatatttgactctttgctacagtcaaggcattgtgaattttattaatataacacttagagaggaaaaaataagtsaagcctaaaattagactctaaaacaagcagtagttataaaaatggaaagtatgactcaaagcatattgagctatttgtgctcactgccacggggggcattgctgacttataagtggaagaacaggtgaatagattgcacactggagaaattccataaggtgaatataattttaaactcatccacaacaccacataggaaaaaaatattaggtaaaaacctaagacatacagaaatgcatttagctgcaatatggcagggggcaagctatagattaggatttttatttctatattcctttgtaaccctattacatctgaccactcaaacctt

SEQ ID NO: 312696 - DNA, 631 bp, Homo sapiens
aagctggcacacctttctgcttgcgctgcctctagcacctcacccagcaactaacccagtttagtcagaccttccaacgttaagggaggttctatatttagacaatgttccctgcctgaggatgaactgtactggctgcagtgtcacaccttaacatagcactgttcctaatctttgtttgttgggggaaaccagcagccktctctggcacatgaacttagagagaccccagaagctcatctaattcaactcctttttacagcatccaagtgcagactttggagccactgcctgggtttgaaccatagtcccaacactttctagctctgggactatggttcttaccatagggtgtctttggactagttcctcaacctcttctttgcctcatttttctcatctctaaaatgcagacaatagtactatttacatcaaagggcatttgaaatggtgagtagtctatgtaaagcactaaatcagtgcctggaacatagtaaattcaaaagaaactttagtcattactatttttattgtttcagatgtgcacactaaggctcagagacatgatatgagctgcccaggttaaccagcaatttaatacacactcagacctggaattggtctattgggg

SEQ ID NO: 312697 - DNA, 486 bp, Homo sapiens
caaaccatcatgaaacagcattgatttttaccacacgtagtacactctgaatagatcctgttcctggctgcaccaccaccaacaccttttttttttkcaaattctgatcacaactgattaaattgatttcatgacctatcaatgggtcatgactcacagtttgaaaatctatgctggactggacacagtgcctctgcctgtaatcccacactttgggaggccaaggcgagcagatcacttgagcccaggagttcgaaaccagcctgagcaacagggtgaaatctagtttctacaaaaaacaaaacaaaacaaaacaaaaaaccagctgggtgtggtggcatgtgcctgtaatcccactcactcaagaagctgaggtgggaggatcacttgagcccaagatgccaaggcttcagcaagctgagatcatgccactgcactccagcctgggtgacagagtgagaccctgtctcaaaaaagaaaagaaaa

SEQ ID NO: 312698 - DNA, 585 bp, Homo sapiens
ccctactttaactacttaacgttattgcactttatttgtgcttcacagatacagtatttttcacaaattgaaggtctgtggcaaccttgtgtcaagtaagttcctatttccaataacacatgctcattttgtgtctctatgtacatattggtaattcttgcaatacttcaaattttttcattattatyatatctgttatggtgatctgtgatcactgatctttgatattactattataactgttttgaggcaccacaagttgtgccaaaataagatagaaaacttaatcagtaaatgttctgtgtgttctgactgctccactgactggtcattcccttgtctctgtccctctccttgggcctccctattccctgagacacaacaatatcgaaatcaggttaattaataaccctagagaaaagaagagtcacacaactctcacatgaaatcaaaagctagaaataattaagcttagtgaggaaggcatgtcaaaagctgacctaagccaaaagctaaccctcctgtgtcaaagttagccaacttgtaaatgcagaggaaaagttactgaataaaattaaaagtgct

SEQ ID NO: 312699 - DNA, 529 bp, Homo sapiens
attccaagtaaattaatacatacataaaaaatatacagagcatatttccttatcagtttccagacactgaagatgaatagcagaaagagttgatagtgtttcacatttagagctgctaaggacctaaaaacattttttaattagtttttcttcgcaattctgggtggcaggaccatatggctacccatttatttttaaaatgaagagaataaggcacatagggttaaatgatttgctgaaattactcaaactgccaccttctggcagtaaaaatagtagtaatcatttatatagggcttcctgtgtgacagacaaaatgctatccatttatatgaattatctcagtccacattggcaccatgaggtagatgctatcctattttctcaattgtaatatgctaatgtttttaacattttaacatctctaatattggtgaattttacaatcaatgtcatgttatagtttaattggcagcrtttttttcttccttagttgtacataaaataatgatggcactccagattcaag

SEQ ID NO: 312700 - DNA, 643 bp, Homo sapiens
ggacacataggagaggaaacaaaatggtcactttcttcaattagctgccacccttcttgggaagaaagcaaaccatatgcaataacaataaagaacaaatgaatgaataaaaatgtactgggtgacactacatgccagaacttgttatgctttttagattgtaaggctctttcacatgttatttaagaatggtcaagtgtatataattaaaagctaggctatgtagtcttttcagagctacagaaggttggaggagagaaatatcaattaagctacattcagagatggctgtgttgaagtttagaggatttcagccaagatgttgagctattgtggagcaggtcaagttggagagaaagaagcacactccagaggaaagagatctgatgcaaacaaggcaagaagcataaaaagctgatcacagtgtccttacaggcatatgcttttacgggaacagagcttatagatggaaggtgggaaactagaggtggactttacaagaccarttaaaaatttggaagaatgtcagtttagaagaaaatgtgtaggaagacaaaaaaatgattgtaaatagggagagggtgaaatatctagagtagggagctgatgtgataaaaagaaatttaagggatattggttttgt

SEQ ID NO: 312701 - DNA, 524 bp, Homo sapiens
aatagggagagggtgaaatatctagagtagggagctgatgtgataaaaaraaatttaagggatattggttttgtagtggcaatataactacattttaaggtacagcagctagatcatcaggattttggctcttctgaccccatatttctactttccgcaacacttaagttacaaatattgctcttatcatttgtggaataacatatcacttagagattttaggtccgctatttgatttactgaacctacaatgacagatggcttaatgcaatataaagtgctaatcctacttacccaatttgaagattgtcatgcaaaattttctcaaaaacagaacagttgtttatttgcccaaacttcatttattcactgtcttcctaaccttctgattcagggttaatttaaaacagaatcaggaaaataaatgccattagttcttttccttccttcaatttctaggcacagtgagggcctagcagagatagaataaggttaggagtcctgtaggatcctcagccttccat

SEQ ID NO: 312702 - DNA, 498 bp, Homo sapiens
tgggtctcccgcagtaatagaaagcatccgcaagtaggagaggcatatggacagtgcttgttgcttagccttaggttgggtgacaatgtcttccagaaggtaccatgaagtcacaccctcactttcaccccccaactctgcatgtccctcttgcaaagggggccaagcaagaatccacctctgattagatcatcaccttctgtgaaaggactccatttcctaacatagagtagacttatctctaaactgtgaaaacccttctcagaccacaacaaagtttccattattggttgtcttagaaaacaaacttgtcaaggcctaagcatatggcaataagaaaayggatatgtatttttctattaacaggagtcagaatgcagttgtatataggaattggaatgtgttagctgctaggagagagaagccattgattcctgcagcagtgtgactaattaggttttcttttgtgaaggaattagtttgtattgattcatttat

SEQ ID NO: 312703 - DNA, 545 bp, Homo sapiens
aattactttttatctataggtaaggtgttactactctgtcaccactttcaggtatttttctatctttatatttttcactctatgactataatgagtgaatttctttggggttcattcagttttttgaatctgtgggttttgtgtctcttgccatttgggaaaaattttaatcattatttgagtgcttttttagaccaactttttttattttcattctggacctctaataatgtaaatgttattttttccttatatttttactagttcctaaggttatattcagtatgctttttccctctgtgttmtagaatgggcgtattagtcagggttctctagagggacaggactaataggatagacgtctatatgaaagggactttattaaggagaattgactgacacgatcacaagatgaagtcccacaataggctgtctgcaagctgaggagcctggaagccagtccgagtcccaaacctcaaaaatgaggaactgacagtgcagccttcagtctgtggccgaaggcccaagagcccctggcaaatcac

SEQ ID NO: 312704 - DNA, 599 bp, Homo sapiens
taatgtaattccaattatctgtcatctcagtgttggtatctattcatttttaaacattctattgagaactccctggttcttggtatgatgaatgagttttttcattgaaatttgtacgctttggaagttatgttatatagcgtagtcttactcatttccttattttagctatttctcttgacactgtttaatatgtgaaggacaggtgctactcactaccatcaggtgagggtagaaatccaggttcctctrttgacacccagtgagggttactgcttgtaacttctggccagggtaggatttctggctcctcactagttgccattgctacctttcttgctgggaaaggtgaaagtgtctcactagttgttacgcacatggccttcactggcttcctgtgtgtttgtgagccttgaccatttcattgctgggcagggtgaagcccccactcttgtttgattctgtctcagtggggtggggtggaaaacctgttactccaggactgttgtcaagtcctgtccttcaaatggtttccactgaaacctgggaggggaggaagtagtccttaactgcaggacatcaaagcagaaattcttaaa

SEQ ID NO: 312705 - DNA, 520 bp, Homo sapiens
attcattttcagagctgaaaaataaataatgcaccattggttcacggaggatttccttggatggttctgatgaaaccctccctcttcagactcccgtggcactgatcaggttgaattcacatgtaaacacaaatctgggcattgctatgctccagcagcactagaagggggaagagagaaaaacactagggtgggaaacattccagttgggaaggatggtggagactgggaaatcttactgtagagattttgaagaaaacacaaaatctcaaagaaggaggaggcttgagactgtgactatgaagagaagaactttgaaaggtttaatttgtttctttccctctgaattggagagcaggatttccagggatgaccacccacaatgtgactgaaaaatattaaacctgaacaggttggcgaatcaggaatagtgtaagaggttccacagcatttcagaaacattaaattrgacggtacaaaaatccatcagggaaaccctatatggctccagtcaccagcc

SEQ ID NO: 312706 - DNA, 569 bp, Homo sapiens
ttcatttatggtactctgtccagcaatcaaagaccaaacatgtccaggacaaagaccaaatggctaccatcaaagtaaacttttccagaaagaaattttctttgtcttcccaaatactgtcaacatctctctcaggagtaaggtgtccttactgcactagatgtgtccccactgtactctcctggtggaggtttgatgtatggggatgggtgcacactcctgcccgctccrtccttttttcagttccaactcttaattccttatttttaattccgattcctaattccaatgtttaatttcaaatctcctagactcttggtgtacatcaatgccatgttgccttcataaagaactactctctatgttatccttttactgcatttccatttaatttgtaggatcctttaaaggctctgtatcctagtacattattttgtttagtaggatcctttgagattctttctctatattgttgttatatgtgaaccctggcactatttttccagcttttagaaggagtcctcattttccagaactgtgagcaggaaagacagtctcctggattcact

SEQ ID NO: 312707 - DNA, 539 bp, Homo sapiens
ggattgctggatcttatgttagttctgtttttattttttagaggaatgtccatagtgtttttcatactagctgtaccattttgcaatcccaggtgaagataacagaatcacagggatggtttcccccacactgtccttgtggtagtgaagaagtctcatgagagctgatggtttcataaaggggagttcccctgcacacactcccttgcctgctgccatgtaagatgggacgctgctcctcattcaccttctgccatgactgtgaggcctcccacggcatgtggaactgtgagtcaattaaacctctttcctttatcaattacccagtctcgggtatgtctttattagcagtgtgagtacagactactacgtatgtgagaaatgtctattgaaacctttggcccatttttaattgggttattagtgtttgtgctattgagttgcaggagctccatatatattttggaaattaatgccttatcttacttatggttwacaaatgtcttctcccattccatacattctgtaggttgcctttt

SEQ ID NO: 312708 - DNA, 495 bp, Homo sapiens
tcacacctaagtgtttaaatgattttgggttgatttttgtgtatggtgcaaaattggagcccaattttattctcctgcaggtgaatatacagttgtttccccagcactgttttctgaagtgatgtcctttctccactgggtatycttggcctccttgaggaagggcagttgatcatgcatgtgtgggtttatttcttggctctctattctgcgaggaacatgagaattgccataaggatgatggtggagtctctatttaagaatttcacaaatctcaataaccaattttattttttaacaaaaatatattgaactatttgtatggggaggcatttgcatattgataactaaaagtagatgagatagttctggcttcaaggagttctaaaccataaaatagaggacaatgttggatctaatcttctccttatcatagttaatcccaaagagaaacatggcaacaggttatgcacaaaaaaaagccaaggtcaccat

SEQ ID NO: 312709 - DNA, 495 bp, Homo sapiens
tcacacctaagtgtttaaatgattttgggttgatttttgtgtatggtgcaaaattggagcccaattttattctcctgcaggtgaatatacagttgtttccccagcactgttttctgaagtgatgtcctttctccactgggtatccttggcctccttgaggaagggcagttgatcatgcatgtgtgggtttayttcttggctctctattctgcgaggaacatgagaattgccataaggatgatggtggagtctctatttaagaatttcacaaatctcaataaccaattttattttttaacaaaaatatattgaactatttgtatggggaggcatttgcatattgataactaaaagtagatgagatagttctggcttcaaggagttctaaaccataaaatagaggacaatgttggatctaatcttctccttatcatagttaatcccaaagagaaacatggcaacaggttatgcacaaaaaaaagccaaggtcaccat

SEQ ID NO: 312710 - DNA, 495 bp, Homo sapiens
tcacacctaagtgtttaaatgattttgggttgatttttgtgtatggtgcaaaattggagcccaattttattctcctgcaggtgaatatacagttgtttccccagcactgttttctgaagtgatgtcctttctccactgggtatccttggcctccttgaggaagggcagttgatcatgcatgtgtgggtttatttcttggctctctattctgcgaggaacatgagaattgccrtaaggatgatggtggagtctctatttaagaatttcacaaatctcaataaccaattttattttttaacaaaaatatattgaactatttgtatggggaggcatttgcatattgataactaaaagtagatgagatagttctggcttcaaggagttctaaaccataaaatagaggacaatgttggatctaatcttctccttatcatagttaatcccaaagagaaacatggcaacaggttatgcacaaaaaaaagccaaggtcaccat

SEQ ID NO: 312711 - DNA, 495 bp, Homo sapiens
tcacacctaagtgtttaaatgattttgggttgatttttgtgtatggtgcaaaattggagcccaattttattctcctgcaggtgaatatacagttgtttccccagcactgttttctgaagtgatgtcctttctccactgggtatccttggcctccttgaggaagggcagttgatcatgcatgtgtgggtttatttcttggctctctattctgcgaggaacatgagaattgccataaggatgayggtggagtctctatttaagaatttcacaaatctcaataaccaattttattttttaacaaaaatatattgaactatttgtatggggaggcatttgcatattgataactaaaagtagatgagatagttctggcttcaaggagttctaaaccataaaatagaggacaatgttggatctaatcttctccttatcatagttaatcccaaagagaaacatggcaacaggttatgcacaaaaaaaagccaaggtcaccat

SEQ ID NO: 312712 - DNA, 506 bp, Homo sapiens
cttcccgagcactggtgttgcctgccagggtgccccttcctgtccgtttctgcacacgcccagactcattcagccagatccactcctcttctctccacctccctccccaagtggtgtggttgttccatgaatgctgctgacttgcgcatggaatacgtgacagctctctctcctcttcatgcctttccatttccctcccaatcctgacttttcctttgatcaactcaagtgtggaaacactttctactctacattttcctttcaataactgtttttaaaccttgaaaatttccttttattcttctgttttccacgtgccaagaaataacrcaaagaatgcaaacaaacaatgggaaaacagaaaccattcagttgtcaggaacacacatcctattttatggaatgaaatgttgaccccaattccagaaaaaaaaaaaagaaagaaagaaatccagtaatccagtagatattcttagttggatggtactgagggcttatatgtgtgt

SEQ ID NO: 312713 - DNA, 622 bp, Homo sapiens
tattgtacaaatttcttcaaaattgtgctatgcttgtcactgaagtcaactttctccttaattaaactgtcttgctacttgtttctgctcttagaattatacttcttctgaattagatagcaggaaaatattaaagaaaaaaatgaaaaaaaaaataacagtatagaacgtacttacctcaawttttctgtgacctctgccttgaatcctgtccctttccactaaaatacatcataagtaatagtctcccagtttcccacagcaggagctcgattccagacaacatttacataacattgcatccctcactggccatgacaagagcagggatttttttctcatccctcctagatgacaataatgctgcatactctacagcaagcccactctgacctttctggtcctgcttgaataatatcaggttggtgcaaaagtaatttctgttttctctgttgcttttaatgatgacaacagcaattacttttgcgccaatctaatgtatatcttgtggttgagatttccaatcacagcaattgctctgctccattcgcaataagtccactcagacacctgcacttactgctcactagagagaatgattcttgctcaaggatttccatta

SEQ ID NO: 312714 - DNA, 570 bp, Homo sapiens
tgtttgtctttctttctcctttttcctgttttagagacaaagtcttgctctggcacccaggctgaaatgcagtggcatggtcatagctcactgtaaccttgaactctactccaacaatcctcctgcctcagcctcctgagtagctagtactacrggtgtgcattactacgcctggctaagttttttggttttgaaacaggatctcactatgttgcccaggccggacttgaactactggcttcaaacaatcctccagccttggttttctaaagtgttaagattacaaatgtgaaccacggcccctcgcctcccttctttatatcactgaataacattccattgcacgaatgtaccacagcttgtttattcattcacctattaaagaaatcttcattgcttccaactcttgccaattatgaagaaagctactatacacatccatgtgaaggttgttgtgtggacataagtttttagcttacttaagtagatatctaggactatgattgctggatcatataatatgtttagttttataagaaatcttcaaactgtgttccaaagccactgtgc

SEQ ID NO: 312715 - DNA, 570 bp, Homo sapiens
tgtttgtctttctttctcctttttcctgttttagagacaaagtcttgctctggcacccaggctgaaatgcagtggcatggtcatagctcactgtaaccttgaactctactccaacaatcctcctgcctcagcctcctgagtagctagtactacaggtgtgcattacyacgcctggctaagttttttggttttgaaacaggatctcactatgttgcccaggccggacttgaactactggcttcaaacaatcctccagccttggttttctaaagtgttaagattacaaatgtgaaccacggcccctcgcctcccttctttatatcactgaataacattccattgcacgaatgtaccacagcttgtttattcattcacctattaaagaaatcttcattgcttccaactcttgccaattatgaagaaagctactatacacatccatgtgaaggttgttgtgtggacataagtttttagcttacttaagtagatatctaggactatgattgctggatcatataatatgtttagttttataagaaatcttcaaactgtgttccaaagccactgtgc

SEQ ID NO: 312716 - DNA, 570 bp, Homo sapiens
tgtttgtctttctttctcctttttcctgttttagagacaaagtcttgctctggcacccaggctgaaatgcagtggcatggtcatagctcactgtaaccttgaactctactccaacaatcctcctgcctcagcctcctgagtagctagtactacaggtgtgcattactacgcctggctaagttttttggttttgaaacaggatctcactatgttgcccaggcyggacttgaactactggcttcaaacaatcctccagccttggttttctaaagtgttaagattacaaatgtgaaccacggcccctcgcctcccttctttatatcactgaataacattccattgcacgaatgtaccacagcttgtttattcattcacctattaaagaaatcttcattgcttccaactcttgccaattatgaagaaagctactatacacatccatgtgaaggttgttgtgtggacataagtttttagcttacttaagtagatatctaggactatgattgctggatcatataatatgtttagttttataagaaatcttcaaactgtgttccaaagccactgtgc

SEQ ID NO: 312717 - DNA, 570 bp, Homo sapiens
tgtttgtctttctttctcctttttcctgttttagagacaaagtcttgctctggcacccaggctgaaatgcagtggcatggtcatagctcactgtaaccttgaactctactccaacaatcctcctgcctcagcctcctgagtagctagtactacaggtgtgcattactacgcctggctaagttttttggttttgaaacaggatctcactatgttgcccaggccggacttgaactactggcttcaaacaatcctccagccttggttttctaaagtgttaagattacaaatgtgaaccacggcccctcgcctcccttctttatatcactgaataacattccattgcacgaatgtaccacagcttgtttattcattcacctattaaagaaatcttcrttgcttccaactcttgccaattatgaagaaagctactatacacatccatgtgaaggttgttgtgtggacataagtttttagcttacttaagtagatatctaggactatgattgctggatcatataatatgtttagttttataagaaatcttcaaactgtgttccaaagccactgtgc

SEQ ID NO: 312718 - DNA, 549 bp, Homo sapiens
agaagaaaagacctgaaatctatttatccaacaaatgactcctaccctagatgcatgaacacctgctacaaattattgtgagaaatgataaacaactccattaagaataagcacaggacttgcgcaagctcttcccagaagatgccaaatggtgcactcacagccaagacctcaaaaccattcrgcacgagataaatgcaaattcaatcatcaaaaatatatcctcgccagaatgacaaatgaatatagctggcagtctctagggctatctagatgtggaagtttactttttacacttttccttgtaattaagataggtttaaatacattcggccacatttggaccttattccttttgacatagaatattctctagttagaaagctgagcatgggaatactaaaattaacacctcttggtataactagccaacacaggaactggtgtatgctatatgcacagttaaaaggttaataaagattttgggtagatcaataattatataactataccaaaaacaaacaaaaaaactctactgaacgataaaca

SEQ ID NO: 312719 - DNA, 446 bp, Homo sapiens
cacaaacgacgatgtgactttaccccatatgcattattgatkatgctctcttgacccctaaaaccaaaaatgtgctgttgtcccataaagccagatttcaaaaagagatatgtaatgtttgtggggattttaaagctcctatccatcaaaccttgatcatgtcaatctaatgttatttatgatattaaatgggttcagattaatcaatctaactgcacaacctgtcagatgccagactgtccttctgtctttctttgcatgaccacacacctgagatggagttatgtaggctcctccattaatggactaatggcataacaccaagagccatctcggtttaataccctctaacacgatgatttatctccctcacactgtaactggctgtgttcttgttcccaaatatttgctgccctgccttctcttcctctgccattcctgtccca

SEQ ID NO: 312720 - DNA, 446 bp, Homo sapiens
cacaaacgacgatgtgactttaccccatatgcattattgatgatgctctcttgacccctaaaaccaaaaatgtgctgttgtcccataaagccagatttcaaaaagagatatgtaatgtttgtggggattttaaagctcctatscatcaaaccttgatcatgtcaatctaatgttatttatgatattaaatgggttcagattaatcaatctaactgcacaacctgtcagatgccagactgtccttctgtctttctttgcatgaccacacacctgagatggagttatgtaggctcctccattaatggactaatggcataacaccaagagccatctcggtttaataccctctaacacgatgatttatctccctcacactgtaactggctgtgttcttgttcccaaatatttgctgccctgccttctcttcctctgccattcctgtccca

SEQ ID NO: 312721 - DNA, 569 bp, Homo sapiens
tggggaggtggacatttgccaacagaggtcttctacatctaggagagtgctggaggtccatttgcacaaccaagtgatatgctgggtggwgtcataaaaaagagaacgaccagaacttcaaatgaatgcgaacctttgatcatgataaataccatacaatgatgcttgcttggaatgtgtcacagaaatgatgaagcaaaataccactcacctagcgattttagaaatgctaattgatgtcataatctttgactttgaacagttgtttataaactgaatttctggcttttctaaatacctagaattctacacaccccgcccacctttgaggtttgtttaaatacagatggctgctgtagacagagaaaccagctcagaagagtgtggttgtgctatgatctctgaaaattactgcactgtctgttaacagtgcataatcaggttcaccattataaaaaggggacttagttcagtcttactttatgcagggaattatactggggctttaaattattaatatattaaggtatatacaaagataatatatacaagagatgttgaattaccaa

SEQ ID NO: 312722 - DNA, 569 bp, Homo sapiens
tggggaggtggacatttgccaacagaggtcttctacatctaggagagtgctggaggtccatttgcacaaccaagtgatatgctgggtggagtcataaamaagagaacgaccagaacttcaaatgaatgcgaacctttgatcatgataaataccatacaatgatgcttgcttggaatgtgtcacagaaatgatgaagcaaaataccactcacctagcgattttagaaatgctaattgatgtcataatctttgactttgaacagttgtttataaactgaatttctggcttttctaaatacctagaattctacacaccccgcccacctttgaggtttgtttaaatacagatggctgctgtagacagagaaaccagctcagaagagtgtggttgtgctatgatctctgaaaattactgcactgtctgttaacagtgcataatcaggttcaccattataaaaaggggacttagttcagtcttactttatgcagggaattatactggggctttaaattattaatatattaaggtatatacaaagataatatatacaagagatgttgaattaccaa

SEQ ID NO: 312723 - DNA, 569 bp, Homo sapiens
tggggaggtggacatttgccaacagaggtcttctacatctaggagagtgctggaggtccatttgcacaaccaagtgatatgctgggtggagtcataaaaaagagaacgaccagaacttcaaatgaatgcgaacctttgatcatgataaataccatacaatgatgcttgcttggaatgtgtcacagaaatgatgaagcaaaataccactcacctagcgattttagaawtgctaattgatgtcataatctttgactttgaacagttgtttataaactgaatttctggcttttctaaatacctagaattctacacaccccgcccacctttgaggtttgtttaaatacagatggctgctgtagacagagaaaccagctcagaagagtgtggttgtgctatgatctctgaaaattactgcactgtctgttaacagtgcataatcaggttcaccattataaaaaggggacttagttcagtcttactttatgcagggaattatactggggctttaaattattaatatattaaggtatatacaaagataatatatacaagagatgttgaattaccaa

SEQ ID NO: 312724 - DNA, 600 bp, Homo sapiens
cttactatgttgcccaggtggatcctgaactcctggcctcaagtaatccacctgcctgggcctcccaaagtgctgagattataggcgtgagccaccatgcccggccttaagtattttttacaagtacaatgacaataatgaaattttacctgggatttcacctgagaattctccaaaagtktactgcctcttttcccttatttcttagagtggggatgacaccctcacgttatgttatacagcggtgagtaagatgtgcttcattgttaggatggagtggtattcagtacatatcatttattttcttatttttgttttttgagacagggtctcgctctgttgcccaggctggagtgtagtggcaccatcacacctcaatgaagcctcaacctcctgggctcaagctatccttcctcctcagcctcctgagtagctgagactacggacgagtgccaccacgcccagctaatttttgtattttttgtaaaggtgaagtgtgttttttttttttttttttttgacagagtgttgcttgtcaccaaggctggagtgcaggggtgcaatcttggctcaccacaaccttcgcctcctgggttcaaa

SEQ ID NO: 312725 - DNA, 600 bp, Homo sapiens
cttactatgttgcccaggtggatcctgaactcctggcctcaagtaatccacctgcctgggcctcccaaagtgctgagattataggcgtgagccaccatgcccggccttaagtattttttacaagtacaatgacaataatgaaattttacctgggatttcacctgagaattctccaaaagtgtactgcctcttttcccttatttcttagagtggggatgacaccctcacgttatgttatacagcggtgagtaagatgtgcttcattgttaggatggagtggtattcagtacatatcatttattttcttatttttgttttttgagacagggtctcgctctgttgcccaggctggagtgtagtggcaccatcacacctcamtgaagcctcaacctcctgggctcaagctatccttcctcctcagcctcctgagtagctgagactacggacgagtgccaccacgcccagctaatttttgtattttttgtaaaggtgaagtgtgttttttttttttttttttttgacagagtgttgcttgtcaccaaggctggagtgcaggggtgcaatcttggctcaccacaaccttcgcctcctgggttcaaa

SEQ ID NO: 312726 - DNA, 600 bp, Homo sapiens
cttactatgttgcccaggtggatcctgaactcctggcctcaagtaatccacctgcctgggcctcccaaagtgctgagattataggcgtgagccaccatgcccggccttaagtattttttacaagtacaatgacaataatgaaattttacctgggatttcacctgagaattctccaaaagtgtactgcctcttttcccttatttcttagagtggggatgacaccctcacgttatgttatacagcggtgagtaagatgtgcttcattgttaggatggagtggtattcagtacatatcatttattttcttatttttgttttttgagacagggtctcgctctgttgcccaggctggagtgtagtggcaccatcacacctcaatgaagcctcaacctcctgggctcaagctatccttcctcctcagcctcctgagtagctgagactacggrcgagtgccaccacgcccagctaatttttgtattttttgtaaaggtgaagtgtgttttttttttttttttttttgacagagtgttgcttgtcaccaaggctggagtgcaggggtgcaatcttggctcaccacaaccttcgcctcctgggttcaaa

SEQ ID NO: 312727 - DNA, 458 bp, Homo sapiens
ccagacctacagcaagccctctgctgccttctggaggcgctttgcctggtagatcctcccaacaccccacgaggtcacaytgctcccccagacctacagcaagccctctgctgccttctggaggcgctttgcctggtagatcctcccaacaccccacgaggtcacattactcccccagacctacagaaagccctctgctgccttctggaggcgctttgcctggtagatcctcccaacaccccacgaggtcacattactcccccagacctacagaaagccctctgctgccttctggaggcgctttacctggtagatcctcgtcacaccttgtgaatggggtcacatttctcccccagtcttacagcaagtgctctgtcgcattttggaggctctttgcctggtaaatcctcgcgagagctcgtgagtgaggtcacgtgactcccctagtcctacagcag

SEQ ID NO: 312728 - DNA, 458 bp, Homo sapiens
ccagacctacagcaagccctctgctgccttctggaggcgctttgcctggtagatcctcccaacaccccacgaggtcacactgctcccccagacctacagcaagccctctgctgccttctggaggcgctttgcctggtagatcctcccaacaccccacgaggtcacattactcccccagacctacagaaagccctctgctgccttctggaggcgctttgcctggtagatcctcccaacaccccacgaggtcacattactcccccagacctacagmaagccctctgctgccttctggaggcgctttacctggtagatcctcgtcacaccttgtgaatggggtcacatttctcccccagtcttacagcaagtgctctgtcgcattttggaggctctttgcctggtaaatcctcgcgagagctcgtgagtgaggtcacgtgactcccctagtcctacagcag

SEQ ID NO: 312729 - DNA, 600 bp, Homo sapiens
agcaggggaagggtgttcagacagccctgatgccagctagtgcaaagactctttggtaattagaagagcgcacctctttaagctagttcattgctgaatcattgtagcaactctgcatctgtgatgccagtgaggcaaacggtgtcgcctggagtcatgcagtgcatggcttgtgcagtgcaagggaggctctggcttcaggaagaggaatggccccrggttgagcaggagctcgggctattagaggaaaactctgtgcaaccagctgaatgcaggcaagccaggggaaaagagaatgaggagggggaagaggtgggccggggttgagacatgtagcacatggaaatccctgttaaggatttgaaggattttaagtcattgaagggttttaagcaaagaaacaacttggtcgtttttatatgttaaaaagtttactctggttgctggttgaagaatggttcagaaggccaaagtggatgtggaaagaccagataggaggattttatagtcctgtgcttgtgggtaggagtgcaaagattagataaatatttgggaggtggaatggatagaatttagggatggatgatgtgtatgtgggag

SEQ ID NO: 312730 - DNA, 399 bp, Homo sapiens
aacgtttgtgtgtttagctattatcgtaagtataaaactttggagacagaatgagaatgtctaaggagggttgttgattgggaaggttttggggtaaaacacttgcataaaactttataagaaaaccccaagactgatactgtttttcaaagcttctgaaatgttatacatgttttctttgaacacatctttgagagtggatcactcagaggccaggatttatatggattatgttgtgtattgactgaacacaggaactagtattggcctctccacccrtgatcctagaaagtgatttttcgcccaggaaattgacaggcatgtctgaaaacattctagaaacagatggctgagagcaaactagaagagctctatgaactagagtgcctctagaaccgc

SEQ ID NO: 312731 - DNA, 649 bp, Homo sapiens
ccaacactacgttgccatttatgcagtcttctaccaacactggatgttgtccatgtttttacttttgccttttatcaaatattttcccatctcaactaacagacgtccacaaaagcattcctaatggaaacacactattctaaaatggggtcaacaactctctcatcagatgtttagatcatttcaatagtttgtcatttagtccttcacaaaacttagttttattactatttttcctcaattgcttttagggaagcagcaccagtgtcaactcccaccagcagtctaggagaatgcagcttctctatgattacaatttttaagaattgactgccagtatgataggtggaaaatgagatttcatgatttaaacagcatttctttgatcatcagaaaagcagcatgtttttcacagtgtattgggctcgtgtacttcttctttgtgaattgccataatggagtttgttcttttgctattagtgtgatyatctttttcttattgacacataggaactttttatatatgaagaacacacatttaattttaaataagtttatagttaaaaggaaacgtgattaacatgcaaagaaagtacaaacaacagtgtcttggctggtctctagtcttgttcttctctaactccctgtc

SEQ ID NO: 312732 - DNA, 529 bp, Homo sapiens
tctagggtggatacattagaaacaggaactggagttgactcaaattatgaaccaaaaattcaaagagatcacactcatttctgaaaccgagtgctgaactgaaatacaacattatgtttttctaaattgtggactcatccaaaaggatttccatgaaaaccagtaaaatcctactgaactaacatgaactgaagctgaaccaatgttttctaaaatgatttaaccagaacattagaatattatctgaactaaaccagtatttttttgtttgaatatcttctgataaatatctttaaaggcttacrtatttctgctttgattattgtgcatatcaaaactgcaggaaacaatatttcaatcaataattaactcttaaattccagcagatactgctagttgcctactaaatacccattccatcctttctttaacaaaacccagatttattcaaggagacaatgtatccaacttccttttcctaacctcccttggaactacatgtggccacttatctaagtttcaaactatg

SEQ ID NO: 312733 - DNA, 504 bp, Homo sapiens
accccgtctctactaaaaatacaaaaaattagccgggcgtagtggcgggcgcctgtagtcccagctactcgctcctgaggcagaagaatggcgtgaacccgggaggcggagcttgcagtgagctgagatggcaccactgcactccagcctgggcgacagagggagactccgtctcaaaaaaaaaaaaaaaaaaaatcatagctgctgagagatgttgcccattgccagcacatagaagtgagccaggaagtttctgctacttgcaggcttaactcttgaccagtccaggaaatactggtgctttaccctaacacaagagacgttttaactgagattacctgaagttgggcaggtgcaaagtggttaggaagtgccctcttgctttacaatccagtgaccagggaagaggcttttagtcatttatsgatggttttcagggcttcttttaagccctaaaactgtgccatcaattttatgtgaaagtacatttgaccgggcaaagag

SEQ ID NO: 312734 - DNA, 506 bp, Homo sapiens
ttacattctaactcttcttttctttctgatccctcatcagaattaatgttaatgtccacatttctagcatgcacctcaacaatctcccagcctctacttagctccaaagccactttcacatttttacatagtatttgttacagcagcagcccctcttctcagtaccaacttttgttttaatccattcaggctgctacaacaaaaatatcataaactaggtggcttagcaacaaacatttatttctcacagctcaggagcctgggaagtccacagtcatggtgctgacagattgggtgttgggtgagaatctgcttcctggttcrtcttgctgtactctcacatgacagaaaaagtgacatagctctccaggatccttgtataacggcattgatcctatcatcaggggctctactctcatgacctaataatctcccaaaagctccacctcctaataccatcacattggcggttaggatctccacatatgaatttttgtgggactgaa

SEQ ID NO: 312735 - DNA, 561 bp, Homo sapiens
aaggacctagtttgattctaatgcatgagcttagcgcaacagatatagatagatacttacagatgtacttctatatctatagccatatatatatctctacaagattctaaagaaacctggaggctgggggttgaacagaagaaaggaataatacatatacattattctgtaagaaatatcagaaaacggatggggcatggtggcccatgtctgtaatcccagcactttgggttgccgaggtgggcggatcacttgaggtcaggagtttgagatcagcctggccaatatagtgaaactccgtctctactagaaatacaaaaattatctgggcacggttgtgcatgcctgtattcccaactactgggaagctgaggcaggagaatcgcttgagcccaggaggcagaggttgcagtgagctgagattgcaccactgcactccagcctgggtgacaaagaaagattttatctcaaaaaaaaaaaaaaagttttacatatacatatatatatgyatatatatgaaaactattgaaaagaattgaatgtgtggtattaagaaaagaa

SEQ ID NO: 312736 - DNA, 598 bp, Homo sapiens
atcaggaaaagggaaggttttccacttattcattgaaaggagacttgaataggatggtcaagtatggtctacaattcttctagacctgagtatatgagggaaggaaatgtccaaaaaaaaaaggggggkgtgtgtgtgatggaactgaggatacaagccttatttttgaacacagagcaatgatgtcaggataagttggcatttggagaattattttgtgtctattccatatttgcttttcaagacatctctattacaccatttaatattgtttataccaattcccaaacaaaacgttcccttgaggaaaagtttgcttttgtagaaaaacaaagaataagaaagaagaggagagttgccttttcatcatggctgacagcaaatttggagcaaactgttgtactagggattttctgagaaaatgaccttttataacaaggtataactgactatatatgtcttgatagtatacttatatatttttcttttagggcctagcaactccatatataattccagaatgggaaactttaccatactgtgaacttttcaaaaaaagagactttcaggccgcacctatgacccactaaatcagaat

SEQ ID NO: 312737 - DNA, 598 bp, Homo sapiens
atcaggaaaagggaaggttttccacttattcattgaaaggagacttgaataggatggtcaagtatggtctacaattcttctagacctgagtatatgagggaaggaaatgtccaaaaaaaaaaggggggtgtgtgtgtgatggaactgaggatacaagccttatttttgaacacagagcaatgatgtcaggataagttggcatttggagaattattttgtgtctattccatatttgcttttcaagacatctctattacaccatttaatattgtttataccaattcccaaacaaaacgttcccttgaggaaaagtttgcttttgtagaaaaacaaagaataagaaagaagaggagagttgccttttcatcatggctgacagcaaatttggagyaaactgttgtactagggattttctgagaaaatgaccttttataacaaggtataactgactatatatgtcttgatagtatacttatatatttttcttttagggcctagcaactccatatataattccagaatgggaaactttaccatactgtgaacttttcaaaaaaagagactttcaggccgcacctatgacccactaaatcagaat

SEQ ID NO: 312738 - DNA, 598 bp, Homo sapiens
atcaggaaaagggaaggttttccacttattcattgaaaggagacttgaataggatggtcaagtatggtctacaattcttctagacctgagtatatgagggaaggaaatgtccaaaaaaaaaaggggggtgtgtgtgtgatggaactgaggatacaagccttatttttgaacacagagcaatgatgtcaggataagttggcatttggagaattattttgtgtctattccatatttgcttttcaagacatctctattacaccatttaatattgtttataccaattcccaaacaaaacgttcccttgaggaaaagtttgcttttgtagaaaaacaaagaataagaaagaagaggagagttgccttttcatcatggctgacagcaaatttggagcaaactrttgtactagggattttctgagaaaatgaccttttataacaaggtataactgactatatatgtcttgatagtatacttatatatttttcttttagggcctagcaactccatatataattccagaatgggaaactttaccatactgtgaacttttcaaaaaaagagactttcaggccgcacctatgacccactaaatcagaat

SEQ ID NO: 312739 - DNA, 616 bp, Homo sapiens
gttgaattgtaatcctcagtgttgggggaagaacctggtgggatgtgattggatcttgtaggcagatttctccccctgctgtttttgtgatagtgagtgagttctcacaagacctggttgtttgaaagtgtgtagcacttcccctttgcttcctctctcctgctctgccatggtaagatgtrcttgcttccctttcatcttctgccatgattgtaagtttcttgaggcctcctaacaatgcttcccgtacagccatgtggaactgtgagtcaattaaacctcttttctttataaattaccaagtcttaggtagttttttatagcagtgagaacagaccaacacatcttgatttctactacattataattttcataattctactattctctcattttcttacagctccaagaataatgaataacagcatacttatatatttatttctattcatgagcagagaggtaaacagaagtcaaaattatctattttttgttttttatttccaaaaatcagctttactcgtatacttactccagtgctatttattgacgtttcctttatatagtcagatgcatagaactgatcctaatgatattttcctatggggttatttat

SEQ ID NO: 312740 - DNA, 616 bp, Homo sapiens
gttgaattgtaatcctcagtgttgggggaagaacctggtgggatgtgattggatcttgtaggcagatttctccccctgctgtttttgtgatagtgagtgagttctcacaagacctggttgtttgaaagtgtgtagcacttcccctttgcttcctctctcctgctctgccatggtaagatgtgcttgcttccctttcatcttctgccatgattgtaagtttcttgaggcctcctaacaatgcttcccgtacagccatgtggaactgtgagtcaattaaacctcttttctttataaattaccaagtcttaggtagttttttatagcagtgagaacagaccaacacatcttgatttcyactacattataattttcataattctactattctctcattttcttacagctccaagaataatgaataacagcatacttatatatttatttctattcatgagcagagaggtaaacagaagtcaaaattatctattttttgttttttatttccaaaaatcagctttactcgtatacttactccagtgctatttattgacgtttcctttatatagtcagatgcatagaactgatcctaatgatattttcctatggggttatttat

SEQ ID NO: 312741 - DNA, 616 bp, Homo sapiens
gttgaattgtaatcctcagtgttgggggaagaacctggtgggatgtgattggatcttgtaggcagatttctccccctgctgtttttgtgatagtgagtgagttctcacaagacctggttgtttgaaagtgtgtagcacttcccctttgcttcctctctcctgctctgccatggtaagatgtgcttgcttccctttcatcttctgccatgattgtaagtttcttgaggcctcctaacaatgcttcccgtacagccatgtggaactgtgagtcaattaaacctcttttctttataaattaccaagtcttaggtagttttttatagcagtgagaacagaccaacacatcttgatttctactacattataattttcataattctactattctctcattttcttacagctccaagaataatgaataacagcatacttatatatttatttctattcatgagcagagaggtaaacagaagtcaaaattatctattttttgttttttatttccaaaaatcagctttactcgtatacttactccagtgctatttattgacstttcctttatatagtcagatgcatagaactgatcctaatgatattttcctatggggttatttat

SEQ ID NO: 312742 - DNA, 594 bp, Homo sapiens
agaagttgatagagaccatggacaaaggtaaaaactttctatmtcagtaccttttacatatctttaccctgcctttgaacaaggaaccccagttttcattttgcagtgggccctatagtgagttgacactccactgcttaacacctagctcctgtatctgctgtggatcaggtcaaggtgtttaaattgtcagcagaacatttcttgcctttcagccccttaccccaccccatttagatatatgcagcaatcactggttttcatttatttggaaataataccaaaaatttaaaaactttattttatggagatgcactttattagaaatgagagaggatggaattcaaaaaattttcactgccctttaaagaaaaactagagttaaaatattgttaggagggatgtcagtaggtgcctagtctccttctccatcttcttagggagatgtgcaggtacagtgaccacccagtctaaattacctgggaaaactccagtgtccacttatgaatctggaataattatcaataacccaacccccttcagatgtgttcaaactgttatggcttgcatgattcattacatgatcaccacaca

SEQ ID NO: 312743 - DNA, 594 bp, Homo sapiens
agaagttgatagagaccatggacaaaggtaaaaactttctatctcagtaccttttacatatctttaccctgcctttgaacaaggaaccccagttttcattttgcagtgggccctatagtgagttgacactccactgcttaacacctagctcctgtatctgctgtggatcaggtcaaggtgtttaaattgtcagcagaacatttcttgcctttcagccccttaccccaccccatttagatatatgcagcaatcactggttttcatttatttggaaataataccaaaaatttaaaaactttmttttatggagatgcactttattagaaatgagagaggatggaattcaaaaaattttcactgccctttaaagaaaaactagagttaaaatattgttaggagggatgtcagtaggtgcctagtctccttctccatcttcttagggagatgtgcaggtacagtgaccacccagtctaaattacctgggaaaactccagtgtccacttatgaatctggaataattatcaataacccaacccccttcagatgtgttcaaactgttatggcttgcatgattcattacatgatcaccacaca

SEQ ID NO: 312744 - DNA, 510 bp, Homo sapiens
agaaccaggtctttattaagacctaaaagacccctgattcagtaactaactgcacaagttaaacaattttcagttgcaggaaacagaatatcccaaatcaactcaatctgaggaaaaaaagaataatggttatgaaatatattgactaaaamataagacacaaaggtggaataaggttaattctatacattgtccaatagtcactacattttttatttccttctctcagttttgccttccacagtctagcactgaggttaagcactgaggctgacttctcttgtattttacagcccttattgcaaactttccatgaagaagattttttttcaatcagtcctcctgtaacggaggaccctgttaaccagcacctccaccaaaaagcattttctaacgccacatttacactaaataggaagaagcatgtgaatgctgtttgaaacttcaaaaacatacatagaaaataagactacatatttgtttattttttgtagagataaagtctcactg

SEQ ID NO: 312745 - DNA, 507 bp, Homo sapiens
aggaattgggataagatgtgcacattcagctcttgctggacagtgaaatcttgccctatcacactgccggtgatgatagaggaagagtcccatttgtcattgtagtagattagcttgtagccaacaagaatactcatagaaaaaattagaaacgatagatacatacccccattcatttaaaagaaytaggaaactaccaagggaatcagaaattcaggggctaagatgctggaaataacggaaacttatctaagtgtgcctaacatctaacgacctgtcccctcaaagcacttgatagttctaaagcagtagagaagagttgagaagccaatcagtaagaaaaagccaagaggcacataacctttcctgatttggagggaaacctcactgggctaaaggcaaagaatctgcaatttgagtcttctaaggcagctagccaggttaaggggaggaggtggctaagattccttagagaaggaaatcatagagaagtgagcctgaaagtct

SEQ ID NO: 312746 - DNA, 557 bp, Homo sapiens
ggcagactgtgaactattatgaaggtaaaaatcctgggggctgtattccgatggcatctacacttttgaagattttacctcctgaaactccactgggttctcacaatgcggatttaagcaggatcttctgggctctggcagggagaggagaaaaatccctatgagatactcctaaagccttccagatataaaagtcctcgccgccaggcaggaacgtttgttccagagcttcatatcacctggaagaaggacattttttttttctccatggcctcctctcaactcccttctcacctacagtggaagaacacctacccatcagagatcggaacatcaaggaaatagatcaggatcactgcatcttggaaaagaaagaagtaagaggggaaagactggagaaactcttgggaaggtaacagccctgagggactggtccactaaaaggacagtaagattatacaacagccctcttccccacactttactaacaascatattaatagggatgaagtataagaacaacagcttgcgattgaaaaagctgcaagacgcatagt

SEQ ID NO: 312747 - DNA, 601 bp, Homo sapiens
gcttctctctcttgaggaatagctattcatggcctttgccctctttaaatgatattttttttaatttaaactgttgagtcatttgagtttcttgtatattgtggatattagtttcttcttgaattaatagtttgcraatattttctcccattcaacaggttgtctctgtaccctgtttattgtgttttattttttttttcttttcttgttttttttctttttgctttatagaggctttttagtttaatatacacccgtttatctattttcgttttgttgttcatgcttttgagttcctagtcataaaatctttgcctaggctaatatattcaagtgcttcctctatgttttcttctaagtagttttatagtttcagttcttgcatttaagtctttaattcattttcagttgacttttttaatatgatgagagataaggatctagtttcattcttctgcatatggatatccaattatctcagcaccatttattgaagtgggtgtcatttcctccaatctgtgttcctcacacctctgtcaaaaatcagttggctataaatatgtggatttctgtctgagtggtctattctttttcattgatc

SEQ ID NO: 312748 - DNA, 547 bp, Homo sapiens
ttgtttgtgcttttctaattccttgaggtacattgttaagtagtttatttgaaatgttttgggaggctggccaagttggctgactagaagcagctactgtgtgccactctgataaaagaaatagaaggagtgagtaaatacagtactytcaactgaaacattcaagtacatgcactgggatcctcaaaaacacaactcagccaatggagaatagaaaaaagcaaggcagccagactgcccacctgggagcaacatggagccaggagagcctctctcaccaggagaagtggtaagtgagtgtgccaccctagggacccacatatttttgcaactcttaggtcaggagatctccttgtgaacccactccatgaagatgatagtccaacacacaaatctatgtggagtctcagcagagcaccaggctctgcatgtgaagccctggaagctttagacacctgagcttcctggcaaaagtggctggaactgtagcaaagtgggaggtcacatacccttagtaaaggggttgaatccagaaggttgagcagtg

SEQ ID NO: 312749 - DNA, 566 bp, Homo sapiens
acaagttccagaacccacttctcttcagtgggcagaatttcttgactgaactctgcaaccacaccaccagtgtttctggcaagcaacagtttcaaaactccttgggatgaagcttcctggggacaggtatgtgtgggggtgttggctaccgtatttgctgttttgaagccttggccattgttgcctttgggagtggagagtctgaaatgactgaaggctaaatcagacccccaacacagcacaactgctttaaaaaaaaagcagcaagagtgatttttwgtttgagtgcctaatcccattctttctcactcatcaagacctccaaaccagggtgtttagcagcccctgccagtgttttctgcacaagagcagtttcaaacctccctgggatagagctcccagagagaggggcagtccaccatctttgctgttttgcagccttcactgttgatatcttcagaagctagaaaacccaagatagctagggactggaatggacggaccctcagcatactgtagcagccttatgaaaaagtggcaagtctgtctgttagatacctggactt

SEQ ID NO: 312750 - DNA, 566 bp, Homo sapiens
acaagttccagaacccacttctcttcagtgggcagaatttcttgactgaactctgcaaccacaccaccagtgtttctggcaagcaacagtttcaaaactccttgggatgaagcttcctggggacaggtatgtgtgggggtgttggctaccgtatttgctgttttgaagccttggccattgttgcctttgggagtggagagtctgaaatgactgaaggctaaatcagacccccaacacagcacaactgctttaaaaaaaaagcagcaagagtgatttttastttgagtgcctaatcccattctttctcactcatcaagacctccaaaccagggtgtttagcagcccctgccagtgttttctgcacaagagcagtttcaaacctccctgggatagagctcccagagagaggggcagtccaccatctttgctgttttgcagccttcactgttgatatcttcagaagctagaaaacccaagatagctagggactggaatggacggaccctcagcatactgtagcagccttatgaaaaagtggcaagtctgtctgttagatacctggactt

SEQ ID NO: 312751 - DNA, 566 bp, Homo sapiens
acaagttccagaacccacttctcttcagtgggcagaatttcttgactgaactctgcaaccacaccaccagtgtttctggcaagcaacagtttcaaaactccttgggatgaagcttcctggggacaggtatgtgtgggggtgttggctaccgtatttgctgttttgaagccttggccattgttgcctttgggagtggagagtctgaaatgactgaaggctaaatcagacccccaacacagcacaactgctttaaaaaaaaagcagcaagagtgatttttagtttgagtgcctaatcccattctttctcactcatcaagacctccaaaccagggtgtttagcagcccctgccagtgttttctgcacaagagcagtttcaaacctccctgggatagagctcccagagagaggggcagtccaccatytttgctgttttgcagccttcactgttgatatcttcagaagctagaaaacccaagatagctagggactggaatggacggaccctcagcatactgtagcagccttatgaaaaagtggcaagtctgtctgttagatacctggactt

SEQ ID NO: 312752 - DNA, 616 bp, Homo sapiens
caatgccaattactgaaaatagatccaccctttgctgtctattttgccttgagtgttttgctaaagcagtaatgagtaaagtgattaaggagcattgtgctggtcccaaagatgcatctggatttataggcttctatttagcagctatgggctaatattgggggttgttcaatttacctctagaaggaaaataaggkggcattgagaccatgtccccatgacatagtttcagaaatggagcaggtgacttacatgtgaccatcattaaaatgaatagcagatttaagtactggaacagattcagctttgcagcatggtgtttgcctggtttgatcagtagactaaagtgggcttgttggcgaaagcttgtgatgaggtcacagtgctcctcattatctcatccaattttgtaaatgaagactgtagtgtctgccggtttcttagtaatgccatcatcattattacctattgaatagtattgaaaaaaatgtagttgtgcctcactctaattattatgatctctctggctttgtttctaaatgtatgactatacaactggcagatggtcacagacagtgaggcatggtggttgaggtcatgaagtagattcaaatcc

SEQ ID NO: 312753 - DNA, 631 bp, Homo sapiens
cctgaacctaaaataaaggttaaagaaatagaaaaaataagacaaaaaatgcaatgtttctacattttaaatttaattacatgtaastttctataaagtcccatcttagcatacttttgctatatctcataggttttggtctctgtgttttgatattcatatgttccaaaaaattgttaataattttctccttaattttttcattgaactaattgccattcagggacatcttgtttaatttacacatatttacacagtttccaaagttcccgttgttattgatttctagattattttttattgttgcctgagaaaatacttgacatgattttgatttgtaaaacatttgttgggacttcttttgtgtcctaacatatggtatatctttgaaaatgttccatgtggtgatgagaagaatgtgtatactgtaattttggattaaatatgctgtaaatgtcttttaggtccatttggtctaatgtgcaatttaaattcaatgtttcattgatttcctgtctaggtaatgtgtctaatgctgagtttggggtgttgaaatcccccacaattattgttttgagtctatttttctctttagatctcacaatatttgctttacatatattgatattct

SEQ ID NO: 312754 - DNA, 631 bp, Homo sapiens
cctgaacctaaaataaaggttaaagaaatagaaaaaataagacaaaaaatgcaatgtttctacattttaaatttaattacatgtaagtttctataaagtcccatcttagcatacttttgctatatctcataggttttggtctctgtgttttgatattcatatgttccaaaaaattgttaataattttctccttaattttttcattgaactaattgccattcagggacatcttgtttaatttacacatatttacacagtttccaaagttcccgttgttattgatttctagattattttttattgttgcctgagaaaatacttgacatgattttgatttgtaaaacatttgttgggacttcttttgtgtcctaacatatggtatatctttgaaaatgttccatgtggtgatgagaagaatgtgtatwctgtaattttggattaaatatgctgtaaatgtcttttaggtccatttggtctaatgtgcaatttaaattcaatgtttcattgatttcctgtctaggtaatgtgtctaatgctgagtttggggtgttgaaatcccccacaattattgttttgagtctatttttctctttagatctcacaatatttgctttacatatattgatattct

SEQ ID NO: 312755 - DNA, 587 bp, Homo sapiens
cccaagggaagtcagccttggaaacagacaaagcacggatcataaaccctccctggcaggatactgcctataagcctgtctgtgtccttgaaaatccttgggtaaaattttaataaattaaaacataggaccctaatttgtacatagcatgtcttcaaaattgttaacattaacaatgaatagaagcataaaattactttaaagtgagaaagaaacggatagggagagtaatgaaaatggggccataatgtgctagttaaaaaaaatctgtgtctggagtcaggacaaccacaatcaaagctgatcaccaccaggtaccagatataggactctgggttaatttcacaacttttttgagacttgcttttcttatttggaaaacaaggatgataatatttaaaatataatatttgtattatttaaaaaacaatataataattcttgaaatgataaaggaaaaaataagatctatttaaacacacaataatatttttcatttaatctyatttttagagtacccgtttatcactagccgatggaaaacaaattttgtcatttcatagtaactgtattgcattttagcaaca

SEQ ID NO: 312756 - DNA, 587 bp, Homo sapiens
gtggaattgagaagacagtgggtttactgtggagtaagctgagttgatctgattcagacttgggtccctggcctcatcctcccttttgggagcttggagtgagacccaagtttaagtaagtagttcgttgagatcatgtgagcttgtactagttgtatagtagtactcagaaggcgttatgaacattgtgattgggctctgactctgaccttaatacatattattgaccaatattaaagrgaaaggaggaagaaatcaacatttttttctgcatgtgaggtgtgccagtactttgccatgtaatgttttagtgtttgagataagtattacatccccatttcacagaggaaggaactgagactgagctaggattctcacctagtctgtgactccatgctctttcccccataccaaagtgcctcccaagcagtggttacttagcttaagaggggaaaactgggagggtaccttggccaagtctcagagagggaaagcgtcagggctgcctggaaaatcctgcacaggtgctgttgcaggaatgcagggctcgtgctgaggatcaggctctaggcgggaggaggaaagag

SEQ ID NO: 312757 - DNA, 547 bp, Homo sapiens
acaggaaactgaggctcagaaatgacatatctgacatagccataggtgctcatagatggggtttgttataattctttggggggttcacataacagagagagctactatgttctctgccaaatgaactgtaagtaaccctggtgagagtagacttatgctatagacatgaatgagtgaatacaaagctagaaggtcgcatttctctttttgttagattctatggtttggttggatttagttcactctctaaaattgctcagattataaacttaaatgtagggtcgggcacagtggctcacacctgtaatccaagcactatgagaagctgaggcrggcaggttgcttaaggtcaggagttcaagaccagcctggccaacatggtgaaaccccatctctactaaaaatacaaaataattagctggcatgatggtatgcatctgtagtcccagacacttgcgaggctgaggtaggagagtttcttgaacccgggaggtggaggttgcagtgagctgggatcatgccactacactccatcttgggcaacaga

SEQ ID NO: 312758 - DNA, 547 bp, Homo sapiens
acaggaaactgaggctcagaaatgacatatctgacatagccataggtgctcatagatggggtttgttataattctttggggggttcacataacagagagagctactatgttctctgccaaatgaactgtaagtaaccctggtgagagtagacttatgctatagacatgaatgagtgaatacaaagctagaaggtcgcatttctctttttgttagattctatggtttggttggatttagttcactctctaaaattgctcagattataaacttaaatgtagggtcgggcacagtggctcacacctgtaatccaagcactatgagaagctgaggcgggcaggttgcttaaggtcaggagttcaagaccagcctggccaacatggtgaaaccccatctctactaaaaatacaaaataattagctggcatgatggtatgcatctgtagtcccagacacttgcgaggctgaggtaggagagttycttgaacccgggaggtggaggttgcagtgagctgggatcatgccactacactccatcttgggcaacaga

SEQ ID NO: 312759 - DNA, 514 bp, Homo sapiens
atcgtctcagtggatgtattcattcaatactatttgttgagcttctaacctgcatcaataaattactgtaaaaattcctataatgataaaaacatgtccctgctatcataaaggctaaagtctattggagaaaaatagttactaaataaaattcatacagtgtgcaattgaygaaatttactgtccactgggggagggcgtgtgccaggatgggattccctgaggagtacatctggagctgagaattggagtttgctggagtgttcactgaatgaggggtgggaggagagccagcattcatactgaaagagaaacccactggcaggaggacacagggtgagcgttttgacagagatcctgtgggtgacatggggaagggaaggaatacatttatctgtgtttgggaaagtggaatgactcaggaaggcttcacagattatgtgcctggattatgaagaacaatatgttttctcaacaggcaaggtaagaagagctgtccaagaaaggtaagctg

SEQ ID NO: 312760 - DNA, 587 bp, Homo sapiens
ccacataaaaatctggcaaaatcagtgaaagagaatttcaaggactgtttttcttttaatttatatctcaaagtaatggtgtaccagggaaaatgtccagattctagttctgcactacttcagatcagagatttgcagtagggagatttggctccccagggggcatctggcaatgtctggagacatttcgggttgtcacaactggtggggggtgctacaggcattaagtgggcataggctggggatgcggctgcatagaacagctcccacaacagaattattcagccaaagaattatcaatagtgccaaggttaatgcaccttgttttacaccaagaaataacctttaagactgaccttctcaaatccttaattttgcagatgttatgtgtaacktccaatatatgaaataatttgcatgcagctggctaattaacagtatatggcctgggactcaggctttatagaccagtgattttctttcctgatgcattagatgtcctgtgtgttttatatcgaatggccagcatattttaatgctgtcagctcttaattccaacacagagaggagttactatatagatgcca

SEQ ID NO: 312761 - DNA, 587 bp, Homo sapiens
ccacataaaaatctggcaaaatcagtgaaagagaatttcaaggactgtttttcttttaatttatatctcaaagtaatggtgtaccagggaaaatgtccagattctagttctgcactacttcagatcagagatttgcagtagggagatttggctccccagggggcatctggcaatgtctggagacatttcgggttgtcacaactggtggggggtgctacaggcattaagtgggcataggctggggatgcggctgcatagaacagctcccacaacagaattattcagccaaagaattatcaatagtgccaaggttaatgcaccttgttttacaccaagaaataacctttaagactgaccttctcaaatccttaattttgcagatgttatgtgtaacttccaatatatgaaataatttgcatgcagctggctaattaacagtatatggcctgggactcaggctttatagaccagtgattttctttcctgatgcattagatgtcctgtrtgttttatatcgaatggccagcatattttaatgctgtcagctcttaattccaacacagagaggagttactatatagatgcca

SEQ ID NO: 312762 - DNA, 461 bp, Homo sapiens
atgacccttcgttgcctgtgcagtgagaggggtggcctgcatgaccttggaactccaacttagcttccagtgttttataattaatcagaggaatatataaattctgatttagtcaatactgatttaggaactataaaactgcaccactttaaaagtctgtacaggcatgccttctgcaaaagtctgaaccatatttagtttttcttgattaaaaaatatcttgcttaattttgctgattttctttcaaagaaagcatgaaaaaatataattgtctcattcatttttttcagctattttattcaacaaagatctacagagcatctgaaaagcagcacagttctgccacaatgsggctcaagtttaagtgactgcaaagtccaggattcttaaagcttaaatattaacacacagttccagacttgcaatgccccagaggcacaggataaacatgccctcaaat

SEQ ID NO: 312763 - DNA, 461 bp, Homo sapiens
atgacccttcgttgcctgtgcagtgagaggggtggcctgcatgaccttggaactccaacttagcttccagtgttttataattaatcagaggaatatataaattctgatttagtcaatactgatttaggaactataaaactgcaccactttaaaagtctgtacaggcatgccttctgcaaaagtctgaaccatatttagtttttcttgattaaaaaatatcttgcttaattttgctgattttctttcaaagaaagcatgaaaaaatataattgtctcattcatttttttcagctattttattcaacaaagatctacagagcatctgaaaagcagcacagttctgccacaatgggrctcaagtttaagtgactgcaaagtccaggattcttaaagcttaaatattaacacacagttccagacttgcaatgccccagaggcacaggataaacatgccctcaaat

SEQ ID NO: 312764 - DNA, 555 bp, Homo sapiens
atcaaatttaattttagtggacacaaacaaagcatatccaaaccacagcacccagctagctttactggcgagttctaacaatttaaggaagaaattataactttcttatgcattttttaaaaattaaaaatatccaaacctccctttgttttctgcatttatcgtcttttttctaactatttgcataagatccaaaatgtgcaaataagcctttgttctctctgaacactataaaacaaggttactttagcttacaccatgtgcatttcttttgttttaaggaaaagaaatctgtatcttatacaactccagggtccctcagtactaagttttcctttccaattaatagcatgccacaagatgtttgactactttgcagctgattttgcattcacttacctctagccaattgttttaataatgatgcatcctgagtagtgtctttctccatttaggcctaaagatctctctgaggacattccctaarttcacagccccatgtatccattctgaaataaaaatgccttctctttctccagcacttcccactccctg

SEQ ID NO: 312765 - DNA, 477 bp, Homo sapiens
ttaacagtggttgtagaaggactgccatttttttctacatgggtgagtgctctattcatcaacattctattgaccatcacattatcaagaaggccctagggtatcattacaatttgtagtctctatcctcaaatgtctatccctaaactgtctcaattctatttaaatggctatatttctatcataatttgcaaaacaaactcctatgtctaggtaacccagcgtgataggaccctgacgtgctgtggctgaataatgcccccttccccctgaaaagatatccatatcctaatctctggaactcataaattttatgttatatggtaaaatgtactttgaagatgggattaaattaaggatcttgaggagggcagattatcctggattagccaggtgagcccaaggccttacaagggtccttaaaagagggaggaaggaggagtcagtcaraggaggaggagatgtaacaatggacac

SEQ ID NO: 312766 - DNA, 596 bp, Homo sapiens
ggggtgggtcttttcccgaggttttaaaaaaacgggaggttcactgcacaagctctctctcttgcctgctaccatccatgtaagatgtgacttgctcctccttgccttctgccatgattgtgaggccttcccagccaygtggaactgtaagttcattaaacctctttcttttgtaaattgcccagtcttgggtatgcctttatcagcaacatgaaaatggatgaatacaccttgctttccaaagaaaacattgtttcaaccaaatcccactcctaccatcaattgttgtgaggattgtgtgtcctccttccttagttcagagtcctccaaaagaagacactgagaccaggtttcaagggtaagtagattgtcttggaggtgacgtcagaaaccactgatggagaagtgacaaatgagacagaaagggaaggaattgatgacagggaatctcaggtgaaaaaaacctcaggactatcccacccaaatagcatggaagagtgagtatcatatagcaactccctgaaagagttgtgaactcccttccatttctgccctgctggatgggaagaaaagcgggtcctggtagctaaggaaat

SEQ ID NO: 312767 - DNA, 596 bp, Homo sapiens
ggggtgggtcttttcccgaggttttaaaaaaacgggaggttcactgcacaagctctctctcttgcctgctaccatccatgtaagatgtgacttgctcctccttgccttctgccatgattgtgaggccttcccagccatgtggaactgtaagttcattaaacctctttcttttgtaaattgcccartcttgggtatgcctttatcagcaacatgaaaatggatgaatacaccttgctttccaaagaaaacattgtttcaaccaaatcccactcctaccatcaattgttgtgaggattgtgtgtcctccttccttagttcagagtcctccaaaagaagacactgagaccaggtttcaagggtaagtagattgtcttggaggtgacgtcagaaaccactgatggagaagtgacaaatgagacagaaagggaaggaattgatgacagggaatctcaggtgaaaaaaacctcaggactatcccacccaaatagcatggaagagtgagtatcatatagcaactccctgaaagagttgtgaactcccttccatttctgccctgctggatgggaagaaaagcgggtcctggtagctaaggaaat

SEQ ID NO: 312768 - DNA, 559 bp, Homo sapiens
actgtaagttcattaaacctctttcttttgtaaattgcccagtcttgggtatgcctttatcagcaacatgaaaatggatgaatacaccttgctttccaaagaaaacattgtttcaaccaaatcccactcctaccatcaattgttgtgaggattgtgtgtcctccttccttagttcagagtcctccaaaagaagacactgagaccaggtttcaagggtaagtagattgtcttggaggtgacgtcagaaaccactgatggagaagtgacaaatgagacagaaagggaaggaattgatgacagggaatctyaggtgaaaaaaacctcaggactatcccacccaaatagcatggaagagtgagtatcatatagcaactccctgaaagagttgtgaactcccttccatttctgccctgctggatgggaagaaaagcgggtcctggtagctaaggaaatccctcaggcaagaagatatgtgtgctgccaactggaagttgggccagagaacatggaagtggtgaaggcagggcatagacagcatccacagctcatatccagtcat

SEQ ID NO: 312769 - DNA, 496 bp, Homo sapiens
atctagcaaggctgggtcaagggccaaatatctttgttctaattcccgctctgcaaatgagtacgcaagtctcccccacctgctgacagagtcatcatatagcacagtggcaatggctggccatagacattatcacagatatcacattggaaatatttrtgaatgacaatgggtcagatgcctcagataaagctatcgcaaaagatgtaatcactgtagctattagactgacagaagaaaatctatcagagcaattccaaggatgcaactgtgaaggataagttgttcttctgggaatgtgagtgtcccttgcaggaacactgatggagaatctcaaagccctgaagcccttaggggattcaaaggtttgagttggcttcagcagcagcaccacagggtaggcagatgtgggaggatggaagttcttcctgggagcaagtgaacaggggtgaacaatttcagaactacagtctgagatctcactgaaaaagccatt

SEQ ID NO: 312770 - DNA, 496 bp, Homo sapiens
atctagcaaggctgggtcaagggccaaatatctttgttctaattcccgctctgcaaatgagtacgcaagtctcccccacctgctgacagagtcatcatatagcacagtggcaatggctggccatagacattatcacagatatcacattggaaatatttgtgaatgacaatgggtcagatgcctcagataaagctatcgcaaaagatgtaatcactgtagctattagactgacagaagaaaawctatcagagcaattccaaggatgcaactgtgaaggataagttgttcttctgggaatgtgagtgtcccttgcaggaacactgatggagaatctcaaagccctgaagcccttaggggattcaaaggtttgagttggcttcagcagcagcaccacagggtaggcagatgtgggaggatggaagttcttcctgggagcaagtgaacaggggtgaacaatttcagaactacagtctgagatctcactgaaaaagccatt

SEQ ID NO: 312771 - DNA, 496 bp, Homo sapiens
atctagcaaggctgggtcaagggccaaatatctttgttctaattcccgctctgcaaatgagtacgcaagtctcccccacctgctgacagagtcatcatatagcacagtggcaatggctggccatagacattatcacagatatcacattggaaatatttgtgaatgacaatgggtcagatgcctcagataaagctatcgcaaaagatgtaatcactgtagctattagactgacagaagaaaatctatcagagcaattccaaggatgcaactgtgaaggataagttgttcttctgggaatgtgagtgtcccttgcaggaacactgatggagaatctcaaagccctgaagcccttaggggattcaaaggtttgagttggcttcagcagcagcaccacagggtaggcagatgtgggaggatggaagttcttcctgggagcaagtgarcaggggtgaacaatttcagaactacagtctgagatctcactgaaaaagccatt

SEQ ID NO: 312772 - DNA, 555 bp, Homo sapiens
caggaaatcaagaacaggtctaggatacagmaaaactggggtcagttggtaaagatggtggccatagcccttaatcctctgatcctatttttcacatatttttcaatgttgagctttgtttcatttataactttttttttttaagatacaggtaaggggctcactctctcacccagattggaatgcagtagtgtgatctcagctcactgagcctcgacctcctaggctcaagcaatcctcccacttcagcatcctgagtaactgggactacatgcacgcaccattacacctggttaatttttatatttttttttatagagacgggactttgccatgttgcctgggctggtctgaaactcctggcctgaagtgacccacttgcctcagcctcccaaagtggtgggattataggcttgagccactacacccggcccacaactaacctttcttgagcactacctaggtgtagggaccagtctcaatgctttgcttgcattaatacatgtaatcctcactatgctatgattctggtattattatcatcccattttacaa

SEQ ID NO: 312773 - DNA, 584 bp, Homo sapiens
gtgaaaaaaaaatactaggagacaaggtcctaaaggaaaattrgtgctatatcctagggatgtcaggctgagaattagaaaatatatcttggacacaataggcaatcatcgatcaacagaatattcctgtggttatactgcattcaccctttttttttttttttaagagaagacctacctctatatttgctggatataggattcaaaagagaactcgcaacctttgcacatgatcttatctccttgctacagcaattgttcaaagggtggacactgaactaaccagagaatgctgccttcttgtttatccaaggatgttgttgggctcagaaaataatatcccaaatggtgctttggcatgctgagcactttgaattttgaattaaaggaaattggaaggccttagaagctgcctcaaaatcaaaatctttctgacctttccttgtttctgtccccaagtgtggggaggggctctctctgagttcctttatctgactcagaagtacttccaaaagaaacataattgccttcaatctcctgtctgaaatctcattaactaggaaagattaatcactgaagaagaa

SEQ ID NO: 312774 - DNA, 586 bp, Homo sapiens
gtcaatgttatttatgacttaggatgcaaaatttgcaatattgccaaacacgataatgccacaacttggtgggcttaattccaaaaatactctattaggaaatttattaatataatagtaataaaaatattgataccaaatttatcttcagtattgattgtgcatcagatactctgctacataatgtatacgtattaacacagttaccatctcattgcaaccctattttggtcattgtaatcataattatcattgaactgtgaagacggaaaacccaaggcataaagaagataatttgtatccctgtgatcacatggagagtaactggtaggcctaaaactcccagaaattttggctcctctgtccctgaccttaaccactccactactaagacaagtgtgtgctgggggcaggaggggggtagggtaagctcataagaacaaatgctagaaaggaatttggttaaattcagtagctattatgactatataaaaaaatcaaaaccacgtcatgattcactatgtamatctactcttaagcattactctgtttaagatgttcaaaatggtgaaactctgaagccact

SEQ ID NO: 312775 - DNA, 556 bp, Homo sapiens
cttctggctcaatcttgagagaccccaccagactactcaacaaaatactgtatcttttcataatgtggcggtgtagctggtgtaacctraataatttcccaggctcacttttcattagctaggaacatatgtatatgttctccatagagtcaaagtgacaaccatgtccacctctctcacggttcttccttactctcatcccatcgtggcaggcagatatagggaatccagcagaatggtttacagcttcagggttgagacagcctcaccatggaaggaaactgagtccctgaatgacttcttggagcagaactcctatatggtcctcactgccccagtttctggtagagagtaaatattaaataaatggtaactgtaggcaaggaaggctttaaactattctttgaagaattagtagagtttctgtagtgagaaaatatggaaaaaaagtgtctgtattggaggaaaagttttaagtcgtaggaaacttacatttttaaagaatctacaaagtggcctgatttcacacttggatgtgtaataggtatctcagaca

SEQ ID NO: 312776 - DNA, 540 bp, Homo sapiens
caataaatggtaaatgggtgaatgaagcaattaatgaatgggtgaatgagacaaagttatgaatttctgatgacacttttgcatacctgtaaagctcaagagactatttatggcacatacaccaccagaattagtaagttttgatttgatgagttrgctggctaaaaatatcaaaatttttttatccattaaaaatataatgggctagaaatgaaaatgaaggaattgtgacaaaagcaataaaatactttagaaataaaattaccagaatgtatcagacatatatgaagaaactataaaaatctgactgaagccataatattttatctgagttaatggaaagagaaactgtgctcccagttggaaatattgaatatcatagaaaaggttagctcttcaaagttgatgtacatatatatatatatatatatatatatatatatatatatagttgaatattaattagaatgctttttttgaaattgcataaaataatttcaaagtttatacaaaagaatacagcctgaaactgatgagtgt

SEQ ID NO: 312777 - DNA, 627 bp, Homo sapiens
ttcctgtacaacctgcaggactgtgagccaattaaacatcttttctttacaaaagttactcagtctcaggtatttctttaaaccaatgcaagaagaacctaatacacatagattccaagaagaaatcccattaaaaaagggaatgtatagatgataaaggtgatttctacagtaaagggaatgaaagtaggtttattttataaagagttctggtacaactggctgttcatgcaaaagaagatagacctagatctcctttaaatgataaaatagcagtggattaaagttttaactataaaagaaatcaaacaataaaaatcttggcaagtttcaataaaaccattaatagaagaggaaatttttttaaactagaacaggaaacaaaacagctacaaaaaataaatcctaaaactaaaaggagataccagaaattaagtcaaaagaaatatttaaaattattatttcaaaataaaatatttgcaatatatgtgactgagattattattgaatacaatcttttcagattgataactaaaaatctcatataaaaygggcactgaatatgaataagcagttcacaaaagaacaaaaccagttctaaataacacaattaagaaaagttactga

SEQ ID NO: 312778 - DNA, 577 bp, Homo sapiens
agatctcctttaaatgataaaatagcagtggattaaagttttaactataaaagaaatcaaacaataaaaatcttggcaagtttcaataaaaccattaatagaagaggaaatttttttaaactagaacaggaaacaaaacagctacaaaaaataaatcctaaaactaaaaggagataccagaaattaagtcaaaagaaatatttaaaattattatttcaaaataaaatatttgcaatatatgtgactgagattattattgaatacaatcttttcagattgataactaaaaatctcatataaaatgggcactgaatatgaataagcagttcacaaaagaacaaaaccagttctaaataacacaattaagaaaagttactgagcctacctacyaatcagaagaatgtaaattagactacacataatgtaacactttacatcaaaaatttgacaaaaactatagagaataagtacgcctactgcaggcaggaatgtaagaagagaaaatagagttaacagtatacatcactggtggaaatgttcattgttgtgtggttttgaagaataaaattgcaatacc

SEQ ID NO: 312779 - DNA, 515 bp, Homo sapiens
taacatttttatagagattgagttccaccatgttgcccaggctggtctccaacccctgagctcaagtgatcttctcacctcagcctcccaaagtgctaggattacaggtgtgagccaccgtgcctagcctctgtcacagtgtttttcatttctagcaattttttttttgagtcttagagtttccatctctctgctaacattacccattttttmtgtcatgttgtctactttttacataagagtccttatcctattaatcatatttgttttacattccgcgtttaataattcaaaaatctctgctgtatttcagtctggttctgatacttgctttgtctcttcaattgtgtttttgactttcagtaatgcttacaatttttttctgtcaaacgtgggacatgaggtatgtggtagaaggagcttaagtagatatggctttagtgtgaggttgtatgaacacatggctaaaagttaggctgtctgctgtttgttgtacctgtggtgtcataagctaa

SEQ ID NO: 312780 - DNA, 570 bp, Homo sapiens
ttgtatagaaaactgaaacctatgaggattcaataatccacccaggtcactcatccatcatatgacttagttcacattcagtttttaggtgttatctaggtgaaaagaatctttagaatcctgaggaaaaagwttaaaatcccccaggagagacaggagctagcacagagcctgacacatgaaaggcacttcatatgttttggtggaagttaaggcaggtgttcagaaatcactgcctgcttcactcactgcgtttaaatgtgtacagttgcacacttcacaactagacagtgtacaccctgcagggatggaataattatttttaaaaattttaattgacatataatgattatacatatttatgaggtacagagtgattttccatacatggatacaatgtgtaattttatataagtagcatatctatcacctcaaatatttatcatttctttgtttggggaacattctaaatcctttctactacctatttgaaattctctctagtaactatttgaaaatatatattattgttaactgtgttcaccctcagtgcactagaactgattcctc

SEQ ID NO: 312781 - DNA, 619 bp, Homo sapiens
ctcctgagctattatgtaaaggtgcacactattcattccaggaagagtccataaagcaaattcacaagttagtgaaggtctgttataaatcagtaaataaccatgcactgtaattccaggctttttttttttttttttttttttttttttttgagacagagtctcgctgtctcccaggctggagttcagtggtgcaatctcggctcactgcaagctctgcctcctgggttttcgcaattctcctgcctcagcctcccgagtagctgggactacaggcgcccaccaccacgcctggctaattttttgtatttttagtagacatggggtttcaccctgttagccagaatggtctcgatctcctgacctcgtgatctgcctgccttggcctcccaaagtgctgggattacaggcgtgagccactgcgccyggccaattccaggcttttaacactaaatgtgcacagtaactataccttatttgatttttagacttttctttaaagtgcatactttatatccacaagaaaaaaattaaaatattatcggtttcatacttcaaagatggctggggatagataaaccctatccaagtttgaatctaggcttctcctcaaactgcc

SEQ ID NO: 312782 - DNA, 619 bp, Homo sapiens
ctcctgagctattatgtaaaggtgcacactattcattccaggaagagtccataaagcaaattcacaagttagtgaaggtctgttataaatcagtaaataaccatgcactgtaattccaggctttttttttttttttttttttttttttttttgagacagagtctcgctgtctcccaggctggagttcagtggtgcaatctcggctcactgcaagctctgcctcctgggttttcgcaattctcctgcctcagcctcccgagtagctgggactacaggcgcccaccaccacgcctggctaattttttgtatttttagtagacatggggtttcaccctgttagccagaatggtctcgatctcctgacctcgtgatctgcctgccttggcctcccaaagtgctgggattacaggcgtgagccactgcgcccggccaattccaggcttttaacactaaatgtgcacagtamctataccttatttgatttttagacttttctttaaagtgcatactttatatccacaagaaaaaaattaaaatattatcggtttcatacttcaaagatggctggggatagataaaccctatccaagtttgaatctaggcttctcctcaaactgcc

SEQ ID NO: 312783 - DNA, 617 bp, Homo sapiens
acagacataggttatccattaggagtcataatgctgccttgcttacagcacgggtccccagctgccctggatcttctgttgctaggctgcatctgttatattcaacttcctacactgaagagtttttctgcttccccaagacactgctaytgggaccaaccattccctgaccaaccccataattagctgagtgcactaaactctaggtctaccaatctggacttttcccttctcaccagcaacctaccattcagataatagtcatctttgcagcggagcaccacatgccaatgtataagaaaagaggcctcttcatcctactacggtgactcgaatttttaaaaattagaaaaatccaaacattcattattttaattgacagaaatagctgaaaatcatttttaaacacaaaagtggcaatgcctggtaaaatctcaaggaagttaaattttatttagatttagttgccatgataagtttgtgtgcagtgattaagtttgttgttttctgataagataaggacatctagagtcaacacctctggacatgattgactacattcctttggataaaatatgaatgttgttggtacaaaaagagaaagagaaaaggaaagt

SEQ ID NO: 312784 - DNA, 584 bp, Homo sapiens
tgactcaacattctggatttgcataatagaagacaggcaatttgtttcaaactcacagaaaaatatttcaacacatttgtctttttcagcatccttaccagttatgacattgacatcatgaaaaaatactaattctaaaatagtcacagatatttaatttaacttgcaaygcatttgcttctactcaacaataactatgtgtctagcacctggtttttatttaaattttattaattccataagcaaatactgagcttccagtttgtgctggccacagagcttgatcctaccatgcaacagtgtgtaaaacaactacctccctgaaggaactctaaccctgtggggccaagaaatagacatacataaacaattacattacagggctaggcatggtggctcatgcctttaatcctagtactttgggaggccaagatgggaggatcacttgagcctaagagtttgagatcagcctgggaatcatggcaagaccctgtctccacgaaaataaaagttaagaaaaaaaattagttgggtgtggtgggatatgccttcagccccagctactcaggaggctgaggtaggaa

SEQ ID NO: 312785 - DNA, 584 bp, Homo sapiens
tgactcaacattctggatttgcataatagaagacaggcaatttgtttcaaactcacagaaaaatatttcaacacatttgtctttttcagcatccttaccagttatgacattgacatcatgaaaaaatactaattctaaaatagtcacagatatttaatttaacttgcaatgcatttgcttctactcaacaataactatgtgtctagcacctggtttttatttaaattttattaattccataagcaaatactgagcttccagtttgtgctggccacagagcttgatcctaccatgcaacagtgtgtaaaacaactacctccctgaaggaactctaaycctgtggggccaagaaatagacatacataaacaattacattacagggctaggcatggtggctcatgcctttaatcctagtactttgggaggccaagatgggaggatcacttgagcctaagagtttgagatcagcctgggaatcatggcaagaccctgtctccacgaaaataaaagttaagaaaaaaaattagttgggtgtggtgggatatgccttcagccccagctactcaggaggctgaggtaggaa

SEQ ID NO: 312786 - DNA, 526 bp, Homo sapiens
ttcttatccactcctgtgatttttacaaagaagatgagaactaaagataatttatttactcataaacatattgaaaatttcaattaaggctgacatagccttaatttttatactctcttcttacaggactgactggacaaaacatttttatactctcttcttacaggactgactggacaaagttgagcccctttaatatgtgctgattggcaatatttattttaaggcatgagcatatgtaatctgataaccacccattcttagccagtgtctatgttaactaaggttgatttggtcaactcaaccacgtttcccttggaagctgttttgaatgtktgttagtcagctctggctgccataacaaaataccatagactgggtagcttcaataacagaactctattttctcacacttgtggtggttgcaagtccaagatcaaggtgccagcagagttgtttcagtttctggtgaggacttttctgagctatcagactgttgcctccttgctatgctctcacatggctt

SEQ ID NO: 312787 - DNA, 558 bp, Homo sapiens
tggggctcagtctctgaactcatttctctgtagctgattgcaatttttgtttttcaacccatgacctgggttgacctgaaactgcctttgtctggctcaatcacagactttccaatcctccagtttcaccgtcaattttccagggtgcctcggtttttgtggctagtagcatcctgtgatctactgygctcttgctgctatgactgctggcacactgggacatttgggggttatgtgactgagtcatgccagataatttctttgttccatctgcctattccttgctcctgcctgggctgcacagattggtggttactatttattaacttttgcaatgaaatcatattgcatttcagggtccacaccagaggccaactattaattctaatattggaagtcaaaccaaagttcatgggccacaccaaagtccactgctatgtgtcagaacagaacaaacaaaaagccaagctgagctagaattggcatggtaaacagccgctagaagaaatcagaactggaaaaaccaaaggggagaatccaatcaatgtccaacttggc

SEQ ID NO: 312788 - DNA, 563 bp, Homo sapiens
caatggaagtaaaagtttggtggtagaggggtggtcgacaggctctgaaggcccagcaagggcacagaaacatgcccttcagatttggcagtgggaaggtcactgctgcttccaggtgggaactttcagggtcactcttttcccatcaggccaggtacttttatgcctctaagtctttgcacattccattcccctacatctaaattgctatttatttctccatttctgtttctgacaagcttatattcatctttcratgcttgcttatttagtcaacaaatatttattaaatgtttactatgtgaaaggtattggtttgaaatccctcaaatgtcatttcctttatgagaaattccttcaccaatcccccatgcagatgcaaaggtttgcttctctgtgcaaccacagcaccctgtacacctctgaccaaaaccctcaatccccagcccactgaactgtggacagctgtttactcactctctctagaacaaattcttgagagcaggaaattggttttattcctctctgtatttatagcaccatattttatgttaaattcattt

SEQ ID NO: 312789 - DNA, 617 bp, Homo sapiens
gttaagtgaaataaacatttaaaaaatccttatagataaaaataaatactgtaaaaatatactaagaaacaggtggtaaagtatgcccacactgacattagctataaccgatatgctcaaatggatataaaaactgttagtgggaactgcttaccatggactaccttgaatggaaggtacgtagagcatcaaagtctattgattttgggtgagctaacaagagttagtggaccagagactgtattgccattttcctcattttgaaaataatagactgtacaataatagargtgttatcacaagtgcattatcaaaaactcatgggtgagcctcatctgaagcagagtttgtaaagcatatggcatttatggaaattcctccccttcagtgctcgtaactgcagactttagctgcttccatgtgatgcaagcaacttgccaataaataaagaagagataaaccagtctgcccacatcattatgagcaacagcgtcagaaacaacagccattgagagagggaagtctcttgtggcaacatctggagtagagaggatgtggtggcatttagcttgacacttccaagtaatttatttgtggagaaagacagtgttcactga

SEQ ID NO: 312790 - DNA, 512 bp, Homo sapiens
tgacttagtagaaaaatgtgatgatattggactgtaggctctgttctgcattcttcagtaaatttctacaacaaaaagacaaattgatttacctgaaatcacagagaaatctgtatgcacctctacataaaaaattctttctacacagcctcagcaatgctaaactggaaaggttaaggcaggaaagtcctctgtagaattggaaaactaattgttttaccccgtcataaagttagtataagcaaaaacagggcagtgagaaaagtgaaagaagattagattcttccctgcctacccaaggtaatcattccctatggcctaagcaacttggatgcagtggtgggcaggaaagggaattagctttaacttatcatcctatcctttctttcactttactctgaggtaggagtcaagacagaagccattaatctgatggtcaaaatgtcaggcctattgataagcaatcaaaggggtatggtacttattyaaagataatgaccagacatatattc

SEQ ID NO: 312791 - DNA, 517 bp, Homo sapiens
gcaattatggtgtccgatgaaagaaaatgtgaggtggctatgatgctcacagcttttgtgagattgagagaactaggacctgcagcaactctggaaaccctgcctgtcagacaagcagatgacctcamaggagtgataagaaacatctgctccatgctgactcccagggctgatgctatcctgcttgcacattggggactgaaagtaaagaagggactaaatgctggcgaggtaaattagggcagaaccaaatgagctaagttgcaaatatatacatgtatacacacacatacacatatatatgtaaatgtgtatgtacatattttaaaagactttactgcagttactcaggaacagcttttcattcacatttgagctgctttcagaaattaaaaccacttttttaaagggtgcattgataaaatctgaggttttttgcttgttttcttctgtgtaaactttttttcctgtgtggcacagggtagaccttaagtatttctcctccatcctttatcct

SEQ ID NO: 312792 - DNA, 513 bp, Homo sapiens
gacttggaatattgatgtttctgcctcttattttgcattccttattaattcagagcatgttaatgcacttgtactccttacatttatacagacaaaaaagaggaaaaaacaaaataaaccatatgttaaaaagtataccttcatatatttttcaatgatgcaaagggaggtagagaatgaacctttggtgaacatttgctatgtattgggctctcgcaagtaacttcaaataacttatttaatcctcacaatgaggtatgtaggagggatacatattcctatgttacagaaatggcaaacaaggctcaggtaggattaatagatactccacaccgtattgacgttcaaaatgtaacagtttgactttgctgtgtactgaargcttgcaggtttttcaatcctgcccattcatttgtaaagtgaaaaattgcgaagttatagtgtgttatgtacttaactcagatgttccatacttaagtttaatttgttgatttataatcctagaatgagact

SEQ ID NO: 312793 - DNA, 561 bp, Homo sapiens
gttctcaccacacgttattgccattgcatgtgttcttgtctcttcctagaatgcccatctgtctcctgtcttcctgaaaacactgttcatgattaaatccctgctgaggcattactttttacatgaagtgctccctgccttccagactccattaattgttttctccactgtaccacttgtgaatctcacaggctttttggctttttttgtgcattgcatatcacagttttatttgtttacaaatmtttttaaaagtctttttaaacatctattttgtgggtacataggtgtacatatttatgggtacatgagatgttttgatacaggcaaacaatgcataatcacatcagggtaaatggggtatccatctcttcaagcattatcctttgtgttataaacaatttttaaaactctttatttttaaattacaataaattattgactgtagtcaccctgttgtgctatcaaatactagatcttttttatctaactatatttttataccaattagccattcctccttacccctcctgtcaccaactacccttcccagcctctagt

SEQ ID NO: 312794 - DNA, 549 bp, Homo sapiens
ttagatttgttgcagaaaggtcaggttcaaataatgtgaagggagagaaatctgggattttctctacagaatcgccacataaggcaattcggacttacttgatcattcatctttttgtcattgccaggaactgagagacagtattggtctgctgttgctaggaagtctgcctaccggtctaaaatctcaaaaatgtggcaatcttctgttctgagacaatattataatactccagatttggtcaatacaggtcatgtcttaattctgttgtcattagttccmgtttgttaaatgtttacagcgtggcaggtataccaagcacagtttcagcagaaactgagaccacagggtagagctcatacatcctcaagactcagctgcagtccccaaagtccccacaccatttgaccagtagggctccattctctgaattacgtgcttcttactgttgacatcaccatcctgaaaaagtgttgtatttattaagctcctaccaggtaccaagtgttgtcccaactaaacagattatttcatctactaccgtgagtt

SEQ ID NO: 312795 - DNA, 545 bp, Homo sapiens
ttatggcataacaattattcaactgcctaagaactgtcatggtttagcccaaatcctagcaagtggttagggagatcagcatgcaaagcatgaatgggtgatgtaagacttgaagttgagaattgattcagagggttgctgactgtataacctttgaaataatgtattcctatattttataatgcctgtcaatgttaagaatattgtcttacaagctarcatatttgttttgttaataagtttttttcttgtctatgctcgtggattcattttgtgtcagcatactaaaaagttttaccatgtactgcagtcaaattaattcagaaaacattagtctgtaacatatattctcacacaggattattcatcaaccaacaattatgaacttagaatctaatatgtatttatagctacactagatacacaggaaggtaaaagatttcctattttgttgggagcagcaaatattgttctccacttgtcttttacccatacaattttccctgcttttggagtacaagaataatatctcctactgatttata

SEQ ID NO: 312796 - DNA, 506 bp, Homo sapiens
cacaatacattattattaactagagtcaccctactctgctgtagaccattagaacttattccttctatctaactgtacatttgtacccattaacctgtttctcttcatcccttaacccactgacacacccttyccagtctttggtctctattgttctactctcctacatgagatcgatttttttttttatagcttcgacgtatgagtgagaacatgcattatttgtccttctgtacctggcttattttacattacataatgacatctagttacatttatgttgctgaaaatggcaatgattttattcttctttatacctgactagtagtattccattgtgtatatatatatgaaattttcttcatccgttcttctgttgatgaacacttaaggttgattccatatctttgctgttgtgaacagtgctgcaataaacatgggaatgcaggtatccatttgatatactgatttctttttctttggagatatacccagcagtgggatat

SEQ ID NO: 312797 - DNA, 581 bp, Homo sapiens
catttattgctatggacttccctttaaccaccacatttgctgtacaccataggttttggtatgttgtgttttgattttcatttgcttcaagaatttttaaattgtttccttttctttcttgatccaattctggagcatgttgtttcatttccaaatattgtaatctatttgtacagttttcaatgttctacttgttattaattactagtttttttcctttgtggtctgaaaagatagttgatattatttcaattttaaaaaatgttttgtgagttggttttatgtcctagcatatggcctatcatagagagtgtttcatgtgctgataagaagatgcatattctatagctgttggattaagtsttctataaatatttgttaggtccatttgatctaaaatgcagtttaaatccaatttttttggttaattttatgtgtagattatatgtctaatattgagtacatgttgaagtccccagccattattgtatcggagtctatttctgtctttagatctattaatgattgcttatatatctgggtgctccagtgttgggtgcaagtatgtttagaattattat

SEQ ID NO: 312798 - DNA, 498 bp, Homo sapiens
ggaaccaagtgattcacgaaggatctgtccccatgacaaaaacacctcctcccagtagaccccacctccaacaatggggatcacgttttaacgtgacatttggaggggacaaatattcaaactgtattagttcctaaaggtggaattttaaggctttggcttatttcatttctaagctctaggaagggcttgtggggaggagctaaaagtaatattaatggtaatcttataattaaaaattggttataktgtgttaaaatagtagtatgaaagacaatagtattcttccattaaaaatattcattggggtttcactatttgtcagccattgtacagggtgatattaaaaccaagcttgatctctgctttccttgtgttaacagcttcatgagtgaagcagcattaatttaaaatgccgtgtgacacctgttaccatgaaaagttcatgccactattcatgcccatactgtgggtactggacacagacaggtgttccca

SEQ ID NO: 312799 - DNA, 602 bp, Homo sapiens
gttatattgtgttaaaatagtagtatgaaagacaatagtattcttccattaaaaatattcattggggtttcactatttgtcagccattgtacagggtgatattaaaaccaagcttgatctctgctttccttgtgttaacagcttcatgagtgaagcagcattaatttaaaatgccgtgtgacacctgttaccatgaaaagttcatgccactattcatgcccatactgtgggtactggacacagacaggtgttcccagaaagatttttctgcraaagtgaccctggagctgagttctgaaaaaggagaaggaattgactaagctaagtggaaagcaaaaagctttcagggcatcaggaacagcatggagcagagccctgaaagtaggccagcagactaaggcagagataatagaaggaatcatagtgtcatctgaggctgataattcatagtagagtattagtgtttgggagtgaaaagtctctatgtgaagtgatgtaatttgctgcaaattctgtggattacaatagcaacactaagtgcttaaaggagtgatatattagatgcactggtttttaaaaggactctgtctctgccagatgta

SEQ ID NO: 312800 - DNA, 478 bp, Homo sapiens
tgtccactgagggctatagaatgttagagacagagaaattacaggcgtcccatgggagatcaatcttttcttcagatagagaaagtaaggttgagaggaagcggaaactttccatggttttgtggttacttagttacgaagccaataccaacctatmaattgattaaatgtaattctatagcttttgtccatcacacacaaatgatgattacaatgttaactgttttacatgattcattattcccagaagagtttgtttgttcacttttctgcagcctccaaaagaacatcatatgtgtgaaaacagattaacacactctggctctgatattgatgatgagctgttataatattaacaatgctgcatattgtggtggcagaaatccaaatgaacaagagattttggatatagcttgctgcaacacggaataaatgctttatacaaatgggaattctttaaaatcagtcatgaaaccag

SEQ ID NO: 312801 - DNA, 628 bp, Homo sapiens
aataatctaactctgaccatagcctctctccctccaacttgctggaataaccccactacactcatcctccaacctctttaagccatcaaaccattgatctgcgtaatttctcccatttctgctgctacctgctttctccatttctctcctaacctaaattagaaaccatgacctgcaattgcaacattactcctgaaaataccctaaaaatgcctggtccttctattttctctgcagctcactggaccaactgtaatttggatgaatttagctcttcattttttttttttttcatgactgagcttagttgtcattttctgagtgctcccggagaaattcacataaaagagaacattagtttctgtctatrtttatgtttcattgacttccaatggtcttttcgtactgcttgacagtccaattaaatcgctgtacaatgtattctctgattttcaaaatagctatttcaaattttctttactctcttgaacattccaaatcccattctccatcctactccttattcttagcagtcttgccttcctctctcctttttagagaagacagaaggcctcagaaactttcattctctatatcaaataaacatacctccctacccctgaattca

SEQ ID NO: 312802 - DNA, 628 bp, Homo sapiens
aataatctaactctgaccatagcctctctccctccaacttgctggaataaccccactacactcatcctccaacctctttaagccatcaaaccattgatctgcgtaatttctcccatttctgctgctacctgctttctccatttctctcctaacctaaattagaaaccatgacctgcaattgcaacattactcctgaaaataccctaaaaatgcctggtccttctattttctctgcagctcactggaccaactgtaatttggatgaatttagctcttcattttttttttttttcatgactgagcttagttgtcattttctgagtgctcccggagaaattcacataaaagagaacattagtttctgtctatatttatgtttcattgacttccaatggtcttttcgtactgcttgacagtccaattaaatcgctgtacaatgtattctcygattttcaaaatagctatttcaaattttctttactctcttgaacattccaaatcccattctccatcctactccttattcttagcagtcttgccttcctctctcctttttagagaagacagaaggcctcagaaactttcattctctatatcaaataaacatacctccctacccctgaattca

SEQ ID NO: 312803 - DNA, 497 bp, Homo sapiens
cagctacttgatctgggacttcccagctttcgtaactgtaagaaacaactggtctagacttataagttacccagttgcaggtattctgttgtaagcaacagaaaatgaactaggaccacctgcttccaagtaattattgcagatttcttattgaatatcccctggctctcccctcctcaacttactttgttcctgaactttctaatatatcttccacatcagtgaaagactccaaaacctattttggtcagccaagtcaaacacatgaataagcttccatttctccttctcactcagacactttccctattgaattagccactaaatttatggccttgaccttcttaaaatccctttatcttcccacctcctcatrtctatagttatgactttgcttcctcatttctcaccctacaaaagccatctcagcttctttccctatattcaaactctgcaactctttaaccacaatccattatctccatgctcatccaagg

SEQ ID NO: 312804 - DNA, 548 bp, Homo sapiens
agaactacccaaaaaatatataaaatatatttaatagttggtttacaattttgcatgcaatgggtaaggtttaaaacctaattatcattctctaatggctattatgataaagaccaaaataaaagtgttgatgaggatgtggagaaaagggaacccttgtgtactgttggtgggaatgtaaattagtacagccattagggaaaacagtatgaatacttttcaaaaaactaaaaatataactaccataggatccaacaattctgctattactggatrcatagccaaaaaaaaaaaaaatgaaattcgtatgtcaaaaagatatctgcactcccgctgttcatggcagtattactcaagacactcaaaatatggcatcaactaagcgtccatcaaccgacgaatgcataagaaaaatgtaacatatatatacacaatgacatactatttatgctttaaaaacccaggaaattctgtcatctgtgacaacatgaatgcccctggaggacattatgtttaataaaagaagccagacacagaagacaaaaatc

SEQ ID NO: 312805 - DNA, 547 bp, Homo sapiens
tctagcggtgagttcagtattcccaaatcttctctgtctacatacagaagacttaagagatcagtatgtcccaaactagttggagtaaggataatatcagaggtagaaaaaaaagataagctttttggctatgggataaaatacaagtaaacgttaacagtggtccttcttgcttcccaccttcttcccaaagttcccaagtcttaggagaaaaagaaaaatccctacctatgtgtgatgtggagtgcaagttttatttctcactaacccaggcagaatgcagagtgtwctgattgtgaagagaagctggtgagttagttgttttagcagccaatgattccccaaggatacttactgagtcctttctgttcctgctggaggaagacgtcatttccatgctgttagcatgtgaaacaatagtggggctgacaacggaagtgccttggtttgttggttaactgacttatacttctgactttaattgagagtggtcaggcatttattggcttagaaagctcacacataaggaactcacatgtcctctaaa

SEQ ID NO: 312806 - DNA, 547 bp, Homo sapiens
tctagcggtgagttcagtattcccaaatcttctctgtctacatacagaagacttaagagatcagtatgtcccaaactagttggagtaaggataatatcagaggtagaaaaaaaagataagctttttggctatgggataaaatacaagtaaacgttaacagtggtccttcttgcttcccaccttcttcccaaagttcccaagtcttaggagaaaaagaaaaatccctacctatgtgtgatgtggagtgcaagttttatttctcactaacccaggcagaatgcagagtgtactgattgtgaagagaagctggtgagttagttgttttagcagccaatgattccccaaggatacttactgagtcctttctgttcctgctggaggaagacgtcatttccatgctgttagcatgtgaaacaatagtggggctgacaacggaagtgccttsgtttgttggttaactgacttatacttctgactttaattgagagtggtcaggcatttattggcttagaaagctcacacataaggaactcacatgtcctctaaa

SEQ ID NO: 312807 - DNA, 548 bp, Homo sapiens
ttttctttaaaacattttctactgtggtaaaataatataacaatttctgttctccctttattatctagctatttggtaatacggaatgtctttgtatatagaaaatgataatataaaaatcatatagccagtctctggtcccagatgctgttcttctccatccatttctttttcttctaagagatgygaagtccattaatctgatatttaggaatggcctattgtgaatgttcacaagtgattgtggtgaatctaatctttattagtttgaaactcttttacatattatataattagtaagcatttattatttctgtatcctggtggataaattcaatattaatttctttgatagttacaatgcattctttacagtgaataattctgggcaatacgttctttttctaggcactctctatgaagcagctgcagattgtatattattttattagtcatggtgaccttaactgagatgaaacatttcggaatttatgtcctgaaccaagtaacagtgtttaaattacttaactctccaatatttcaaacaa

SEQ ID NO: 312808 - DNA, 548 bp, Homo sapiens
ttttctttaaaacattttctactgtggtaaaataatataacaatttctgttctccctttattatctagctatttggtaatacggaatgtctttgtatatagaaaatgataatataaaaatcatatagccagtctctggtcccagatgctgttcttctccatccatttctttttcttctaagagatgtgmagtccattaatctgatatttaggaatggcctattgtgaatgttcacaagtgattgtggtgaatctaatctttattagtttgaaactcttttacatattatataattagtaagcatttattatttctgtatcctggtggataaattcaatattaatttctttgatagttacaatgcattctttacagtgaataattctgggcaatacgttctttttctaggcactctctatgaagcagctgcagattgtatattattttattagtcatggtgaccttaactgagatgaaacatttcggaatttatgtcctgaaccaagtaacagtgtttaaattacttaactctccaatatttcaaacaa

SEQ ID NO: 312809 - DNA, 548 bp, Homo sapiens
ttttctttaaaacattttctactgtggtaaaataatataacaatttctgttctccctttattatctagctatttggtaatacggaatgtctttgtatatagaaaatgataatataaaaatcatatagccagtctctggtcccagatgctgttcttctccatccatttctttttcttctaagagatgtgaagtccattaatctgatatttaggaatggcctattgtgaatgttcacaagtgattgtggtgaatctaatctttattagtttgaaactcttttacatattatataattagtaagcatttattatttctgtatcctggtggataaattcaatattaatttctttgatagttacaatgcattctttacagtgaataattctgggcaatacgttctttttctaggcactctctatgaagcagctgcagattgtatattattttattagtcatggtgaccttaactgagatgaaacatttcrgaatttatgtcctgaaccaagtaacagtgtttaaattacttaactctccaatatttcaaacaa

SEQ ID NO: 312810 - DNA, 565 bp, Homo sapiens
catgcaataacctgtactgaatttctaatgctagtattgaattatccactgtaatggaagcaaaaattgatatagataattgagaaggagaggaaattgtttctgtttcactttgatagacaatttttgcagaaaatttaccttcccaactctgttttcaggtttagaattggtttgcatgccctgaaacacaaattttgatataaagaaaagcactaagaaaaatctgtcttggaaaatatttaaatcttgctgatttaacacttgtcattaatatttcatgcatgacaactacacaaattcaactctattattaatagttttgttgtttagtaaaagaaacaaatttgtttcatttcagaatatcrgcttagtaactggcctttcattcactcatctactcatataggttacacgaaatacaaaaaggtacagacttagatgaatgcatggaaaaaccatcaaaatatttttaatccctaatttaacattgaatatgttttcttctaaattaagtcccctcctaggcacagtaaaactcatttcacttccttgaggaagagtg

SEQ ID NO: 312811 - DNA, 456 bp, Homo sapiens
gtttagccatcaaaaggacggaagtgctgatataagctgcaacatgaatgaaccttraagacattaagtgaaagaagccagacacaaaagaccacatccttactgtatgattccatttatacaaaatatccatgaaagataaatccatagagatagaaagttgatccgtagttgccatggactgaggtatgcatggtgactgctaatgggtatgggatttcttttgggggcaattgaaaatgttctgaaatttggtagccttgattgtgcagaacactgtgaatgtacaaaaagccactgaattgtaaaggttatgacatgtcatttttaccataataaaaaaatagaacgatgtcattgtttgacaacttttttttcattcaaattataatacctatataattatgtttaaaattgttaaaaagttggaaaatgttctctagtggtctttctttc

SEQ ID NO: 312812 - DNA, 632 bp, Homo sapiens
aaataggcaaaagactttcatagacacttctccaaagaaatacaaatggctaatgggtatgctaaaagatgtttagcatcactaattatgagaaaaatgcaaatcaaaaccacaataagatatcacctcacacctgttaggaaggccattgtccaatcaaatgaataatgagtgttggaaaaaatgcggagaaattagaaccctgtgcacggttgttagaaatgtaaaataatgcagcactatggaaaaaaatctgaaatttctcaaaataatttaaactagaactaccatatgatccagcaatcccacttctgggtatttatccaaaagaattaaaattggaatctggaaaaggtatttgtacttgtatgttcaatgcagcattatttacagcacctaagatgtgagggctggtaaatgtccatcagtggatgaatgaataatgaaaatgtggtatatagagccaatggaatataattcagcctttaaaatgaagaatgaagaaaatcctgtcatatgtagcaacataaacgaaatttgaggacattatgctaagtgaagcaaatcamatgctacatgactctacttatataagatatctaaagtagcaaactcatggaagcagaaagtag

SEQ ID NO: 312813 - DNA, 563 bp, Homo sapiens
aagacaatacattgccatttaatttattggaataataacaagttttagcactgcaatggttctgtgtaaaataagtcacagcgactttggttctcagctgtgtcaaaaatttttcaacacaaagaaaatttttaaaattgagataacgtttctttggtgaatatattcattttatttcttttagagttcatgttatactggtgattctttcgtctgtctcagagatgacagcctgctatacaccttgttgaccaaaagcaacatcaggtagagaagtttaagtcaaaccttcactagtatttaaaactttctttccagttacaacaatgtgatctaatcatacatgttagaactaaaagggtttagagagattctagtattttttactagcagagaaaatgctagtrtcactgctttctagtcatacattttcctagttacataactagtgagtggttgtgaaagcactagaaacagatcacaaccaggtgcatgtctactactaatacagtgcattttcaacgacagtgatcaataatcatgcttttagtagaatacctatc

SEQ ID NO: 312814 - DNA, 586 bp, Homo sapiens
tggctgtgtgggagaccggagttttattattactgaaatcagtcttcccgagcatttggggatctgattttttaaggataatttggtaggtagggggccagtgagttgggagttctgattggtcatgtcagagatgaaatcacagggagttgaagctgtcctcttgcaaagtcatttcctgggtagggggggtggcagggtggggccaaaagaccaaatgagccagtttatcaatttaggtggtaccaactgatccttcgaatgcagggtctgcaaaatgtctcaagtgctggtattagggtttacaatagtgaygttatccccaggagcaatttgaggaagtttagaatcttacagcctccagctgcatgactcctaaaccataatttctaatcttgtggctaatttgttagtcctgcaaaggcagtctagtccctaggtaggaagggggtttgttttgagaaagggctgttaccatcaccgtttcaaagctaaaccataaagtaagttcattccagagttagttcagcctccacccaaaaatgaacaaggacagcatgaaggttagaagcaagatggagtcagt

SEQ ID NO: 312815 - DNA, 590 bp, Homo sapiens
atgtataaatatttaaatacatgtaattcatatttacaattatatgtgggtgtatatgtaaatatataattattaaatgtttattttgttatatgacaatctgcctcttcaggaagtggtatgacatgtaactaaatttttgataattgcacagctcaagacatttgatctgagtattgactcatcaaaaacacttactaagaatccttcattttgtcaggcagcaatatagttacctttggtgaatgtgctttttttgctccaattacaatatgtatttcyaatattggatatttttcgataacctcattgcaagtgtgtattatagctcagcagctcccactggtgtgcccttggttcattataatgtacaacagtgtcccccggtcgaatatcctggagaaatgttgttgaaggtgatacttctagcttggaggaagaggaataaacagagctagttgcactcaatatagagaggcaccataactaaccataactaatcagataaacaatgtaaagagagcaaccattattaaatggctcttttgttattgacaatcttcttcaggaagtggcatgacatgtaacta

SEQ ID NO: 312816 - DNA, 575 bp, Homo sapiens
tcctgggttattcaggtgggctcagtctaataacatgaacctttaaaagcagagaactttctggattagagtcagagagaagtgataaagggtacatcaaagatattcaaagtgcgagaatgacctgacttgccatgactggtttgaagatggagggggaaatgtgacaaggaatgcaagcagccttaagaaacggagagatgttcccaaatgatagctaacaaagaaaggaaaactccaactctacaaccttaaggaactgaatgccagccaacaatctgaaagagcatgaaagtatttctttcccagagtctccagaagggaacatagccctactcttggttttgggmctgtgagacctcgagcagagaatccactgagctgcactgtgcacagacagctgacccacagaaactgagataataagtagatgctgtttcaggccactaagtttgtggtggtgtgtcattggcagcagtagaaaatttacacacttttaaatatgaaaagccacaatttagaatgaagatataataactgtggttatctatgtaccagttagcacagcagccacc

SEQ ID NO: 312817 - DNA, 569 bp, Homo sapiens
taaacaatttgttaaaatttttctgtcttacttcatttctgtagcagttgatatctggctgtcctttttataatgcagagtgggaactttccctaccatgtttgataaatgttgtccaggctccattgccaataatgtgttgtccaaaatgcctgtttagtttttaaagacggaactccaccctttgcttggtcttaagtatgtatggaatgttatgataggacatagtagtagtggtggtcagacatggaaatggtggggagacaaaaatatgcatgtgaaataaaactcagtattttaataaatttaaaaaaaagagaaattmatagcctgaaacacacttaccagtaaaagtggaaaaaaaaaaaacaaatgtccaatcccaaaaaagctagcagaagaacaaaaggaatcacacagaagaaaataagataaaagcagaaagcagtgaggtagggagaagaaaaacagatgaattacaacagtccctctatatctgcagattctgcatttgcagattcaaccacccatggattgaaaatagagtcctaatttagtactaataaagt

SEQ ID NO: 312818 - DNA, 570 bp, Homo sapiens
gtctcatagtaaattagtgtcagactcaactaaatctcagttttctgtctttaatattttctagtakatccgtttaaactacttttattttatcaaaagttaaagtaatagaagacaattgctttatatctgactatccttggacaattacaaccagcagatagtaagtctcagtaatttagagttcacttatacagattgtgattataccatttctacattttatatgctaatacttaccttgtactcccttttaatgagtgttatatggccaattagtaataaaatgaaattagtagcattctttcttaaaaggcaaatatatattttagcaccttggaaatgctttaaacttatttaaatataaccagagctcaacacagattatacttgttcttaaaaatggttactctgaaacttattcttaagtgcaaaatatctggcaaatatctttattaacctgatacagtttgtgtattcttaaagtataagaaaactgtgtccttcaaaatttctgtgagttttgacattcatcagttctcttcccctttacctaaatctcccagtgag

SEQ ID NO: 312819 - DNA, 570 bp, Homo sapiens
gtctcatagtaaattagtgtcagactcaactaaatctcagttttctgtctttaatattttctagtatatccgtttaaactacttttattttatcaaaagttaaagtaatagaagacaattgctttatatctgactatccttggacaattacaaccagcagatagtaagtctcagtaatttagagttcacttatacagattgtgattataccatttctacattttatatgctaatacttaccttgtactcccttttaatgagtgttatatggccaattagtaataaaatgaaattagtagcattctttcttaaaaggcaaatatatattttagcaccttggaaatgctttaaacttatttaaatataaccagagctcaacacagattatacttgttcttaaaaatggttactctgaaacttattcttaagtgcaaaatatctggcaaatatctttattaacctgatacagtttgtgtattcttaaagtataagaaaactgtgtccttcaaaatttctrtgagttttgacattcatcagttctcttcccctttacctaaatctcccagtgag

SEQ ID NO: 312820 - DNA, 559 bp, Homo sapiens
tatttgtaaatcatgtataaatcataaagggcttatattcaaaatrtatcttaccaatcattaataaaaccattcaattaaaaaataagcaaaaatttgaacaggcatttaatcagggaagatttatgaatggcttaaaaacccatagaaagatcttcaacatcattaatgattagggaaatgtaaattacgttttcaatgagatataccagcacatcaactagaatgctgtcttattagttaaggctgctataacaaaatatagagtgggagtcttaacgaacatgtatttctcatagttctggagccagcagatttggtttgtaatgaaggccttcttccatgcttatagatagctagctgccttctcgcagtgtcctcacatggcatagagagagagagagagagagagtgaggtaacgatctagcgcatgtactctggtctctttctcttcttataaggacactaatgccatcacaggggccctaacatcatgccctcatctgaacctaattacctcccaaaggcctcatctccaagtactatcacattggcgtt

SEQ ID NO: 312821 - DNA, 654 bp, Homo sapiens
gcatttaatcagggaagatttatgaatggcttaaaaacccatagaaagatcttcaacatcattaatgattagggaaatgtaaattacgttttcaatgagatataccagcacatcaactagaatgctgtcttattagttaaggctgctataacaaaatatagagtgggagtcttaacgaacatgtatttctcatagttctggagccagcagatttggtttgtaatgaaggccttcttccatgcttatagatagctagctgccttctcgcagtgtcctcacatggcatagagagagagagagagagagagtgaggtaacgatctagcgcatgtactctggtctctttctcttcttataaggacactaatgccatcacaggggccctaacatcatgccctcatctgaacctaattacctcccaaaggcctcatctccaagtactatcacattggcrttagggcttcaacatatgaattctggggggacaaacttactgcataacattccactcctggcagcccagaatccatgtccatttcctatgcaaaatacgtttattccatcctaacagccccaagagtgttaagtttgttgcagcatcaactctaaagtacaaagtctcgtctaaatattttctaaatcagatatgtgtgtg

SEQ ID NO: 312822 - DNA, 545 bp, Homo sapiens
aaccacgcttccctgatggaactttscaaccctccagtcagatctccttgtgaacctactccactagggccttctgtctgacagacagagctatgtggagtctcagcaaagcagccactcaggcatgcatggagaccctggagcattagctacttgagctttctggcaaaagtagctgcaactctggcaaagtgggatgttagacccccatacatacccataggaaagaggctgaatccaggaggctgagcagtgacagtcagcaggccccacttccatggcatctcacaagatgagactcactggcttggaattccagccagccacaagtagtggcattgtacctccctaagaaggagctcccagggggagacccaggctgccatctttgctgtttgggtgcctgagacgtttcagctttcaggcttcagagagtctgagcccactgggggtgaaagggatccctcagcacatcacagctgctctaccaaaacatagactgctactttaagcaggtccctgatccacttctcctcactgggcag

SEQ ID NO: 312823 - DNA, 592 bp, Homo sapiens
ggatgtgactactgactctacagaaaaaaaaaaaaaaaaaataagaagctactttgaacacctctacacacacaaactagaaaacctagaaaagatggattaattcayggacacattcgccctcccaagactgaggcaggaaaaaattgattccctgaacagatcaataatgagctgcaaaactgaatcagtaataaatagcctaacaactgaaaaaagcttgggacctgatggattcatagccaaattctaccagagtacaaaaaagagctagcaccattcctacatgcactattccaaaatatggaggaggagggattcctccccaactcattctatgaggccagcatcatcttgataccaaaaacctggcagagacacaacaacatcaacaagaaaaagcttcaggttaacatccttaatgaagatcaatgcaaaaatcctcaaaagacacttgtaaaccgaaataagcaatggtgaaaagattctctattcaataaatggtgctgggataactggctagctatatgcagaagactaaagctggaacccttctttacaccacacgtaaaagatcaattcaagatggatt

SEQ ID NO: 312824 - DNA, 592 bp, Homo sapiens
ggatgtgactactgactctacagaaaaaaaaaaaaaaaaaataagaagctactttgaacacctctacacacacaaactagaaaacctagaaaagatggattaattcatggacacattcgccctcccaagactgaggcaggaaaaaattgattccctgaacagatcaataatgagctgcaaaactgaatcagtaataaatagcctaacaactgaaaaaagcttgggacctgatggattcatagccaaattctaccagagtacaaaaaagagctagcaccattcctacatgcactatwccaaaatatggaggaggagggattcctccccaactcattctatgaggccagcatcatcttgataccaaaaacctggcagagacacaacaacatcaacaagaaaaagcttcaggttaacatccttaatgaagatcaatgcaaaaatcctcaaaagacacttgtaaaccgaaataagcaatggtgaaaagattctctattcaataaatggtgctgggataactggctagctatatgcagaagactaaagctggaacccttctttacaccacacgtaaaagatcaattcaagatggatt

SEQ ID NO: 312825 - DNA, 592 bp, Homo sapiens
ggatgtgactactgactctacagaaaaaaaaaaaaaaaaaataagaagctactttgaacacctctacacacacaaactagaaaacctagaaaagatggattaattcatggacacattcgccctcccaagactgaggcaggaaaaaattgattccctgaacagatcaataatgagctgcaaaactgaatcagtaataaatagcctaacaactgaaaaaagcttgggacctgatggattcatagccaaattctaccagagtacaaaaaagagctagcaccattcctacatgcactattccaaaatatggaggaggagggattcctccccaactcattctatgaggccagcatcatcttgataccaaaaacctggcagagacacaacaacatcaacaagaaaaagcttcaggttaacatccttaatgaagatcaatgcaaaaatcctcaaaagacacttgtaaaccgaaataagcaatggtgaaaagattctctattcaataaatggtgctgggataactggctagctatatgcagaagactaaagctggaamccttctttacaccacacgtaaaagatcaattcaagatggatt

SEQ ID NO: 312826 - DNA, 602 bp, Homo sapiens
cgtgaatgttcattacagccctattcccaccaatagcaaagacatagaatcaacctaaatttccatcaatgacagattggataaagaaaatgtggtacatttacaccatgaaatactatggagccataaaaaggaactaaatcacggcttttgtgggaacatgggtgaagctgaaggctattatccttagcaaactaacacatraacagaaaaccaaatactgcatgttctcacttataagtgggagttaaatgataagaacttatgaacacaaagaaggaaacaacagacattggtgtctacttgaggggggaggctgggaggagggagagcagcagaaaagataactattgaatattgggcttaatacctgagtgaggaaataatatgtacaagaaacccacatgccacgtgtttgtctatgtaacaaatcttcacatgtacccccaaacctaaaagtttaaaaaataaataaatcataaggagaaaatagaacacaaaatggactttctgaaaaaaagcacttgtaatttgattttaacatatttaccatataatcatgtataaactcaatcatttaattaaaatttaaatatatacat

SEQ ID NO: 312827 - DNA, 527 bp, Homo sapiens
cttctcagcctcacctttgctcttgatgcacaaaaccaagctacttgtattttccctgaaatgcctttcctacttttcaactcacagtttcctctgcttaaaatgcacttttcctagtatcctgctctattaaaattttaccatcccccaaagctcagatcaaatatcctctcctccatgacccaatctctaattccgattggaaatagcctctaactttgatattccacagtacccagttttgcctctctgaggaactttgggaacttatcatgaattataataagctgtatatatgtttatctagctactgaacaaactccttaaggggaaagaacaagttttattcatctttgctctacaaactttgaaaatcatgtgttcaayaaacatttggtgactcaagttgaaatttgagtgctcgacaccttcgtttttaaacatgaagtaaaacctaagccagcataaaaatttccactttttgatatattctgccaaaatcttaataacattggcatttgtagaac

SEQ ID NO: 312828 - DNA, 537 bp, Homo sapiens
tgtacagaaaaaaaatgtggttttcacagcaatcagagtatatctaattttcatagtaatcagaataaatttaaacctaactacaaaaatattttcaaattatttaccccatttggaccagggatcgtggctcatgcctgcaatcccagcactttgggaggctgggcacgtggatcactcgaggccagaagtttaagaccagcctggccaacatggcaaaaccccatctctactaaaaatacaaaaagaactagccaggcatggtggctgcatgtctgtattcctagctacttgggaggctgagggacgagaatcgcttgaacccaggaggcggaggttacagtgaaccragatcatgccactgtactccagcctgggcaacagagtgagcctctatctcaacaaaataaaaaatatatatataaaataaaataaaaaataaaataaaattatttacctaatttagcccaattcaggaagttattttgtaatcatgtattattaagataaatgaaaaactatttcattcaaatattt

SEQ ID NO: 312829 - DNA, 605 bp, Homo sapiens
tggggctacaacaacagagacagttcctgagtcacagaagcttaagctagtaagaaacttaaaagtaatttgcataatttaaaggaaactcagaaacctttagtccacacccttcatttttaaaatgaggaacctcaagtccagaaaagttaagtggtttggctaaaggtccacagctagacagttaagggtcaagactagaactcagatcttataattcccagcctaattcactacaccatactgactcaaagtactcaatatgaaacggagattaggatcctgatctgccaytaacaaaagcccttctcaattatttacttattgcattaatgcaaatcaaataagcttcaagggagttatgagcagcaaaaaatatataacctattatgattacttaaagcatttgcagggcggctgaattaatagttcttatgtcagttgtaagtctgcttctggtctatcaggttagatgtcacattctcagcttctatgttgtatttccattctcattcattcccagatacaaaaataaaacacaatatgtatcggactgccaagtgtgccagaaatttgaaaggaaaaaaaatctgcaaagtaagatt

SEQ ID NO: 312830 - DNA, 623 bp, Homo sapiens
ctcaagtagatttcatgaaaagatttcaaactctagttagtgctctaagagcatggcgttccaagatgtgttatattgttcaaatatcagtccattagataacttacaacctctacagtatttaaggcatacatattgttataggtagcttttgttttgcatctgacctcaaaatgtgtatttcaatataaataggggtattgtcaagaataattaatcctggaaaaaaaaatcagtttatggattaatttaagatatatggcatcatattttggttttagagataatttttcattctaaagatttgaaatttgcaaaagatgtaatgaaagctgtrtgacatcagtagggtattttgaacacattctggatagtgagaaataataaaaaattatattctagtttactaacataagcacattagaactcataaaaaagtatatatcatgatccttgaggtaaaatatcattaagtttctgaaaaaaagtttaggaattaacaactatatctaagttaattattctctcccttaatttttgtgccatttttctctgttctgattcttcatctctcttgataaaccttcacagctttcgtatttggcttctgcttctgcaactac

SEQ ID NO: 312831 - DNA, 644 bp, Homo sapiens
tccttttgatgtaaacagctcagaaaattgcagctgctgctgttatagttctatatgtaggatttttgaagttcttaaatcctaccatggaaatgaagggagattagttttgtgctgaagacaattataaaaataagcacctaattagaataagttaatagctctttaaaacagcctttatatataatattgaacacatttctaagcctacagtctgatgttcattaaatacttgaataaactcttccctgacagaagagtatactttgagcttatacagctaattggcctgggtaacttmtagatcattaggttttaaatgtaacttgagattttactatatatacttcttatgcttatacacaaaattataaatttatgtttgtaattatattgcatatattttttagatttttttattgtggtaaaatatatatgcctcagtctatgatttggaatatttttaggtgtatattcaatagcagtaagtacattcacaatgttgtgcaaccatcatcactattcattttctgatctttttcaaatggaaacaatgtatttattaaacggtaattctccattccctagtgatttctcttttgctctccatcagtttgcctattctaggtacctggagtaaagaa

SEQ ID NO: 312832 - DNA, 644 bp, Homo sapiens
tccttttgatgtaaacagctcagaaaattgcagctgctgctgttatagttctatatgtaggatttttgaagttcttaaatcctaccatggaaatgaagggagattagttttgtgctgaagacaattataaaaataagcacctaattagaataagttaatagctctttaaaacagcctttatatataatattgaacacatttctaagcctacagtctgatgttcattaaatacttgaataaactcttccctgacagaagagtatactttgagcttatacagctaattggcctgggtaacttctagatcattaggttttaaatgtaacttgagattttactatatatacttcttatgcttatacacaaaattataaattyatgtttgtaattatattgcatatattttttagatttttttattgtggtaaaatatatatgcctcagtctatgatttggaatatttttaggtgtatattcaatagcagtaagtacattcacaatgttgtgcaaccatcatcactattcattttctgatctttttcaaatggaaacaatgtatttattaaacggtaattctccattccctagtgatttctcttttgctctccatcagtttgcctattctaggtacctggagtaaagaa

SEQ ID NO: 312833 - DNA, 557 bp, Homo sapiens
actgctttgaggcctttgatggaaacaggwatatcgtcacataaaaactagacagaagcattcccagaaacatctatgtgatgtttgaattcaactcacagatttgaagataacttttcatagagcagttttgaaacactcttttcataccatctgcaagtgaatatttgatctgttttgtggccttctttggaaacgggaatatcttcatataaaaaccagatagaaacattctcagaaacttttttgtgatatgtgcattcaactcagagatttgaacctttcttttgatagagcagttctgaaacagtctttttgtagaatccgcaagtggacatttggagagttttgaggcctatggtggaaaaggaaatatctacacataaaaaccacacagaagcattctcagaaacttctttctgatgtttgcattcaactcacagagctgaagatatgttttcatagagcagttttcaaacactcttttgcatatctgcaagtggatatttggactgctttgaagccttcgttgtaaacaggaatattttcacataaaa

SEQ ID NO: 312834 - DNA, 646 bp, Homo sapiens
ctgccttgacttaatctctattttaatgagcataatgataaacatggcaagagatagggttataaatctaacccaaacaatgtatttatttatccattacatttaaacttctgctttggcaagtcagataaataaagtaatattacttcactcttgaaagattttttagttacttaactaataaataagttgagtgmctgttgattagtctttttgcttcttttttcttctattagtcaacttttgagtatttattgcttattgtttaccaggtaataagagacaagaaaagggaaagaaattcagacatttgtattacttatttatcttcttagtgaaagaaccatttgtggttaaaatcaggaaaaaagttatttgcagattttatttttttttacattttttcattaaaaagctatattaacatactaaaataataaaccaaaactcggtactctccatatttttctccaaatataatcattgtattagcagtttgtctttccaaactcttttctatgtatttttccacatatttacatatctactactttaactgatttatagagaattatgctatgagtgtggcactttacaacttgcattttaacttatggtatctttgagatcttcagtacgagagtgt

SEQ ID NO: 312835 - DNA, 602 bp, Homo sapiens
tatgtgtttaatgttgaaatctacctctgaatgtatcctacatgttgaattaccaataagagaaactgatttattcttattaatctctttcaggttacttagatatttcagtcctcctttttggcttctcctgcctgagacaaaaatatatataacttatgcttggcatagtggctcacacctgtaatcctagcactttgagaggccaaggcaggcagatcgcttgagcccagggctctagactagcctgggaaacacagggagactccgtctctataaaaaatacaaaaattagtctggtgtgttggtgcatgcctgtagtcccagatactcaggaggctgaggtgggagaatagcttgagcctgggagatggaagctgcagtgagccgtgattgcaccactgcactccagcatgggtggcagagtgagaccttgcctaaaaaaaatgtatataacttaggaaagttacatagtgagaaatcatayatccgtcacagaaatctggagagtggcaaagttttggctctacaaaaagtcattggtcctttttggcacgtatgctcattaagaaacagaggtttccagttccatcaaaataaaa

SEQ ID NO: 312836 - DNA, 582 bp, Homo sapiens
  misc_feature (1)...(582): n = A,T,C or G
caaggactcaccaagtagtgggaaacatgccaagcacattggatccatcatttgatttagaaaatttagtaaccctgtgrgtagctgttattatcctcaatacacagatgagggcacagaggattccagagctagagtcaagtggcaaaaacagtccttatgcaggcaggtggaagagccagggttcaaatctaagtgtttctcacacccatactctcacatcctactctgcatttctccagttgtggggttattgaacagcttttcaattttttcattctgacttcagcatatagggtggaaaatctgcccccctcctccattttttatcctacttctattctctttatatctgatttaaaaattagcagtaatttgggatcactgtctcctgttttcacctcacatccaagctcaactcactttcatctgtcagtctagagcatctgtgtcaattgaggtcatcaacaactccccanaggtctcatttcaagctcttttcctggggctcgttttccatctcttggcctgaccttttaaaaaaaatgaaggtcttcaagggctcgttggtgtattatgaag

SEQ ID NO: 312837 - DNA, 593 bp, Homo sapiens
tgctagttagttttatttatctggcttctctccttgactaagatatttgcaatggctgacactattttttctttaaataagcccctcactaacaagatgcttggtacagatttggtgaccaatgaatgttgaaatgataaagaaataagtgaatcagtgttgtgatactaagttcatttgttgttaacttgaatacatttataaagcatttaataaaatagtaattaagatacagcttttataattatttacacatttaataaaaaaaacttttagagatttcaggctccgattaatataactgaatatgaaagtgaggaaaggccctgcttctaagaacaggcatgtgtttaattattatcatgctgsatgaatacgagcagttaaactgcatcgtctatctactccctcttttctcttattttctttttctcttattctaggataaacctttggtgtttgtcctgctcatgtacctcttcagctagactgaatctagtcattttcatattatctcttatttccatgactgaaatcaaaattcctagagaaatgttctcttaagtggggcactttgacccatcgtcatgtgg

SEQ ID NO: 312838 - DNA, 611 bp, Homo sapiens
atcatatcatatgaattattttcatggatgcttgaatgacaagccacttttattaccttatatggtttggctctgtgtccctacccaaacctcatgtcaaaatgtaatccccacatatcaggggagggacgtagtggaaggtgattgaatcatgggggtagatttcccctatgctactatgatagtgaggatctattcatccactgttcaaacttggacatgctacacaacttatctgagcctcagtttctccttcaaactagttagagaaaattaaatgaggtaacacatgaaaagtcattagcattgtattactttatctgcattgtattactttatttgcctactgaatgatgtcatccctctctctatatgtgtgtgtgtatgtatatttataaatttttgtcctattcycttttttgagtatcaagaattaaacaatctctctctctctttctttctctctactgaaacaaagtttttgtcttctagcatgttaacagatctcatgctctaatctctttaaatattcaggctcagattgtgtattccaaattatttaatatcttccaaatagattaatatactaatgcatttgaaatatgtcatga

SEQ ID NO: 312839 - DNA, 586 bp, Homo sapiens
ttttcttttcagtctggtaataacactcaatagacttgtaaagtatgtctatctttccataagttgaatgactctttagttggtcttactgtctagatacaagtttataaatattctcatgtctattcttttaaatagtgttttgtttctctttcatccacccttttttatttttttaagaaagatgtatctctgtagggattataatatattttagctggtaatagagccttggaaaaattggaattcttggctttttttgcattcttatttaagctttatgtccttaattgattgttggataacaggagaggtcagtagggatagactttaccacttgctagagtatgagcaatctggaggatcacatattatgtaacccatagaaattttgctataaagcattactactaaatattactacttaattatcagcacaattaaaggaaaaaggtacatcttttttttataaattatgaaacatctttcccactccttccctgtcmcatcttacccctttttcattctaatatcatcatctccagtacacactcattagttgagggaggtgtgtagtgacaaacaa

SEQ ID NO: 312840 - DNA, 595 bp, Homo sapiens
tatttaaatgttcttcttttaagcagcatctattttctaatattctatttttaattggattattcattgtgttttcattaaatttaattactattttgagagagttaaacctctatctacttgtctcatttggggttgtgagttaaaagagcatttagttcactatcatgaaccagacattcctccattggaatttttgtataaatattaactagcctatgtgacataaaacatatcgcaagcatatatcgtttttagtttcctcatctgcacagtaaggtaggtaataccacctgtacacaaattattaaatattgccatatttatcaaattagggaattaatttagtgtaaagcatgtggcaaatattagttattatwtgctaatttggagtaaaaatatttggagtgcttttatcatgacttctattagatttacctaattacattttcttcacatgacatatcattgattcatggcattaacagatttttaaaattacaaaacacagttgatctcgctatctctggggaaaaaaagtcagtgcaaaatgtacacactatgaaaacaaagcactctttcccaaagagtggaa

SEQ ID NO: 312841 - DNA, 595 bp, Homo sapiens
tatttaaatgttcttcttttaagcagcatctattttctaatattctatttttaattggattattcattgtgttttcattaaatttaattactattttgagagagttaaacctctatctacttgtctcatttggggttgtgagttaaaagagcatttagttcactatcatgaaccagacattcctccattggaatttttgtataaatattaactagcctatgtgacataaaacatatcgcaagcatatatcgtttttagtttcctcatctgcacagtaaggtaggtaataccacctgtacacaaattattaaatattgccatatttatcaaattagggaattaatttagtgtaaagcatgtggcaaatattagttattatatgctaatytggagtaaaaatatttggagtgcttttatcatgacttctattagatttacctaattacattttcttcacatgacatatcattgattcatggcattaacagatttttaaaattacaaaacacagttgatctcgctatctctggggaaaaaaagtcagtgcaaaatgtacacactatgaaaacaaagcactctttcccaaagagtggaa

SEQ ID NO: 312842 - DNA, 560 bp, Homo sapiens
agatttgaggactgttagattaacgaggaaacatatccgtgagaaggttctggtttacaaacattgaattcttccaagcctgttggtgtcggctgagccattgtgacttcagagatgtttgcctatttggggtgaaaaggagggtgtttacacagagaaacagacctggctttgccctatcacgtcttcttgcytacgttatcagtcaactgtgtgctcactcttccgtgggctctgtgtggaggtaatggggcacaatgccggcttttgaagaaaggatctgaatgtagatctttttagtttaaatatctatgtttttaatcactgtgcttagtagtcagaatcctaaagtcataatccactattgtagaaggaaacagaatcctagagattgtagactttaatggttttcaaattgttctttctgcaggtggtttcctcactggttcctcaaataatgcagaattttacaactaaattccaccaagaaggaggagctaaattgccccagaagctgttttcttttctttgcattttttacactctgatggccccatgta

SEQ ID NO: 312843 - DNA, 560 bp, Homo sapiens
agatttgaggactgttagattaacgaggaaacatatccgtgagaaggttctggtttacaaacattgaattcttccaagcctgttggtgtcggctgagccattgtgacttcagagatgtttgcctatttggggtgaaaaggagggtgtttacacagagaaacagacctggctttgccctatcacgtcttcttgcctacgttatcagtcaactgtgtgctcactcttccgtgggctctgtgtggaggtaatggggcacaatgccggcttttgaagaaaggatctgaatgtagatctttttagtttaaatatctatgtttttaatcactgtgcttagtagtcagaatcctaaagtcataatccactattgtagaaggaaacagaatcytagagattgtagactttaatggttttcaaattgttctttctgcaggtggtttcctcactggttcctcaaataatgcagaattttacaactaaattccaccaagaaggaggagctaaattgccccagaagctgttttcttttctttgcattttttacactctgatggccccatgta

SEQ ID NO: 312844 - DNA, 594 bp, Homo sapiens
gtttagaaagtataagtgtgtttagcagttttgacttacataaggtcagtatacaaaatgcaaaagcatgtctctttactggtaataattgaccagaaaatataacatgaaacatcagcccatgtgtaatagcagcaaaatgtataaaacatctaaagctggcatggtggcacatgcgtgtaatcctagcggcttcgggggctgaggtaggagaatcgctggaacctgggaggcagaggttgcagtgagctgagatcgtgccaatgcactccagcctgggagacagagcgagactcctctcaaaaaagtaaaaaataataaataaatgaatattaacaaataataaacaagatcttagtagaaaaattttgaaaatatattaaaggataaaaaaggagtatagaaatactattttcaagtgtacgattatatgctattttaagaatgtaaattattccsaaattaatatctaaattcaatataattttcttcaagatcccatcaagatattaagaaatttgatgagtgaattctaaaatgtaaataaaagaacaagtagattgaaaaagaaaagaaaggtaggggaaccagctt

SEQ ID NO: 312845 - DNA, 594 bp, Homo sapiens
gtttagaaagtataagtgtgtttagcagttttgacttacataaggtcagtatacaaaatgcaaaagcatgtctctttactggtaataattgaccagaaaatataacatgaaacatcagcccatgtgtaatagcagcaaaatgtataaaacatctaaagctggcatggtggcacatgcgtgtaatcctagcggcttcgggggctgaggtaggagaatcgctggaacctgggaggcagaggttgcagtgagctgagatcgtgccaatgcactccagcctgggagacagagcgagactcctctcaaaaaagtaaaaaataataaataaatgaatattaacaaataataaacaagatcttagtagaaaaattttgaaaatatattaaaggataaaaaaggagtatagaaatactattttcaagtgtacgattatatgctattttaagaatgtaaattattccgaaattaatatctaaattcaatataaytttcttcaagatcccatcaagatattaagaaatttgatgagtgaattctaaaatgtaaataaaagaacaagtagattgaaaaagaaaagaaaggtaggggaaccagctt

SEQ ID NO: 312846 - DNA, 524 bp, Homo sapiens
tccttctgcctgtctcttttacaccaaaatgaaggtaataatgtacccctttctcttgattgggatgttttgtgttctaagataaaaagatcttcaatttttaaagttaatartaaccatatatgtatatattttatctaaaatttgtgttatgctctggcaatagaataagctgttgtaaatcaggaatattctggaaaatcttggtagaaacacatctctaatctactgcaaaatgtgccatgtagttttccctttcaaaggaaaaattattcattatacacaagtctgatgattttttgaagttagtattccctacacggtcattattgaatttttaagtatgcatgaatttaacagatagctggtagtgctttatagcttttgaataaggttataattctagggttgtgattttgggtcgttttccttttatttctcccaataaaggaggctttcatgtctatagggagctatcatcttgactaatctacaatgccaattctctgctttttactccagca

SEQ ID NO: 312847 - DNA, 593 bp, Homo sapiens
gagcatatctcttattattttaatgtttttaaatatattgaggcttttttgtgagctagtatatagtgtagcctcaataactttccacgtgctcctggaaagaatgtatattctgtttttttagggtgaagtgttctaaagacgtctattagatatgcttagttttagtttgtttaagtctttgatgtccttgttaatcttatgtctagtttttaccttccttttctgaaagtggtctattgaagtctccaactataattgctgaattgtctacctctcyctttaattctgcttctctctgagtggcattcctgctttacaagagcaggatgctggatgcaggctgctgcctctggtcctctctgcttgcctttcttagctgctatcccagtaatcctagccacccaagccagggtagggcatgtgctctttgagtaggggctgggcagaagagacccctgacctctcagcagcacaggccaggaatttagcctccacaacacggaactagactgggactaggaatacaagctgcctggcctttttggcctgagaggggaaaggagggagtctgatctttgtgttctcactca

SEQ ID NO: 312848 - DNA, 557 bp, Homo sapiens
gtggacacaataagatggcccacatcagatgctgattccttgatcttggacttcagagtctctagaactgtgaaaaatacatttcttttctttataaattacccggtctgtgatattatttayagtagtacaaaatgaagtaagacatcatctatgctgtaggtgtccttcatccaaccagttgaaaggacttaagagtaaaaatggatttcctagagaagaagaaattctgcatcaagcctacatcattaacttctgcctgactttgtagccttctggcctgccatacacaatttggacgtgccagcccccaaaatcatgcaaactaattccttcaaataaatctgtggcgtgtgttgtgggggtgggagaatactataatagtgatagcttacatatattattacaaaatgacatttttaaaccaaagatgaatttaagttctgccccaaatttactaaaatcaacgttcagagaaatttagatcttaaagctggaaaaaccctgagaagtcactggatccagcctcctcactctaaccaagttaaatttataat

SEQ ID NO: 312849 - DNA, 527 bp, Homo sapiens
ttactagtcatagtgatgagtagcatattgatattgtggacaggaattgtgcaaatgactctatgttaatctcatgatttctaattcctgtgcatggaggcatgttgtctcatgccttcgggtgtttattgggataccagtctctccagtattattttgaagatcttcaccattcttattttatagccatttccagattgctttcttatttctattttcagagagtaaattctcccctttggcagtattttttcctcttgtcagctttctgtgkgcactttttgtttaaaagaatatgttgactagtcctttctctttctcattcccatctcaactttccccatgaagtctcaaggcttgtggttgttttccagtttagatttacattaatgtgcagttcggggcagccatctgcaaacagtatttcagttcaggcacctgagtgagggtgtggcttagcctggttgcagtgaatgtggctcttcccgccaagcccagagctcagtaacagccacactggtggtaac

SEQ ID NO: 312850 - DNA, 610 bp, Homo sapiens
aatgacataaacaaagcacacaaagatttaaatcagaattggcctaacgtataatttcctcatgctactcatcatggtgagagcttgcaaggaagatcaactgaattatagagaaacaaaacaattgtgttttttgacacaatgaggttgttgagagtaagtttgtgatatttctctactggtgcatatgcaggtagggtacaaaggaagaggaataaaaaactgtttcattccaaggaaaatatacccctctggcttccatagctctgcctctctctttctctgagctacaattttgctttttgtaattggctgctctctacttgttgctctccctaccaaggaaattccattcatttctatcccacaccaacgccattctctggagcagagaagacattttgagatccctgaccaayagccctcccccttgctttcttttccactgatagaaactctttcctgggacagaggtgaacagactctgggaaagaagtcttcctttcctggccactctgcagtgaggggtgcccatgggacctggttgggtcaatgatgaagaaggaaaaccagcaggttacttctgttaaaggtctttctcctccatgaa

SEQ ID NO: 312851 - DNA, 564 bp, Homo sapiens
agaggatattgctgcagctttccagtccatctggtttgaactgatcctttcagttctgattcaactgggcagatgaaatctcagtagtttcaatatcccatattggcagggytgacctgactgtaggatggagcaaacgtccccgtatggtaggatttcagagacactggaaacaaccaaatgcctttcctggcttcaccccctacccacatgtccattatgattttgtattttctaattttgcctgaagtttcaccataaaagctttagtccttaggctgaatgatcagtggaagtgcacactgagtcattatcagtactttatacccttgtgagaataaagaacctgtgggcatttcatgttcttgtaattactcattcttccttttctgcaaagatttgatgaagctacaataaaattcagtaacagggtaaaataaagacattgaaaatgtggaaaatgatgacaaaagtagaaaagatgaatctaaatgaagtaggttggcaccaaaaaagagacttctgtatgccacgattttatgtttaagactttttttccaagat

SEQ ID NO: 312852 - DNA, 564 bp, Homo sapiens
agaggatattgctgcagctttccagtccatctggtttgaactgatcctttcagttctgattcaactgggcagatgaaatctcagtagtttcaatatcccatattggcagggctgacctgactgtaggatggagcaaacgtccccgtatggtaggatttcagagacactggaaacaaccaaatgcctttcctggcttcaccccctacccacatgtccattatgattttgtattttctaattttgcctgaagtttcaccataaaagctttagtccttaggctgaatgatcagtggaagtgcacactgagtcattatcagtactttatacccttgtgagaataaagaacctgtgggcatttcatgttcttgtaattactcattcttccttttctgcaaagatttgatgaagctacaataaaattcagtaacagggtaaaataaagacattgaaaatgtggaaaatgatgacaaaagtagaaaagatgaatctaaatgaagtaggttggcaccaaaaaagagacttctgtatgccaygattttatgtttaagactttttttccaagat

SEQ ID NO: 312853 - DNA, 572 bp, Homo sapiens
tgcatagtattccgtggtgtatatgtaccacattttctttatccagtgcatcattgatgggcatttaggcagactccatgtttgtttttttaaatagaatatttgatatttttctaattgtaattaatttttttttcaaaattgccagtaagcaccatagaggcaagcagcttgcttaattagtctttaatgcacgtctactcttggacacattgtgatcacttacatattgtggaaagagaggataataaaagacagaagacaaagatgaaaacggagaagaaggaaakaaaacattaagtaagtctgctcttcgatgcattcttttcttccgattaaaattcttaccgtgacttccaggtgataaggccttatagagcagagtacatgtctacacatctcattaacaaagctgattttgtttccctttttttccctttttgtttttattacacaagtaatatttaaagcattctaccatagttgcatcagtgcacacgtatgttgggtaaagcttaaaagtccccctgaccttccttgaccctcccatttcatgcaggtttttatcctat

SEQ ID NO: 312854 - DNA, 612 bp, Homo sapiens
gaacaaaagcagatggtgacctggttatgaggcattctcaactcaccctgagtttgtttgttcatttgtttcccacatcccacctttgaggaaaatcttcccttccaccttttcataaaacacagcaaataattgtggtttttttccttcggagtgrggggtgtgggggatctgaaagggtcacccgctttacatgtgtcattgcagatgcgagaaatgcattaagcgtttttagaagaatggacactgtcgaggccctgacagtctggtgacgatttgtttgtgttggagtaaccagtaagtcggccgttagtctttgactaatcgctcctgtcagcttgttaaacattaaaaacaaatgcacgcactggagaaaagccatacctctttttgagatagggagtcagcttttgggctcttttcaatacatgtggtccttgaggttgtgcgttcctaattgttgccttcacacctaccgtgaggagcccttcgtaaggcagagtgaggatagaggtgttgacttctgacctgcaagccaggtccagcctccaacctggtccccaggtgtacacatttctggccattgatgttacagcacagaaaacaattttc

SEQ ID NO: 312855 - DNA, 594 bp, Homo sapiens
tcttgccatttgcagagggcccatactccttatccagacatgatgcagggaggcaccaaagaacttgagctaaccttcagatggtctctgcaaggttttctttatcttccttttttcttcctttacttctcctttttattctccttctctttcccttccttcctccctctcttcctcctgcttcttccttccattattccttcttccctctctccctcattctttcctttcttccttcctttttcctttcctttcaaaacatttatttcatactatagacatcsaccttcttatccttataacaactagcaacgctaccaggtggtaattgttattcccatttctagggagaaaaaccaattctcaaaaagggaaatgtagataatagtaatccaaaatgtgttccctgagggaagaaagtctctccttcacagctgcaaatttaacactgaatagaatgggaaattctgagttcagaattgcctataaaaagattttgtaaagaagaaagaaaggaaaaaaaggaaagaggcattgcaggttttataccacaaattattgctgtttcaactacaatctgcctcctagtttctg

SEQ ID NO: 312856 - DNA, 593 bp, Homo sapiens
aactgattaacctgctgtcaaccccctgataaggagtggttcttcaccttgtcctacagttaatggcctttgaattttccataattagaaagatacatttatttatttagtgaataagttgcagtgggcctgatattttaacataggagcccagacatttttgctgctaggcaatccctttatgttaaataataattcaaagtttctctttcttttttgttatcaaacatatctattaagycataattcctgaataggatatgttcacaaaccacatcaaatagatattttcttagtaaagaatgtgaaataaagcaaaccaacaacatgctgtttatttatttgcttcatgtaagcatttttgagtcatattcaaatggcttttggaaatagttgaaataggtctcttgtttttgcaactgttctacattgagattcaggttgcctactttcaagaagaattgagatcctcctagagaaaggccaccttcaagatttaaggaagaaagaaggcctgggatgggcgtttattgctctaccttgccgtattgctctaccttgccgcctgtacctaaagctttcccatgtttgta

SEQ ID NO: 312857 - DNA, 536 bp, Homo sapiens
taagctaggttacagttcatccacaaggactcaaatatacaagtacagagtccttctggggctgtatttaatttgctttaacaattccccccttttggtcattttctcaattttgagaggttgactaaaaccttagttattgatgttactgttactgttgtaaatgtacttatatgattttgaaacctactgggaaacagaatagtgtgttttgcaaggagagaataaggactgagtagagagtaccttatgctggaccatcctgtttacaggagaaaaacaaaacctggtctgttctaggatctgtgttttcttaaagccttagcttgattatgtcatatttagcatgagtcactccatattagtttggtttggtttrttggggcctagcacatgaactcagtcgaaaataatggtttcccataattttgttttaaaaaattccccctttttggccaggttctcacttaggtgagagtgtgaacaaaacttagggtccctcagttaccattattttgggtttccggtctcagcac

SEQ ID NO: 312858 - DNA, 569 bp, Homo sapiens
gtatctttcaaggcaacccaagccattattacaatacactggacccaaagacaaacgccctgctactccgtcacctgggccatcaagtggccctggttctgccacaaataaaatcatccctcctcccaaataacagctccttaggtacttgagtatgatttcattgtgcctggctatttctttgtttttggggtcaaacatttcctgtctctttgtacattaccctgtgacatggtttctggtctacctatggtcttggtgagttgctcaatgcacttcctgtagtctgccaataacccatttaacactatccacaaatgatattatatgtggataaggtgatctcattagagcagaatcacacaattaagtctctacttctatttcccaggctaggaccacatcaactgacaaatcatattacttctaaagtcaattagaccttygtccttgtgcagtttggattttggaagtgccttagagcatgtcttgatgattgtccttattaaatgtcaacttgtcaggttaacctttcattccagtctgtcaagaaaacttcagttctgagt

SEQ ID NO: 312859 - DNA, 621 bp, Homo sapiens
cacacaccgtccctcgcagagccccctcagaatccttctgtccctcaatcccaaatgcttaagttcatttgctttgaggacaaccggttgtcaggctaaggcagcagttctgtctgccttggtaaaggaaagcagataatacaatccaggaaacatgagcaccagaacataatgccacattcaaaacaacgtcatgctgacatcacacaatggcaccactcacagtcacttttactttccccaagggatagatcaacattaagtaacttcaacattcccagcagggatggcatttctcacagaattttactgacaccggttggtttctctaattggcaaaaattacatttgcaatttaaaaaaaaattactaccactttgtagaaaataaattctactgagggtgggagcagacttaaggatggctccttaagatggaacggagcataaaatgctttgggtctaacagttatgttttttcagccacaaaaagccaaattgaatatgttcctttgaaaaaggtctcactgacatgtaacaaatttgtataraaaaaaaaaaaaaaaaaaaaaaggtggtaccgggccacatttcaatactactcagagacaatggtggatgt

SEQ ID NO: 312860 - DNA, 634 bp, Homo sapiens
tttttcttctgaacagtaggtctcaacagtgggcttataatattcagtaagccatgctataagcttatttgctgtcatccaggcttgttgtttcatatatacagcacaatcagagtggacttagcattattattaagggccctaagatttttgaactggtcaatgagcattagcttcaacttaaagtcaccagctgcattagcccctaactgaagagtcagcctgtcctttgaagctttgargtcaggcattgagttctcctctttagctagtaaggtactagatggtatcttctctgttgaagactgtttcacctacattgaaaatctgtttagtgtagctatcgtcatcagtgatcttatgtagaccttctggacaacttgttgcagcttttccattagcacttgctgcttcaccttgcacttttatgttatggcgatggcttctttccttaaacctcatgaaccaacctctgttagtttctaacttttcttctgcaatttcctcacctcactcagccttcatagacctgaagagttagggtcttgctctggattaggctttgacttaaaggaatgttgtgggctggtttgtttttctgtccagcccacttaaactttccctgtgtcagcaa

SEQ ID NO: 312861 - DNA, 635 bp, Homo sapiens
ctaatctaaaaatccaaaacttgaaatgctcccttgagcatttgagtatcatattgtcacccaaaagttttcakattttagaacattttgcattttcagattggagatactcaacttgtaccttgttcatccttcactgttggtccatatttttcacagtcatctgaagttgtgctttattccattgtgtcctaattattttaacccacctcttcttgttggatactttgatttttccatagcataaattcctagaaataagactgttggatcaaggagtgtgcacattataaatttgtacagttaatagcaaatggtccttctaatggctggatcagttgcacttccatcaaaagggtaggagctctgagctgggtgcttgacagaaccacaaatcctgctgaggacaggagccacatagcattcccagagtgttcacacacctgctctgatattttggggttgtaagtgctcacagagcagcgaacagctctgatggccaagagttggaggcaaaccaagcaaagttcctccctctcttccaggtctctagcatcctgttgggtttctcaggtgctgaccttctgaagagtttccagggggagctgggtcaccatctaccctggctgggttgg

SEQ ID NO: 312862 - DNA, 635 bp, Homo sapiens
ctaatctaaaaatccaaaacttgaaatgctcccttgagcatttgagtatcatattgtcacccaaaagttttcagattttagaacattttgcattttcagattggagatactcaacttgtaccttgttcatccttcactgttggtccatatttttcacagtcatctgaagttgtgctttattccattgtgtcctaattattttaacccacctcttcttgttggatactttgatttttccatagcataaattcctagaaataagactsttggatcaaggagtgtgcacattataaatttgtacagttaatagcaaatggtccttctaatggctggatcagttgcacttccatcaaaagggtaggagctctgagctgggtgcttgacagaaccacaaatcctgctgaggacaggagccacatagcattcccagagtgttcacacacctgctctgatattttggggttgtaagtgctcacagagcagcgaacagctctgatggccaagagttggaggcaaaccaagcaaagttcctccctctcttccaggtctctagcatcctgttgggtttctcaggtgctgaccttctgaagagtttccagggggagctgggtcaccatctaccctggctgggttgg

SEQ ID NO: 312863 - DNA, 635 bp, Homo sapiens
ctaatctaaaaatccaaaacttgaaatgctcccttgagcatttgagtatcatattgtcacccaaaagttttcagattttagaacattttgcattttcagattggagatactcaacttgtaccttgttcatccttcactgttggtccatatttttcacagtcatctgaagttgtgctttattccattgtgtcctaattattttaacccacctcttcttgttggatactttgatttttccatagcataaattcctagaaataagactgttggatcaaggagtgtgcacattataaatttgtacagttaatagcaaatggtccttctaatggctggatcagttgcacttccatcaaaagggtaggagctctgagctgggtgcttkacagaaccacaaatcctgctgaggacaggagccacatagcattcccagagtgttcacacacctgctctgatattttggggttgtaagtgctcacagagcagcgaacagctctgatggccaagagttggaggcaaaccaagcaaagttcctccctctcttccaggtctctagcatcctgttgggtttctcaggtgctgaccttctgaagagtttccagggggagctgggtcaccatctaccctggctgggttgg

SEQ ID NO: 312864 - DNA, 646 bp, Homo sapiens
ggcattctagctacagagcttgtgcccttaaacactgtgctatggctgatgtgaatgaccatggtaaatgtactgctgcttctgatgttgattgtaaccaatgataatcataatagaccactggctatgacctgacatgctaatggcttcatgtagaatgcttctttaaatgctgtgagataaatctgatcattatacccattttacatatgggtacactaaggtttatagaagtaacccttttgtagtcgccacagatggcgaggacttgatcccaggtgtgatcaactgcaaagccatgcacttaactggcctgatattcctcacaagaagggtcataatcacagtcagaagacttgcacaacggctttagctgaagggataggcattttctctcctgtgacagctggcttgttgatttgtytgtttgccaatgctaaagagaagcatgcgagcacagctgtgaatgccagaagtcagaggtggcagtccaagatgatgtgccaaggtcagaggtaggaaagacaaggcagacaagcagagatggtccaggggctggtgcctgggcaagagacaccaagggcagagtgggggaccaaggcattagttgcaaattagaggtcagggctcaagccacacactggga

SEQ ID NO: 312865 - DNA, 597 bp, Homo sapiens
aagacacatgcctattttttttcttcttaaaagctgtgctcttaggtgccaaggttcagatctgggcacaattatcaacctgagcgcctgtttcagattatatgctgcaccaacctaggagtggaatcagagcactctttttttaattaaatgctgtgtcaagccttcaaaaatgcctctcctttttttttttctttctcttctctcttcaactttcattttcgggtgttgcttgttttttggcctgagactatgtcacctttgagtttttgtgcacctcgaaataaagcacaagtgactcctttcctcacgtgcttgggtggtgagtyagtcagctgccctttaaccccttaccccaattccaactgcatgcagaagaagacaaagcataaaccttcccagggcatctgaagaccctgagaccctcagagagcattgcttccatctcctcattttacagattagaaaatggagacaactggagaaaggacttttctaaagtcacaccaggatttcagcaaggatgggtcagaatccacatttcctagacctcagatagagcttttgttgaatacctttggggtctccgagctccat

SEQ ID NO: 312866 - DNA, 601 bp, Homo sapiens
ttgttgtttttaccacaaaagggtgttggagtttgtcaaatgcattttctgcatctatcaagatgattagttattttatgtctttattctattaatgtgttgtgcctaaatttcaacataaaaatgtacttgaagaaacgaaatcagtttagtctaaccaaactgattttggcttgtcagattcccccactttctgcttctcatcaaatcagaaatatacaccagacagaatgcacaccttggatctcgtttgcatctccaactcaaagaagttccatccaaaccctggttgttgcttttaaaaatagtcagagctcatttgaatagtaactctttaattaatcagctactgcacaatggtcaggtctgttgggaagcagtcagtttatttctccaagaaatttttatgccagtttatgacttaaggaaaaacaagtttcartgtgtttaagtaagttgactaagctctttggtgactaatgctttttactagaaagtcatacttgaacatcaaaatgtagaaaacttttaccaaattcagtcccaaaatatccaccaattaaactcatttattcacatactaattatgcagggaagagca

SEQ ID NO: 312867 - DNA, 590 bp, Homo sapiens
cacacatatgtgggcaatcaatttttgacaaagatgccaaagccactcaatgagtgaaaggayagtctttcaacaagtgttgcctgagaaagctgctgggataatatgcaaaagaatgaacctctgcctccatttcagagtatctacaaaactaactgggactagatcacagaacccatgtaagagctaaataggtacaacttctagaaaagctcttaatggccttgaatttggcaaatatttcttaaatgtgacgccaaaagcatgaactctaagtgaagaaaaaatcagcaaattggacttcactgcaataaaaaaaaaaaagcttggtcttcaaaagaaactgttaagaaatgaaaaggtaagtcacagtctgggaggaaatatttgcaaactcgatatccagcagaggacttgtgtgtagaatatataaagaacttttacaactcaataaaaacaagaaaaaacacccaattaaaaatgggcatacgttttaaacagacatttcaccaaagatatataaatgccaaataagcaaattaaaagaagctcaatatcatcagtcattagggaaatgcaaattaaaaccc

SEQ ID NO: 312868 - DNA, 535 bp, Homo sapiens
acaactttaaaaacatttttgcagttaaccattgttttttaatattatctgctttattttctttgactctaagtcttcccatctaggaaagacttggaggtgacatctgagtttggtttgagcaacaaatacattttccaggcccagcatggcatggacatgacatgctggggatttyttctcaggatcctgcccctttattacctgtttagaccatctccagctggttacaccaccagctctgcttgggagtcagttccaacctccttcaaaaactctgagtcctaagaaaccagatccttacccactgtacacttttcttatccatcatggtcacgctccttttattctgtcaacctggactcatgcttcatggaatgtactaaacaaataagggtatgcatatgtgtgtgtgtgtatgaacacattaagatgtgtgtgtatgtgcactgactgtgggcattgagtatatgtgtacatgcctacacacatacactcaatctttcatttaataatcattcaagaaataaatggc

SEQ ID NO: 312869 - DNA, 624 bp, Homo sapiens
agcatggactagatctctcctcccacctgaaacaactaaaaattcagacaagacaatgattttcagacactggagctcagtcaggggaagacagcaatccctgagagaggagaaacgaagtgagccctacagttgcctcaacttcctgtctggagagagcgtccaagtcacagcagaaagaaggaggaccccagcagggcccagatgtctccctgagttgaggagatgaaggctggattccagcaaggccaaggaggctggaattcacaggccagggcagcaaaaagaactgcccagtgaatacttgaggtcagcagagggacccccttgagtctttagctaagtattggtggacacaggcatgtgtgaaagctatccaaggtgggggagagaaacaccctaaaggagcagacagaacatttcccagagtttatacagggctgggaayggttcaccttcccaccagccagagtggaaacctcaagctcacagagcacctggtagagtactgagaatagcagcgtctctgtagtgggaaaaaattagccctagattaagagagctctggttccacctaataaagctcaaaggcaagacccaaaaaagatcaaactgtttccatac

SEQ ID NO: 312870 - DNA, 571 bp, Homo sapiens
  misc_feature (1)...(571): n = A,T,C or G
atggaggagactgggccctctttccagtgccagctctgcctgcatcgagcactatgtggcgcatctagaccaggatccacatccatggtgtggtttccccaggctgcagaagtgcactgtggaagcaggtctgtgtgcttgagatcnagggaagctgacccaagaagatgggacacagttgattctggagaggcagcggacagacaggggactctcctaacaggctggatcttccaggacagttgaaggacaacatccagtaggaccctagaccaagagtatagacactgtcgctatgggtgtttctctgagccctgagacttcccatgtttaagataagctggttggattactggttattgattatgttgaatcttttggtggcacagaccaacttgagaatctgaagatatcaactttctttctggagaaatgcatgtgcttacatagagacaaaatatgcctgcrcttcctagaagggcaaggacccctccgaagttcattcacagccccaggatgacagcctctcacttaaaggctcttgggccgccctgctagtcattggcctgct

SEQ ID NO: 312871 - DNA, 577 bp, Homo sapiens
ggaagtcacataaatgaaattgatataatatgtaacctattaacgctggcttttttaattgagcaaaatgttgttgagattcatccaagttgttgcttttatcaatagttcattcttttttgctactgcatgtattcatggtaaggatgtatcacagttgttttagccattcacccactgagattcttcctagttttgggtaattatgaatagagatgctacaaacatgtatatgaatgttttttctgtaaacttaagttttcatttccctagggtaaatatctagacattgaatttctggtaatatgctaagtatatgcttaattttataagaaaacttctaaactgttttcctgaatagcracattgttttgcattcccattagtaatgtctgagagttccagttgccccccatcctcatcactacttggtattgttggtatttttatttcagccattataataggtgtgttcacatctcatcattgcttacacttgcatttccctaatggctaaagatgctgatgttctttttctgagcttatttgccatccaaatatcctctttgatcatgtg

SEQ ID NO: 312872 - DNA, 583 bp, Homo sapiens
gttcattcttttttgctactgcatgtattcatggtaaggatgtatcacagttgttttagccattcacccactgagattcttcctagttttgggtaattatgaatagagatgctacaaacatgtatatgaatgttttttctgtaaacttaagttttcatttccctagggtaaatatctagacattgaatttctggtaatatgctaagtatatgcttaattttataagaaaacttctaaactgttttcctgaatagcgacattgttttgcattcccattagtaatgtctgagagttccagttgccccccatcctcatcactacttggtattgttggtatttttatttcagccattayaataggtgtgttcacatctcatcattgcttacacttgcatttccctaatggctaaagatgctgatgttctttttctgagcttatttgccatccaaatatcctctttgatcatgtgtctattcaagtcttttgcccattttccagttgggtagcttgttctcttcctgttgaattttgagagttctttatatatcctggctataaagccttctgtaatatatgtgattt

SEQ ID NO: 312873 - DNA, 532 bp, Homo sapiens
taaccctctttcatgagccctttaatctgagcctgctgacacttttatatgtgcagggttatgttacttgaggaattcctttgaagacaattttaaactttcatcccttagttcaattttaaagtttgtaacatttgggacccttctcagagccctggatttactcctggcatcaagatgttcagggcagagctgagctggaggggaattccgcattcctagtgatccttaactggtgcccctggggaatttatctaacatactggagcctccactggtctgtaaggcagaattaagaacaccttgaaagaacatgaaaaaatgaaataaacagcccaagtaaagcamcagcacatatgaggcacttgaaaatgttcactccttttcccccagacgctgggaaatagttcagatgccccctatcccaggacccatgaagcagctcaccgcagcctctctatgttgatttttagatttccttctgttgattattctccacggaaggcgactggagcaaaagaggtggttggcc

SEQ ID NO: 312874 - DNA, 532 bp, Homo sapiens
taaccctctttcatgagccctttaatctgagcctgctgacacttttatatgtgcagggttatgttacttgaggaattcctttgaagacaattttaaactttcatcccttagttcaattttaaagtttgtaacatttgggacccttctcagagccctggatttactcctggcatcaagatgttcagggcagagctgagctggaggggaattccgcattcctagtgatccttaactggtgcccctggggaatttatctaacatactggagcctccactggtctgtaaggcagaattaagaacaccttgaaagaacatgaaaaaatgaaataaacagcccaagtaaagcaccagcacatatgaggcacttgaaaatgttcactccttttcccccagacgctgggaaatagttcagatgccccctrtcccaggacccatgaagcagctcaccgcagcctctctatgttgatttttagatttccttctgttgattattctccacggaaggcgactggagcaaaagaggtggttggcc

SEQ ID NO: 312875 - DNA, 580 bp, Homo sapiens
aaggccatcagttcattccttttcaaccctagatgtatattggaatcctttgaggatagaggttacttcaatgagaattttcaagaaaaaattctagttgacagattcaccaaacttcctctgaggccccacctatatttgaggattacctttccctgcccaaccccaggagctagaacaacattccagaagttttaactctcaactctaaaaacctgctctctttttggaagtctctctgcaagttactgaggcaggaggagacagaggagagagggaacatgtgtgcacacaagagaaatgtccaattgaatgagtctgatcaataagatctatgactcaaaaatacttgcttcatggcaagggaacatcttttgctttcatatccatctcacataccygctgagtcaaggaaacagctccatatttaggagaaaaatcctcttctaatctctaaatgcaatcgaaggttttctatgtctttttctgtggctccttggaaatgttaaaggcatgtctcagctacagcaaggtggggcatgacatattgccccccaaaatatgaaccaattgaatgtcg

SEQ ID NO: 312876 - DNA, 559 bp, Homo sapiens
gcattcttgaccttcacaatgcttttgacaatggttcattcaccctccatcacacttgttcctttcagtagggcagatattgttagtcccattttacagatgggaaaacagattctaagaggtccatcagcctggtctgcttagttctttgaggatgagtattcatctctctggctgtgtcagctgagctggacctgccgaattcaatcttcccatcactcagctcccaatgccatcagtcaagtgttatcaaattggtggagcttaaaaatgacagccatttgaaaytgagtagaatttggtattattaaaatagcattctaaattttaatcttgtgcatcgactttttaatagcttctactttcactaaaaattgtgggccatgctcacagacattcaatttaaatactgtcaggcaagactgatttctcttccaacattgccagatttttcttttttttttctttctttgcattcatcttcttttttttttttaagcattgagttaatttttcactacttggaaatttcacagtgtatgaaacctcagaaaaagaa

SEQ ID NO: 312877 - DNA, 563 bp, Homo sapiens
gagcgcacagcttactctcagaagcaggaaaacgtgccaattacccatcacactcacatcgtttctaaagtagatcctcaattaggcaacacttcagcagctgcggagtcactccgtagtagtctgaggcaacacaagtgcatctcatctgaaatatcctctaatgcaggatatactggagctgttgcctagggagatactgctcaaggaatatgggttccacaagcaaatgctatgaagttctagttattattttgagcccagaatgagttgaggcctaaaaatgttgccattccattaaaatgtgttagtttgaatttaggcacaaatgttatttttgaattataagcatgcgactcgtttatagtaatgtagctttgagaggactttgggttatttgccaggccattctttttccttttcttttcttttcttctcttttcttttcttctctttcttttcttttcttttctttctttctttctttctctctttctttcttttttytttttttggtagacatgggtctctctatgttgcacaggctggtctcaaactcctgg

SEQ ID NO: 312878 - DNA, 612 bp, Homo sapiens
ttgcatgactgggttttaaattgctcagcaaagcatcacttggggctaacctgagtctgtgaagttccacaattcaggaatgatggttactgcagcactcttgtgtttcaaggttcgtcatgaagactagcatagattccactgttcaattaaagcaacgtttaccatgatattcctattttccatgatgcaggatcctgggaagcatctctttcaggaagggagtatgtattcaaggtcagtcagtatatgaatgtgtctgagacttggatggctcaaggggatagagctaggtgttatctggcagtcgcaaaagtgagagatgatgacaaggccaaggtaggtaggagaatggggatccctcattcatttatcccatcattatttattgagcaccaactgtgtcccaggcattgttcaaggttcaagcacaaagccgtgttcaatgggttcaggtagaaacatgcacagttacatcacaacaragtaaaccatgggaactgcatggtgcagagtagggggtatttgcatggcagttgaagacctgtgtcggacgctgatgcttctataataacccaacttggttcctctccacttttagagccaattaat

SEQ ID NO: 312879 - DNA, 583 bp, Homo sapiens
ccatgatttcagattagggaggcaccacctggcaaagggggagcctgacaatgcagggcagttctaagtaccaggcttgggaccgattctatggagatatggtagatgggactaccctcaactgaataatgtgtgaagagaatttaagaccatgcctgatacatagagggtccagtgaaagttgaaggcaaataaccctggtaaagaaggcaggaaacacaaggaagccattcatttatttattattcattcaatcaacaaatatttcttaaatatttataccaacaaagcatggaacctctagccaaactctctggtttcaaatcctggctgttttacaatatctgtataaccttgagcaagttacttaattattctctgtgcctccatttcttcatttgtaacatgggaataatcaaaaagaataaatgaagattgttatgaagactaacacrtgattgttattattatctttttgttcatttatttagctgtgtccttagtctgttgcttgattggtgtggtgttggggatgtggccaacggagacaggaaaggtctccgtctttacccaccttatatta

SEQ ID NO: 312880 - DNA, 537 bp, Homo sapiens
tccccagggcatatatctcaattacaaacctgcaggaaacaaaaagtttgtggagagtcacaaaacatatttgaaatgtataagactttcaccacaggaaactaggcctaacaagtattttcctgtggaacacccctggctttgatgaaactccccattcaatgtctctttcctcctgcraactttgctaatagcagtgaaaataaaagcacagatcctatatttacttaatgatcttggctgctttagacatgagatagcattccaagagagcaaagtgctttttaacaaaattcaacaagaccctgccctttcccccgccctcccacctggcctctggaaggaggaaggaatttctcattctctgatcttttcgcctgccatgacccccagggcaatccagacagtaagactggccatgcctcctggtcatgtcccatacctcatgtcctcatgtgagaccccagatgggggagatgatcacatttgagttacatttgaggcggagattcaggtgggggcccaaaacatggctga

SEQ ID NO: 312881 - DNA, 630 bp, Homo sapiens
atatctcctaggagtgacaagggaattcacgcggctgttaatgacctggtgcctgcctggggctaccaagcagccaccacaagagtcctccataatagcatccaccgcactgcagtcagggcaacagcactgcaagcacttcatggacagagaccaagcctttccaacttgatctgccatgtttcaacacagtgcctcagccattgagaaaatcctgtgacaggcacagacccccttcaagaaggacttgctgctcagctcgtgagagggttgtcagcagcttcttcagggcttgctcagttgcagagrgctacctggccagaggtcatgcccttcaggggcagcccacctcctctgagtgatgggagtgatggaataaaggcccatgtcagcccatcccagcactcattccagcacaatgctggcaggccatcttggtgctcttggggctggctgtggctgcatccagcctgcatcacgactcaacctctgcacagtcctgctgccttcccctcctcccgtgggtatgagcctccagcacactcaacttcgtgtcagagcttaccttccaagaaccctacctgcaatgaacttggtatttgttgatgagtaaatgtctgaaacaagatc

SEQ ID NO: 312882 - DNA, 277 bp, Homo sapiens
actaggggtggaaacgagacccaggaaagggagactaaatgttcttctcaactagccaccagctctcgggctgccaggaatgctgggctgtggtaaatgaatatatagatatatagatatatgggtctggtgccagaaatgtgcaggtctgcagggatgagtatgaaaggcctcacctctcctgccttctrgagaataatatacagttcaagagccaaagatgcctgagggtgaactggtatgccaagttcggaagggtcaccaaaccacctaatcc

SEQ ID NO: 312883 - DNA, 604 bp, Homo sapiens
cacagtgagtttctcaactccagtttactccagctaacaccacagctttactgttcctcttccaatcaatagtggaatgaaatgatccagttggaattccagttcaggccacagagctgacatcttctggattcccactcctggggattctcagacccaaaggcaaaatgggccctggtcatgggaaagtccatggctttagatgggcagaatctgcagccactgaggctgcagcacacagcagggaccaaagccaggaacagccaaggacactcaatgccactcctgccttatgccagccctcagggtgagtgcataagctcttcccataaaaatggcatttgcacccttagtaaccttttattcaattcaacttcatctagtcctagtaaatagaattacattacttccttgcttaaaacrcttccatggtgcctatgcaaaaatgtaaaatactttctctggcacacaaagcccacatgctcttgccctcctctccagcctccttcatgccagtcactggcttggccatccaattcagactccctggcttcacttctccttccttgactgtgcgtagctctttcttgctttgtagtgagac

SEQ ID NO: 312884 - DNA, 594 bp, Homo sapiens
tagagacatacccgggactggatgatttataaagaaaacaaggtttaatggactcatggttccacatggctggagaggcctcacaatcatggtggaaggctaaggaggggcaaakgcactttttacatggcagcaggcaggagagagcatgtgccgtgtatcagaatatcacatgtaccccataaatgtgtacaaatattatgcgtcaaaacaattgaaagagcataatttagctaagtgatatggtttggctctgtgtccccacccaaatctcatctcaaattataatccctgtgtgttgagggaaggaagtgattggattatgggtgcagtttctcctatgttgttctcatgataatgagtgaattctcatgagatctgatggttttataaatggtagtatttcctgccctctcacatgctctttctcacctgctgccatgtaagatgtgacttttccctttccactggattgtattaggttggtgcaaaaataattacaatttttgccattaaaagtaatgtcaaaagctgcaattacttaataagtttcctgaggcctcaccagccatacagaactgtgagtcaattaaa

SEQ ID NO: 312885 - DNA, 594 bp, Homo sapiens
tagagacatacccgggactggatgatttataaagaaaacaaggtttaatggactcatggttccacatggctggagaggcctcacaatcatggtggaaggctaaggaggggcaaaggcactttttacatggcagcaggcaggagagagcatgtgccgtgtatcagaatatcacatgtaccccataaatgtgtacaaatattatgcrtcaaaacaattgaaagagcataatttagctaagtgatatggtttggctctgtgtccccacccaaatctcatctcaaattataatccctgtgtgttgagggaaggaagtgattggattatgggtgcagtttctcctatgttgttctcatgataatgagtgaattctcatgagatctgatggttttataaatggtagtatttcctgccctctcacatgctctttctcacctgctgccatgtaagatgtgacttttccctttccactggattgtattaggttggtgcaaaaataattacaatttttgccattaaaagtaatgtcaaaagctgcaattacttaataagtttcctgaggcctcaccagccatacagaactgtgagtcaattaaa

SEQ ID NO: 312886 - DNA, 648 bp, Homo sapiens
cttaaatgataaaactatgcagtttgttctttcctctaattttattattttttcccaaatatcttatgtgcattttaggaggtctacattggttttatagtgactttatgattgaaagttatttcccaggtcacatttattttttcaatctcatagtctcacttcaatcttcattctaaacttwcattttataggttaacaactgttttccaggaaatgtcacataagtttttatgtaaagattgtatttttctagtgagacgatttaataattgtatttggtgaagctgacattttcaaaagtatgtatctatcatctttgaatttctcaaactttgtttctaactagatttctccagaataggtccatctgtctcatgtagagtttcaatacaattctattatattatatgtctttatattttctgtcagttaaactcttttattaacttccaaactgaaaaaaaagaagtaaccatattttttctcatatgactatcacatcacattttcaatgcagttcaccaaattttgctcatttagagttttgcagtgctctcttaaatcactactgactagataactctgcaatttttacctggttttttagacttttcatgttttttcactgtactagtgagaaagata

SEQ ID NO: 312887 - DNA, 438 bp, Homo sapiens
caatcctgttcaaatattgtttttgcctgttaactattacacaatcttcaaaagacatggtaatgattgaatgaaataatctctgtgagccacttaatacagtatctcagttttagtaaacatgtaatcaatgctgtgatttgagtaataaatatttctttgatattatatatgatttccatttatgattagtatgttattattaatgaggtatttaggctatacatgtatctctgattaatggttacattaaagtaatgacaaaagtgayggtacaagaggtgaaaacactacttttaaaagtaagacaattattttagaaatataggtaaatatattggtaaaaataatagcaatataggttaaaatgactgaaattgtgctttacttcttgtttttatttatctagttgagataaatactatcttcccttttttg

SEQ ID NO: 312888 - DNA, 498 bp, Homo sapiens
ccctcctaattcgtgtgaccagatctaggaacaattgcactgtttargagttttgaaagagggaaaaatttgtaggcctcaacttctgtccatcttcacttcttgtgttagggtggataaaacacaacatgcatagaaagtgaaaaattaattttctgacattttgcctgtgtcttagcttgtccattaacacatgctttaatggttgagaatacttgttctgaagtcaagctatttgcataaaatggttactcaatcatttattgcatggatactcttggaaaaattagttaaatctgtttggcttcccattactcacatgactaataagtacattaattgttgtacaaattaaatcagttttaaatacaaattgtttagaatactgtttatcatatagtaagctcttcataaataattgtcaatattatcagcagtataattatttcaattaacttaatcttattgaatcaatattttctctgttctttctagttg

SEQ ID NO: 312889 - DNA, 567 bp, Homo sapiens
atgatgcaatttgagcatattattttggatctacgacaatatttttctatagtcatccctcctaattcgtgtgaccagatctaggaacaattgcactgtttaggagttttgaaagagggaaaaatttgtaggcctcaacttctgtccatcttcacttcttgtgttagggtggataaaacacaacatgcatagaaagtgaaaaattaattttctgacattttgcctgtgtcttagcttgtccattaacacatgctttaatggttgagaatacttgttctgaagtcaagctatttgcataaaatggtkactcaatcatttattgcatggatactcttggaaaaattagttaaatctgtttggcttcccattactcacatgactaataagtacattaattgttgtacaaattaaatcagttttaaatacaaattgtttagaatactgtttatcatatagtaagctcttcataaataattgtcaatattatcagcagtataattatttcaattaacttaatcttattgaatcaatattttctctgttctttctagttgagattttgatatc

SEQ ID NO: 312890 - DNA, 569 bp, Homo sapiens
accacagtctgctgaaggtgcataaacataayggcatgaaaggaaagagctaaaaacatttgtatatgacagcaatttgaagctgccaggagagtgcattcctattaacttaagaaataagtcatcagtaatcatgttacattacataaaaagctatttcaggttgtctttaaaacaagaaaaaagctgaccccctttattttaaataaagatctctacagtttacaatattgtgatattgactaatacatttgtctcttctccaatctgtacttgcctatttctacattcataaccctttaattattctaaattaaaagcaatgtatacaaagggaagttgagattctccttttgaaaaaaaataatataatacaatttatttaaaaattgggctttttttttcctattcagtatgtactactactcttcaagcataagtatctaaaattttcttagagggatctttagtcctatgtgtcctgtaatgttaatagtatttgacttataagatgcccatctcaaggcttaggagggctgtcacggctaaagccatattaccctaatatg

SEQ ID NO: 312891 - DNA, 439 bp, Homo sapiens
gtttctttccagaaggggtttaccatggcactcttccagtagctacttgacagcctggcttctaactaacttgcatcaaggacttcaagggacagtcaaaagcagcccactggcagctcatcacttcctgagccatttgccrcagctcacttcaacaataacttcatgtctaccaattcctcctggaggaatttgaccatgcataaagtgccccaacagttacagcatttacccaagggactgcatcccaaaatgtcttgctctgggagcagaagggtctaggcatatgtgagtcttcctagactacagaacaaaaaggtgattttaaataagtgtgcaaacacctccagggtctagactccctgagagcagtgcagaaagggggctggaatatgaagcttccattttatctccagaagggttttgctgcattacctcc

SEQ ID NO: 312892 - DNA, 532 bp, Homo sapiens
catttcagcataagatgttaaaagcaaccaggttacttcttgaatgctttgctgcttagagaataaatagccaaactatgtctagatcctaattgaaaagaaatttttgaaatgtcataataatacaaaatactgattttaaagaagttcagtgaaatataagagaattatgaaaaatgatataaaaaatcagaaaaacagtacaggatatgaatgagaaatttaacaaggagaaaaacaaagatacaaagaatacatatcaaaraaccagaacacagttagcaatgcaacatgaaaaaaaccttcatatgtcaataataaccttgaaagtaaacagactaaattttccacttaaaaaatataggttggctgaatgaataaaaaaaaataaaaaccatgatccaaagctatgctgtttaccagaaattcatcttcctagtaaagatgcatacagactgaaagttaaggaatgaaaaaagacattccacacacatgtaaaccaaaattgagcaggagtagctatacttacatt

SEQ ID NO: 312893 - DNA, 641 bp, Homo sapiens
ggctgtaatattttgtattcccaccagcagtataggagtgatccagtttcttcacaacctcaccagcatttggtagtgttgatatattttcagctgttataataggtttgtagtgatatatcattggtatttcagtatacatttccccaatggctaataatgttaaacacattttatgtatttatttgccatctttacatgttcttatgcataatgtctcttcatgtcttttgataagtttctttttcaaaygatttttactgtggaatcttgagagtactttgtatattccacattattcttacttttgtgcttgtcttttgttttattaaccaggtctattgacagcaaaatttttaatattgatgaggtcagatttataaatttgatttcttgtgaatcacatttttagtgtcatgtacaagaactctttatctaggcctagttcccaagattttctcctattttttcctcttaaaaatattatagctttatgtcttatatttaaatcaataatctttgaatccatgattcataaaatttttacatgagtgatatatatgtatacactcctattgatttatgtatttgcctatggataatgaattgctgtagtgcattttgttgaaaatgccacctga

SEQ ID NO: 312894 - DNA, 497 bp, Homo sapiens
aaaacatttggcaaagtgagtttttatgagattgcaggtaatgctaaatttataccaatgattgtataaaggaagatctggaaaccggagcttggttagtagataataatattaacagaactgatcaaacgaagattggtcaccttcgctgcatacaatgatggaaactaaaagcaagcatgctacatggcatgccattttagacgtttaagcaagagttaawaggactgtaggagagtggaaataaaaggaaagcttttggttttagagacaatgcatagatggactgagattttgttaacagtggagtttggagactcagagacaaataaaaactaaagcagacttctagctttcaagtttaaaaagggtcacgtgaaaatgtaggtataatttatgactcaaatcacaaggatgagactggattgtaaaggaaagacacttagaaacttgccataagagtgagataaatgaaaacataaaactacgataaacat

SEQ ID NO: 312895 - DNA, 563 bp, Homo sapiens
gctacatcaaaaataaaaagggtggaggaaataggaaaaatgtgtagagtttttttaatgcaaagttaaattgaagtcaactttatgaagcctcttgtaactctcatgtttatgtcagtctcatggtaaccattaagcaaagagctatagtagtacacaaaagaaaaatagtgagcaattatagcacaccactaaagaaaatcatctgatcacaatggcagacagcaagagaggatgaaagaaaaaaggaaatacaaaacagttataatatttgaaaaaattcggcaaaagcacaagtcagtaaatctcagaagattgagattagagcaattttcttttgtgatgaaaatggtatgtatctggtaatgaataactaaaggaatgtctgaaaattcataaatatctcgaaattaaaaacatgcttctrtacaaccaatgatcagaagaaattaaaagggaagtttaaaactatgtggagacaaattaaaagaaaatgcaagataccgaaacttatagaatatagataaagcagttttaaaagaaatgtttacaacaataaattc

SEQ ID NO: 312896 - DNA, 423 bp, Homo sapiens
aatgctaaagatatttattcaataaagataaaaattaagagtttaaatattttgcttaatagctatgaacaggtagaaaatgcagtaagtcttcacttaatgtcactgataggtttttggaaactgtaactttaagagaaaaaacatatcatggaaccaatgttaccactgggtagttgatataaacaatagtttaatatctacagcatagttctggtcagaaaaatgttaccatactttttacaaacaccacaaatacttctaacattaaacattgaaataaatgtgaactatacacacatttargaaagatgaataaaaacaagtgagataattatttaccaaattatgccagtttaggatcatatctcccagcagctcagggcacaaggtgaaaaccagccctagacaggatgccattcc

SEQ ID NO: 312897 - DNA, 461 bp, Homo sapiens
tttttgtttatatttttcagcctacattaatgagatgacaagtcatactttttcttttgtaataccctcatctggtttggtatcagtgttatagtggcctcactgaattaactgataaatgtgctacttttattttctgagagagaaagtgaagaactgttgtcatttgtttttcaaatgtttgttggaattcactgttgaaatcatttgggcctttarttttctgttaggaaagtataaaattacaaactcaatcactatattagtctgttcaaagtctcctataaagacacacctgagactgggtaatttatggataaaagagatttaattgactcagttctacaggaagtacataaagcatggctagggaggcctcagtaaacttacagtcatggcagaatgcaaaggggtagcaggctcaaacttcacatggtggaggaggagagagagcaaagggg

SEQ ID NO: 312898 - DNA, 563 bp, Homo sapiens
taggtttaacttaaagtgacagaaaacacaaaatattactgtttcaaataagatagaatttatatcttgcctacataatgtaagcggtcatccaagcctggaatggtgctccttggtgtcaggaacttgagttcattctgtcttgcagcctctccatgcaggaattccatgttcagggtcatcccgtggtctaagacaaatgctggaatttcagcatttccattcacattccagccagcaggaaggagaagaygattgccaaaaaagtgcactcctttcctctaggaacactttctaaaagttttactttcttcctgcatcccagtgtctaggaactggtcacataaccatatctagctacaaggaaaactaataaatacaaaagctgctaattacttctcagcattcctgtacctactaaaaatcataattattgtagaaattggatattgaagacaacgaagaaaacaatgaagagtatttgccacaccgtttgaacagggcagtgtttgtagaatctcttgaagctcatccattccaaagacatccgtgagtgcttacca

SEQ ID NO: 312899 - DNA, 563 bp, Homo sapiens
taggtttaacttaaagtgacagaaaacacaaaatattactgtttcaaataagatagaatttatatcttgcctacataatgtaagcggtcatccaagcctggaatggtgctccttggtgtcaggaacttgagttcattctgtcttgcagcctctccatgcaggaattccatgttcagggtcatcccgtggtctaagacaaatgctggaatttcagcatttccattcacattccagccagcaggaaggagaagatgattgccaaaaaagtgcactcctttcctctaggaacactttctaaaagttttactttcttcctgcatcccagtgtctaggaactggtcacataaccatatctagctacaaggaaaactaataaatacaaaagctgctaattacttctcagcattcctgtacctactaaaaatcataattattgtagaaattggatattgaagacaacgaagaaaacaatgaagagtatttgccacaccgtttgaacagggcagtgtttgtagaatctcktgaagctcatccattccaaagacatccgtgagtgcttacca

SEQ ID NO: 312900 - DNA, 580 bp, Homo sapiens
gaacttctagtcactcaggggacagaatggttaccatttgttgtcctaaagcaagggtagcataggggcttgtcccaggaacaatcagttggtcttcaaccaaaaaagtggatatttccatcagggacatttgcctggacaccaccatgttagattctaaaaatcaaacatgtgtcccaccctaactttgcctttagtccctgaaagaatggacstaggtttgagagaggagaacagtgagggtcatccctcttcatctcaggagcaattaactagttattttgctcactttgggaagaatttgccttcaaaaattataccttttggaaaactataccatataattatttatcttccttcaaaatatgaattatttgatctttttctcacttcaacttttcaaaaatttcacataaggagccctattcaattatctccttctgtaattaaaacattttagtaggtgtgcaaccaaattgccaaactaagacagatcttgttattttaaaagaacattataatttcaattattctaataattgttattattcgatagagcaaattatgaatgcaattttca

SEQ ID NO: 312901 - DNA, 510 bp, Homo sapiens
tgcagtacttcatcagatgtgataatccgcaagcatatctggagtcctagctgcaaaggagtcaagcaaaagtggtttttaacttcatagcttctgcagcacagaaaggcacacaaggagcagtatggaatgaagattgagtacagattcactgtattcacctcactgaggataataatggaaagactcatgggggatattccttcaaagatgtgaatttggtaaaaattggaaaagtgaatccacccaaggtaacaagcaaaacctcacaaggaagaaattgaaaaaactattctcctcagaaatgcctcatggaaaacctacactgggaggcctattgaccagaacaaaaccaggaatacagactttaagctacattattcttyatgatttatgaccaccaaatattttattatttttaccagttgaagtaaaaatttaaagtttttctaattaaaaagtgaaatatattaaacttctataaataagtttcagtattattgttagtaa

SEQ ID NO: 312902 - DNA, 598 bp, Homo sapiens
agacaaaaagtgagttgagaaaactacttagatgcagtcatgggctatttctttcttacagaaaaagaaggatctctcggaggctaagcaaaccatccagagtgtggacccaaaatccaaaaaacaaaattaattagagagccactccaagagataagaaataggccctaatcagggaacattccctgtccctggacatgtacctgtttggatttcacaattgcttcagaccattgattgctatgtgctcccagtcctttctctttttaaaaaagaggattattcattgtggttattttttctttgtctcaccatttcatcttagatatttgaataaaagagggtaaaagccttgtagttttggttcacagaactctggatcatgaaagccaaggagctccacagagaaacctcctttgtatctggaccagaggggaagctcaaacttgtggatttccagcctgatgcaatacctgggatraaacttttgcaattattgtgataggagtaagcgtactttccatgtgcaaaaatgattaatttgtggccagaaaatggagtgtggtaaatttgtggtttgatagccacaaattccacc

SEQ ID NO: 312903 - DNA, 376 bp, Homo sapiens
aagtgagtgaagtgatcaaagaaatgtttggggaaggttaatctggcagtgatgtgtagaatgttctccatcatgtggtgacaagaaaatggacgtgtggacagaaaactgtgaattaactcatgtcagcgtctgaagaacataccaagtttagcagttaccaatccagactagccccaggtccatgctctratcacctttgagtcataagctttggaactccaagccgttactgactgatggaatttgtagacttctttggaggcctggggagaaagaaggggaaggaaaccatgatatggtcagaggcacacctgtgggttacaggaattggcatgaaggaggactagtgaggcagtgtaagtctgacttcatt

SEQ ID NO: 312904 - DNA, 378 bp, Homo sapiens
tcttcaagaataagctcaaaaatgaactccaccaattgatgtggaaagtatttcatgcatgggacgttctaaccagggamatgggaaagagctggcatagcaaaggtggaggggctaaggaagaacactgagagatgggacagagatggcttgccaattcacgcgtcacatgagaacaccaaaagattttggaaaatccataaataacctaaattctcttttttcctggcccgtccagctacctcccccccaaaaaaagaagccctaaacagcctctttgctatgtctcagctaatcagcttatcagcagctcacataagaaaaggtaaataatattcgctatttcaaattgttcctctctccacttttccttacata

SEQ ID NO: 312905 - DNA, 526 bp, Homo sapiens
ctaataagatgagcctgaaaacctgggctcacgtttctacatggtcgctttgtagcatgtggtttatacaagtcccctatctatctaaaccctaatttcctctgtgaaaaatgagaaccctactatctggaggaatagaaaaaatgtattttgtccgaactttatcccgtggccttttctaacatcaaaactgccaaataattggcagttattgggttctacctactatataaaacattaggcccaaagttggcactcaattatggagaatttttataactctttttccaagtttttgtgattttattaatcataaagtcatttttgtaccaagccatcattttaatatttatgtagtggttaccatgtgtaagctcttacaattgcctcaaatgccctgaaacaattagtaaaaacaaacaaacaaaaaacaaraaaacctggttaaaaccctttcgtacaattatgatgtcttctttccctttgcaatcacatttggcagaggtaagaatgaattacagtcaaa

SEQ ID NO: 312906 - DNA, 518 bp, Homo sapiens
tcaatgttctgaatattgagtacaaagcaggtaacagggattttgtggttcaaagcaattgacctcttagttaatacagaagaaaccaagagctcaaggcacatagtactggaagtttagatgctcactgagagaggaatccccaaagtgagcaatattgtagcacctcgatactctgcactctgacttcttttaaactttgtgttgagtgggtcatgctgagcccacaggtgcatgggaggcaatggctgccaaagggagaataaagaatcatggaaagttgttacattatttcatatatttcattcttggttacctyccaatcaaaattatcagctcttcaaagatggataaaatgatataatatgattgaaggctttaaaattacaaggttaaaaagtcatcacacattttaattggagcagatgtgaaatgcccttttctaaaggtaaaaaattcatatataaacatcactctgatgcccaagtcaaaaagacaacctaagattccaatccaag

SEQ ID NO: 312907 - DNA, 551 bp, Homo sapiens
ttgtatttattgaattccctattcgtaatttaagaattgtccctgactattatttttctcttgagtgtatggcccctgatggaaggaatgaaggaaattaatattcattagggatctaaagtgtgccattacttaatacattctctcaaaacccctgtgatgtattatttcctccatttttaagtgaaaattccaggatctgagaacattcaagtaacttgtttaaggccaagtgattattaggtgatatgctggagtttgatactcaatacattacatgttattctagatgataatattctcatggaagcaataaacataaaaactagcacttcatttcttcattggcttaaaaaaattaaaaccagttgttttaagatataatccacattacatgaaatttattcattttaagtgcacaattactttaaatgacatactaaagtggattttaggatattacctgggttgtgcaaccaccactacaacytaattttagaatattttcatcaccccaaaaagaaaccttacctacattaccagtcatcccc

SEQ ID NO: 312908 - DNA, 563 bp, Homo sapiens
agctacctcctagggttgtttatatttagagcttctaaatatatattctatattccatagaatattctacattccataaattccacatatatktagaagctgtaagaatagtgatgggtccacagtgagtactagctactgtcttgtttcacacacatttgttgaatatgtacaaattactattaatacaaaatggattaaatgtaacttctgtttttaagaaggataataaatagtgtgacataagtgttttaatttgaaaggccaggcagggtggctcactcttgtaatcccagcactttgggaggttgaagcagaggaatcgcttgaggtcaggagtgtaagaccaacctgggcaaaatagcatctctatgggaaaaaaaaagaaaaagaaagaagaagaaagaaaagaaaggaaggaaggaaggaaggactgggtgaaagtactgcctagggtataaacattatgaagttttagtgttgaaatttattttaatagcccctcagagtggtcctaaaatggaccaaaaaaaaaaaaagaagctgaacagttcaatgaataa

SEQ ID NO: 312909 - DNA, 592 bp, Homo sapiens
taagtactagggcctgtaaaaactggatttctgaaaaataaaataacaagaaaaagtcagtacatttttcagtctataaaacctcttggagagtagtgatgtgtattgtgtgctttggttgctgaaaatatgtgagaaacaaaaatcaataagttaaactgttggtggaaatgtaaattagttcagccattatggaaaacagtatggaggttcctcaaaaacctaaaaatagaactaccatatgatccagcaatcccacgactgggtatctatccaaaggaaaggaaatcagtatgttgacgatttctctgcactcccatgtctattgcagtactcttcacaggaggcaagatacagaatcaacttaagtgtccagcagagggtgaatggataaagaaaatatggtgtgtgtgtgtgtgtgtgtgtgtatatatatatatrtgtgtgtgtggaatatcattcagccttaaaataaaaaggtaattctgtcatttgcaaccacatagatgaacctgaaggacattatatcaagtgaaataacccaagcactagaagataaataccacgtttttactcacaatgctaaaaaaaa

SEQ ID NO: 312910 - DNA, 588 bp, Homo sapiens
atataagtcaccacaacactaatacaagattatagttttcaaatttaaaataaaattaatttaagcacactgacagaaatatcaagaatgaattttgtcttcaactacaaacatcactgcagatgtcattagaaagactattctaaaagatgtttagaaaactaccttcagaatcttgggccttattatcataatatttttcaggtgttgattaattgagtatctagtcttatgatccactgagtcacaaatagaaagacataagattggcaatggcttctacaatatttcatatttgttattttcagaacatatcaacaagagaaaatttattatagtattttttgttgatgtggccctaatttgcttttccctgctgttctacaggtctacaatggtgagaatctaagatggaatcctgaaaatcctatgcttttcaaaatacattttgagttccctttaacctaacacacagatgccaagtggcacatttagcagtagactgkgtgtgtcctcaagcaaggatggagtggcacactagagagtttgaaaatggctcttaatattgtcagaactaagttaactgag

SEQ ID NO: 312911 - DNA, 505 bp, Homo sapiens
gtaacatcccagctctctttttattggtgtttaccttatatatcttttcgctccccacctctctttcaacctttctctgtcctttttattttgtgtctcataaacttcacgcagctggattttgtttttttatccaatatggcagtataacctttaattggcaagtttattccatttacattcattgtaattattgacatacatttggacttgtttgaactaattttattagtctctttttttttctatgcttttttcttccttgcctttaaaaaaaatgtcrggcatgtgtgttttattcttttttttttttcaaatttatgctaccaatttttcttagtgttacccttaaatttttgccttgcatatttaatacaataaagttttaagttaaatatcttaaacactacccctagacaatccaaaaaccttagaatgttttaagtctggacacctctctccagactcttacacagatgtttatgtatgtgtgtatatatatgta

SEQ ID NO: 312912 - DNA, 502 bp, Homo sapiens
ttcaccattttggccagcctagtctcaaactcctgacctcaggtgatcctcccgcctcagcctcccaaagtgctgggattacaggcatgagccatcgcacccagccccattacaggaactcttatccatgaataatgcataaatcatattgctagttcacctgtgttgatcttttactatgtgctgggccccatgttagatgtttccattcattatctcatttaatcttcacaacctagtgaggtagataatgtcaacatctctattttataggttagaaaaatgaagttccagggagattacctaacttgcccaaagtcactctcagcaaatggcctacctgggattcaaacccaagaccatctaatgtcaaagtttatkccctgagctatgttatcacaatgactcaagcctttcttggcattaaggatgtttgtcactagtacttcccctctgagaaaagactgcatgaaacttactatcttagtctgtttgggctgct

SEQ ID NO: 312913 - DNA, 547 bp, Homo sapiens
agagagactgccctagatagggcacttttaatacattagggacccgagaaaccaggaaaaatcttactttaggagagtaggttgcaggtagcccttgaaacaaagaatttctacagtcaattttggactctccctgttttattaaaatgcagtatacatgtgaactcttgcctatttaaaaaaattctgaaccacagaatatcacaataaaaagccagaaagaagaaggtaaaatgaaaccctgcattttgtcatgtagttattctggtttctacaacaactggagaagaaacaaattaaaaattaccaatgcttcttaaacattttcaaaattcktatgaaaaatttttctctagttttacatccttactgattccccaaactgacctcattattgataatgtagtggaacacaaacagcgaaatatagtcatgaatatgaaacatttgtacttaaaaatctagtctgaaccatcatagttttatacactatgttcatcaaaatataatatcacatgtcataatctgtcagattttggaaagaaaa

SEQ ID NO: 312914 - DNA, 547 bp, Homo sapiens
agagagactgccctagatagggcacttttaatacattagggacccgagaaaccaggaaaaatcttactttaggagagtaggttgcaggtagcccttgaaacaaagaatttctacagtcaattttggactctccctgttttattaaaatgcagtatacatgtgaactcttgcctatttaaaaaaattctgaaccacagaatatcacaataaaaagccagaaagaagaaggtaaaatgaaaccctgcattttgtcatgtagttattctggtttctacaacaactggagaagaaacaaattaaaaattaccaatgcttcttaaacattttcaaaattcttatgaaaartttttctctagttttacatccttactgattccccaaactgacctcattattgataatgtagtggaacacaaacagcgaaatatagtcatgaatatgaaacatttgtacttaaaaatctagtctgaaccatcatagttttatacactatgttcatcaaaatataatatcacatgtcataatctgtcagattttggaaagaaaa

SEQ ID NO: 312915 - DNA, 607 bp, Homo sapiens
attaatcagcatgaacatttctgaaagaacttcaaaagtgaagatgaataagataggaagatttaagatcctgtccccaaagtgtggtaaataggaaagtttacagatactatattcaagttgtttttaaaagtttctgtgaattgtattacaagctatgccaatggaagatatttccaaatgccaaattctttttggttcattggcaaatatttccaaaacagaaatacgttttagcacagtgaagcagctgattactatgatagtttctttttttcttttttgtttttttgcaggtgggtgggtaaggagtaagggtaagggtggtaatacaaatgttatagagtcccctaacattttcactacattcyaagcctataggagttctcttaaagacttccatggcttccatggtactatcactggtatgaaaagtacccacagatgtgttctacactttcctctatgttttcaattagatgcaataaggagaaaattgcaacaaccaaaggtttttttttttctaacatctgtgtgtatataccttgtcaaaaccactagagtacaccagaacatggtataacaaacagaccttttacttaaagat

SEQ ID NO: 312916 - DNA, 547 bp, Homo sapiens
tgcttcatgttcatttcacttaatgcttttggcattatttctaagcctagatatttatttatcccacagatatttttctctagttctcaatgtttatagaatttttttaaattaccataaacatttttgggattatttgatcatatcataataactctttttctttctgtcttttttttttttttttttttggkgatttttttgttatctcagaaagtagccctctagttttcctttctagacttacctttcattacattatcccctttcaggccttcagtcaaacacattacttgtccccagaacatactctgcactactatttcagtagtagtaagcaagtagatacgaccttaagtagaaattaaactctgcaaattacctgaaagtcatttaatatcatttaatttttcataatgtatatatttctataaagtgatgtataacatttgttattaatctacttcagaatcatgtttaaaagattccactaaaggagcatattcaaggatattcgatggatggaaacagttctatccatatatag

SEQ ID NO: 312917 - DNA, 547 bp, Homo sapiens
tgcttcatgttcatttcacttaatgcttttggcattatttctaagcctagatatttatttatcccacagatatttttctctagttctcaatgtttatagaatttttttaaattaccataaacatttttgggattatttgatcatatcataataactctttttctttctgtcttttttttttttttttttttggtgatttttttgttatctcaraaagtagccctctagttttcctttctagacttacctttcattacattatcccctttcaggccttcagtcaaacacattacttgtccccagaacatactctgcactactatttcagtagtagtaagcaagtagatacgaccttaagtagaaattaaactctgcaaattacctgaaagtcatttaatatcatttaatttttcataatgtatatatttctataaagtgatgtataacatttgttattaatctacttcagaatcatgtttaaaagattccactaaaggagcatattcaaggatattcgatggatggaaacagttctatccatatatag

SEQ ID NO: 312918 - DNA, 477 bp, Homo sapiens
ccatgccctgctaacttttgtatttttagtagagatggggtttcaccatgttggccagggtctcaaacttgtgacttcaggcgatacacccgcttcggcctcccaaatctaaatacctttttccaacaaacagaaccagtgctccttaaagaaatagttgtttctagatctagagcagagtaatacatatgagcctggagcatcttacagtgccagaaaggaagtgtccagaaaaaaactctatagagatggaaattagattagtgaatgcctatggctgagaytgagaatgggaaaatgactgcaaatgaagatgaggcttcctttcgggatggtggaagtattctacaattagcttgtcctattagttttacaactctgtaaatatactaaaattcatattgatatcatgtacctcctgatgtgatgagtatgaaagttgaatatgtgcatacacgtcaataaattttatggtat

SEQ ID NO: 312919 - DNA, 212 bp, Homo sapiens
ctcatgtaataaacctgagaaatgccagtgacatttgctataaaayatgcatggtgcctcctttcatgcttatttgcattataaaaccagaggtgacttttgattagaaaaaattgtccctgggatatactaaaaccattgcatgtagccaaattttagtcacaccttcaaagaaacatgtatcactttaaaaaagacctaatatggccaaa

SEQ ID NO: 312920 - DNA, 588 bp, Homo sapiens
atataagtcaccacaacactaatacaagattatagttttcaaatttaaaataaaattaatttaagcacactgacagaaatatcaagaatgaattttgtcttcaactacaaacatcactgcagatgtcattagaaagactattctaaaagatgtttagaaaactaccttcagaatcttgggccttattatcataatatttttcaggtgttgattaattgagtatctagtcttatgatccactgagtcacaaatagaaagacataagattggcaatggcttctacaatatttcatatttgttattttcagaacatatcaacaagagaaaatttattatagtattttttgttgatgtgrccctaatttgcttttccctgctgttctacaggtctacaatggtgagaatctaagatggaatcctgaaaatcctatgcttttcaaaatacattttgagttccctttaacctaacacacagatgccaagtggcacatttagcagtagactgggtgtgtcctcaagcaaggatggagtggcacactagagagtttgaaaatggctcttaatattgtcagaactaagttaactgag

SEQ ID NO: 312921 - DNA, 536 bp, Homo sapiens
ctcatcaatgtaaaagtagtaacataagaaatccagagtagggggatgagggaaggagaggaagtaggaaatcaagggatactgtgaaatttttaaaatgtgaataaatctcatctttactctacccaaaaaactttacagaaattaaaataacttgtaatgaagaaaaacatttttgaactttagcaatttttgcactttcattttaattttttaatctattaaattcaaatcaaattatattgcttttaattttaaaaaagatatacagtaattttctatttttgtaaatgtgtttgaattcacctaattagctatcattctatcagagggatagctgtgcagcaccaaatgttaatgatttcctctggatggtggaatttgaagtaattgttttttgtsattttaaaatttgtacttttgtacattacttgatttaaaaagcaaataatagcgtctactattttcacacaaaaaagttctttaaaagcataatcagaaacgtttttattttacataacagaacagatttaaat

SEQ ID NO: 312922 - DNA, 587 bp, Homo sapiens
gatccctttttctctctctactttctctcccttggcaatctcatcccagtataaattttaaaaatctatcaaatattatgaatgagacactgtgttaggcactgttgatgtagtggtgaattataattctttcaaagcctcacagacaaatggtggaggaaaagacagataaatgaataaatgatttaacgcaatatattaagaagtttctagctcaaaatggggatggtatccccaaagcattcacacattttttagcaaatttattatagtgtcagaaaaatgttgaaacttcacaacaacctatctttaatactgacawataacccagtgtcagaatgggtggtatctgcatcagagatggtttgagaaaacctccccagacttagtacatgctcatcctaactctactgcctaaaacagagattgcatgaagaaaaaggtaataaagtccagcttctgccctgccttagagacccagggctactaccaatgaggaactgggctatgttgtgagtcaagaaagttttcacttcatgacttacattctcttccttgcccagaaaacatctatacacagcatagct

SEQ ID NO: 312923 - DNA, 599 bp, Homo sapiens
aaagataaaggtttctgcctacagacagatgagctcaccaggaaaaatcaccagaaggagaccccagacatatcctggaaaattaagataatgtcagagagaatgcaggctattcacaagctgaataaggtggctttagacatttctgagagacagcagacctgagaagtgatgaaacatagacaataacaaaggagaccttttcaatcagtggtgaaggatcaatttcccaaggaatgaggctgagacacaagttagctactgggaaacaagctaaatccctactttatatccaatccctaaatgaatccctgctggattaaatacttaaattaaaaattgtgccataaaagtagtatgataaaacacagatgaccatttatacaactttagagtgaggaggaacttccaaagaaggaaccaaagggaaaagcacataaggaaaaagactgatagaycaaactacattaaaaatgttaaattttgctaaaaaactacaggcctaaaacaaattatgccactcaaaagaaatgaaatatacatgacaaaggtttattcatgcaactaaatagaaaaatgggtaaagaatatgaacaggc

SEQ ID NO: 312924 - DNA, 492 bp, Homo sapiens
  misc_feature (1)...(492): n = A,T,C or G
ccttttcaatcagtggtgaaggatcaatttcccaaggaatgaggctgagacacaagttagctactgggaaacaagctaaatccctactttatatccaatccctaaatgaatccctgctggattaaatacttaaattaaaaattgtgccataaaagtagtatgataaaacacagatgaccatttatacaactttagagtgaggaggaacttccaaagaaggaaccaaagggaaaagcacataaggaaaaagactgatagaccaaactacattaaaaatgttaaattttgctaaaaaactacaggcctaaaacaaattatgmcactcaaaagaaatgaaatatacatgacaaaggtttattcatgcaactaaatagaaaaatgggtaaagaatatgaacaggcattcaagatagaagaaatacaaataagttttttagtccaactggcaatcaatttttaagatccanattaatataactaagatttaacgttt

SEQ ID NO: 312925 - DNA, 501 bp, Homo sapiens
gaaatactaggaagaagcagtcactctcatgggcagctgggatatgaagggctcatcagtatagcattgctaaacagccattgggaatttttattaaaagccttaaaaatgagaaaaactttaatccaaaacttctacgtgttggatttatcttaagaatattatctattatggcccagcatggtggcgcatggctgtaaatcccagcactttgggaaactgaggtggacagatcacttgaacccaagtgctcaagagtagcctgggtaacatggcaaaaccccatctctacaaaaaattggctgggtgtggtgttgtgtgcctgcagtcccagctacttgggaggctgaagttggaggattgcccaagcctgggaggatgaggctgcagtgagccatgattgcaccactgcactcccacctgkgtggcagagtgataccctgttttcaaataaataaataaataaaagaatattattcattaagttaccaaaaatatgta

SEQ ID NO: 312926 - DNA, 515 bp, Homo sapiens
ggggggggcgggggcgggctggaagaaaagctgatggacccaagagtgtggtggctaggaaacagaatgctcaggaggtcctggcctctcataatctgaagggatgccatggagaaaggggagtagttgattctgtggggggcctttcaggaacacaacaaggaccaaggaaagggaatcccaaggagccagccttctgaaagttggaaccagctaacaagaaaatgtctctctgggaaagtagtaagtgcctcatctttggaggtgagcaagyggagactgcgtgaccacctgggtagggtgctgtggccaaggctcaagcttggggtggaggagcacaccatgcctccgaagcttttcaagccttgagaggttctgaaatgcgagccaggcccagacttagggcccatcttccactgcatttggatagcaggcagtgctatgaatgagcagatgaaatctggatcccatcatgtccaagctgaaagacacagaacaaacctccagatcctgaa

SEQ ID NO: 312927 - DNA, 597 bp, Homo sapiens
tgtcttcttgaagtgaagaccataatctgaagctatttatggagaatggagtgrcttttacacaaacatacacaggcacatccttggctgcctttctaaagacaatggattcctttggaataaaagtctaaagtcacagaaagaactgaaacgtgccaatctggttggcctttttttccccctttgaacatgctcctttaccaaagtttaagaattatacaatagcttccaaaatctaatcacttgatttcttcttcttaatattccaagttaaaaatagttcaaatacacttctctgtcagtcaaatcacaaagtagaagacactgtaccattctaaatataagatgagagtaattatttccccaaagaaaaatcctctaacattttgattttgtttccttggaagcttttataagccacattatgaggccagaaatcctaagtgtttgcctggttttgggatgccagaccccaaggcccctggccccaccctccatgaggacaacatcatggaggagaaaacccaagaaagctggtcctattttactcctctgaagccagatggcagtagtgttgccacctctcaggttactggg

SEQ ID NO: 312928 - DNA, 597 bp, Homo sapiens
tgtcttcttgaagtgaagaccataatctgaagctatttatggagaatggagtggcttttacacaaacatacacaggcacatccttggctgcctttctaaagacaatggattcctttggaataaaagtctaaagtyacagaaagaactgaaacgtgccaatctggttggcctttttttccccctttgaacatgctcctttaccaaagtttaagaattatacaatagcttccaaaatctaatcacttgatttcttcttcttaatattccaagttaaaaatagttcaaatacacttctctgtcagtcaaatcacaaagtagaagacactgtaccattctaaatataagatgagagtaattatttccccaaagaaaaatcctctaacattttgattttgtttccttggaagcttttataagccacattatgaggccagaaatcctaagtgtttgcctggttttgggatgccagaccccaaggcccctggccccaccctccatgaggacaacatcatggaggagaaaacccaagaaagctggtcctattttactcctctgaagccagatggcagtagtgttgccacctctcaggttactggg

SEQ ID NO: 312929 - DNA, 532 bp, Homo sapiens
agggaaatccaggaagaggaaagagtgtgtaggtgacattggagcatgaaagaccagactcagttctgggaaccccttagcaccgagtggccagatacttaaagtggggctgcaggagatggagctagagaggaggggtgggggcagattgctaaatgccctggtgctaaggcagggttttcagacttttttatgggagtaatgaagacatctaaagaagagcctcccataggtcgacaggaccagctttactttttgggaaaatycctggagcaaccatgtggaagatgcactgaggggccagggcaggatcccggaagacaagagagagcccaactacagtggcttagggtagggtcagcagagagaaagggaaggttgagctcttccacagtggaatggataggacttggtaactcagtggattgcaggagtggagggcttctgaggggagaaagggaaaacttggatcttccatttttgaggctccacaagcaagtcacctgcttcctcagagggggtggatgcagag

SEQ ID NO: 312930 - DNA, 520 bp, Homo sapiens
ggccagggcaggatcccggaagacaagagagagcccaactacagtggcttagggtagggkcagcagagagaaagggaaggttgagctcttccacagtggaatggataggacttggtaactcagtggattgcaggagtggagggcttctgaggggagaaagggaaaacttggatcttccatttttgaggctccacaagcaagtcacctgcttcctcagagggggtggatgcagaggaggctgtgtgagtgtggcagaaataccaggctcctccaatgtcaatcctgctgtctaaggatcctccaaaaaggcctggacactgtggaaagaaaaacagaatggatggcatcaggcaagtgcctccttccattctctccttcacaggtagaaccagggctgggacggcaggaggctctggtgccagctctgttacagggcttaaggtggtttccaacatctcctggggtcaggcctctactcctatccctctgtggagcaaactgtgggctctaggtgttttag

SEQ ID NO: 312931 - DNA, 613 bp, Homo sapiens
aaatagaaatgaatgccctctagcacctacatttccaaggagaaggcagagccccagagttcaaggccacaaagtctccacctactgggaggctgggtgcaagagatttatctgagctgctgtttctattaggatggttgtttttcttagggcttttgatacaaactcctgcaggtgttgaaggacaagccctaacctttttttttaaccccataagcactgctatttggagtgcagttttgcatataaggttgtttatggaagaatatgtggcatcacagaagaaatgtttgggccatgatgggtgttacagatgcatagaggaggagatggggtgacatctggagaaagtgaaccctaagctgagatgcaacaccagagaagctcactagataaaaaggagagcaagaatgtttcaaaccaaacaagacaaactgtcctgygacaaaattagatttatctttgatgatattagaaagttagcaagcaggccaaaggtttcctgtcatctcagtgtggtttgatcacctttcaacttcctggtgaattgaccctgcccagtgctgcctttattgagtcaggtgaggagctgttctcctgcatttgccagggg

SEQ ID NO: 312932 - DNA, 467 bp, Homo sapiens
tcccatcctgtccttggcgcctcctctctgctcttgccctggaatctctcagatgacatcygtgcctgctcctccctagctgctcccatagatctctgaattcatgtaggggaacagcagtcccagttaatggctgcagaacctggcaagagcaggggtgtgtgtgtggatctgacctggtgacaactaactaacccgtacagagggcctgaaataccccatccagggcccaggccaaggcagactccctccaggtgcctgttccattctgcattctgttaatccacccacttctggttatgggtgtcaggaccttcagccacatatcatcttatttctctgtctttatttccctttcatcctatatcctcatctagtggcttgattctgtttgtttgtttttatacgtctggcctcatctccagaagatttaatgtggccaatatgtgtgcacatgtatgcatctg

SEQ ID NO: 312933 - DNA, 467 bp, Homo sapiens
tcccatcctgtccttggcgcctcctctctgctcttgccctggaatctctcagatgacatccgtgcctgctcctccctagctgctcccatagatctctgaattcatgtaggggaacrgcagtcccagttaatggctgcagaacctggcaagagcaggggtgtgtgtgtggatctgacctggtgacaactaactaacccgtacagagggcctgaaataccccatccagggcccaggccaaggcagactccctccaggtgcctgttccattctgcattctgttaatccacccacttctggttatgggtgtcaggaccttcagccacatatcatcttatttctctgtctttatttccctttcatcctatatcctcatctagtggcttgattctgtttgtttgtttttatacgtctggcctcatctccagaagatttaatgtggccaatatgtgtgcacatgtatgcatctg

SEQ ID NO: 312934 - DNA, 467 bp, Homo sapiens
tcccatcctgtccttggcgcctcctctctgctcttgccctggaatctctcagatgacatccgtgcctgctcctccctagctgctcccatagatctctgaattcatgtaggggaacagcagtcccagttaatggctgcagaacctggcaagagcaggggtgtgtgtgtggatctgacctggtgacaactaactaacccgtacagagggcctgaaataccccatccaggrcccaggccaaggcagactccctccaggtgcctgttccattctgcattctgttaatccacccacttctggttatgggtgtcaggaccttcagccacatatcatcttatttctctgtctttatttccctttcatcctatatcctcatctagtggcttgattctgtttgtttgtttttatacgtctggcctcatctccagaagatttaatgtggccaatatgtgtgcacatgtatgcatctg

SEQ ID NO: 312935 - DNA, 577 bp, Homo sapiens
tcatctcagaatgagcagattttttccagcagactccagtgggatattcttctcatgtgcatccaacaccttaaaacgtcaccaattaaagaggataaaaatttgatttcaagtctgatttttagtcatcagacctgtgagggtgagaggaacttaacttgtaatatttcttaaatgatgctttgatgaagactcccattaacacttataataattcacagaaaagaagcccaagcagagctggctgagatgtcttccttaaatgaaggccttcatcacagatcagaaacagaaactagcgtgtctaagaattgkctctcccctgtgtggaccagtcctcatggccacacctgcctcccagggctcctctaagagaagaggcagcctctcctcacctgtccttttcccttccttccccttcttttcctttctttcaagaaagacaacaaacaacctaattgaaacttgggcaaaaacctagaagagacacttcacaaaagaggataaacataaacagatggcaaacaagcacatgaaagatcatcaacatcatgatttactagagaaatgcaaatta

SEQ ID NO: 312936 - DNA, 580 bp, Homo sapiens
gaggcagatctatatgtaatataaccaaactactgttaaacttcagtgttaactgagaagagatgtggggaaactaggtgcaaagtcctctgtagtgtgcccctatgcaagggggaaragtgtacaaatccatcgactctctgcaagagaatattagaaactgacaatgagagagactgatgacaaccagagtggagggaaactgacctttcacatatattacctgttcaaaatgtttttagtaacaacaaaaaaaggtaaattgcatgagtggagatttgtataaaagttccaccccaaggaagaaaggttcagaaattaaccaggcttccttcggaagtaacggtgttccatccctggaagtgtctaaaattaggctgaggaccactgtggaagagcaaagtggggtcatggggtgtgcttgactcgctgtccttcgaggctttatctagccggatgtggccatgctccatcaggttctccagagcaacagcaccacttgcagccacagcatcctctggacattgtgaacactttctaagagctaagaatgcagcatattcctggaagaaaaatgctg

SEQ ID NO: 312937 - DNA, 580 bp, Homo sapiens
gaggcagatctatatgtaatataaccaaactactgttaaacttcagtgttaactgagaagagatgtggggaaactaggtgcaaagtcctctgtagtgtgcccctatgcaagggggaagagtgtacaaatccatcgactctctgcaagagaatattagaaactgacaatgagagagactgatgacaaccagagtggagggaaactgacctttcacatayattacctgttcaaaatgtttttagtaacaacaaaaaaaggtaaattgcatgagtggagatttgtataaaagttccaccccaaggaagaaaggttcagaaattaaccaggcttccttcggaagtaacggtgttccatccctggaagtgtctaaaattaggctgaggaccactgtggaagagcaaagtggggtcatggggtgtgcttgactcgctgtccttcgaggctttatctagccggatgtggccatgctccatcaggttctccagagcaacagcaccacttgcagccacagcatcctctggacattgtgaacactttctaagagctaagaatgcagcatattcctggaagaaaaatgctg

SEQ ID NO: 312938 - DNA, 622 bp, Homo sapiens
tatttcattctgcagcctttctaatgaactaggtcctatcctcaatgaaaagattcatcagggctgggtttggccttgctgscccaaatttatgcccagtgatttcaagaggcttcctgaggctctcaacaacgcctccttctcaccagcctctccaggggcctattgtagctaagctcatttcttcctgacctccctggtcatacatacacaagaggatgagtcgaacacacttgcagcttcacagactcatcctgcagcaggctaggtgggtacaaaggaagatgagatactctctgtcttatggatagcttctgggacccaaaacatacccagccatactcttctggactaaaccacatctccccagactttgccttctcagtattattaacaggcccttgaaacaaaaatgggggctcaactgccttgccaggtaactagcactcaagctctttgtttagcctgaacatttacagcctgtagggaaaggcaaggttgcacctctctcaacatgcctgtcaaagacctgttggcaaaataaggcttgttcctgggtggtttgccagtgtttgaggtgcattccttctccatttgcaacagccctcaagttactctttcc

SEQ ID NO: 312939 - DNA, 622 bp, Homo sapiens
tatttcattctgcagcctttctaatgaactaggtcctatcctcaatgaaaagattcatcagggctgggtttggccttgctggcccaaatttatgcccagtgatttcaagaggcttcctgaggctctcaacaacgcctccttctcaccagcctctccaggggcctattgtagctaagctcatttcttcctgacctccctggtcatacatacacaagaggatgagtcgaacacacttgcagcttcacagactcatcctgcagcaggctaggtgggtacamaggaagatgagatactctctgtcttatggatagcttctgggacccaaaacatacccagccatactcttctggactaaaccacatctccccagactttgccttctcagtattattaacaggcccttgaaacaaaaatgggggctcaactgccttgccaggtaactagcactcaagctctttgtttagcctgaacatttacagcctgtagggaaaggcaaggttgcacctctctcaacatgcctgtcaaagacctgttggcaaaataaggcttgttcctgggtggtttgccagtgtttgaggtgcattccttctccatttgcaacagccctcaagttactctttcc

SEQ ID NO: 312940 - DNA, 622 bp, Homo sapiens
tatttcattctgcagcctttctaatgaactaggtcctatcctcaatgaaaagattcatcagggctgggtttggccttgctggcccaaatttatgcccagtgatttcaagaggcttcctgaggctctcaacaacgcctccttctcaccagcctctccaggggcctattgtagctaagctcatttcttcctgacctccctggtcatacatacacaagaggatgagtcgaacacacttgcagcttcacagactcatcctgcagcaggctaggtgggtacaaaggaagatgagatactctctgtcttatggatagcttctgggacccaaaacatacccagccatactcttctggactaaaccacatctccccagactttgccttctcagtattattaacaggcccttgaaacaaaaatgggggctcaactgccttgccaggtaactagcactcaagctctttgtttagcctgaacatttacagcctgtagggaaaggcaaggttgcacctctctcaacatgcctgtcraagacctgttggcaaaataaggcttgttcctgggtggtttgccagtgtttgaggtgcattccttctccatttgcaacagccctcaagttactctttcc

SEQ ID NO: 312941 - DNA, 622 bp, Homo sapiens
tatttcattctgcagcctttctaatgaactaggtcctatcctcaatgaaaagattcatcagggctgggtttggccttgctggcccaaatttatgcccagtgatttcaagaggcttcctgaggctctcaacaacgcctccttctcaccagcctctccaggggcctattgtagctaagctcatttcttcctgacctccctggtcatacatacacaagaggatgagtcgaacacacttgcagcttcacagactcatcctgcagcaggctaggtgggtacaaaggaagatgagatactctctgtcttatggatagcttctgggacccaaaacatacccagccatactcttctggactaaaccacatctccccagactttgccttctcagtattattaacaggcccttgaaacaaaaatgggggctcaactgccttgccaggtaactagcactcaagctctttgtttagcctgaacatttacagcctgtagggaaaggcaaggttgcacctctctcaacatgcctgtcaaagmcctgttggcaaaataaggcttgttcctgggtggtttgccagtgtttgaggtgcattccttctccatttgcaacagccctcaagttactctttcc

SEQ ID NO: 312942 - DNA, 596 bp, Homo sapiens
atgatgttatacttcctttcatatactcattggtcatctctagaaaaatgaaaacaaaatatatgttcacataaaaaaacatgtacatgaatgttatagcagcttcattcttaattgcccaaaactggaaacaacacaaatgtctctcaatggatgaatggtgaagcaatctgtagtacatccataccatagaatgctactcagcaataaaaggaatggaccattaatattcacaacaacttgtatggaaatgagatccatccaggttgagattatgttgagtgaaaaaaaagcccatccctgaaggtaacatacyatatgattccatttatacagcaccttgtaatgacaaaattatagagatcaagaacacattgattgtcagtgatcagggagaagaaggaggaaaggtgctggccatggctataaaagggtatcaccagggaagcttgtgatgaaactgttctgtgtcttgactatggcggtagtcatacaactctacatgtgataaaactgaacagatctaaatacacacacacacacacacacacacacacacaagtgtatgtaaaactggtgatatctgactaaagtca

SEQ ID NO: 312943 - DNA, 441 bp, Homo sapiens
tatcatttcatatgctattatcgcatatctgcattttattggaaaacagaggctgttgctggaagtactttaaggtgacccaaaccttgcttctttagtattctcttaaactatgacattaaagtagacgtggcagctgatcacttcagaatgaaggcccttcaatctccaaactcatccccacctttacccatttataattgcaccaaccaggagggctagctttctccacttgtcaggaaggaaagttgagagcaacgtctgtgctgctgccactagctcctggctacttcccagacctcatctcaaccactcttctcctstgctacttccagcccatggtcctatctggtccttgacactgccaagatcttcccacctcagggcctttgtcctgtctgggtcctcttcctggtatgcctttcccacttctctatgtgt

SEQ ID NO: 312944 - DNA, 579 bp, Homo sapiens
aataaagaaatggtggcattacaaaccacctagtagaaaatgcagtggaatttggaagaacaatgaaagcagactcacacctcctcagactttggcccagatttgggtttctctaaaggcaaatgttgcatcctgagaggccctgcagtaataagacagccacatgttgtaagggaagtgtggggacctgtgggatagctcagagggtgttctttctgtctctgtttcccccactcccatcttcactgcctcctggctgaaagaaacttccagaacagagtatgaagcaggcagagcagcagcctcagtggctacgacccccagcaccctcagcagaaggcacactcctgggcatcccacgacacgcgcttcattcatactctggagaggagaacaccaacaaatataacagaaaactattcaaaaacacacagaagaaaggcttctkgaattaaagtcttggaactgccatttgaaaaagtcaaaatacatcctaagataaaatcaagatgcatcctggtgaaattactaaatctccaggataaagaaggaatcttcttgacatccaggtagaaaaaa

SEQ ID NO: 312945 - DNA, 570 bp, Homo sapiens
gtaaaaatgaggcctgccctaaaactgaccactgcaatgccatgttcagctgaccacgttcaatgccataagacactgaagcaatgtccatgaattctgagcaaaggaattttaatttatgtgacccatgtatataaacccaggcaggytgcccctgcaaccccatgtacacaaataggcaagaagattcaagcattctcaaaacttcagggaacagagcaccagtgagctatggagggtgggaggtgggtggcgaataacctgaaaatggaatctgggaatctggtcaaacaaaaagtaacataaaccaaaaatgttagaacttgtttatccaagtgtggctcttgcagcagcagtactgacatcatggaggttgggggcaggtgttagaaatacagaccctcggctgggcacggtggctcactcctgtaatcccagcacttttggaggccgaggtaggtggatcacgaggtccggagttcgagaccagcctggccaagatggtgaaatcccatctctactaaaaatacaaaaattagctaggcgtggtggcgcttgcctgtagtccca

SEQ ID NO: 312946 - DNA, 570 bp, Homo sapiens
gtaaaaatgaggcctgccctaaaactgaccactgcaatgccatgttcagctgaccacgttcaatgccataagacactgaagcaatgtccatgaattctgagcaaaggaattttaatttatgtgacccatgtatataaacccaggcaggttgcccctgcaaccccatgtacacaaataggcaagaagattcaagcattctcaaaacttcagggaacagagcaccagtgagctatggagggtgggaggtgggtggcgaataacctgaaaatggaatctgggaatctggtcaaacaaaaagtaacataaaccaaaaatgttagaacttgtttatccaagtgtggctcttgcagcagcagtactgacatcatggaggttgggggcaggtgttagaaatacagaccctcggcygggcacggtggctcactcctgtaatcccagcacttttggaggccgaggtaggtggatcacgaggtccggagttcgagaccagcctggccaagatggtgaaatcccatctctactaaaaatacaaaaattagctaggcgtggtggcgcttgcctgtagtccca

SEQ ID NO: 312947 - DNA, 573 bp, Homo sapiens
ctgattgcatgacaacaaatcatttggaccagaaccttctttaattcaacaaggcacaacacctgagtttgaaacaaaatttgaaaagcttctggtttatgatagttaaccgagctcatgtgttaacctttccttcctttccaaaaccctgcagaaataaccaaattaatatagaagtgctaaaccctaagcactcatacccctgtgtatgagtgcattttgtgttgctataaaataatatccaaggctgggtaatttatttatttatttatttagagatggagtctctctttgtccctcaggctggagtgcagtggcgtgatattggcttactgcaacctccaccttctgcctcagtctcccaagtagctgggattacaggcgcccgccaccacacctggctgatttttgtatttttaatagagacgrggtttcaccatgttggccaggctggtctcaaactcctgacctcaggtgatccacctgcctcagcctcccaaagtgctgggattacatgcatgagccactgcgcccagccaaggctgggtaatttataaagaaaagaggtttatt

SEQ ID NO: 312948 - DNA, 616 bp, Homo sapiens
cctgctacttgggaggctgaggcaagactgaggcaagagaatcctttgaacctaggaggtggaggttgcaatgagtcaagattgcaccactgcactccagcctaggtgacaaagtgagactctgtctcaaaaaaaaaaaaacccaaaaaccccaaaaaacccaccaaccaaacaaaaamacctcaatcatctcataaagcttgagcccaaatacaaccattaggtattctgcaaaacatagttcttctgaagaaataaatgctccaatgcagagtgcaaaccgatgcttaccttcacatccatggagcccaggcagtctatgaggagagacacaaaaggatccagcatttccaggacacattcacctgaagacttgatcttggaagtcttcagactcagatgcagcagctaagagagttcaaacaggtatttcacattagttgcccattagaccagatgagttaggtaaatgtgaaatgatgttcagagaaaagcaagaaatgttaagatacttctattagaaatgataaaacatttttaaggaatgacaaactgcctgggagggtctcagtaagtcaaagtgagagctcgctgtgcagctgagatgctaccactg

SEQ ID NO: 312949 - DNA, 544 bp, Homo sapiens
agtagtctcaccactgggttgtatctcccctttattttctcacctttctcttggtttggttttggtttccattgttacagtgtgattgcttctttgaacacaaggcgctacatcacagtacaaaggagcttggactctrcacccagccctcccaggctcacacacttgggctgccactgctctaggagcttccatttactcatcaataggggggatactagtgcccctcatggggtggttatgaggaggcaatgacctcatacattgcttctcaagtgtggtccctgaccagcagtatcagcacctcatgagaacttggttagcactgtaaattctcagaccctgctccaaccctcctgaatcaagaactctggggatggggcccagcaaactgctttcataagccttccaggtgattctgaggcaggctctagtatgggaatcactgacttaacatacactacagcacctagaatattgtccaacacataccatgtgctacagaaagtgtttattcttattactgtctagtctttacataaat

SEQ ID NO: 312950 - DNA, 544 bp, Homo sapiens
agtagtctcaccactgggttgtatctcccctttattttctcacctttctcttggtttggttttggtttccattgttacagtgtgattgcttctttgaacacaaggcgctacatcacagtacaaaggagcttggactctacacccagccctcccaggctcacacacttgggctgccactgctctaggagcttccatttactcatcaatasgggggatactagtgcccctcatggggtggttatgaggaggcaatgacctcatacattgcttctcaagtgtggtccctgaccagcagtatcagcacctcatgagaacttggttagcactgtaaattctcagaccctgctccaaccctcctgaatcaagaactctggggatggggcccagcaaactgctttcataagccttccaggtgattctgaggcaggctctagtatgggaatcactgacttaacatacactacagcacctagaatattgtccaacacataccatgtgctacagaaagtgtttattcttattactgtctagtctttacataaat

SEQ ID NO: 312951 - DNA, 610 bp, Homo sapiens
ctaaatatttgttgagggagtaaaggagaaagtgataaaggtgagaaggaaagccacaaagtggatcagtatcttgtcatggggagatctgtgaaaggacggtttgataaattgtcccttcatggattgtagtcaccatcttccaggtcccagagggtcacttggtactgaagtcttatcagcctagggaccaaggctgcctgcccttcatgccctgtgtgagacaccgcttctgmactgcctcacgtcctctcaacctaccttttctccagtccctgctgcagcacccagcacccagagaagtgaatctactttccctcaccttgtaactgagtctttcaactttgaatgcattttaaaacttttttcctctctttctagtcttaagatgtaacctcgaaactgagtgtagaaactctcttttccttagtcttaaaatataccttgaaatgtactttgaaactctgcttccctctctttcccaccagactctcccttgcaccatggacacgtatctaactgtatacttgttaataaattccaggggctgattttacacaacagccaggcaaggagacccagctgcagaattctcccctacttggagatt

SEQ ID NO: 312952 - DNA, 542 bp, Homo sapiens
gagtctcgctctgtcaccctggctggagtacagtggcacaatatcagctcactgcaacctccctccacgcctggcctatttatttatttattttagagacagagttttgctcttgttgcccaggctggagtgcagtggcaccatctcggctcactgcaacctctgccttcccaggttcaagcgattctcctgcctcagcttcccaagttgctgggattataagcatgcaccaccacaccctgctaattttgtatttttagtagagacggggtttcatcatgttggccaggctggtctcgaactcttgacctcatgatccgcctcccaaactgctgggattacaggcatgagccaccttgccyggccaaatttattttttaagatagttcattcacatgtttcaaaattcaaaaggtacagataaaattccttctctcaaccctattcttccagtcacccaggtcccttcttaccagtttgaacccaagccttttgcctttgggtctttgggtctagtgccccttctgaggcagcagtgcagg

SEQ ID NO: 312953 - DNA, 467 bp, Homo sapiens
aagcaacaggaaaataacaacaaaaaaaagttgaggggccmtgaaaatactgtctgaatgtcctttccccaaagggttgaggtcaggcatatggttctattcaccaagccctaaacaaaggacttgggctattttatgcactgatcattattgttgcttaaattaaagcacgatccaaaaagtgtaatgcaatattaattttagttactgtagctaattgaaaacatagcaagagctgtgactatagaaaatggagtgagaacactcagatgcacatccaagtctatcttaccccttttaagctgggcaatagcatattttcaaaacatggccattatccccagagtctgtacttaagtgcatcaggagaaatacttggcctgggaaaaaggaaaagcagttaactcccagctatcagcagacttcgaaacttcaaatttaatttgaaaactatcaatggttaattt

SEQ ID NO: 312954 - DNA, 467 bp, Homo sapiens
aagcaacaggaaaataacaacaaaaaaaagttgaggggccctgaaaatactgtctgaatgtcctttccccaaagggttgaggtcaggcatatggttctattcaccaagycctaaacaaaggacttgggctattttatgcactgatcattattgttgcttaaattaaagcacgatccaaaaagtgtaatgcaatattaattttagttactgtagctaattgaaaacatagcaagagctgtgactatagaaaatggagtgagaacactcagatgcacatccaagtctatcttaccccttttaagctgggcaatagcatattttcaaaacatggccattatccccagagtctgtacttaagtgcatcaggagaaatacttggcctgggaaaaaggaaaagcagttaactcccagctatcagcagacttcgaaacttcaaatttaatttgaaaactatcaatggttaattt

SEQ ID NO: 312955 - DNA, 467 bp, Homo sapiens
aagcaacaggaaaataacaacaaaaaaaagttgaggggccctgaaaatactgtctgaatgtcctttccccaaagggttgaggtcaggcatatggttctattcaccaagccctaaacaaaggacttgggctattttatgcactgatcattattgttgcttaaattaaagcacgatccaaaaagtgtaatgyaatattaattttagttactgtagctaattgaaaacatagcaagagctgtgactatagaaaatggagtgagaacactcagatgcacatccaagtctatcttaccccttttaagctgggcaatagcatattttcaaaacatggccattatccccagagtctgtacttaagtgcatcaggagaaatacttggcctgggaaaaaggaaaagcagttaactcccagctatcagcagacttcgaaacttcaaatttaatttgaaaactatcaatggttaattt

SEQ ID NO: 312956 - DNA, 601 bp, Homo sapiens
tacacactgaagtatacttacatgctttacatacatattatgcataaagggttttctaccaaaatagattatactacatcttttttaatactcttgaagctctttcagagcatatcagctctatcagaacttaaagtacatatayatctatatcactataaacaaataatagattgataaaaaaattgcatcatataaaatagactaagattttatatccataatatatgtttaaatcctacaaattaatataaaaataaataaataaaaacaggtagaagcaacctaagtgtacaccaatggattaatgtataaagaaaattttatatgggtgcatgtatacatatgttacaaacctgcacattttgcacatgtaccctacaacttaaagtataataaaaaaaagaaaattttacatatgtatacacatatatagacagtatacacacatatataaataaaaaatatataaacattttatatatagtatatacatataacatttatatatatagtatacacacatacacacacacaatgatataccattgtgtgtgtataaaaagccaccaaaataatgaaattgtgtcatttgcagcaa

SEQ ID NO: 312957 - DNA, 601 bp, Homo sapiens
tacacactgaagtatacttacatgctttacatacatattatgcataaagggttttctaccaaaatagattatactacatcttttttaatactcttgaagctctttcagagcatatcagctctatcagaacttaaagtacatatatatctatatcactataaacaaataatagattgataaaaaaattgcatcatataaaatagactaagattttatatccataatatatgtttaaatcctacaaattaatataaaaataaataaataaaaacaggtagaagcaacctaagtgtacaccaatggattaatgtataaagaaaattttatatgggtgcatgtatacatatgttacaaacctgcacattttgcacatgtaccctacaacttaaagtrtaataaaaaaaagaaaattttacatatgtatacacatatatagacagtatacacacatatataaataaaaaatatataaacattttatatatagtatatacatataacatttatatatatagtatacacacatacacacacacaatgatataccattgtgtgtgtataaaaagccaccaaaataatgaaattgtgtcatttgcagcaa

SEQ ID NO: 312958 - DNA, 566 bp, Homo sapiens
ttcttccttgtggtttgatggctttctgtagtggtatcctttggttcttttctttttatcttttgtgtatctattataagcttttgctttgtggtttccctgaggcttatataaaacctcttataacagatttatttttgcttagaacacttgattgttattgtatacacgaactcgtcacttctacttcccttcttcccacgttttatgtttttgatttcacactatacatctttttataatatattccataggtaattatagtagccttttaaaaataatgttgttttttgacctttatagtacagwtataatcaatttacccaccaccattatagtattaaactgttttgcatttgacaacatacttacttttaccagtgagttttatgctttcatatgactttatgatactaattagcatccttgtccttcagcttaaagaacttcctttagcatttttttgtaatgcagatctggtgtaataaattctctcagattttgtctgagaaagtttttatcactcttttgtttttgaaagacaagattgcctgaatatagtattc

SEQ ID NO: 312959 - DNA, 475 bp, Homo sapiens
aaactggaaatagtttcagtaactattcagctcttgtgtattattagtactgagtaaaaaaacagaacaaaatattcacacatactcttgtgcctgggaatcttggtaatttagaaatgtggcaagtggtagaacaggatacagagagtataattcacctttctacccctccctttctcacctctgcgtctttccttttgtgtcagattaaaaaataaagtaatgggcaaacctagatggtcgtggttgagcagaragacttgtgattgtaactgcttaaacctgtgaacaagacttcaaaaataatccctatagatgcctctcttctctaagatctcaccccactctggggcacaagaacttggttgtacttttggaaaggctgtcaagaatttttcttgcttttggcaaccccagaggggccccatttctggtagtagagctcatctccttcaatgtagactcctactaaatt

SEQ ID NO: 312960 - DNA, 581 bp, Homo sapiens
ggtgaataagaaacacatactgctaaaaatgaagattcccgggccccataacctagaggtttgattgtaggagttcttcaggtagtccacaataacaccttgagaaacaacactctaaggcttttcttcccaaggctatatttcttttgattaattctgaggaactgcaggtcaccaaagagttccacattgccatatccaatgaccagttttctgttctcatcttattcatgttggtcattctgtacttcttgaaatgctttatttacttctcctcctgcatcattgtctaccaacatatcacaatggcttccttgggttccctccagaacatatgaagcaaactcccacctcagggttttgtactttctttttcaaaacataaaattttcttcttccatttatcttttatttacgatgccctcccttagctattgaaggtttctgatcacatagcaactcttcagaaatggctttcctgagcaacttatctgcaatagctcccractcattctctacccctttacactgcttaattctccatcaccagtcatcgctgacatagtatttatttgttcaca

SEQ ID NO: 312961 - DNA, 597 bp, Homo sapiens
ctatggctttgtcaaaataagtatcccaacctataaaaattaattacatatttaatccctttctttgattgtaattaaatctgtgaaacttaatatatcttactctcttaaatatattaaacatgtctccaaacaaaccaaacatgaaaaataccacaatgattacaaaatatcagtgattacaaaacatgtaaaaacttacactaaaagtgtttatgaaagttctaataccatggaatggatttgcatttgtttcttcattacctctctctctttattcatttcttaaattttaattttatacctttctcaacactgccttcctggttgctataactaagaagatactatttctagggttgcagtaatcatccyagttgtactaatattatcaggcataaagaaaaaaaatggagaccagtttaggctgcaggattggaactgattcttgcagagacaataattgattgtatgacccaatttaaatgaaactcaagtctatgatcattaggatgaaaccttttattcatggttaagtttcatacttggtggttaataatgggaattctaaaatcctttactttttactttttttgg

SEQ ID NO: 312962 - DNA, 564 bp, Homo sapiens
ggcacatcccctggcatcctagaaaacacgctgatctataactgcaagacacacccttgccatcctaatttttcctaccctaaaacgtgaagtcaggtgtttttaccaagtcctggttcctatgagtgtgatttgaaaacataatccgtgctttgtgagtgctcctgatggcacattgtgcatgcaagtgctgctgttgctgcaggtggaattattttagtggcagggctgggaaaaactttaagagtctgagcttatatcacattttttctcaattaaaaaattttaattatatgttttcatgctgcattcacattaaaaataaaactgcacaaataggttttgtaaaycatggatgatttctgtccagcaccaatattttctgagattagctatgattgaatctgtagtattggtctccccagcagccctttctcctttctttgttaatagtacttcaatttttcattctgggacttctcttccctcctcccttgcttttctgatgaggtggtcatgttcgctatcctcagcctcctcagacacatgtctgaggtgagacta

SEQ ID NO: 312963 - DNA, 562 bp, Homo sapiens
tttcctaacacttaccaagttctaagtaggacatatttgttgaattgtatatagactgtagtcttgtttatgtggtatcaaggtyttcccacattgacagttgactcaaagtggctaggccagcatacacatttaggagccaagggctcgaagcctgagtatcagttctatgagtttagtaagttctttgattttactttttccttagctagagattgaaaagtggccttgttatgcccaaacaggttgggtcatgcttaatttggactgtccaaaggcagaataaaaaattagtaacaaaggtacagatagccagattaggtgagatttttaaaaagataaaatggaagatggcagctttatatgaaaaagactgttagcaaagagattggccactacaggtgaaactgaatgttagatggaatccacagggctaaggctgaggctaatgggttttgctaaatcactatgggattatatttaccaaaagtaccaattcattgtgtagtaaagagagtcttgccggacaagcataaacagtggattccctatcaaatagcac

SEQ ID NO: 312964 - DNA, 562 bp, Homo sapiens
tttcctaacacttaccaagttctaagtaggacatatttgttgaattgtatatagactgtagtcttgtttatgtggtatcaaggtcttcccacattgacagttgactcaaagtggctaggccagcatacacatttaggagccaagggctcgaagcctgagtatcagttctatgagtttagtaagttctttgattttactttttccttagctagagattgaaaagtggccttgttatgcccaaacaggttgggtcatgcttaatttggactgtccaaaggcagaataaaaaattagtaacaaaggtacagatagccagattaggtgagatttttaaaaagataaaatggaagatggcagctttatatgaaaaagactgttagcaaagagattggccactacaggtgaaactgaatgttagatggaatccacagggctaaggctgaggctaatgggttttgctaaatcactaygggattatatttaccaaaagtaccaattcattgtgtagtaaagagagtcttgccggacaagcataaacagtggattccctatcaaatagcac

SEQ ID NO: 312965 - DNA, 534 bp, Homo sapiens
ggattacttatattactctcagtacttttataaatagattttttctttctttcttttttttttttttttttttgccgagtcaagtgaacatttatttttgtgcctttcttcctatgtgcatttcaagtctttttcaaaacaaggccccaagaatctccagatttaattatgtccctgggcttggtcgacccctgcaatagtcttagggagccttgtacaaatgctagagttactcatttagcagcattaaaccttaggaaagaagatgcaacaaagcaagactccttcctccatggaatgtgctgatttcagacgaggaggcagccaatgtggaaaacgctggaatttttcctcggaactggactgtgatgagaggtgcttgccrtgaacatagctactgtcttttctttgacccttcctttccagtttttgaagataaagcaggaaataatcgtctctgaagatacttgataaaaattcccaaaagaacaaaatcactggcttccacttcattgatacaaattgactgcagtt

SEQ ID NO: 312966 - DNA, 582 bp, Homo sapiens
ttgattaataagggttatgactacttstttcaaattaaacttggttttactgaacatgcaaaagcaacaggaaatacaagtaggatttttttccccaggttttgatacttaaacttttggaggattaaatttgcgaaaacagtaagtaggcttttatttttacatttcacatatggaggccatgcactttcacaatccttaaactggaaaagattcacagagttaatctacccgaatcatttagtagccattccccttactgaaaaacaaaatgtcaccagaattattacaacatccaaatagtgaaaagagtttacagatcaaaagcctaatctaactcctttattttacacatgaggaagctgaggaccaaagcagctacaggactgacctgcccaaaaccacacagtgagtctgcagcccggcttcggaccagagtttcttctgacaagcggcaagctcactgatggccacacccgctcatcctggataacagtattccccagtggaattaacacgatgcatcttccctggagtatcatttttactttaagatttaaaagcaagcagcaaattaaatag

SEQ ID NO: 312967 - DNA, 582 bp, Homo sapiens
ttgattaataagggttatgactacttgtttcaaattaaacttggttttactgaacatgcaaaagcaacaggaaatacaagtaggatttttttccccaggttttgatacttaaacttttggaggattaaatttgcgaaaacagtaagtaggcttttatttttacatttcacatatggaggccatgcactttcacaatccttaaactggaaaagattcacagagttaatctacccgaatcatttagtagccattccccttactgaaaaacaaaatgtcaccagaattrttacaacatccaaatagtgaaaagagtttacagatcaaaagcctaatctaactcctttattttacacatgaggaagctgaggaccaaagcagctacaggactgacctgcccaaaaccacacagtgagtctgcagcccggcttcggaccagagtttcttctgacaagcggcaagctcactgatggccacacccgctcatcctggataacagtattccccagtggaattaacacgatgcatcttccctggagtatcatttttactttaagatttaaaagcaagcagcaaattaaatag

SEQ ID NO: 312968 - DNA, 555 bp, Homo sapiens
tctccctgcctgcattccctgctctgattaggcagcctcagcttgacagttcatgctttcttaaggcctacatgctgctgcctggtcccagctaaccttgatccctattccatcacaactttattttttaattgacacataataactgtacatatttatggggtatggtgtgatgtttcaatacatgtattcattgtatgaaaaatcaaatcagagtatttaacatattcatttcctcaaacatttatcatttctttgtggtgagaagattcaaaatcctctcttctcgctmttttgaaatttagaatgtaatattgttaaccatagtcaccctactgtgcatttttaacagcattttctctcttctgccggtggccccattcttgtgtctgagaacacggctagctcttccttatccttacagatgtcctttgaggactcttcctctaccatcatttccacttctctgaggctttatctttggctttcgtccttagttctctctcttttgcagcctctgtcttcactctcttccttagaaatctgactacatat

SEQ ID NO: 312969 - DNA, 611 bp, Homo sapiens
taatgttgacagtggggttttaaagtctccaactattattgtggagtcagtctctctatttagatctaatattttctccatgtatctgggtgctccattgttggttgcaaatatgttttaaattgttatgccctcttactgaatgtatcccttaatacttatataatgatcttgtctcttttcactgttttcatttaaggtccattttatctgatataagtatagctacttctgctcatattttgtttwtgtttgcatggaatatcttttttcatcccccttttttttagtctatatgtgtctttatagaggtgagttccttgtaggcagcatacagttggatcttttttttttttttttttaaatccatggagccagtccatattttttaagtggaaagtttgatctatttacattcaaggttattatttataggtgaggacttattcctgttattttcttaattgatttctggttgttttgtatttttaaattctttttctctcttatttatctttatttaataaattatttattttcttgagaaagaatcacattctgcctcaaggctggagtgcagtggtgcaatctcggctcactgcaatgtctgc

SEQ ID NO: 312970 - DNA, 545 bp, Homo sapiens
caacagtattaagagatgaggccattaggaggtaattaaataataagagtaaagtcatcttacgcagaattacggtcttatgaaaggtggaggcaactgggtctatatcttttaccctcccatcccttatagcatgtgaggacccaccattcatctcctccagaggccaaaagccacctcgacagtcactaaatataccagcaccttgatcttggactttccagcctccagaattgtgaaaaataaatttttattctttgtaaattattcagtctgtgttattttcttatagcagcacaaagagaccagggaactaaccctctgacctaaaatagggagttgatcctggattatccgsgttggcccagtgtgaccaccagggtccttcaaagtggaagaaggaggcagaagagatgagtgatgtgatacaaagaagacctaagccattgttgctgtctctaaaaatggtgaatgagaaccatgtgctcaagaatgcaggaaggcagactcaagaagctaggaaaaggcaaggaaatagattctcc

SEQ ID NO: 312971 - DNA, 598 bp, Homo sapiens
aatacttgtttagatgagagttggtgctattttgtttagaagagtgaaagcagagaggctttataatgcagaataaaatagagacaaacttaaaatgtaacaggcagttagtgaggaatcctgttttagataagcttatactaaaaaagtatacagaaaatgatgcagagtttttctcattctgtgtaggatattttcatctctgttatttcaaatctttaacaattctaagtgtttctaaaatcccaaatgtagcaagtaaggagattttcagttatataataaactttttctttctcagggaaaagtatttcacttaaataakgtaaggatgacaaggaacatataacagtaaataaaatatagcaaactaagtatttcttatttaacggcattcttactctataataatcagtcctaatttttcttctatcaaacgatttatgtagtgttatgagctccacttggaaagctattttatccattttatattcttccaagaagtctaggagcctacttaggcatctataatcagaaacattggatcttggcaaattagacttaataaatcctcattctctactcactagaaaacaat

SEQ ID NO: 312972 - DNA, 598 bp, Homo sapiens
aatacttgtttagatgagagttggtgctattttgtttagaagagtgaaagcagagaggctttataatgcagaataaaatagagacaaacttaaaatgtaacaggcagttagtgaggaatcctgttttagataagcttatactaaaaaagtatacagaaaatgatgcagagtttttctcattctgtgtaggatattttcatctctgttatttcaaatctttaacaattctaagtgtttctaaaatcccaaatgtagcaagtaaggagattttcagttatataataaactttttctttctcagggaaaagtatttcacttaaataatgtaaggatgacaaggaacatataacagtaaataaaatatagcaaactaagtatttcttatttaacggcattcttactctataataatcagtcctaatttttcttctatcaaacgatttatgtagtgttatgagctcyacttggaaagctattttatccattttatattcttccaagaagtctaggagcctacttaggcatctataatcagaaacattggatcttggcaaattagacttaataaatcctcattctctactcactagaaaacaat

SEQ ID NO: 312973 - DNA, 538 bp, Homo sapiens
aaaattcaagcatacttataaagaaaatttggaaagtaaagaagtaaaagaatagttgaccccaatacaaccattattggtttttgtttttcccacagctaaacagcatttcctttaaacatcaatcctgtgaataatactgataagtattaagatatattaagacattattttaagaaattttaattatctaatttggtcactggaagcctaatttggttactagggaggaaaaaatactcctatcaacatcatcattatattgacacactggtaatggatgttaagactaagagatatgaattaaattcagacacacagcttagttttactacatttttatgttctaaaatgtggaaaaattatatatattttttagacagagtctcactctgttgcccaggctggagtgcagtggtgtgatcttggcttactgcaacctccgcctgccaggttcaagtgattctcccgcctcagcytccttagtagctgggattgcaggcgcgtgccaccatgcccaactaatttttgcattttt

SEQ ID NO: 312974 - DNA, 340 bp, Homo sapiens
gccaccactcccagctgatctctattttataataccattagaaaatatatctcaatrtattgtaatgataccaatgatctacttttggagggctatcaggccttcaagcaatgttatgctctcatgaggtttcttcccttctgatttatcaaacagttccccaacataatgaatgcttgacagtcctgaatcattaaggacatgttgttactttattatagttcaataatatgaatttctgtttacacttttgacatgtttatgcttgaattgttgcgtgtgtctgaatatgaataataccatgtaagagaactcatgagttcttatgagtgagttctag

SEQ ID NO: 312975 - DNA, 602 bp, Homo sapiens
actcatatgtgggaagctaaataagtagatttcatagaagtaaacagtagaatagtgataactagaggcagcaaagtatagggagaaaaggaggataaggagaaattggttaacagatacaaaattacaggtggataggaagaataagttctattgttctttagcactttattaaagatatagattaagttcttattctgtatcttcaaatagctaaaygagaagacattgaatgttcccaacacaaagaactgataaatgttagaggtgatggatatgctaattaccatgatttgatcattagacatcgtataaaggtatcaaaatatcacaatgttaccccataaatatgcatattatgtatcaattaaaaataataatgttctattgtatagaaaaaacctgttacagaaaaagaaagctcattaatagaacaaaatcactttcttccctttcttttttctcagtcttgtttttttctctaactgtagcttttctcatttataaagtgagaagtttcaataaagtttaaatatgtattgagtgctctgggttccagggaaaggaataagaatcaccaggtatatgagcatgggtgaaac

SEQ ID NO: 312976 - DNA, 508 bp, Homo sapiens
tcacagtttgcaaaactctagtatgatttggctcctgtctgcttgaaggtcatggtctccttttctgaggaggatgtggaggtctggctcagcacccatgccaaaggttggagagctaaaaactctgtttcccarattaactcccacataggtcacataggtcctggctgagtttattttcttccaattagattacgtgagattgaaggaacaaatttctgcctcttttatttatctccttttctggcaaatagtatcaaggaaggatctggtttgtctggggaaatgttttatgtgtggttgttttctagttgtagggtgtctccctgatactgcaagtggccccttgttgaaccaatgctatagcttgcttctcaaggttgtttcctccttgagtttttctactgaacctgtaatcagttttaacctgtctactaaaacaaagatggattctaaaccctgttgttcaaacctgagtgacatatttatcttcagtttctctaatatg

SEQ ID NO: 312977 - DNA, 352 bp, Homo sapiens
ttttctccccctccttaatagttctggctagaactttcagtagaatgatcaatagcagcagcaagagtggacattcttgtcttgctcttgatctcagggggaaagctttcagttgaacattagtttttacatggggcaaaattgagagaactgtatttggagaacagtgatgtgatctaacctctactttgaaagcatgttgctgccttttttatgttttaaatgattacagttagtttgtaaacagaaggctagaaaccttggtaaatttaataagtaggtattagaaatctgacatggtacattaaatttaaattrcctaatgatattgctacacaaaactgtttaatgc

SEQ ID NO: 312978 - DNA, 352 bp, Homo sapiens
ttttctccccctccttaatagttctggctagaactttcagtagaatgatcaatagcagcagcaagagtggacattcttgtcttgctcttgatctcagggggaaagctttcagttgaacattagtttttacatggggcaaaattgagagaactgtatttggagaacagtgatgtgatctaacctctactttgaaagcatgttgctgccttttttatgttttaaatgattacagttagtttgtaaacagaaggctagaaaccttggtaaatttaataagtaggtattagaaatctgacatggtacattaaatttaaattgcctaatratattgctacacaaaactgtttaatgc

SEQ ID NO: 312979 - DNA, 508 bp, Homo sapiens
tttgtatttttactggccactcagatattgtcttctacaaattgctttttaatgcaccttaaccattttgccattggtattttatcttttacatagcgatttctagagttcctctgtatatctagagaacctaattgatttagagggtgtagrcatttccttttcacctttttgtttgtttaaacatatttatttttccttttgctgatgaaagaaaatattgtgtgatggttaagagtacagactgcggagttagatttcttgaatttaaatcacagctctagaagtacccagctgtaaaaccctaatctaattaagttcatgtgtttgtgcttaaaaattctcatataaaaaatggagtaaaaaaaaaagtgtctacttcctagggatattgtgaagtcctaatgagatatgacatataagtccttatgggcagtgcctcatgtatctaagtacccactttaagttagccattattgttttcttctaatataaagctttatgtagt

SEQ ID NO: 312980 - DNA, 634 bp, Homo sapiens
caccatttaattggtaaatatgaaaactgaagtgaaagtttcttgggatatattgttaaatgaaaagcaaaataaatatcatttccatattatgcttacaactgtataaaattatgtatcaaaagtacaaggatgtacaagtattgtattataaaaagtttggccttatctttgtcctcagttccagctaggtaacctctaaaacttgaaaatttcccaagtgatagtagtatctagacctcttgtattacatctgggtttatattaatgagctgagtcaggatggggtccagtcaccagaaagactaaccatrtaattcaaggactggggctttgagcccagtaatgtcatcccaacctctgaggagtggaaggatgctggagattgagttcatgtgccctgcgattcagtcaatcatgcctagataatgcaatccacaaaaaaactatggacggcgaaatttgggtgaggttctttggtttcaaaggtgtagggagggtaatgcatcacgattccatggggagaagacgtggaagctctgattcagtatcctcctagttctagccctatgtgtctcttcattgagctgcttctgaatcgtgtcctttacaataaaattataatcataagttt

SEQ ID NO: 312981 - DNA, 573 bp, Homo sapiens
tgttacataaatcattgaattttactttaagaaagtacatttcaaatttacttatcacatatgataatctttaaacatttattttattttcaagattttctacatatgtgagttgattaactgaagcttactccatcctaggcagagtgagaggtggtgagaaacaaaaagctgtctaagacactggctgagcaatcgctgatagtgactgagatcacctacaagcaacatgattaagatttctactatcataacaatggggatctagacagaattttaatatatctcacagggcatttgatcagagtcayctcagtggttttcaacatgtttttagctaacagactctttctttagaaaaagattatgcaaaagtccaattcttaatacataaatgcagatattgaaactgcattgaacaatctagagttctgaactctacactatggtcccttgtggagcttggtgagaacccaagggtcaacagagtagactgtaaaccattccccatacacattctcctctaaaatgccccaggccagtttattctatgtgctagactgtttttgtaca

SEQ ID NO: 312982 - DNA, 391 bp, Homo sapiens
gccaaatcaagtgagatgtgtgcttaaaatggtttcaaactttaatttttctgggaaagcaaaaacaaatggttttcccagcgtttagtcagggtatactctttattctcttatcacagatcctaattgagccagatccacaggaaaacttccttcaggcagacgtgtcctctaggtttgactayggaggcaaaatatacatatattttgagttttgacaaagtcaaaaatcctgtctttttgtagtgtaattggttttgaatgatcattcccagctttcagccacaatgggcccagtatacctttataaacctggaacacactttgggaaggtttgctactgcatttcaacaaaatggtgccattagagtctgatagtagactaaagtag

SEQ ID NO: 312983 - DNA, 604 bp, Homo sapiens
atagtaacaatagcttacacatttgtagcacatagtacaagttaggcattctgatgttttacatgaattgattcattaaattctagcaaaagttcaacaaagatttttaatttcatgttgtgaataaagatataatacaaaggaacacagaagttaggtacttgcccaaagttacacatctgatagagatttagctggaaccaagatgtgacgtcagcaaatccagcttcagaggactgatcctgagtgctaagcatgttgcttctgttagggaaggttgtgatctagctatgtgtattatattttcagcaagtatgtttgattctcattcctcaatcaaattttctccattttatgactatattaatgttatgcatgagtatattatatggtgtgtgattgcatttggaagcatcagtaaatacataggattgacaatgaggaagattatagtgttattagacctaccatcatgatgttagataagatttgtaatttgaagtagagacagygcttaccaaatatctattattcccctacatgtttgagcccctctaacatttatattggggccatataattaattctaacaaatgtgataata

SEQ ID NO: 312984 - DNA, 656 bp, Homo sapiens
ttttccatacttttctacatagtctttaaaagtttttattcatttaaatattgtattgttatgttactctacagttatttttattcattcaatataaatattaaattaatattttcatttaaatattctattatgttataactatacatagtatgtttccacttttatgtttggttcccttcatttgaatcaggatctcaaattccctgaagttattcaatttttttcttttcttcttcagtttccaattctcaaattatttcagctatacttacacatgtatttattttacttatttayttatttatttatttatttatttatttattttttgagacagagttttgcctgtcgcccaggctggagtgcgatggcgtgatctcggctcactgcaacctccacctcccgggctcaagctattctcctgcctcagcctccctagtagctgggatttcaagcacacaccaccacgctaggctaatttttgtatttttactatagacggggtttcaccatctcagtttggccaggctggtctcaaagtcctgacctcaagtgatccgcccaccttggcctcccaaagtgctgggattacagccgtgagccattgcacccggcccatttacacgtttaaatgttcaaaaactttctaactg

SEQ ID NO: 312985 - DNA, 656 bp, Homo sapiens
ttttccatacttttctacatagtctttaaaagtttttattcatttaaatattgtattgttatgttactctacagttatttttattcattcaatataaatattaaattaatattttcatttaaatattctattatgttataactatacatagtatgtttccacttttatgtttggttcccttcatttgaatcaggatctcaaattccctgaagttattcaatttttttcttttcttcttcagtttccaattctcaaattatttcagctatacttacacatgtatttattttacttatttacttatttatttatttatttatttatttattttttgagacagagttttgcctgtygcccaggctggagtgcgatggcgtgatctcggctcactgcaacctccacctcccgggctcaagctattctcctgcctcagcctccctagtagctgggatttcaagcacacaccaccacgctaggctaatttttgtatttttactatagacggggtttcaccatctcagtttggccaggctggtctcaaagtcctgacctcaagtgatccgcccaccttggcctcccaaagtgctgggattacagccgtgagccattgcacccggcccatttacacgtttaaatgttcaaaaactttctaactg

SEQ ID NO: 312986 - DNA, 550 bp, Homo sapiens
cttttaagtcagcaatacctttttgaaataaggccccaggctcattcttctcatttgggtaactgaatgaatagtgacaacacagaccatcatatgaataaaggaagaatggcaaattttagaaggatgtgtagacaagggaattagttcatattaggaacattaaattttatatgcttttagcaggtttatgagatgtgtagtagatatgtaagaaacttaaaataaggttgaagagtttttaaaatgtgttcagtgttgaggttaaatataagaattattgggtatactgaagacataagagtgaatgatatgtaacagactttgagtaacgttagaagaaacaggggctaccattcctgggaaagcactgatgttttcagggatggcagagaaaaaagatccaacaaaggagcctgaaraggtgagagtgggaggagaaataggagagaatgggatacatatctaaagggaaagaggactgagaaaaaagggattatcagacaggccaatttctgtgcaatttttgaaggtttttaaaaaggtaggt

SEQ ID NO: 312987 - DNA, 596 bp, Homo sapiens
atccatccatgttgacacatttagctgcattcctttcttattgtgctgtgtagctaatctgctgtgtgaatagcccatagggtacaggtctattccactgtagatggatatctggatccatgcttttgctgttacaaagacttctgttaataatgctcttgcacatgcctacttgtccacagctgcatgagtctttacagtctagcatgagtctttacagtctattacctagaaaagaaattgctgggtcttatagtactaggatcatgactcaggtagaagtaccaaaagagtgctactaatttttactcccacctagatgtataagagttctttttgttctacatcttcatcagtggttgctactgktatacatttttttaaatgtatgtaaatctttcagatgaaaagtagaatccaaaagtaattttgattttttttcactaaatatcctagatactaagaagaattttatgtttattggtatgttttcttttctgtgaaatatccattttctcttagaatatgattttcttactgaattgttggagttctttatatttgaaggatattaatcctttgtcatatttgtaaaa

SEQ ID NO: 312988 - DNA, 593 bp, Homo sapiens
ttatcagcaattttctgagggtcgtcattgccagacacctgggaattctcaatacacatgcaaataattatttttcacagatatgacttctaagttaaataagtaactgtactaattcattctaccgtatttcagaattttgtattttaaaactaaagcagaatcgagtgatcatagtacatatggacgtgagcaaaacaataagatttgagctttaacagctatttttattaaattgaattaagtttagcctagagctacctcctacctatcttaaatttggcctaaaagtttcygcatacatagtaaactgtaacgtaacttgatgtgtaaacagactgttactttctgtataacaagtagcggaatctaaatcagtcacagcaactggacttaagtcaaccacaggcagccaacggttcaaaccaaattcaaataggacaaacagggagctttaaccaatcaggctatctctgtacctcatttctgcttgctgtatgtcactttcctttttgtgtctataaatgttattcaggcacatgagagccctggagtcttattaaacctttcctggttctagaggctgtcaaatt

SEQ ID NO: 312989 - DNA, 672 bp, Homo sapiens
agtaaatggataacaaaaacttccctataaatgaattcatcaagtaaataaataaaatagatagaatgcaaatgtcccagttattcacattatgttatttgactaagatacatgaaaaataatttctcaggagttcccattgcttgatgacaatgtaacttgattccaattgtcatgtaaaacaatggtttctattttgcttctccaaattttgtcacagccaatccagcagagatgatgtatgacccactacaaattagggaaagcaacagttcgtgtcagctgaatctgaawatacatttgtcgtttctttggtttccttcattaaagaatacactccgtgggtccaatttgtatggtgcattattgttcaatctcccagagcaaaacactattatgttgccttttccccccttaactgcattcctttggaaattaacttacttaatgcattttatgcagaattgttttgaattgacaaaaatcagcatgagaagtaagtaaaaatttaatatatttcccaacggtttaaactaatgatatagactcagtaaatgaacaaattaagataaactaatgatatagactcagtaaataaacaaattaagaaagccagtctcaaattggtcacttttagttaaaacttaccaattttgttatctcacccttatg

SEQ ID NO: 312990 - DNA, 666 bp, Homo sapiens
gccttttagaaagtcttcatgaaacgagaagggggcacctccccaaaatgtccagacccacttattcccatagttggactgggaaccagatcaccagatcacaattttttttaaaaaaaggcctgatcctctgcattttagccaaccaaaccttactaattatctgttcattgtaatggtcagtattggttgccagagggattttcttttgtaaaaaattgttggtcttgcccttaatagtcatttcccaggcaaaatgtaagtgaaaaggtacatggagtcataaaacatggagttggaaaggatattttaggtcayatttaaggaagcatgtatatatattattttagtagagtcactggcacatagtaagtgctatagaaatttagctattattatcattattaatagtgcttctattcccacttttgtttatgtgtcagaatcaccaggagtgcttatcacaattcagattccctggccccttcctagacttaccaagccagaattttgcagttctagggaatctgtattttaaagaaggtttcagtttattccactgctggcagccaggcagtaagccacaaaatggaatttagcaacaattgacaaactcacttgtcttttttaggcagggagtaaatcaagacctggagacattaagcg

SEQ ID NO: 312991 - DNA, 666 bp, Homo sapiens
gccttttagaaagtcttcatgaaacgagaagggggcacctccccaaaatgtccagacccacttattcccatagttggactgggaaccagatcaccagatcacaattttttttaaaaaaaggcctgatcctctgcattttagccaaccaaaccttactaattatctgttcattgtaatggtcagtattggttgccagagggattttcttttgtaaaaaattgttggtcttgcccttaatagtcatttcccaggcaaaatgtaagtgaaaaggtacatggagtcataaaacatggagttggaaaggatattttaggtcacatttaaggaagcatgtatatatattattttagtagagtcactggcacatagtaagtgctatagaaatttagctattattatcattattaatagtgcttctattcccacttttgtttatgtgtcagaatcaccaggagtgcttatcacaattcagattccctggcyccttcctagacttaccaagccagaattttgcagttctagggaatctgtattttaaagaaggtttcagtttattccactgctggcagccaggcagtaagccacaaaatggaatttagcaacaattgacaaactcacttgtcttttttaggcagggagtaaatcaagacctggagacattaagcg

SEQ ID NO: 312992 - DNA, 484 bp, Homo sapiens
gtaaaaaactttaaattatacagcgtatgttatctgatcataaaatrgataaaattaaaatcaataacgtaaagatatatgggaattttacaaatatttggaaattaaacaacatacttttaaataacctgtgagtgaagaggaagtctgaagagaaattagaaaacatttttgagtttaataaaaatgaaagtacaatatatcaaaatttgtaagatgcaactaaagtagtgcttcaagggccatttatagtattaaatacttattttagcatttagtattatcatagtattaaatgtgtgtattagaaaagaagaacaacaagcaatcaaagcctctacctaaagggacagtaaatagaagataaaattaaactcaaagaaagcaaaaaaaaaaagaaatgataaagagcatacattgcaatgaaatggaaaataaagataatagaaaaaaatgaagccattatatattttaaaagagatta

SEQ ID NO: 312993 - DNA, 615 bp, Homo sapiens
cttcaactagacgaagtttcatacacagacttccaaagtagtatgacgctattactgtggtgcagtatccaaaatattagggaaaactgacacttagataattaaagtaaccaaccttgaagtgayggaatatggcaaaggaatatgggaaagtcaggttagtattgaaaataaattggaagtaagaaatggtttggtgtagggactgacaaactgcctactagccaagtctaatcagttgcctattctgtaaataaagctttattggaacacagccatacatattcatttacatacagtgtgtgacttctttcatgctgtaatggcagagttgagtagttgtgataaactgtatgccacagaagtatgaaatatttactatttggctttctacagagaaggtattctgacctcaggtttagtgcatgaaaaataaaagtggccaagaaaattttggaaaataattagaaaagggtgacaaacttcaagcagatttttaaatatattatagagttagataatcaaaatagtatgatattgatttggcaaaaagcaaatagctcactaggaagataataggaagcccaaaataaattatctatataggaatttaat

SEQ ID NO: 312994 - DNA, 581 bp, Homo sapiens
ataacactatttctggagcttcaagggttgcaggtgcccccctagatgctgctgcagggctgcatggagctttgctcctgctgatgcccaaaagtgctcgtcctggctcctgcaccctctcacctgtgcctcccatcctgtgagggttggaacatagcaggaccaagtgagtggagtctgcccctgctggtactaaagcagccagatagttctagtactaatgcactccagttcctgcctgcaaaggggtcagggaaaatttcctgcttcattttgaaggattgtctggaatacatcagaagggtgagtacatgcaaaaaggtagatctctctcttcctgccctcagactttcctgtgagctatgccacttgcagggaacaggatgcaacactgccatctctatcttttgggtaaaaggaaygttggctctgtttctctcacagaagtcttgctgtcgcataggaccagaataaagtcctgaggcaactgaatgcatctggccaaggccactcctcagtgttgccagaaggcccccaaatccagtccccaactgcccatcaagtcgttggacaagaactcc

SEQ ID NO: 312995 - DNA, 515 bp, Homo sapiens
tactttcaggtgtgcataatagagggcttacgcaggattagaactaagcctctcaattataccaagctatccaggacagtccagggatttgatgagaatcctactgccttcctggagaggataagagaggccttcataaggcacacatctctatctcctgcttcagttgaggaacatctaatcctaaaagatgaatgtattactcaggaagcccctgatatcagggggaagctgcagaaaaaggccctgagaccagatagtactttagagaacctcctcaaagtgrtcaccacggtcttttacagtaggtcactggaatagattcttaaatttattatacccaaataaagacctgggaagttgacagagttatcgccatcaacccagaagagcacccaaagttccaatgtaaatagatgggggacatcaagctaaaaatcacaaaagataagttttaataattaaccttccatggatatcctccttatagtcttgcctatgcttgctgtttttac

SEQ ID NO: 312996 - DNA, 531 bp, Homo sapiens
gtgaacaataaaaatcattctacaaagcaagcttaagcatggcttatgattctcttaagttgtttctaaagatgtaccacttttgaatttcttggggtttgcaaactcaaactaataagacaaaacaaaacaaaaaaccaaggcacttgtaatctatcctttgattttgaaggaggttgatagagtaggataaataattctttcacaaagatatttcactgataacgtgttcatgtatttattcaaattgaatctgttttctgaaaacagctttattatctcctagtgttagtatctcactctgcttttaattacacataactgagtagtattmaccatcatttgccagccaaccaacacagcactatgttcttcaaagaacaatgcatgctctgattatctttacactgaattgttcacctgataaaaaatgaaaatatatacctgtaactttttgtgagtttcctgtttctatttctgctctgaagaaagtggcatgagttaactaataaattggcaaccccactagct

SEQ ID NO: 312997 - DNA, 522 bp, Homo sapiens
  misc_feature (1)...(522): n = A,T,C or G
ttattttcactgatgttttgtgatggttaagtataataaatttaactaactctgatttattttctacagtatttgaataacatacgagtgaccacccagtcactattacattaaatatgtaatttgggcaccaaatttaaggtggaactacacaaaaacagacttcatcgctgtccattnttaaagtatgaaatttaaatgttgaaaatattcaatctggaatggcagtattcttaccttctaatttaagttaattggttcatgttaatttcttatctatttgatgtttaaacagcactttcttctacttgtatctactctaagatggaaatgttataccatgatagcttttgctaccaactctcaaccgcttaacttacagagaagaatattcatttagggggattttgtgcttyatctgagctcagaagtaatgccagaaaatgttaagcatgtactttttaagaacatataaggattttaattgtcctattaccatgctatttcaagtgaactagaagt

SEQ ID NO: 312998 - DNA, 512 bp, Homo sapiens
ttttttttttcttaatgatgcaaggcacttttcttttttgggtttcatttagaataaaattgattctacactgatttattatattctatttagaaccattttggacaaaggaaaaagagctgggcaactctgaaaagaacaaatacaactttggcttttacaaaagaaaatgcaaaaatgaaagtcacatgaaagttaacagtatccaggtttttaagcatctggtactataaagcaaaacatcttcctgttatcattaaacctttgctgtttttatagaataaataaattagaaaagtaataggaaaggaaacagtaattgaaccataagtaaagatagttggttagtgtcacratttaaagattgttaagggatcacgaagtttaaaaaataaaataataattaagctattgaattatactaaaaaagaaatgtagcagattcctgcattttgttaatgtttctataaaagccttcatcatgaaattgaactgtaaaagttttaaaaata

SEQ ID NO: 312999 - DNA, 522 bp, Homo sapiens
taatacatcacatatgcatttagacaaaatctctgccttcttcttaattaagatttcttcagtgartaggacttcagggagaaagaaaatgatctgatggaattgtattaaataccagtttacttcccaagtttctaactgattttttttccacttaacatgacttggcctgaaaggcaaaggcatttgaacaaggtatagaggctggcatttcaattgaggtatcattttggctccagtgaactgttcccagtaaaaatgagcctgtgagatgtagctgttttatgcaaaggctaacaatgctagtcttttataaatcataaatcctcttaacctcaaacaatttggggccaccaactgtaactgtaatctataaggtctcaactcacagggattttgtttcttcttggtgcctttcaagccattaggcaatttttttttttttttttttttgagatggagtctcactctgtcgtccaggctggagtgcagtggtgcgatctcggctcactgcaacctcca

SEQ ID NO: 313000 - DNA, 541 bp, Homo sapiens
cctgttgctatcagtctgatcaagattcatggtagtcctagaagcaaagtttgattggcataggttgatcacacactctgtcactgactggtggaagatgaggctgtattttttaggatacccacacactcccaacaatccattataacagaatctccctgaacggaaataagataccactgggaaggaaaattggatgctgggcaggcaaaaccaaatgtccacgccttgcttaatatcacacttagggatataagcaaaaaatgcccattttattctcaaatcgaatgcagggattccaagagcttcaataagtctccttgtaaattaattgttaccttggtaagaggaatctgatcatsttagattcaattcattgaagctattgtgaaattctctggcttcaaagtggagtcctgggaacaatacccttgattcaattccacactgtgagttgggcagtttagaaggatggaatgaattttcctccaagctttgttgaaagttaatgatccagagctaggatgctgcatgtttttat

SEQ ID NO: 313001 - DNA, 641 bp, Homo sapiens
  misc_feature (1)...(641): n = A,T,C or G
gttgttagagtatgtaggaggagcacttgatttagactcattgagcagggggcatcaaagaagatcctttaggtggaagaaacagcctgaaacctgaaagatgaggaggtaatatggcacatttgaaagagtgccatagatgtgtgctatgggtgtaagggtatagctcacatgcagagagaataatatgtgtgaagcctcagaagaaagacagtgaatggctttcaaaaaactaaaagaggttcagtgtgaccagaatacagagtttgaggatctttcagttatctattgttatccaacaacacacctcaaaatgcagtggctttgaaatacaaaaggctgatttgcatcaagtaactgataattntgcatcagaaagcacagagactagaggatagtggaatgacatccttaaagcactganagaaaaaaaaactatcaccccagaatttagtatccatcaaaaatatccttcaggaatgaaaacaaaatgaaacttttctcgggtgaaagaaaaatggagagaatttgtcaccagcggacctgctctaaaataaatgctaaaagaagttattcaggaggaagaaaattatmccagatactaaagacttcaggaatgaagaaagagcaacagaaatggg

SEQ ID NO: 313002 - DNA, 621 bp, Homo sapiens
tctgtcctcacatggtagtagagcagaaggcagtgaacacactcctgaaagcccattttatactggcattcattcattcaygaagatggatgaattacctaaacacctcccattaggccccacttcccaacactattacattagggattaaatttccaacacatgaatttcggaggacacatttataccatagcaggggcttttaaatgttttgcagctaagacatatgaaattgattttaaccataaaaaattctagctaggcaaacaggaaggaataaaattattttacttttttggatactagtttctacacactgacttgatttgatactttttattacattattcagttagatcagaaaatctcataattcccattctacccacattcatttgtgcccctaccaaactatgtggtgattgtccacatacagactagactttttgaaatgatgctatagcctgccatattctctgtttcatggaatcagatgtaaatttaactttcaacctgtattacatgttcaaatgaatttggatttggaggttttatttaacagaatgttgcaattattgtttgataattatttgttttattagtctacaaataaatcacaaa

SEQ ID NO: 313003 - DNA, 577 bp, Homo sapiens
cagactcctgggtgtctcactgtcatctttcttactcagcctggaaatgatgggtgaaagcacagcctttggaaccagactctttgaatttacatkacagctattctacttattactgcccatgcaaacttgggtaacttcatttacctctaggtgcagattgcttcatctgcaaaatggttgtattaacactacctcctatatagaattgggtggagattacataatatatcagtaaaacactcagaacagtacctggtacctaataggcacagaataaatgctagctcctatgataccaggaaagatagtaggatcaccagacactgaaagcaaacacaactcataaggagaaagatagcaagatttataatgtagaaaggaaacctcctcagttttaccaagaataaaaggaagggtatccaatataacctatttatattttcaaagaaaatatgttttatagattataaaccaaaaggtaaactttcaatcaatactacaacttgtatttatggaaaaaaatctagaacaccaaagtcactctgaatgcttgaaagatattgtcccgttgtgt

SEQ ID NO: 313004 - DNA, 576 bp, Homo sapiens
ggaggaccagtgagcgcaccttttgagaggcactgatacgatggttaattttatgtgtccacttagctaggccacagtacccaaatactttgtcaagcatcattgtacatgtctctgtgactttttaaggtgagattaacatgtaagtcagtagactttgagcaaaggagattacctccataatgcgagtggtctcatctaatcagttgaaggccttaataaaaagagactgacctcttcctcagaagaagaaattctgctagcagactgcctttgctcccctcccwggttctccagcctgctggtctaccctgcagactttgactttccaagctgccacaatcatgtgagccaattccctaaaataaacctctctatatatacttgtatacatcctgttgattttggttctctggagaaccatgactaatacaactgggcttaacattttatctggagctccgaaagaagctgaggtcttcaccaaggtattatgaaaggagcaaagggtgtcctaagaatatctgagtgtctgcaaggtgtttaactcgtgttaaagggtttgtgctgggcaga

SEQ ID NO: 313005 - DNA, 563 bp, Homo sapiens
tttattttgttttcaactgagaaaaagattgaaatcctgtaaccatacttatggtaatttggtcttttctactttcactggcttccattcttacacccaaaacatttatactgctactttactaggcttgatcattttgttttgcttcwattttcagtaggttaaagaatgacttcaaataaaaattttcaagaagggtacatgattaacctattttctcagtttatatgtgtctgttttgtttatcattgcatctaaagtgcctgacatcgaataagtatggttatatttgtagagaaaaactcagttcaataatgttttagtactttcccaggagttcgaggtcagtctcaaactcctgacctcaggtgatccacccaccttggcctaccaaagtgcttggattatatgtgtgagccactgcacccacatgaaagagtaagataatttggttgcacataaaattcttggcttctaattattttttctacctcaaaactctgtaaacattgaatttatcaatatgaagaagactgagcctagatttttcttactattatttt

SEQ ID NO: 313006 - DNA, 517 bp, Homo sapiens
aaaaaaagaacaaggctaatctttcctgaacattaaaactttgcacccatatcacagtttgtcctcatgacctaaaggaaaagatctgaaatcaattcaaattattaagtgaattgaatttctttggaaacaaacaccayttagaaaatcttattctcatctacttttccaaataagatatataatgtactatttctgcttagaacttataaagtcttttatgtaatttttttcaccaggaccctaagctctcatagctcttgggagcatcagaagtagcaaaaccaatcaaatttcaaatacctggtatcctctatcaatttttagaggcttgataatggtagcttaggaatttttggataaatagagcagatagtgaattcttggaaatccataggaaacaaaatgactattcatagaaccaaataaaagccttccgttagaaactaaaaaaaatcaatggtgttttatgtgtttatataagcaaaatgcaaaggagaaaaaacagcaaataaat

SEQ ID NO: 313007 - DNA, 517 bp, Homo sapiens
aaaaaaagaacaaggctaatctttcctgaacattaaaactttgcacccatatcacagtttgtcctcatgacctaaaggaaaagatctgaaatcaattcaaattattaagtgaattgaatttctttggaaacaaacaccatttagaaaatcttattctcatctacttttccaaataagatatataatgtactatttctgcttagaacttataaagtcttttatgtaatttttttcaccaggaccctaagctctcatagctctygggagcatcagaagtagcaaaaccaatcaaatttcaaatacctggtatcctctatcaatttttagaggcttgataatggtagcttaggaatttttggataaatagagcagatagtgaattcttggaaatccataggaaacaaaatgactattcatagaaccaaataaaagccttccgttagaaactaaaaaaaatcaatggtgttttatgtgtttatataagcaaaatgcaaaggagaaaaaacagcaaataaat

SEQ ID NO: 313008 - DNA, 517 bp, Homo sapiens
aaaaaaagaacaaggctaatctttcctgaacattaaaactttgcacccatatcacagtttgtcctcatgacctaaaggaaaagatctgaaatcaattcaaattattaagtgaattgaatttctttggaaacaaacaccatttagaaaatcttattctcatctacttttccaaataagatatataatgtactatttctgcttagaacttataaagtcttttatgtaatttttttcaccaggaccctaagctctcatagctcttgggagcatcagaagtagcaaaaccaatcaaatttcaaatacctggtatcctctatcaatttttagaggcttgataatggtagcttaggaatttttggataaatagagcagatagtgaattcttggaaatccataggaaacaaaatgactattyatagaaccaaataaaagccttccgttagaaactaaaaaaaatcaatggtgttttatgtgtttatataagcaaaatgcaaaggagaaaaaacagcaaataaat

SEQ ID NO: 313009 - DNA, 603 bp, Homo sapiens
tactttacctttgaactggatgtccattccatatcagactttttctcactgtcacgtgctaattcttctggaggacattctaataaattatcttcatgtatatcatttctgcataaagggcatttagcatgtggctatataagaaagaacgaagtatgagcaacacttaacagaagaacaaatataaatatgcctaaaaatttttaaatgtatgctaaaatctgtatctctcatagctaacattttattaaaccttttaatggatttcatccatttaagagacatctgaacatgctgaactccagacataatgtggtaagtagaayggataaaggagggagcaaaagtatgtgatctggactagctagaagcaagagcaagaaaccaaaaattataacattgtaagcaagtttaaaaaaaaaatctatgaataacaatttattgaacctaaatacaatacagctacactatttagtactattctttaaaaaaaaatccatcttaatggcttataaagctattaagcttataaagcttataatagcttataaagctactaggatctgttaaatcctatcaagttcattccaaagcaacatctgt

SEQ ID NO: 313010 - DNA, 561 bp, Homo sapiens
gctggtcatgaattcaaaacctggctgtgccaatttaattatgtaaccttggacaggttgcttaacctatgtcttgagcttcctcagttctaacagtggcattgtaaaagtacctacctcatacaactactgttatttaatttaatayatgtaaagtatttaaaatagtgcctggactatattaagtgctatacatgaatctgttgctagtattagtactggtagtattatggcaacaaacatttctgaatattcaagaatgcaaggaataggcaaaataatacaaagattaaacttacaagctctaaaccaaagtgccagagttaatctgtcctgtcactcactagctgtgtgacaacagtgtaagtcacctaaactgctctgtgcctcagtttcctcacttataagatgtggataattatactgacctaataggattgctgtgaatacatttaaagcactaagatcaatgtataacacctagtgagtgctaaataaatgttagtaaatatatagcctattaaaaagaatactttaaaaataacttattttctgagaaca

SEQ ID NO: 313011 - DNA, 589 bp, Homo sapiens
tggtattctgtgatatgatgtaggtgaatttcattttgccctgcagtgttttagacattttttcgttcagtactaattattgaaatagctaagtccgcattttatacatattaatttattttcttaaatacaaaaawcttatttttctcttgacaagtgggaaatctggcaatgcaggatgagttgtcacttccatatgacaatagttgactggaactctccctttagctagggcatatgctctcccagttttatcacctgtttcttttttctttttctaaactctttcaatctttcagttaccttttctcttttaggcatttgtacttgtgatctcaatttaagtatctggaatatttaggatcttgatattctaattctaatttttaggatattcatataatcctaggtgagtttgaagagaaaataaatgctcataatgtctcactttgttttctcctttttcagtttatcaggtttttcagttattgagaataacttagtgaatcacaagttcttgcatttcccattttccaagcagaatgagttactaccctcagtggttccgttagccaaactctaccctttg

SEQ ID NO: 313012 - DNA, 484 bp, Homo sapiens
attaattgtaacagtatttctatacagaacctggcatgaaatttccaaaaaccccgtggaggcaatttcacatatagcatttttattcagaataaaatccaagctacctaaacccggatttccaaagaaaagcagcagtggttgaaaaacaacttttaccagaaaggcctcagcatataaataacgtgaggactttgattaaaaacacttgtttaaggctgttttcctggcttgaatgtttctgtccttcatatttatccattatggtcacttgggttgttttcacattttagctactgtgaataatgctgatataaacatgggtatacaaatgactcaagattctgctttcaattttttttaatatatacccaaaaatggaaatactggaycatgtggaaattctacttttaaaattttttaaggaataccctactgatttttatagtagctgtgccattttgcatttccattaacagttcac

SEQ ID NO: 313013 - DNA, 590 bp, Homo sapiens
aatgctagaagtgatagatatccatttaccctgatttgattattacacgttgtatgcctttatcaaaatatctcatataccctataaagatatacacctattatgtacccataaaaattaaaaattggaaaaataacttaaaaatcttcactcgaggaagcaaccacagatgtggtgaaaatagcaagacacctagaattaaaagcggagcctaaagatgggactgaatttcatcaatctcatgataaaacttggacagatgaggacttgcttcttactgctgagcaaataaaacrtatatattttttcttttttgagatggaatctacccctggtgaaggtgctgtaaacattgtttaaatggcaacaaataatttagaatattacataaacttagctgataaggtagtagcagggtttgagatgactaactttaactttgaaagaagtttcaaatgtaagtaaaatgctatcaaacagcatcacatgctacagagaaatgtaatattaaaaagtcaattgatgcagcaaacctcattgttgtcttatattaagaaattgctccaggcacccaaaccttcagcaaccac

SEQ ID NO: 313014 - DNA, 584 bp, Homo sapiens
aggttattgactccaatccctggctcccagatagcatctctggacctgcctggggcctggaggaactcaccgccctgaagagaagttcacagacatggctgacttcaccatctgctgattgtagagccttacagccttgagtgaacataggcagcagccagrtagtggttatagtgagccttgggcaagactcagggctatgctggctttaggtctcacccagggcagtgccagaggaggtagccacaggggtacttgcatcttgcatcaccccacccagagtaccaggcactgtaggagagagagagagagagagagagagagagagagagagagagagagagagagactaactccatttctttgggagaaagtaagggaaaaaaacaagggtctttgccttgtaatccagagaattctttcagatcttatgcatgaccaccaacaatcacagcattactaggtttggagcccaagtccctttgaatactacagaagccttcccaaatagaatgggcacaaacaagcccagattatgaagaccacaataaatacctaactaatcaatgcccagacaccaacaa

SEQ ID NO: 313015 - DNA, 578 bp, Homo sapiens
accgagtctaagacttttggagaggacttgagaaggaattttctgttcattgttccagcttctcttgcaacaagtcttggccccgagtggtcacttaacacacatcarctgagcaccattagtgtgccagcaacatgtgctaggcactggggatgcagaatgcaataatacttaggccttcagagtttaccacccatagaaaagatgaaggaggaaaccaatgattacagtagggtgcaggctagtctaagggcagagatgtcttcccagaagagaagacaccttagctctgttttagaggacaattgccaggcagagtagtgaaggatagtccaggagaagggaaccgcatgaggataagcaagaaatagcaggtgcatgctagaaacaacaggtctatatgtctggagtgctctttagcatatgcaggctgaccttttatcctgtgttgaaggtttattgtttgaacctcatctatccctggcatgctgcaatgatgggttaattaaatctagaaggtctttacagctttaagagccacagagaatattcctggaagggatattcttaaggggttc

SEQ ID NO: 313016 - DNA, 592 bp, Homo sapiens
aatagtctgtttacttaaatatttcagagcctcttagcatttcaaaagagtgtttttaaaaatcagctatgaaaaaaccagatgagtaaatagaggcataattgctcactattctaggctcagcagttatctattgaactgyacacatgcagagagaaaaaacaaaaataataaaacatattatcttgggaacagacgtaggaattatctataaatttgctaatcagtgctggtccttggtggttaaatttacctccacctgaaaaccgggtttggaaaggacagatccgaagaaagtttttgttctcctaaacagtgggtcagaagcagtctctgctgcaatctgatagtcttgttgtaagacacatagcgacaggggttccctacagctttgaaaagcagaaacctggaggttctcactgattttgaattctggatcttgacttccctttcttttcttttgtaatgttacagccccactgagcttggttctagaggacatttgattaaaatgttatttttagcaaatacataatttcccacattaaaattcaaaaacccaagaggacagcttaggcttgtaactgtgcaa

SEQ ID NO: 313017 - DNA, 592 bp, Homo sapiens
aatagtctgtttacttaaatatttcagagcctcttagcatttcaaaagagtgtttttaaaaatcagctatgaaaaaaccagatgagtaaatagaggcataattgctcactattctaggctcagcagttatctattgaactgcacacatgcagagagaaaaaacaaaaataataaaacatattatcttgggaacagacgtaggaattatctataaatttgctaatcagtgctggtccttggtggttaaatttacctccacctgaaaaccgggtttggaaaggacagatccgaagaaagtttttgttctcctaaacagtgggtcagaagcagtctctgctgcaatctgatagtcttgttgtaagacacatagcgacaggggttccctacagctttgaaaagcagaaacctggaggttctcactgattttgawttctggatcttgacttccctttcttttcttttgtaatgttacagccccactgagcttggttctagaggacatttgattaaaatgttatttttagcaaatacataatttcccacattaaaattcaaaaacccaagaggacagcttaggcttgtaactgtgcaa

SEQ ID NO: 313018 - DNA, 442 bp, Homo sapiens
aattatttattaaatatctgtttaactcaccctgcccccccttaaaaaaaacattttattaaaagataaaacagagatacagaaaactccagaaacacacatagggatgaatggaggcaaacaccttggtgatcaccagccggggcaagaaactgaactttgctacccacctctgaaccctgttcatgtgccctctatcaatcagaacccctcccttctcctacaagcaaccactcttttgatttttggatatgtcattttagttttttcccttgcatttcattttagttttattaccccaatgtacatttctgaatcctgtagtttagagttgttccttataaaaatatatgtcttttaagtattttttratctacaggatctccctctgtcttttttacttgcaatttacttgctatagatcttggctgtttgtcttgtg

SEQ ID NO: 313019 - DNA, 543 bp, Homo sapiens
gaacccaaccaaagcccagctgaatggatcatgagatctgaatcagccggaagccactgctgtgcgccccagaacccatgtctcaattccacctggcatcaccaattatctgtgcctctgacataggaggtttttttwattccctcgaaatagggctataattaaatccaaaattgtactggagactttatcgtcatggtaaaagcagaacacaatgtctgcagacaaaaaaactctttcaataaaaattaattatgcacagctcatgcctcagtcccggtggcagtgtgaggaatgcatatgaggcatggggaggagctggcccatggcactgcccaggctggctccaccaccctcccgaggctcccgctgtgtagcccccctctccattcacgcaaagccccccgctgcatctccctccctcggagtagctgcttgttctctgcagtcccgcgggtcactgcttttttctcctccttcagggtccgaaaaattgaaagcagtcataggtggggctgagggaggtaagagaagagaaacaag

SEQ ID NO: 313020 - DNA, 590 bp, Homo sapiens
gattatatacacatatgattaagaatatatataatgcacacatacacacagcatatagcaatttggggcttgaggctttttttttttttttttttttttttgagacagggttttgttctctcacccaggctagagtgcagtggcacaatgtatcttggctcactgcaacctctgcctcctgtgttcaagcgattctcctgccttagcctcccgaatagctgggattawaggcacgtgccaccttgctggctaatttctgcatttttagtagagacagggttttgccatgttgcctaggctggtcttgaactcctggcctcaagtgatctgcctgcatcagcctcccaaagtgctgggcttacaatgggccactgcacccagtcctattttggcctcaaggctttgatttgccgttgaggcaaagcccaccaagtgatgtttcaaattattgtatctgatcagctaaaaagatcttgccattgacctcgttctacattcccctagatatatgccactaaacaaaaaatacaacccaacagagagatcctagtgtgaagtccaattctcagaatgtaatggccaaaaaaaac

SEQ ID NO: 313021 - DNA, 590 bp, Homo sapiens
gattatatacacatatgattaagaatatatataatgcacacatacacacagcatatagcaatttggggcttgaggctttttttttttttttttttttttttgagacagggttttgttctctcacccaggctagagtgcagtggcacaatgtatcttggctcactgcaacctctgcctcctgtgttcaagcgattctcctgccttagcctcccgaatagctgggattaaaggcacgtgccaccttgctggctaatttctgcatttttagtagagacagggttttgccatgttgcctaggctggtcttgarctcctggcctcaagtgatctgcctgcatcagcctcccaaagtgctgggcttacaatgggccactgcacccagtcctattttggcctcaaggctttgatttgccgttgaggcaaagcccaccaagtgatgtttcaaattattgtatctgatcagctaaaaagatcttgccattgacctcgttctacattcccctagatatatgccactaaacaaaaaatacaacccaacagagagatcctagtgtgaagtccaattctcagaatgtaatggccaaaaaaaac

SEQ ID NO: 313022 - DNA, 594 bp, Homo sapiens
gagtgctggtgcaaatattctggacatttagatgacttggaaaaatgggcttcaacactgtcaaagtcaaacctggcactgtgggagggaggtaacactgtagctgagggcatgcgttcaggagttaatctgcccaattcaaattctggcttgacagccttctagctgcatgacctcaggcaagttatttgacctccttgttcctctgtttcctcatctgaaaaatgggaaaaagatgagtccctacgtcaatgcacctaactttggtactttgctaacagagagtttcaaggatagaataagagaagtccatcccaagaaacaggtacctcagaaatattttcttccatccaaggttaagagatgccctgattccctacagtgtacatggcttagcatgtctggcatctctgatgatcaagggaagaaaagtcttcagagggtcattgaaggsagcagacaaaatattctacaagaagacttggaatattctgagtggctcctaccagaaatgcagtcacttagttatggttatttccaaagttatgattcttgactgatacatgctttagtcactagggcatggatatctca

SEQ ID NO: 313023 - DNA, 602 bp, Homo sapiens
aaacaaaaggaaaagggatcaatctcataatggtattcatacttgactgctcactaggaggttatgggagttctcatggaaaatattgcctagatgatgctatcttatccaaataggttatgacaacttttcattgtttttgttgtttactttaagmatatcttgaaccccatccaaattcatattcaatttaggagaggtattaaaaaaccccaacataccaaaatctattaatcatttatcctgggatgatactcagcattagttgtagaagtggcataatctcagcatgaaatgtaaagccaaagtacagatatcagcctggtcaacatggcaaaaccccgtctctactaaaaaatacaaaaaattagctgggcatggtggtgtccacctgtagtcttagctactcgggaggctgaggcttaaacccaggaggtggaggttgcagtgagctgagatcatgtcactgcactccagcctgggtaatagagtgagacactgtctcaaaaaacaaaaacaaaaacaagcaaacaaacaaaccaaaaaacaaaatacatatacctgtgaacttttcagtacttcttgagttggccccttacaat

SEQ ID NO: 313024 - DNA, 602 bp, Homo sapiens
aaacaaaaggaaaagggatcaatctcataatggtattcatacttgactgctcactaggaggttatgggagttctcatggaaaatattgcctagatgatgctatcttatccaaataggttatgacaacttttcattgtttttgttgtttactttaagcatatcttgaaccccatccaaattcatattcaatttaggagaggtattaaaaaaccccaacataccaaaatmtattaatcatttatcctgggatgatactcagcattagttgtagaagtggcataatctcagcatgaaatgtaaagccaaagtacagatatcagcctggtcaacatggcaaaaccccgtctctactaaaaaatacaaaaaattagctgggcatggtggtgtccacctgtagtcttagctactcgggaggctgaggcttaaacccaggaggtggaggttgcagtgagctgagatcatgtcactgcactccagcctgggtaatagagtgagacactgtctcaaaaaacaaaaacaaaaacaagcaaacaaacaaaccaaaaaacaaaatacatatacctgtgaacttttcagtacttcttgagttggccccttacaat

SEQ ID NO: 313025 - DNA, 602 bp, Homo sapiens
aaacaaaaggaaaagggatcaatctcataatggtattcatacttgactgctcactaggaggttatgggagttctcatggaaaatattgcctagatgatgctatcttatccaaataggttatgacaacttttcattgtttttgttgtttactttaagcatatcttgaaccccatccaaattcatattcaatttaggagaggtattaaaaaaccccaacataccaaaatctattaatcatttatcctgggatgatactcagcattagttgtagaagtggcataatctcagcatgaaatgtaaagccaaagtacagatatcagcctggtcaacatggcaaaaccccgtctctactaaaaaatacaaaaaattagctgggcatggtggtgtccacctgtagtcttagctactcgggaggctgaggcttaaacccaggagrtggaggttgcagtgagctgagatcatgtcactgcactccagcctgggtaatagagtgagacactgtctcaaaaaacaaaaacaaaaacaagcaaacaaacaaaccaaaaaacaaaatacatatacctgtgaacttttcagtacttcttgagttggccccttacaat

SEQ ID NO: 313026 - DNA, 540 bp, Homo sapiens
atgtggatggatgtgtatgggggtgagaagtaaactatgcttgtttaagtccctgagatttgagtttygtttgttttgttatttggttcaatttgaccaatacacacagtctcttcctcctctaattctctttatatactcttgccagggtaatcttaaatcacaggccagattatcccctaatcaaaagccatcagctgttcatcattacccagaaacagaaaacccaaatgtctgaatttcaagaaactctgagctctgccctcaatgtcctcttcccactttctcactacacgtatgttccggcccagtgtaaaggctcacagtgaccctcagatgatcatgtcttgacttgggatgttacatttgtatggagtgtctttgccctgattacatcatgttgaaatctagccactttaaagcacaggttcaaatggtcaaactttcctgactcctacaagtggacaggcactcccactcttctggggtcccttagcaaattgtgtctcatttatagtacttactactttctattgcata

SEQ ID NO: 313027 - DNA, 540 bp, Homo sapiens
atgtggatggatgtgtatgggggtgagaagtaaactatgcttgtttaagtccctgagatttgagtttcgtttgttttgttatttggttcaatttgaccaatacacacagtctcttcctcctctaattctctttatmtactcttgccagggtaatcttaaatcacaggccagattatcccctaatcaaaagccatcagctgttcatcattacccagaaacagaaaacccaaatgtctgaatttcaagaaactctgagctctgccctcaatgtcctcttcccactttctcactacacgtatgttccggcccagtgtaaaggctcacagtgaccctcagatgatcatgtcttgacttgggatgttacatttgtatggagtgtctttgccctgattacatcatgttgaaatctagccactttaaagcacaggttcaaatggtcaaactttcctgactcctacaagtggacaggcactcccactcttctggggtcccttagcaaattgtgtctcatttatagtacttactactttctattgcata

SEQ ID NO: 313028 - DNA, 540 bp, Homo sapiens
atgtggatggatgtgtatgggggtgagaagtaaactatgcttgtttaagtccctgagatttgagtttcgtttgttttgttatttggttcaatttgaccaatacacacagtctcttcctcctctaattctctttatatactcttgccagggtaatcttaaatcacaggccagattatcccctaatcaaaagccatcagctgttcatcattacccagaaacagaaaacccaaatgtctgaatttcaagaaactstgagctctgccctcaatgtcctcttcccactttctcactacacgtatgttccggcccagtgtaaaggctcacagtgaccctcagatgatcatgtcttgacttgggatgttacatttgtatggagtgtctttgccctgattacatcatgttgaaatctagccactttaaagcacaggttcaaatggtcaaactttcctgactcctacaagtggacaggcactcccactcttctggggtcccttagcaaattgtgtctcatttatagtacttactactttctattgcata

SEQ ID NO: 313029 - DNA, 540 bp, Homo sapiens
atgtggatggatgtgtatgggggtgagaagtaaactatgcttgtttaagtccctgagatttgagtttcgtttgttttgttatttggttcaatttgaccaatacacacagtctcttcctcctctaattctctttatatactcttgccagggtaatcttaaatcacaggccagattatcccctaatcaaaagccatcagctgttcatcattacccagaaacagaaaacccaaatgtctgaatttcaagaaactctgagctctgccctcaatgtcctcttcccactttctcactacacgtatgttccggcccagtgtaaaggctcacagtgaccctcagatgatcatgtcttgacttgggatgttacatttgtatggagtgtctttgccctgattacatcatgttgaaatctagccactttaaagcacaggttcaaatggtcaaactttcctgactcctacaagtggacaggcactcccactcttctgggrtcccttagcaaattgtgtctcatttatagtacttactactttctattgcata

SEQ ID NO: 313030 - DNA, 587 bp, Homo sapiens
ctgtgcagttgttctatccattattcagaggggaatattaaagtatccaactattattagtaaaactatktttttcttcaattccatcagtttttgcttcatatatatttatggtttgttattaggtacatatatgttcataatttttctatattcttgctatattgaaacatattaatatataatgttttgtctcttataactctttttttttaaatttaaagtccacttattctcacattaggataaccacccctgccatctcttggttactatttgcatggaatatctttttctattttttttcactttaaatctatttgtgtctttgaatctgaagtgattctcttacagacagcatatagttggatcatttgctgttatccattctgtcaatttctgcattttgatatagagtttaattctctatcaaagtttacaaaagagtttacatttaaaatagccagttaccaataagggagcatctgtttctgtattttgctatttgttttctatggctttacagctctttttgtcccttaatttgtgcattactgtcttcttttgtgtttgattttttttttagt

SEQ ID NO: 313031 - DNA, 568 bp, Homo sapiens
gatgtctttagccagaagttatttcctttgttctcttgtggtaccgtttttactcttcatatattatatattgccttttaatgagacatttgttttcgtgtcttagatactttactaggtcttaagtgctcaagggcaagaagtataaccctgcaacttggtattctgttccaggcttggcctagtgccttcctgccagtagaaacaggaaaaatatagattctaatttcctaagtatagaaactgtgtagtagatgctcagtaaacaactattgaattgaattggtgaactcaacacattaggaaatatcattttatattttccacattagactcatatatcyatgaaccagcactacagcaaatctattctcacttctttgtgaggttaatagtttgagaccagtccagttattaattatagaccataatagtaatatatgtaacatatcactgttaattaataattatataaatatatataattatattaaatctcatataatactttgtgataagcattaagcactataatagcattaagaagtgggtgttgttattcctgttt

SEQ ID NO: 313032 - DNA, 568 bp, Homo sapiens
gatgtctttagccagaagttatttcctttgttctcttgtggtaccgtttttactcttcatatattatatattgccttttaatgagacatttgttttcgtgtcttagatactttactaggtcttaagtgctcaagggcaagaagtataaccctgcaacttggtattctgttccaggcttggcctagtgccttcctgccagtagaaacaggaaaaatatagattctaatttcctaagtatagaaactgtgtagtagatgctcagtaaacaactattgaattgaattggtgaactcaacacattaggaaatatcattttatattttccacattagactcatatatccatgaaccagcactacagcaaatctattctcacttctttgtgaggttaatagtttgagaccagtccagttattaattatagaccataatagtaatatatgtaacatatcactgttaattaataattatataaatatatataattatattaaatctcatataatactttgtgataagcattaagcacyataatagcattaagaagtgggtgttgttattcctgttt

SEQ ID NO: 313033 - DNA, 600 bp, Homo sapiens
tcagagaagtcaactgtctctgaagcaaatcactctcctaccagaagatctgttctcatttacatcacactgatcgagcaactctttggtaggtagaaccctgaattcagtttttctcattcttgctttcatttagttacttaccaactcatttatttataaaagatccattaaaagtgagagctaaggaccgtgcttagttttcacgatgggcactgcctgcagtttaaaattcagtgtcatagcactgaaagggaaaaatgactcaggcactgggggaggactaagggaggaggctcttcattgtgcctgaagggaaaggggtcaggaaagacatcaaagaggggatgatgctgacaatgcaccttggagtgatcaggatttcacatggaaggagaagctggagaagtcagggtagggctgggaggcagggagagaacattccaagtagctgatcctggtatgtycaggaaaatgcagctatagtggagcatgtggtactcatgggacatgaggcaggaaaaatgagtggggattgattatgaagatcttcatgatatacaagtagttttgaatttattccataggtgacaaggagct

SEQ ID NO: 313034 - DNA, 564 bp, Homo sapiens
cccactgttttctctgtgaagtccaatatctggccattgggctggccttctggagaggccttctggcttaatccagacctagggcacyccagtcagagacagtgggaggcctctggtgttgtcagggatcttcactgccagcttcagtcttctctcccagctcttctgttcccttcgaatggatgcagtttataatgggcctattagagccctaattgaatggttaacacaccagccattagcagctgctaatgagggaatccaggggattacggtatcaattaccaagtttgacttctgaatgtggctctgccaacagtgggttcttatgagagtctttagaaagcgtgacagagagggggaagagagccatgcacacacagtgtgactgtgccctgcctgtacccaagataagctcttacagctgtccacactcatgtgactgcacaaaacaggttctggggcagtttatccacccatgatggagatagcattcatcccaaacacctgcacacctctctcccaggtctttttaccctccatacaacacatgtgcttctttgc

SEQ ID NO: 313035 - DNA, 625 bp, Homo sapiens
ggcatattggtaacaaggtgaacatttgggcgtcagaggtattgcttaatgaacgtggagaaaaatgatctgtagttgtctggcttagaatctctccttttcttctgctttattcaaatgttttatctatgacttgaatggaaatatagattttcagaagataggaactgagtaaaactgtctttctstatacacacacagatagatttttgaaaggctggattcaagagtggaattgcacaagataatattcaacaaaatgtgcctctttgcatgctataagaaagagaatgtggcttagcagtagctcatgtgaaaaggcttagtagtctgcatcaacaaaatatacaattgtgttgtgaggtctcctgtaatgctacttggatcatgggttataataatagaagtaaagtctgcaactgaggaggtgatcttccattctacagtgtacttctatcattaggaattttgacttcctagttttggacatcacattaagactctggaacaggctggaatggaggtgagaagctgtttaataaaaataacctaaaacattctcaaagaggaagatggaagaaatggagatgagtaatttcaggagtcacaagagagacagctttaa

SEQ ID NO: 313036 - DNA, 455 bp, Homo sapiens
tcaaataattttttctcttttaaagtcaagtaattgtatgaatatgtgttgtctgtggttatgctgaattgctattttcagatatgcattgtgttcctttgatatgtagttagtattttttaattacagggaaggttccttagattataatttattttgtattttttatgttccctttgtttgctttggtttcmttcttcagggatgcctattatctgtgtgctgtattttctttgtttattttcagtatttctctctttatctcatttttttgtctttcttcatttctgttttaaacattctccttattttcactttctcttgaagaattatctgttgtatttattcacccatgtgttctttcttgtttagttctcatttctgagatttttttatgtgtaatttttttcctgtgttctgtgacctgatttctaagttttttgtagttttcattt

SEQ ID NO: 313037 - DNA, 612 bp, Homo sapiens
tgtcccctgcccagactgcccccgacaccatcccaccccgttcttttccaagtactgggaagttaatccttgttcatgctctccaaacactgaaatagtcccccatgcattctccacacagctgtcagatcggagttaacagaaaagggagaacaacagcaaaagcaacaagggtgagaaaagcaagttacagagaagaggcagttggagaaagagtctccgctgtcccctctctccatactccacctctgtgatgtgagatggagttcacacctctctgccttctgtgcagaagccgggtacgcacccgagataaccccgcctggcaggatcatagcagagcgagccaaagtgaaacctgcattccctcggtcgagctacctttagaggctgcatggagtgctgcgagggttaagtgacaggtggtggccartgaatgtgaaatttaaggaaaacaacttcacaaaggcattttgaggtgatttaattaaaacattcagtcacaaagtcaacaacagaagcaacaaaaaattatgaggcgtgggcaccggagaaaagaaatgcatgggacgactggaaagtgcaggagttgatgagagagcacaaggaaga

SEQ ID NO: 313038 - DNA, 382 bp, Homo sapiens
gcaccaatgaattctcacaaccttatgccctggtccacccagagccctgatcctggagattagggatgttgtatggaggagcagaaayagcagcctgtaaggcagcatgagggagcttaaggctggagtcaaaggaagcttggaaacttgcaggggttactatggagaaaacaccattctgaatgaaaaccaaagagagtggctgacaggaaatgggtcagaaagttaaataacatgtttcagcacatttagacattcagcagagtaccatgaaacctcctgcttcccacaggttcttattttaatgaacccagtcaatcaagacttttccttgaggagtgctcagcgtgagtcggtggacctccgagagctgcctgctcat

SEQ ID NO: 313039 - DNA, 590 bp, Homo sapiens
gaaggaacaaagtcacatcttacatggtagccggcaagagagcatgtgcaggggaactgctctttataaaaccatcagatctcatgagacttattcattattatgaaaacagcatgggaaaaaccagcccccatgagtcaattacttcccaccaggtcccttccatgacacatgggtgccatgtccagctccgttttctcactatgtccaggacactttggcttcagctagagtgtcttccttgagcaccaaccaggtattgatctcccagttctcctgtcccttaacttgtgaatatcaggaactcacatcccagccacaaaactgtcttcacattgcttcttctggagcacacacagaagttccaccaagagtgcacagtattgctagggccagctttggtactatgtgggtagagggtggctttgacctgtttcttccttccttcatggactcttcctgacctctggctgtccaacactccaaagggcttgcacacttgctattgtacctgagtatttctagctttgctatatccrttaagtattttctttccaatcctcttggctccctttatccccctattaaaa

SEQ ID NO: 313040 - DNA, 486 bp, Homo sapiens
cagcctaccaagagtgagccatgaagaaatagaacacctccaaaaaccaataacaagtaatgagactgaagctgtaataaaaaaatctcttatcaaaggaaagcccaggacttggtggcttcacttctgagttctactgaacatttaaagaactaataccaattctactgaaactcttcaaaaaaattgaagaagagggaatatttccaaactcattccacaaggccagcattactctaataccaaaataagacaaagacacaacaaaaaagaaaactacaggccagtatcrtagatgaacatagaggccaaaattcccaacaaaatactagcaaattgaattcaacaatagattaaaaaaatcatttaccatgatcaagtggaattcatctcagggacgcaaggatggttcaatatatgcaaatcaataaatgtgatatatcatattgacagaaccaagaacaaaacccatatgattatttcaat

SEQ ID NO: 313041 - DNA, 525 bp, Homo sapiens
tacactcaagtagatgtttgaaattctacatttagttgtgggtttcttaaatatgcagcgaataatttaagtgaagcgaaatatgcagcraataatatgcagcgaaatatgcagcgaataatttaagatactgcacaaataactggagagacaataatttcagttgcaatgctggtgacaaagtattatgaaaatgaaacgcattgtgttcagaataatactactccaaagcatgcaaaatcagtccacctggtaaactcaatccttcaggaatacaaacagaatgtacttctgaaagttgagaaaagtaactttctgcttttgagcccatctttatttttggtgacaggagtaacaaaatttataccttttgcataagcaacttgtacttttgcatattcgtgacaacatatggattaaatgttttaaaatgagtctagtctaatttttctaataaaaaagtaattgctagctctaaaaaaaaatgggaagctataatggaagaagcctgggtaatggagagtt

SEQ ID NO: 313042 - DNA, 608 bp, Homo sapiens
tcttcaaaccattctctgcaatgcagataggataatctttaccaaatgtatatctaatcatgccactcacctgataagccacattgcagggtttagagaacttgtagtatgttctcaactctgcaacagggctcagcgggcctttaggatcagataaaaagggcaacacagcttacctagcatttgttttctkgatgtagtcctgtttttggcctcatgccttgcccttctcctgcttttttttgtttttctttttttatgtgacagccatatttctcctctttcaattcccagatgtgccatgctcttttcctctgggtctttgtgaattatttttctctatgcagaacactttgttttgcactcttgcctttacctggctaacttcagctcatccttcatatatctgtgtaaatatcattctctcagcttggttctatctgtcctttagacaagattaattattgcccttaatctctctgtacttcccttatcataacatcagtcattcttattgttatcatttgtttaattatcggtaagttctataaagacagggatgactagcttgtattcctcaagcctatctggcaataagcaggtactca

SEQ ID NO: 313043 - DNA, 544 bp, Homo sapiens
aaattatattgtactcataggaggaaattttatgaaaccattacaaatcatgtttctgaagaatatttaatgactttggaaaatgcccacagtatagtgtaaagtatgaaatgtaagatgtaaaattggattcacataatgtgatcccattatcttatttacatatagagagattggaaggaaatacaccagaatattaacagttgtttatggttcatttttattactctctttataggttttgaacatttaatatktataaatgtgcacatatcatgttcataatgacaaaaattccataaacattgtcgatatttttgtagttttgacccttttccagagaccccaaagggtgatatcatgttaattttttattttgctgaggcatatattcatgacaggccctgggaggctattgggagggaacacatttctaaactctgccacccttcacacacaggccaggcattttatggagctcagccctgtaaggaaattagagttaggtggagctggggcaaaatctgtcacctgatatagatgc

SEQ ID NO: 313044 - DNA, 544 bp, Homo sapiens
aaattatattgtactcataggaggaaattttatgaaaccattacaaatcatgtttctgaagaatatttaatgactttggaaaatgcccacagtatagtgtaaagtatgaaatgtaagatgtaaaattggattcacataatgtgatcccattatcttatttacatatagagagattggaaggaaatacaccagaatattaacagttgtttatggttcatttttattactctctttataggttttgaacatttaatatgtataaatgtgcacatatcatgttcataatgacaaaaattccataaacattgtcgatatttttgtagttttgacccttttccagagaccccaaagggtgatatcatgttaattttttattttgctgaggcatatattcatgacaggccctgggaggctaytgggagggaacacatttctaaactctgccacccttcacacacaggccaggcattttatggagctcagccctgtaaggaaattagagttaggtggagctggggcaaaatctgtcacctgatatagatgc

SEQ ID NO: 313045 - DNA, 442 bp, Homo sapiens
aattatttattaaatatctgtttaactcaccctgcmcccccttaaaaaaaacattttattaaaagataaaacagagatacagaaaactccagaaacacacatagggatgaatggaggcaaacaccttggtgatcaccagccggggcaagaaactgaactttgctacccacctctgaaccctgttcatgtgccctctatcaatcagaacccctcccttctcctacaagcaaccactcttttgatttttggatatgtcattttagttttttcccttgcatttcattttagttttattaccccaatgtacatttctgaatcctgtagtttagagttgttccttataaaaatatatgtcttttaagtattttttgatctacaggatctccctctgtcttttttacttgcaatttacttgctatagatcttggctgtttgtcttgtg

SEQ ID NO: 313046 - DNA, 601 bp, Homo sapiens
tatctatgtatccaccacccagcttaaggaagagtgttgccagcatagtgtgtggataccctctccttttccggrgtcctgataaggtcactctttcaagtttgcctgacaccagaaacaggtacaacttagctgctcagggactatatgagtccttctgctaaactactgggtttcagaactcttttttgttttttttgtggagcggagcccaggttggagtgcagtggggcccggagtgcagtggggcgatcttggcttactgtaacctccgtctcctggattcaagcgattctcctgcctcagactcccgagtagttgggattaccagcatgcaccaccatgcccggtgtatttgtatttgtagtagagacggggggtctcactatgttgtccaggctggtcttgaactcctgacctcaagtgatccgcctgcctcagcctcccagagtgttgggactacaggcctgagccactgcgcctggccgggtttcagaactcttaaagtcacctacattcatactaaaaaggagatgggacccttgaacaaacaacagagttttagtggcaccgctctgcagcgggctgtcttctgacgagt

SEQ ID NO: 313047 - DNA, 601 bp, Homo sapiens
tatctatgtatccaccacccagcttaaggaagagtgttgccagcatagtgtgtggataccctctccttttccggagtcctgataaggtcactctttcaagtttgcctgacaccagaaacaggtacaacttagctgctcagggactatatgagtccttctgctaaactactgggtttcagaactcttttttgttttttttgtggagcggagcccaggttggagtgcagtggggcccggagtgcagtggggcgatcttggcttactgtaacctccgtctcctggattcaagcgattctcctgcctcagactcccgagtagttgggattaccagcatgcaccaccatgcccggygtatttgtatttgtagtagagacggggggtctcactatgttgtccaggctggtcttgaactcctgacctcaagtgatccgcctgcctcagcctcccagagtgttgggactacaggcctgagccactgcgcctggccgggtttcagaactcttaaagtcacctacattcatactaaaaaggagatgggacccttgaacaaacaacagagttttagtggcaccgctctgcagcgggctgtcttctgacgagt

SEQ ID NO: 313048 - DNA, 601 bp, Homo sapiens
tatctatgtatccaccacccagcttaaggaagagtgttgccagcatagtgtgtggataccctctccttttccggagtcctgataaggtcactctttcaagtttgcctgacaccagaaacaggtacaacttagctgctcagggactatatgagtccttctgctaaactactgggtttcagaactcttttttgttttttttgtggagcggagcccaggttggagtgcagtggggcccggagtgcagtggggcgatcttggcttactgtaacctccgtctcctggattcaagcgattctcctgcctcagactcccgagtagttgggattaccagcatgcaccaccatgcccggtgtatttgtatttgtagtagagacggggggtctcactatgttgtccaggctggtcttgaactcctgacctcaagtgatccgcctgcctcagcctcccagagtgttgggactacaggcctgagccactgcgcctggccgggtttcagaactcttaaagtcacctacrttcatactaaaaaggagatgggacccttgaacaaacaacagagttttagtggcaccgctctgcagcgggctgtcttctgacgagt

SEQ ID NO: 313049 - DNA, 547 bp, Homo sapiens
ttcatcatccacctacctctcaccccctcatctctccaggtctccattgtctagcattccacactctatgtccatgtgtatacattatttagctcccacttataagtgatagtttgtggtacttgtctttctgtgtctgagttgtttcactgaagataatggccttcaattccatccatgttgttgcaaaatacatgatttcactcttttttatggctgactgctatactattgtgtatactttctaaactttcaaagtgaaaatgggttctcctatttcaagtgatgattctccttccttccttcctcattcttccttccgtcctcattcttccttcctcattcttctttcttccttctttcctccctccctccctcttcttctcktttcctttccttttttctttcttcctttcccttcctttccttctgcttaatgtctctccactatattttgtgaagaacaattactttatctagttcctttgtgttacagtcgcactggagactactgataaaactctctacttggttaaaagggttcaat

SEQ ID NO: 313050 - DNA, 524 bp, Homo sapiens
atgtgatatttgtctttttctgtccggcttctttcacttaagataatgacctccagttccatccatgttgctgcagtgatgtgatttcattcctttactaccttttctttatccattcaatactgatgaacacttcagctttccaagtggctgggattgctggcgtgagccactgtgtccagacgaagtcctccaccattattgtgttgcaatccatctctctctttagatctaagaatatttgctttatgaactgggtattgcagtgttggatgcatatatatttaaaattgtgtatcctcttgctggattgatttttwaaaattattacataatgatcttttttcttttcctacttttcttgacctaaagtctgttttatctaagtatagtgactcctgcccactttttgcttctgatagtgtagaatatctttttccatttctttcctttcaacttacatgactttactcataaggtgagtttcttgtaaacagtacatagttggatcattttttaaaatc

SEQ ID NO: 313051 - DNA, 610 bp, Homo sapiens
ttttcttttcctttcctcatttttgcctctttattgcctccctgtgggttactgaaacatattttagaattttcktttgatttatttaaagtgcttttgagtatatatctttgtgtaatttgtgtgtgtgtgtgtggttactctagatattacataacttatcacagtctactggtattgacattttaccagtttgcatgaagtatagaaaccttacttcccttttaactttccttttatccttccacatttctaatataatcatcttaaacatttcctctatgtacattgaaaactaaaaatgttacaagtctggctttaaacatcaaacttaatttagaaaacttagaggagccacgatccactgtatttactcatatttttattctgtccattgttttttcttcattctttcttaggaaattacattagctattcttttaaggtagaactactagtgaaaacttcttagtttcccttcttttaagaatgtcttaatttccctttcattctgaatgacatttttgctggatataagattctgggttgacagcaattttctttatgcacatgaaaaatgttttatcatttctttctgcctctaggtttt

SEQ ID NO: 313052 - DNA, 610 bp, Homo sapiens
ttttcttttcctttcctcatttttgcctctttattgcctccctgtgggttactgaaacatattttagaattttcttttgatttatttaaagtgcttttgagtatatatctttgtgtaatttgtgtgtgtgtgtgtggttactctagatattacataacttatcacagtctactggtattgacattttaccagtttgcatgaagtatagaaaccttacttcccttttaactttccttttatccttccacatttctaatataatcatcttaaacatttcctctatgtacattgaaaactaaaaatgttrcaagtctggctttaaacatcaaacttaatttagaaaacttagaggagccacgatccactgtatttactcatatttttattctgtccattgttttttcttcattctttcttaggaaattacattagctattcttttaaggtagaactactagtgaaaacttcttagtttcccttcttttaagaatgtcttaatttccctttcattctgaatgacatttttgctggatataagattctgggttgacagcaattttctttatgcacatgaaaaatgttttatcatttctttctgcctctaggtttt

SEQ ID NO: 313053 - DNA, 610 bp, Homo sapiens
ttttcttttcctttcctcatttttgcctctttattgcctccctgtgggttactgaaacatattttagaattttcttttgatttatttaaagtgcttttgagtatatatctttgtgtaatttgtgtgtgtgtgtgtggttactctagatattacataacttatcacagtctactggtattgacattttaccagtttgcatgaagtatagaaaccttacttcccttttaactttccttttatccttccacatttctaatataatcatcttaaacatttcctctatgtacattgaaaactaaaaatgttayaagtctggctttaaacatcaaacttaatttagaaaacttagaggagccacgatccactgtatttactcatatttttattctgtccattgttttttcttcattctttcttaggaaattacattagctattcttttaaggtagaactactagtgaaaacttcttagtttcccttcttttaagaatgtcttaatttccctttcattctgaatgacatttttgctggatataagattctgggttgacagcaattttctttatgcacatgaaaaatgttttatcatttctttctgcctctaggtttt

SEQ ID NO: 313054 - DNA, 610 bp, Homo sapiens
ttttcttttcctttcctcatttttgcctctttattgcctccctgtgggttactgaaacatattttagaattttcttttgatttatttaaagtgcttttgagtatatatctttgtgtaatttgtgtgtgtgtgtgtggttactctagatattacataacttatcacagtctactggtattgacattttaccagtttgcatgaagtatagaaaccttacttcccttttaactttccttttatccttccacatttctaatataatcatcttaaacatttcctctatgtacattgaaaactaaaaatgttacaagtctggctttaaacatcaaacttaatttagaaaacttagaggagccamgatccactgtatttactcatatttttattctgtccattgttttttcttcattctttcttaggaaattacattagctattcttttaaggtagaactactagtgaaaacttcttagtttcccttcttttaagaatgtcttaatttccctttcattctgaatgacatttttgctggatataagattctgggttgacagcaattttctttatgcacatgaaaaatgttttatcatttctttctgcctctaggtttt

SEQ ID NO: 313055 - DNA, 586 bp, Homo sapiens
ttattataatgtgtcaaggccaggtgtcttttgttatcaccattattttaaagtttgttattggtggctttgtgtgggctggagacctaaattccatgcaaaaacatgcacttagtttctaaatggttgactttcaaacaacagagtgatcccacaaccttgtaagttggagaaaactctatactctaccaggtgctcagaggcataaataaattgtaatttgaggcaggtaggccaattcttttcatatgaagttagacagttacaaatgcaagatgatacctaggacatatggactcaatgaaaggtaaggctggggtatcaataaaaagacaagcgtttctatttctcaactcaactcttcaccatacacacttttaaatggaaactaaaaatattaaggcaaagagggatgattaattcttcaaggtgaggagtttgttttattattttacaaattgaatcctaggccttttttttctgtttaagatattacaattgatctctatgtrcaatatatctaggactactgccaatattcagggccactgttgattgtagtactgataggcaaagaaccagctgc

SEQ ID NO: 313056 - DNA, 238 bp, Homo sapiens
tgtgtgcatatgtggtatgtgtgtatcatattttggtgttyggttttcacatataattaaaaaaaattcaggtataaacagaatacataacaccattattttagtttgatactataatcaaagttcctacagaaaaaacaaaacagaaaggtatataaactgctaaaaatgaattggcctggcagctagcataattttatattttattaataagggggaaatgttaaacttttcgtaa

SEQ ID NO: 313057 - DNA, 544 bp, Homo sapiens
agtgttcaatatttcccacagatgctttttaccttgctctcaacagatttgtccttgtaaataatgaattctttaataataggagaatagaagaggtaaagtcattaaacaaaaattatcatttctcccactttatttcatttttatttttattatcattaaccacactttattgtatacctgaatttagaacatccagacagggatccaaatttctttggtttttgcccaaacggcaaatttctctttaatgcccagcttcatccttatcaggaaagtgtacataaaagagaaggaatgatgggaagccctaggaccttacatagtcttgagtagtcatgaaaggaaaacgccaccrttttttttttttttttggcacctagtaatttttcactgagggtgaagcaatgattcatttttggtaaagttgaaaaaaagggctattggtgaacacattgtatactcaggtaaatcttatttaagagaggatataaatggaatttgggaatctggaaattgattttctgacaattgtaggaattct

SEQ ID NO: 313058 - DNA, 617 bp, Homo sapiens
ttgcagtaagcagagatcgcaccactgcactccagcctgagcaacagagcgagactctccatctcaaaaacaaaacaccaaaaaaaaaaaaaaaaaaaatcaaaaaacaaaacaaaaccaaaaaacacctctttgcaatcccctttctttatcccactccccaaatattcctgcttctaagyttcagtcttggatgtcaacctgagctgtagttccttagtggaaagaaaagatgttctcccctcacactgctatgtgctgtgtctgcagcacaacaaaaccacccaaggccctcagtgggggtggtcctgggatatttaagccgtttatctacaatttaaatcctctgtgaaatgtaaatactcctagcgagggtgatagattgcctttttcatttctatttgcttttttatgtcctaatgtttttcgaggtttttaatttttgttttgtttctctttttgctatgtcatctcccactacctcatttcagtctctcatcacctttgtcttggacttctgcaaccatctcctgatggtgtttctgcttctaggagggccaaggtgatatctagcatttgaagctggccagttactgttcaaaaaccctttctccaca

SEQ ID NO: 313059 - DNA, 617 bp, Homo sapiens
ttgcagtaagcagagatcgcaccactgcactccagcctgagcaacagagcgagactctccatctcaaaaacaaaacaccaaaaaaaaaaaaaaaaaaaatcaaaaaacaaaacaaaaccaaaaaacacctctttgcaatcccctttctttatcccactccccaaatattcctgcttctaagtttcagtcttggatgtcaacctgagctgtagttccttagtggaaagaaaagatgttctcccctcacactgctatgtgctgtgtctgcagcacaacaaaaccacccaaggccctcagtgggggtggtcctgggatatttaagccgtttatckacaatttaaatcctctgtgaaatgtaaatactcctagcgagggtgatagattgcctttttcatttctatttgcttttttatgtcctaatgtttttcgaggtttttaatttttgttttgtttctctttttgctatgtcatctcccactacctcatttcagtctctcatcacctttgtcttggacttctgcaaccatctcctgatggtgtttctgcttctaggagggccaaggtgatatctagcatttgaagctggccagttactgttcaaaaaccctttctccaca

SEQ ID NO: 313060 - DNA, 593 bp, Homo sapiens
aattactcatttttcttaaatgtctagttaggacagttaaaccatcagttgaaaactaaaatgttgagacggaatagccccacagatcacttcccttatgagggaagggtcactacatcagccatctgagcccctcttggccaggcattgaggagtgagactctcaggctggatctatggctaagtacaaatggaagaaatatgtaaaggattgggggattcttgagttggttaactggaccagggtgctcaattatcccatgaaaataaggtcctgaggtagatataaggaggtgtacattgtatggaacataggataggaaagtcagataagagcaggcaaatagacctagccattgyctgggaccgatggctgccctttcccaaagtgttatactcagattaactggttctatctgtgaataacacattcacacaaattcagcattatttgattcagtgatccttgttttattgtatgtgcattccagagaatacatgagttacatataaaagatgacatatgtaggtccagacacacaaaaacacacatggacacacagacatatgaacatatgaattatatggaaata

SEQ ID NO: 313061 - DNA, 512 bp, Homo sapiens
ttccttccctcttttacctactgtcatggctggattggtgccaaatgggacaaactcagatccacccacattttgttccaagaggttgtatggtacaacctcttgcccactgtcgttgccattattttgtcagatgaacataaaatgaaaagtatcctaagtcactggtgaaaggcaaataaagtagaattagtgacaatccacaamtatttatagggctattacactcatttcttttccttgggattttttatgatttagaacatagagaaactcacaccgtcaattcacctagttcttatgcagatgaagagacattgacaaataactttaaaaaaaacatgagttaacagcttgagtactgaaatacggttcttcctcttatattacttgaagaaccatggttgtataaaaatcccagtgcaataaatgcaataaaatcatctttatttatcaaaataacatttattaccaagacatgaaaaatgaaaccgacaaattaagttacatat

SEQ ID NO: 313062 - DNA, 599 bp, Homo sapiens
caaaaacaaaaagattaaaaaaaattttcaactataacacaatccacaaataaggaactcaaatttagttataacaaaattatgttcactttctcaccaacttattaataaaataactgttttmagtgttttttttttccatttcaggctatattttacaagactcattataaaaacaatactagtatgttagagcacttactaagtgccaggtttgcacaaagtgctttacaaaaatcatcatgtagcctaagaaagtatgatttttatactctctaattcacaatgaggaaggaggctttgtgggattaagaaacctgttctaattaagaggcaagttagggtggagctctgatgcaagctcaagtaatccaattcagctcctggctccaaactatagcactttaataacatttttaaactgtaaatgctgtaaaagaagcaggaagtatttctatatcagtacaatgaaccaaaaagaaactatgagacacttcatttttactgatattgcttctgacaaatatcctaaaaatatagttagctctctagttaaagagaaccaggaatgttaatttccaggttttctgcttatatgg

SEQ ID NO: 313063 - DNA, 599 bp, Homo sapiens
caaaaacaaaaagattaaaaaaaattttcaactataacacaatccacaaataaggaactcaaatttagttataacaaaattatgttcactttctcaccaacttattaataaaataactgttttaagtgttttttttttccatttcaggctatattttacaagactcattataaaaacaatactagtatgttagagcacttactaagtgccaggtttgcacaaagtgctttacaaaaatcatcatgtagcctaagaaagtatratttttatactctctaattcacaatgaggaaggaggctttgtgggattaagaaacctgttctaattaagaggcaagttagggtggagctctgatgcaagctcaagtaatccaattcagctcctggctccaaactatagcactttaataacatttttaaactgtaaatgctgtaaaagaagcaggaagtatttctatatcagtacaatgaaccaaaaagaaactatgagacacttcatttttactgatattgcttctgacaaatatcctaaaaatatagttagctctctagttaaagagaaccaggaatgttaatttccaggttttctgcttatatgg

SEQ ID NO: 313064 - DNA, 594 bp, Homo sapiens
tgtattgcatgtccattatacttttttctatatacagcatctttttttgctctctgcttctgcctggatattttctgagagtcttcctgttcacctctcctgttttctgcttatctaaactgctattttatccagcactaaattcttaattttatagtttgtatttttcggttctagaatttccattagattcttttgatagattcttattattgggtgaagcactccctctttttatgtattttctcttcctctagtttctgaaatatattcatttcaaagtccctgtctagtaacttcagtatttggatcatctaaataactatttcttgtatgcgtgtttatgtgtgtgtgtccaaatgtcctatctcttagcatgcctagcagtgttttattgaaatctggatattctatgtatatattaaaaaaacaaaatataaaaagaaaacaaaaacctaggaggccccagatgatgttgtcttctacctgaggattcactttcttctggaaagaaaaggtaaatgtcttactaatctccatccagtcaggaactgagctaaccccaggctaagttkcagttttagcaagattggg

SEQ ID NO: 313065 - DNA, 384 bp, Homo sapiens
atgttgccaaatttttctcgagataaactgtggttgtggccttttaaatccatctagcagagtgtattagtccaatctcacactgctgtaaagatactacccgagactgggtaatttataaaggagagaggtttaattgactcacagttccccatggctgtggaggcctcaggaaagttacaattgtggcagaaggcgaaggggaaagcaagacaccttcttcacacgctggcaggagaaagaagagtacgtggaggaatttgccaaacacttataaaaccatcagatctcgtgakaattcactcgctatcacgagaacagcatgggggacccgcccccataatgcaatcgcttcccaacaggtgacttcctaaacacctgtgg

SEQ ID NO: 313066 - DNA, 579 bp, Homo sapiens
ttcataaaatttaaccttccttcatcataaaatctctcaataagctagatatagaaggaaagtacagcaacacaataaaggcacaactaatgtcagagcaaatgggggaaggctaaaagctttttctctaagaattggaacaagcaagacaaagatgcccactatgacaactctcagtcaacatagtactaaaagtcctaaccagaccaattagacaagagaaagaaataaagagcatctgcattggaaaagaggaagtcaaatcatctctgcttgctggcaacatgatcatatatagataaacctaaagactctccaaaaactctcagaactgccaaattaattcagtaaagttgcaggatacaaaatcaacatgaaaaaatcagtagcagttctacacataatgagctagctgaaaatraaccaggagggcaatcctatttataatcacttaaaataaaatacccaggaacaaatttaaccaaggagatgaaagacctctataaggaaaactataaaacatggatgaaataaattgaggggatacaaacaaatgaagagacatcctacgctcatgga

SEQ ID NO: 313067 - DNA, 525 bp, Homo sapiens
ctcactctctaaaactgtaagaaataaatgttgctctttatgaattaactagactaaggtattttgtagcagcccaaatgcactagacaattctaattctctactcctggctaatgcctccctatatattttccattcttccctagctgtacttctrgacaactgaggcaggaggactgcaggaaaaaaggaaaagtaggaaaggtgattcctgactcttgaccctcccacaaccagtcttgggtctctggaaacagaaaactgtttctctctatcaaaaaccctgtcatggacttcctatatagcacttatggttgctactttcttagctgttgttgttacagtatctgtaattactttcaaagttctttagcattatctagaaagcacagtcaagaagtggtcagtctactaattaagaaagtgtagcccagggtgtcaaataacattctatcagcaaggactactcactccagaggcagctatcacaggccttcctgttatccatatctccatcaataacag

SEQ ID NO: 313068 - DNA, 525 bp, Homo sapiens
ctcactctctaaaactgtaagaaataaatgttgctctttatgaattaactagactaaggtattttgtagcagcccaaatgcactagacaattctaattctctactcctggctaatgcctccctatatattttccattcttccctagctgtacttctggacaactgaggcaggaggactgcaggaaaaaaggaaaagtaggaaaggtgattcctgactcttgaccctcccacaaccagtcttgggtctctggaaacagaaaactgtttctctctatcaaaaaccctgtcatggacttcctatatagcacttatggttgctactttcttagctgttgttgttacagtatctgtaattactttcaaagttctttagcattatctagaaagcacagtcaagaagtggtcagtctactaattaagaaagtgtagcccagggtgtcaaataacattctatcagcaaggactacwcactccagaggcagctatcacaggccttcctgttatccatatctccatcaataacag

SEQ ID NO: 313069 - DNA, 596 bp, Homo sapiens
accttttggaagtgagagctaattttatttcttaaagcagtaggttaagagtatggactttggactttaaaacactaggtttgaatttgttattggaatgtaacctggggcctttcttcacttctatttccttatctgtaaaatgtaaataataacagttacttctcactcggactcctgtaggactaaaatgagataatgtatgaaaaagcacagttcctgtgcagagcaaagacttagtaagtgattataaatcataatcaggaatattgaattttcccttcctgtatgactgagtagctcccactaaatctcaccctccttctgataaaactgcaaattctggacaaaataaaacaccaatgacctaaactcactgaggagtgaacaaaagcagactgattctggagaagagttgacacttaaaaaaaggatatgagttaccagttttttaacagctttctgtctgagggtgggtcaaagttgacaccaagatgtcactataattctgaaaggaaatyctcagtttttcttgtataaagacccaaaggacagttagggcaagtgaaagggaaattctggagagctagagacag

SEQ ID NO: 313070 - DNA, 596 bp, Homo sapiens
accttttggaagtgagagctaattttatttcttaaagcagtaggttaagagtatggactttggactttaaaacactaggtttgaatttgttattggaatgtaacctggggcctttcttcacttctatttccttatctgtaaaatgtaaataataacagttacttctcactcggactcctgtaggactaaaatgagataatgtatgaaaaagcacagttcctgtgcagagcaaagacttagtaagtgattataaatcataatcaggaatattgaattttcccttcctgtatgactgagtagctcccactaaatctcaccctccttctgataaaactgcaaattctggacaaaataaaacaccaatgacctaaactcactgaggagtgaacaaaagcagactgattctggagaagagttgacacttaaaaaaaggatatgagttaccagttttttaacagctttctgtctgagggtgggtcaaagttgacaccaagatgtcactataattctgaaaggaaattctcagtttttctkgtataaagacccaaaggacagttagggcaagtgaaagggaaattctggagagctagagacag

SEQ ID NO: 313071 - DNA, 567 bp, Homo sapiens
tcttcattggacatctccaatgttacctagggaagtgatactgcaacaaaaaatacttctcattgataggaacagaaccagttatgattcttgaagccttaatattattgaggcaagcagtctttaaacagctactttctgttgtcagtctgctattgatggcttactagactttgaaagttttacatagatgatctctttttttcttttttgccttttaatagttgagacagggtctcactttgttgcccgggctggagtgcagtgacataatcatagctcactgcagcctctacctgyccagctcaagcaatcctcccacctcagcctcctgagtagctgggattacagaaatttgccacaaatccaggctaattttaaatttttttttgtagagatgaggtccccgtatgttgcccaggctggtcttgaactcctggccacaagcaatccttctagctcagcctcccaaaagtgctgagattatgggtatgagcccctgcgcccagcccataatctcttttaaatgcccagtacaaccctatgagcttcctgataaaattttcc

SEQ ID NO: 313072 - DNA, 485 bp, Homo sapiens
ggtatttttgtttagagatttaaaacctgacttttgatggagtaccatattgaaaaacatctgaaaaatttaaaaattgctttcttatattattttattttgagatggagttttactcctgttgcccaggctggagtgcaatggcgtgatctcggctcactgtaacttctgcctcccaggttcaagcgattctcctgcctcagcctcctgagtagctgggactatgggtgtgtgtcaccacacccagctaattttttttctttttttcttttttagtagagayggggtttcaccgtgttggccaggctggtctcgaactcctgacctaaggtgatccacccaccttggcctcccaaagtgctgggattacaggcataagccactgtgccaagcgaaaattgctttctagaaattgttttagtggcagaatagtcatttgctcttatgttgtcttcgagaaaaaataaaatctgtcattgatttgc

SEQ ID NO: 313073 - DNA, 601 bp, Homo sapiens
aacagaaacggagccgttctaagtcttaggaggcttgagttagcatagtgcctgataacattgcagccattcaatacatgtcacttgtttcctctctttttttcttaatattaataactagatagtcactttgatgtactgtttaggtcttctatctttcacttatctgcacaatgaaaattagacagaaagatcattcctgatctatgtatatatgatctttcagtcttattttaatttcgcatatatatgtatatatatatatatrtatatatatatatatatatttccatagacctgttatgcatattattcatggtgctttttaagttggtacgtcctaagacaagagtcccttggactaccagttttcaacatacatttcttaggtaccattctgctttgggggaaactgagtgaacagggatcagtttcctccttgccaacactgtgcccactgtacatattatggttctttataaaattttgattggaaaaagtttccaagctcttacaaataagtgtgcaagaccagcctgcaaaacatagtaagactctgtctctacaaaaaaataaaatttaaaaaattagccaggcatgg

SEQ ID NO: 313074 - DNA, 567 bp, Homo sapiens
tacatcgtttttttcaggctcttgtctatcttctagaatagttgtaatattctttaaaatagaaaatataattattgggataattaggatataattatttgggtaataaaagtattrgaaggagattggtatcaaataactgttcatcatcctattgatatttaatagtttatttttataatcattatggaaatagtgaatactttttaaagtaatgtaattatttataataataagagaattgtcaagttgtcattgcttccctaacacagtatacaaaggaagaagaaaacgctgatccaattctatcttacattgtgactttagtattccaactagattgtaaaagacaaaaggttaaagattatctactaattcagtttcacttttgctagagtttaatatcacacatgtaatgaataaagtaatagaaaggaaggacattaggggaagtctgggggaaaataatatcttagaaattacttattaattcatgttcaattaaatttgtttttcactgatgataaaatcaagttgccttcttgagaagtcttacaaatttgtttt

SEQ ID NO: 313075 - DNA, 631 bp, Homo sapiens
tattagtcctatttgataaagagagaaatggtttcctccagtgcccatgttgttatgggcactaaatgctttatacatgtatcctggtaataaatactccataatgaggaaatgagggacttacaaagttaatacattactaaacttagtgttttaatataaagtccattaagctgcctgtacatgcaagagaggtgcttcttaaacttgcctgatgataacagaaacttaagatgcttattaaaagtatagaaacttgggtatcacctaggcctcaatctccaagataagaaacttaaaatccacattttaataagctcatatgtcttgtaatcagactattttagaagcatcaagttatagcaaagtttggggttctgaaaatgttgtatttaagaaagacgtaaagaggaaggatcctttcatttccctttaaccaaccttaaccaaattaacttggctgctgcatctttcggaggtggtggtgggtagagcatatcaactaaggtttctatatggtttttagtttctgcctatggcaacctaaaaycaccaagaaatccagaaaacatagaacttctgcttgctgccttcatttgcacaggcaccaacaggaaacagcagtccccag

SEQ ID NO: 313076 - DNA, 561 bp, Homo sapiens
tggccttatggtattgtaacaggatttcttagttttgctttctrtgggcactgtttcttccttgcttgattcttttccattcttccacctggacccataggtaggagatttgggacatggattctagtggaaagggacggaggaggagagctgagaagtacagttaattaggattataccttaaaactattatacttcaaaagctactagaaaccctaacgtttcaagagaataggaaacgtgtatcttgatcaatatgtaaccccagttcctgtggcttttacccgagtgagacatgcatctatcgcatgctggctttttgcagtagaaggccatgatctgtgacccaacagtttaaaaggatgtctctgcctttagtgttgaggatagaaggcagcagaaactgaagcaaggagaacaaccaggagatgtagcattcctggtgaaagctgatgctggcttgtgccagagtttcactggtggagaggaggagaaatggtcagcttctgaatatattttgaaggtatgaacacaaggatttcctaatggattcggtcaggg

SEQ ID NO: 313077 - DNA, 561 bp, Homo sapiens
tggccttatggtattgtaacaggatttcttagttttgctttctgtgggcactgtttcttccttgcttgattcttttccattyttccacctggacccataggtaggagatttgggacatggattctagtggaaagggacggaggaggagagctgagaagtacagttaattaggattataccttaaaactattatacttcaaaagctactagaaaccctaacgtttcaagagaataggaaacgtgtatcttgatcaatatgtaaccccagttcctgtggcttttacccgagtgagacatgcatctatcgcatgctggctttttgcagtagaaggccatgatctgtgacccaacagtttaaaaggatgtctctgcctttagtgttgaggatagaaggcagcagaaactgaagcaaggagaacaaccaggagatgtagcattcctggtgaaagctgatgctggcttgtgccagagtttcactggtggagaggaggagaaatggtcagcttctgaatatattttgaaggtatgaacacaaggatttcctaatggattcggtcaggg

SEQ ID NO: 313078 - DNA, 578 bp, Homo sapiens
tgtattctgcaaaggctgaaaaatataagtatggtaagtgaaattatattatttatttatttctagaatgtatttaaaattatatgatgcatgacaacttgtatgtatggctgagttggatgagatcttgcaaagctatcaaccatccaaactgccattgttgtaaatcattcagctatttgctytgggagaaactaagttgtagtaataggatttatatcactgaagtactactgatggataatgaacgaaaagagttttctatttaggattagggaaaacattactatttcaggatgggcagtacttaaaaactaaccaactttcaataaaaaactgtggtttttcggtgtgtgtatgtgtgtacacttgtatgttttcttaattttgaaaactgataaaaatcaaaatgaattttttgcttaattctgaatatgcatgtacaaaccacaagtgacctttcagctttaaatttatcatgagataagagagaggaaggttttcttccattatgtcaaaatccaccaatttaacttgttcaaagaataataatcacgttagacactcctgagttccag

SEQ ID NO: 313079 - DNA, 611 bp, Homo sapiens
tgtaaacacactttctgcacactggtttgctcttctggttggcatgcaaatgcacatgtatgtgtcgcttgttcctctttttggttgtgaagttttttgggagtgaggagagtcagaggataattgcttcttgcttaccatccacccagaggaaagaagttttgaaaagttaaccatgcctctcctccccttttctgtttaatttgcacagatcattagcaagtgaaaggtactctgcaaacagaacaaaataggtttccagatagacaaatagtgatttacaaagactagaaaaaaacatgcttaaactaggctattcattgtagaaaatctcattacaaatgaatcaataagcatcagcaatacggggacatgtgtgattattttggttagggtcaaattttgttctagtgggattctggtgtttgacctgtggtgtgtcaacatgtcttactaaaggatagtaataatattctaaaactattgaaaaataattatacttatatttatatgaaggttaataaaaatcttctatggaaatttgaacsccttatttcctctgggattgagctatcagatgactcaagaatatttattatttataatgcttt

SEQ ID NO: 313080 - DNA, 545 bp, Homo sapiens
tagtgtaatagaaagctgtaaaaaagtagagcctcaaggaatgttcttatttttatgtgctcatatattcacattatttaagaagttttgtattatttattgtctttacagtgatagttataatgcaattaggagaaagagaaaaagtttctgactttctgagtcacttctcttaataccaactaaatacctyttaaaatactcaaattttgctaagcattagaggatattaggtcctgagtttagaataaaaacaatatttttctactgcccaataatgggcaatagaaagctctgaaataagagtgaagttatggttttgaaaccaatcctaaaacaagaaaactcccttcccagtcattggctacccagcaccaaattctaatattcccattggtctgaaatgttcaaatgctaacttggtctaaaatgaatcattacttgtttgaccaacttaaacattttctaaaaagcatcatagtattccagtgttttaaaaatttgcttgaacataagaatcaccaagagtgataattataaatata

SEQ ID NO: 313081 - DNA, 615 bp, Homo sapiens
tatggttttgaaaccaatcctaaaacaagaaaactcccttcccagtcattggctacccagmaccaaattctaatattcccattggtctgaaatgttcaaatgctaacttggtctaaaatgaatcattacttgtttgaccaacttaaacattttctaaaaagcatcatagtattccagtgttttaaaaatttgcttgaacataagaatcaccaagagtgataattataaatatagatttccaagacttactcttgaggatttggattcaaaggcctgggatggggcttaaacattatatttctaaccataaatgccagtgatgacatctatgattaagccagttgctatactgtgttgatatgattcagaaaggattcaagaatcttctctagtgagcttgttttctctctcttcctttttccttccaattcttactaatttttgtggcaatcaacaagaattgactgagtttcctatgtatagcaggcactgtagtaggcactgggggaaattgacaatgagttggtccccaattcttcctctcagatggctcattatttggaataatagaaatctataacacaataaaacacttgtgaatgaataatgacaata

SEQ ID NO: 313082 - DNA, 578 bp, Homo sapiens
tgtattctgcaaaggctgaaaaatataagtatggtaagtgaaattatattatttatttatttctagaatgtatttaaaattatatgatgcatgacaacttgtatgtatggctgagttggatgagatcttgcaaagctatcaaccatccaaactgccattgttgtaaatcattcagctatttgctctgggagaaactaagttgtagtaataggatttatatcactgaagtactactgatggataatgaacgaaaagagttttctatttaggattaggsaaaacattactatttcaggatgggcagtacttaaaaactaaccaactttcaataaaaaactgtggtttttcggtgtgtgtatgtgtgtacacttgtatgttttcttaattttgaaaactgataaaaatcaaaatgaattttttgcttaattctgaatatgcatgtacaaaccacaagtgacctttcagctttaaatttatcatgagataagagagaggaaggttttcttccattatgtcaaaatccaccaatttaacttgttcaaagaataataatcacgttagacactcctgagttccag

SEQ ID NO: 313083 - DNA, 483 bp, Homo sapiens
attaacctatttcttgttccatggaaaatgagatgctttttccagattcttcaagggctggcaagatggaagaagcaacagaattcraagagaaaaataaaaactgcaaaggtagagtgtggctactaagtttcagccaccttctaggaaaaaaacaaacaaacatatattggtttttagtttctgacatcctatctttttctgtttcataacatgagaaagggatgatttcctgtgacctactatgaatttaatacagaattaacatcagtaatgataacgctaatcctttggttttaattttcaagatttgtactggaagatattagtgcttacactgagaaattcacgttagtctagaatagatagcagccttgtcaggtcaactgtattttaagctgtgaattagtttctgagttaacattgacttaaaaattggactgaaaaagggtataggacataaaataaaatcaattattgacc

SEQ ID NO: 313084 - DNA, 483 bp, Homo sapiens
attaacctatttcttgttccatggaaaatgagatgctttttccagattcttcaagggctggcaagatggaagaagcaacagaattcaaagagaaaaataaaaactgcaaaggtagagtgtggctactaagtttcagccaccttctaggaaaaaaacaaacaaacatatattggtttttagtttctgacatcctatctttttctgtttcataacatgagaaagggatgatttcctgtgamctactatgaatttaatacagaattaacatcagtaatgataacgctaatcctttggttttaattttcaagatttgtactggaagatattagtgcttacactgagaaattcacgttagtctagaatagatagcagccttgtcaggtcaactgtattttaagctgtgaattagtttctgagttaacattgacttaaaaattggactgaaaaagggtataggacataaaataaaatcaattattgacc

SEQ ID NO: 313085 - DNA, 606 bp, Homo sapiens
agggctggcaagatggaagaagcaacagaattcaaagagaaaaataaaaactgcaaaggtagagtgtggctactaagtttcagccaccttctaggaaaaaaacaaacaaacatatattggtttttagtttctgacatcctatctttttctgtttcataacatgagaaagggatgatttcctgtgacctactatgaatttaatacagaattaacatcagtaatgataacgctaatcctttggttttaattttcaagatttgtactggaagatattagtgcttacactgagaaattcacgttagtctagaatagatagcagccttgtcaggtcaactgtattttaagctgtgaattagtttctgagttaacattgacttaaaaattggactgaaaaagggtataggacataaaataaaatcaattattgaccagctgctgattcaccayttggccttagagaaaattcaaattcttgataggagaaagaaaaaatagttcacaagacaactatggatgagttccctgttagataaactgtatttaaaaaccatgctatctgaatctgctcattatcttgaaatgtaaccaattcattgttaagacata

SEQ ID NO: 313086 - DNA, 606 bp, Homo sapiens
agggctggcaagatggaagaagcaacagaattcaaagagaaaaataaaaactgcaaaggtagagtgtggctactaagtttcagccaccttctaggaaaaaaacaaacaaacatatattggtttttagtttctgacatcctatctttttctgtttcataacatgagaaagggatgatttcctgtgacctactatgaatttaatacagaattaacatcagtaatgataacgctaatcctttggttttaattttcaagatttgtactggaagatattagtgcttacactgagaaattcacgttagtctagaatagatagcagccttgtcaggtcaactgtattttaagctgtgaattagtttctgagttaacattgacttaaaaattggactgaaaaagggtataggacataaaataaaatcaattattgaccagctgctgattcaccatttggccttagagaaaattcaaattcttgayaggagaaagaaaaaatagttcacaagacaactatggatgagttccctgttagataaactgtatttaaaaaccatgctatctgaatctgctcattatcttgaaatgtaaccaattcattgttaagacata

SEQ ID NO: 313087 - DNA, 491 bp, Homo sapiens
tttggaacaagaacttcaaggcaggctcatcattataccattacctatccccacccacaaaggaccacactgattgagaaatgacaaggaggagaaatgggctttgctctgtgctattttttttttctttctttttttgagatagagtttttgctctgttgccaaggctgtagtacaatggtacgatctcggctcactctaacctctgcctcctgggttcaagcgattcttctgcctcagcctcctgggtagctgggattacaggtacccaccaccacaccaggctaatttttgtaattttggtagagatgtagtagagatgaggtttcaccattgtgggccaggctggtcttgaactcttgaccctaaggggttccacctgcctccgcctcccaaagggctaggattacaggcwtgagccattgcacccggcctactctgtgctatttttagatttttatttaatttcctaaatagctaatacatttata

SEQ ID NO: 313088 - DNA, 511 bp, Homo sapiens
catattaacagaaggtaaagttcacaaatagtaaaatatgtcattgaactgcatttgggttttcagaaatagatcacacacctgacaaacacacaagacataatgttcagcattctaattcatgtttggcttggcatatctcatttggggcagaacaagatgccctaccacaaatggaagtatctcattactcaggaaataagacatgtctgcaccaaagacttgacaaatcccattaactgtataagaagaaggatgattttttttttcccttaaggaaaggcagaaaggkcagggatctgtggtagaaaatatgtgtgtagatacattaatgcttgtgtcattttaaaaatatatgtgtaaaattataccagaatgcatgactctcttacagaagtacttctccttcaaaaatatggtgtcatgctctattcacagctggggtcagcaagaatgagaccagcgagtgttttctaggaattaaataagaccattcagttttttgaaggct

SEQ ID NO: 313089 - DNA, 585 bp, Homo sapiens
gtctggttgtgattttatattgcatayataaaatacagtcatatgttctgctcatgaaattgaccctacttattataagaaattagacatgacagcttctcatggatgctttatacaaagagagtctgagaagtctgaggaagattctaatgacatgagcaaaatgtgtccaactccagctctgattccaaattctatttgttattgaaatcctctgggatccagtaaattttatgttgatgttcaaaataagtcaaacacacttgaaatgtttgtcagtaaaatcttttggtatacaagtgaccatgtcagaatgtctagcatcctgtaagccaagtagtgatccataaatatttgcataaaccttgatgggaatcaggttccaaataatagggtctttaaacatcaatcatatgacaatgcgaagggattgttattacaccactgagtgtgtggtgaataaaatctaggagtgagaaaagacagccatcccctatttaatttatcattaagcaacctaaagacttaaggaatagacaatctgcaacctcacagtactggagtatgattcagcaaaactcctac

SEQ ID NO: 313090 - DNA, 584 bp, Homo sapiens
ctatttaaccaccatctccatctcctattttgtaactgtaactggttttaattttcttcaaaccaattgttacaatctaataaattatatctctttgtataacagttactttttgtaataccctatgtgaacttcatgaaactttgtttggctcagtgctatgtctgtagcatgtagaacaatccttgtggatagcaggtgttcaacataaatgtgttgcgaaagtargagaatgagagattcctgcttcagtttgagcctacagcccttgtccccatgggggaaaaatgggatacaaacaaatgatagcatatagggatttctgatcctttgatcttattgcaaaacaaacaaacaaaaagacatggacattattctaggaacattagcatccccagatagcccttgtccatcactatataaagtattgattgtttcccacccagtctcaggaaacaactctcgaatcgcctgctcaagttaccctggaacaatgcctctttccttcctacatagggagcccttgagaagcctctatgtttaccaggaggctccatcccactgtagtgaccaataaatagcaa

SEQ ID NO: 313091 - DNA, 587 bp, Homo sapiens
tttccagtaggcagatatgagtctaaagctaagagaataagaattaacttcacaggcagcagaattaataaggtaaaatctttgagcagactacagaaataaaagtgactttaaacattccaattggaatctcattttttgtacagtgggcgtgagccaatggccaaaatgctggctaggaaaaataatcgttttaggaggtctttaaaatatttccccaaatcaaatagccttctgactaggtgagatatcagtgattagagagagagaatgaaagagtcagagggtgcgggggagtgkgtaagagagagagagaaagagggattctcagtgcagcagaatgctgggaaactgagggaaaatattcataatggttccccagtagttataaaatcagtgtcaactttcttttcctgttacacaagatggcagtggtttttatctaacaactaactatacatattctgaggacatttgaaatggtggagattatgcatgctgttttcattacttctaaagtgctacaatctgctaacttccagatttgggagtttaccaatggaatagatcaagaaattccaataaca

SEQ ID NO: 313092 - DNA, 564 bp, Homo sapiens
taaggaaagtattaagatgatatggacaatgtcagccctaacagtaccattaattagacttttgcttttctaagataggaataattttagttgaaaccctaaatatatgactatggctgtaaaatgttcaatttggcggtcttactacattgagatgtagaagatgaatatagcagttagaaaatacagtgagwtatgcatttttcagtcaattaaatgtaagaatttataattcatagattgatcattttttagacaaattgtctgcttaaaactatggatatatgctttcccagtaggatttttacctagaaattactattttgtaatgcaatcttaagcactccctataggaaatttagcagacaacattgtaatgtgaagaatataggctactgtgtcatagcaatgtcttacttattttcatttggagacattaataatgttgcttataaacctgtggcactgaatcactgtcttttaaaaatgtaatgttcaggtgtcttgtctgccaagttataaatttcatctctgagtgcttttctgtgtctttactagcaaatg

SEQ ID NO: 313093 - DNA, 655 bp, Homo sapiens
tgcaccatatcttcagaatgattaattcttaaatgtatgtgtatattataaaagatttgaaattgtacaaagtgacactgtgtactgtaaggtatacttaaaagatttctcctctgtataaaaatcatatgcacctagaccatgtgtctcttgtgccatagagtgtggtgtctttaagagcacaacaaatcattttcctgcaaagtttgtatttttcagatttaaytgaagctaacaaatctccgctcatcagcactatgaactatgaaatactctttaaaaaataatagcattaatatatctttccacacaaataattgcattcagatttggtaaacatgttgaactactgtttggagacttgtgtctgtttatctttgatgacttttactattaactccgttccaaatttaagaactaatagcaatggaatattatgaaatgctctgatttttttttctccagaaagatataagagattttctttctatattaaaatggagttaagctaccctcatttctcaagcgttttaggttaggtttcttctttgttccactaaaacatcttctgtgtatacaacataattagggaaaaccacaacagttgcttttggccagtggggatgtttcaaatactattatttcaaagtggctt

SEQ ID NO: 313094 - DNA, 655 bp, Homo sapiens
tgcaccatatcttcagaatgattaattcttaaatgtatgtgtatattataaaagatttgaaattgtacaaagtgacactgtgtactgtaaggtatacttaaaagatttctcctctgtataaaaatcatatgcacctagaccatgtgtctcttgtgccatagagtgtggtgtctttaagagcacaacaaatcattttcctgcaaagtttgtatttttcagatttaactgaagctaacaaatctccgctcatcagcactatgaactatgaaatactctttamaaaataatagcattaatatatctttccacacaaataattgcattcagatttggtaaacatgttgaactactgtttggagacttgtgtctgtttatctttgatgacttttactattaactccgttccaaatttaagaactaatagcaatggaatattatgaaatgctctgatttttttttctccagaaagatataagagattttctttctatattaaaatggagttaagctaccctcatttctcaagcgttttaggttaggtttcttctttgttccactaaaacatcttctgtgtatacaacataattagggaaaaccacaacagttgcttttggccagtggggatgtttcaaatactattatttcaaagtggctt

SEQ ID NO: 313095 - DNA, 655 bp, Homo sapiens
tgcaccatatcttcagaatgattaattcttaaatgtatgtgtatattataaaagatttgaaattgtacaaagtgacactgtgtactgtaaggtatacttaaaagatttctcctctgtataaaaatcatatgcacctagaccatgtgtctcttgtgccatagagtgtggtgtctttaagagcacaacaaatcattttcctgcaaagtttgtatttttcagatttaactgaagctaacaaatctccgctcatcagcactatgaactatgaaatactctttaaaaaataatagcattaatatatctttccacacaaataattgcattcagatttggtaaacatgttgaactactgtttggagacttgtgtctgtttatctttgatgacttttactattaactcygttccaaatttaagaactaatagcaatggaatattatgaaatgctctgatttttttttctccagaaagatataagagattttctttctatattaaaatggagttaagctaccctcatttctcaagcgttttaggttaggtttcttctttgttccactaaaacatcttctgtgtatacaacataattagggaaaaccacaacagttgcttttggccagtggggatgtttcaaatactattatttcaaagtggctt

SEQ ID NO: 313096 - DNA, 613 bp, Homo sapiens
tgggtaatttataaagaaaaagaggcttaatggactcaacaattccatatggctagggaggcctcacaaccctggtggaaggcaaaggaggggcaaaggcacatcttccatggcagcaggcaagagaacatgtgcargggaactgcctttataaaaccatcagatctcgtgagacttattcactatcattagtgaaggagaacagcatgggaaaaacccacccccatgatgtaattacctcctaccgggtccctcccacgacatgtggagattatgggagctacagttcaagatgagattggggtggggacacagcaaaaccatatcaaatgataatacttgaatcatgagggagggtcatgaggattaaataaaataataatctgaaatatgtatataatagcatcatccagactcatactaagcactcaattaatgattttaaaagagtgtcaagaaatatttcttgaaatttactgaaacttgttttataaagcacttttccataaatgtattttctgatatttattgctcatattaaacttggttatataatataagtagccatggtaataagaagtcacttttttaagacacatgcaaatcaaactca

SEQ ID NO: 313097 - DNA, 601 bp, Homo sapiens
agatttaagagaatactaacaaacagtttgcaacagtcaaagtaggatagcatgtcaacatggcatgatatcaaaactgaggactttaattcatatataagttcattatagtacttagatgaaacttgaaaatatatagtatattgtttcccaaaagcaccagagattatttgttgaactagaaaatattttgtctggcaatctttggtctctactaccttacctctgcatctaaacacactgcaccccgactatggtcctggagtcagtttacgtaaagatataagcactttataaggaattaaaattatgtctcaaaggacctggacaaaaatgggcatgcagattatacattataaagcccataaaggtatatatcttacacattgagacttatatattgatgtaaacctatacattgatcaaaacaggatatactacagttttacaagtgtttggttttttgatccacraaatatctcattcaaaaggtttgctttaatttctgaagttaaatatctttcacctctccaagttattaaattcagtgtagaatgaacatgaactgaaaatcaagacaggagaacttaaaataacgctt

SEQ ID NO: 313098 - DNA, 623 bp, Homo sapiens
ttttcatcagtattatattgttacggtgatctgtgatcagtgttctttgatgtaactattgtaattgttttgggatgtgacgaatcacaaccatgtaagatggcaaacttaataaatgtttgttcaggttcagactgttctaccagctgaccatttgcccttatctctttcctctccttgggccttcctattccctgagacacaaaaatactgaaattcagcctactaaatatactacaatggcctctaagtgttcaagtgaaaggaagagtggcaagtctctaactttaaatcaaaagctagaaatgattaagatcactgaggaaggcatgttgaaagctgagctagaccaaaatctaggcttcttatgccaaacagttwgccaagctgtgaatacaaaggaaaagtacttgaaagagattaggagtgctattctagtaaacacacaaatgataagaaaatgaagcagcctttttactgatatggaaaaagttctagtgatctacatagaaagtcaaaccaactgcaatacgcctttaagccaaaacctaatctagggcaaaggcccaattgtctcccattctatgaaggttgagggagatgaggaaagcttcagaagaaaa

SEQ ID NO: 313099 - DNA, 675 bp, Homo sapiens
atagacatttaaagcaagaaaatgacaggttcatatttagtttccagaagataactacagtagaataattacttggcctagcaaaatgagcaggctagatgaaaaaagaccagtatgaaaacagttgcagtgaaagataatgagctgctttttacagcaaataattttagactttttggatgtttcatacctacttatttgcatgtacacttttgtacatttacaacttttgtaaatgtttttatttactatatactactctataccaatgacaaactattatgtatattttaaacatcatatgtgattttattaaaattttaagcactaagattaaaaatacatattgttaaattttctattattatcttacaccaatggattgttttctatagccctggaatgttgttcactcactctagatagtatgaatcwagaagagttgttctcaaccttatctgtatattggaatcaccaggctgcctttcaaaacaattatttctgaatctaggtgtgagacctggacattgaaatttttctgtctccccaggggatttcagtgtgcagtcaaggataagaaccacttaaagggattagaggaatgattttaacccctgagcacagagaaaataaaggagaggagtggtatgttatgttagaatcacatgggaaact

SEQ ID NO: 313100 - DNA, 675 bp, Homo sapiens
atagacatttaaagcaagaaaatgacaggttcatatttagtttccagaagataactacagtagaataattacttggcctagcaaaatgagcaggctagatgaaaaaagaccagtatgaaaacagttgcagtgaaagataatgagctgctttttacagcaaataattttagactttttggatgtttcatacctacttatttgcatgtacacttttgtacatttacaacttttgtaaatgtttttatttactatatactactctataccaatgacaaactattatgtatattttaaacatcatatgtgattttattaaaattttaagcactaagattaaaaatacatattgttaaattttctattattatcttacaccaatggattgttttctatagccctggaatgttgttcactcactctagatagtatgaatcaagaagagttgttctcaaccttatctgtatattggaatcaccaggctgcctttcaaaacaattatttctgaatctaggtgtgagacctggacattgaaatttttctrtctccccaggggatttcagtgtgcagtcaaggataagaaccacttaaagggattagaggaatgattttaacccctgagcacagagaaaataaaggagaggagtggtatgttatgttagaatcacatgggaaact

SEQ ID NO: 313101 - DNA, 631 bp, Homo sapiens
cttcattttctaccctaaagcaagtcagatgatttgcagtatctgttacacaggaattttttttttttttcagacatcacccccacaatgttatccatacacctctaggttaacacagtraacagactggagctaattaactagtttggctacacaaattcttttctgcttttaattacattaacctaatgtgacttgaattcaacagaccaaaaacaaaaccgctaattatattaagggcttcaaagatgatttcaaattgctaaccaccaaactgtcatagaatttatctcatttcctttaatatattttacatgcaaaatctgtgctttactaaaaatactatttaaaaatacatcaaaacaatgaataatagaatattgattataatgctaaaagagaaatatgtttcaactaatacagataagacacacataggcatcatcataccaataagaaattatgcagtactaaatttttacaattttctaaaagattaaaggtttgaaaatattgatttacagtagtaagggcttgacgagtgggattcacatgaagaatgaagttgtctaaagcacctgagtttagaaattattttttcagaaaaaaacttgattctttaccaccaacc

SEQ ID NO: 313102 - DNA, 574 bp, Homo sapiens
atgcttattcaacatattactggaagtgctacccagagcaatcaggctagagaaacaaataagaagcacccacattggaaaaaaaaaaatcaaactgtccctctctgctgatgatattatcttatatctagaaaaccctaaagactccaccaaaaaaaatttttatttgataaataaatccagtaaagttgtagaatacaaaaatcaacatacaaaatcaatagcatttctattcactgataatgatccagctgagaagaagttttaaaaagcaatcccattcacaataastacaaaaagagaataaacctaggaatgagtttaaccaaggaggtgaaagatctccacaaggaaaactacaaagcacagatgagaaataaattgaaaatgatacaaacaaacagaaaaacataacatgctgatagatcagaagaattaatattgttcaaatgacccaaagcaatctagagtcaatgcaattcctgtcaaaataccaatgtcatgttttacagtaagaaaaaacaatcctaacatacatatggaaccaaaaaagtgcccaaatagccaaagcaat

SEQ ID NO: 313103 - DNA, 565 bp, Homo sapiens
tgctttattttcactttcttctctctctctgggttttctggtcttgtttcaaggatgctattaagtttgccaaatagttttctaaagtattcgatgtacatttcttcttttgggtctcttccctgtgtctgaatcacttggtatgtttttgttttactcattctcaaataaaaacaaatctattgagcctgagaattagccaaccaagaggatttttggagacagagtgccaaggatttgccttgagtccccttctgtttacttggatgaattaattcccttctgattctacagctggaagggagataaatgcgctatctcctagctcaggatccaatagtctttcgtttgttttagatttactgggcaaaartaagataacattctatctctgctatctggacagatgagatgcacagaacgccacaatttccagttttcattgctaccagatggtttccatctttgcctccatgtaccatctttatttgtgaggactacacattccagcttgtaatgtaccacatactgtcatttttttccaggtattaccatctcccaatgc

SEQ ID NO: 313104 - DNA, 565 bp, Homo sapiens
tgctttattttcactttcttctctctctctgggttttctggtcttgtttcaaggatgctattaagtttgccaaatagttttctaaagtattcgatgtacatttcttcttttgggtctcttccctgtgtctgaatcacttggtatgtttttgttttactcattctcaaataaaaacaaatctattgagcctgagaattagccaaccaagaggatttttggagacagagtgccaaggatttgccttgagtccccttctgtttacttggatgaattaattcccttctgattctacagctggaagggagataaatgcgctatctcctagctcaggatccaatagtctttcgtttgttttagatttactgggcaaaaataagataacattctatctctgctatctggacagatgagatgcacagaacgccacaatttccagttttcaytgctaccagatggtttccatctttgcctccatgtaccatctttatttgtgaggactacacattccagcttgtaatgtaccacatactgtcatttttttccaggtattaccatctcccaatgc

SEQ ID NO: 313105 - DNA, 599 bp, Homo sapiens
ccatttatctcctccttctgatttctctccattgtcacaatcaaattcatgaaattatacctcttagttgtttatgtctgcatggtgctgaacctttgctaataaaaatatgcatttctgctgatctttagcaaaaaataaaagcaaaatcatagtgaaaccaaaccaaaacagagcaaataaacatgcagcctagaggaaaagagaaactggaagcaagagaaaccaggaaaccatgcagacatcaacctaatagaaatcaagcagraactgccacagaaacaacgctgtctacatttgtctccgtggattttatctcaggttctgccaatgaaaacctgagagtaggtcttttacaattacctacatggtctgtggtcaacagattaaattggattaaacaaacaaacaactcttgagtaagggagaacagaaagctttggttttctggactggataagtagaagttccttaatggtgtgaagagaggtcacagctgagttactcaaagtagaaacatggagacattgttttgaaagttatattaaagaatacaagtttaggatgtttacaaataagtttattatatcatattcctt

SEQ ID NO: 313106 - DNA, 622 bp, Homo sapiens
cttttacaattacctacatggtctgtggtcaacagattaaattggattaaacaaacaaacaactcttgagtaagggagaacagaaagctttggttttctggactggataagtagaagttccttaatggtgtgaagagaggtcacagctgagttactcaaagtagaaacatggagacattgttttgaaagttatattaaagaatacaagtttaggatgtttacaaataagtttattatatcatattccttcaatctcattagctgtcagctaatggcattaacagaaggaaaagtttctatttttaattctttcaacctataaggatctgagtaaaattacttcctgagaagtcttttgttgaaaatcatagttagcaaacagatttaagatcaagttattttcttcagttaatgagrtttattttgatatcagttttgagacatcaccatgttttcttttttttttattcccagatgtgctataattctgaactaagtgtatgccttttagatttctttctggtgtcttgccaattgcctgttgaccttctgcttctgtcttccacaaccatctctacacatcattcttctgatcttattctgtgtgcctttatagcaagcg

SEQ ID NO: 313107 - DNA, 502 bp, Homo sapiens
ctattcaaccatagaaagaatgaaattttctcatttgtgaaaacatggatgagtttgaaaaacattatgctaagtgaaataagccagacacagaaagataataatctcactcatatgtggaatctaaaaaagctgatctcatagaagtatagtgtagactgctggttaccagaggttggggtggttaggagggagggaaaawggggggatattcatcaaaggatatccaagtggatctcagagatattgtgggatctgttccagaccactgcaataaaataaatattgcaataaagcgagtgacatgaatttttggtttcccactgcatataaaagtttacaccatactgtagtttattaagtgtgcatgcttactgttcagcacagtaaaaataaagtcactttgggaacaaatggcagacatgcttattgctcatgataaaagatttgggttccccaggcttgggttttctcttctataattaaaccatgggcatagtaa

SEQ ID NO: 313108 - DNA, 516 bp, Homo sapiens
tcacggccaccacaatatgtagctccagggaccaccattcacagaatggtcaatgcaagtgacaccactatgcagtayccagcttgaccaacaacatgaattgcagctctgtgctagaagttttctctattttaatgttttatatatgataaatgtaaaagctgatcaagatatgcctttgttttgcatctacttgttgacctaaaggaaaaatcaaaggcaaaattaatataagtagagagtttatttggaccaagtttaagaactgcaacctgaagcacaagtagccctgaatatgtgctccaattagcagcagttacaagtggggttttaaaggaaaaaaaatgagaggcaggtcccttgtcatttaccaataatttacattaaaataatataatctattaataggctatacactgctctctgtatcacaaagtccaggaacgtgaagataatgggtgaggtagctagtcagggaactacagggaagaaaagaaagaaaaataatgtcttaaa

SEQ ID NO: 313109 - DNA, 516 bp, Homo sapiens
tcacggccaccacaatatgtagctccagggaccaccattcacagaatggtcaatgcaagtgacaccactatgcagtatccagcttgaccaacaacatgaattgcagctctgtgctagmagttttctctattttaatgttttatatatgataaatgtaaaagctgatcaagatatgcctttgttttgcatctacttgttgacctaaaggaaaaatcaaaggcaaaattaatataagtagagagtttatttggaccaagtttaagaactgcaacctgaagcacaagtagccctgaatatgtgctccaattagcagcagttacaagtggggttttaaaggaaaaaaaatgagaggcaggtcccttgtcatttaccaataatttacattaaaataatataatctattaataggctatacactgctctctgtatcacaaagtccaggaacgtgaagataatgggtgaggtagctagtcagggaactacagggaagaaaagaaagaaaaataatgtcttaaa

SEQ ID NO: 313110 - DNA, 611 bp, Homo sapiens
tccctcattctcccagccagggttatgtcagcagaggcttattgagaaccagaactaccacctgccctcagtggcaacaaggagcccttctccccccttccccaggtatacattaaggctgagaggggaactcagacttccacatttctttctctctctctctttttttttttttttgagacagtgtctcactctgttacccaggctggagtacagtggcacagttccagctcactgtaacctctactacccaagctcaagtgatcctcccacctcagcctcctgaatatttgggctacaggtgtgcaccactacactggctaattaaaaaatttttttttgtagagctgaggtctctctatgttgccaggctggtcactcctgggctcaagtgatccatcttctttggcctcccacagtgctgggattacaggtgtgagccaccctgccrggccaagaccttccacattctatctccacctggcagtaatatggtgtaaggcctaaaattaaggtcaagtattaagtgttgtcttaacatttgttgaaaccagaagggcctcaactggcctaaccacatgttcccctccccctgatgctgcagataaggc

SEQ ID NO: 313111 - DNA, 592 bp, Homo sapiens
tgtgcaccactacactggctaattaaaaaatttttttttgtagagctgaggtctctctatgttgccaggctggtcactcctgggctcaagtgatccatcttctttggcctcccacagtgctgggattacaggtgtgagccaccctgccgggccaagaccttccacattctatctccacctggcagtaatatggtgtaaggcctaaaattaaggtcaagtattaagtgttgtcttaacatttgttgaaaccagaagggcctcaactggcctaaccacatgttcccctccccctgatgctgcagataaggccctctagcccaacaatctccccatcaagaggatcaggtgaagttcctgcttatccctgagtagtgggtttcaattccagcccttggaattattcaaacaagtcaatcatatcctctcacaggaaccagggggcatcccactctcttgatactaccaagttttccttctacagtacctggttgttcattctgtctttgagtgtgtgacctggtatggtgtagtatgttgagtcctccttcacaggctgtgagtacmtgtgactaataaattgctatcaatttca

SEQ ID NO: 313112 - DNA, 524 bp, Homo sapiens
ccaacactgtcatgacacagatgttagaattatctgataggattttgaagcagccatcataaaaatgctccagcaaacaattgtaaatacacttgaaacaaattaaaaaaacagaaaatctcagtgaagaaataaaatatgtaaagagggaacaaatggacattctagaactgaaaaaaatacaataaacaaaatgaaaactcagtgaatgagtttcacaacagaatggagataacagataaaaaaaatcagtgaatttgaaagaacaataaaaattacccaatctggaacagggaaaaaatatgcttaaaaaaaaaaaagggaaacagactcgcagggaactgaacctcacacctcatacaaaaattaacacacagtggactatctatttamatgtaaaatgtaaaactctcaaacttttagaagaaagcatgtgagaaaatattcaggacttaagacttggtgaagttcttagacttgacagcaaaaacatgacacacagatgcaaaaaaattggtaaatta

SEQ ID NO: 313113 - DNA, 557 bp, Homo sapiens
tcaatgtctggtaaccttctgcaggcacctcaggctattcttatcaggccagccagcccatttccagagttgttggtcagtatattttcttttatctttgttgaaggtctagttttcctaaggctgtttttaatgaataatctataaactctagcaaagcagtaattatttcaagcaaatgagcttttctctaacatggagtcagtactgttacacccttgtaggcatttatcacagagaaataaaaatttgtgttacaaaaacctatacaagaatggttacagcagcttaatttgtaatcatcctaaactagaaaaaaaccaaaatgtccttcaataaatatgtggttaatcaaactgtagcacactcatagcatagaataatttttttctttgtctttaggctattcatgggaaaactgaygattaaagatgagatatgagatagtttgttctctatctctcattacaaaaaacttttaagttttctaacttaaaatttcacattaagtagaaaaagttaattttacattacaagaagacttggtgttaaggaat

SEQ ID NO: 313114 - DNA, 557 bp, Homo sapiens
tcaatgtctggtaaccttctgcaggcacctcaggctattcttatcaggccagccagcccatttccagagttgttggtcagtatattttcttttatctttgttgaaggtctagttttcctaaggctgtttttaatgaataatctataaactctagcaaagcagtaattatttcaagcaaatgagcttttctctaacatggagtcagtactgttacacccttgtaggcatttatcacagagaaataaaaatttgtgttacaaaaacctatacaagaatggttacagcagcttaatttgtaatcatcctaaactagaaaaaaaccaaaatgtccttcaataaatatgtggttaatcaaactgtagcacactcatagcatagaataatttttttctttgtctttaggctattcatgggaaaactgacgaytaaagatgagatatgagatagtttgttctctatctctcattacaaaaaacttttaagttttctaacttaaaatttcacattaagtagaaaaagttaattttacattacaagaagacttggtgttaaggaat

SEQ ID NO: 313115 - DNA, 597 bp, Homo sapiens
acaggatagatgtatatataaaggggagtttattaaggagtattgactcacatgatcacaaagrtgaggtcccacaatagaccgtctgcaagctgaggagcaaggaagccagtccgagtctgaaacctgaagaacttggagtctgaagttcaagggcaggaagcatccagcatcggggaaagatgtaggccagaagactaaaccagtctagtctttcacattcttctgctagcttttattctgaccacactggcagctgattagatggttcccacccagattgagggtgggtctgcctttcctagtctactgactcaaatgttaatctcctttggcaacacactcacagacacacccaggaacaatactttgcatccttcagtctaatcaagtggacactcagtattaaccatcacagagggaaaacataaagttgctttctccatgcttctgacgaattaaaaccatttgggatggggaaattcaatggagacagatactatggaatgatgaaaacagcctgcatgctagttgtcaagattagccccctcctagtcacctaatagaagagtgtgaaagaggaatattccaacacaa

SEQ ID NO: 313116 - DNA, 597 bp, Homo sapiens
acaggatagatgtatatataaaggggagtttattaaggagtattgactcacatgatcacaaaggtgaggtcccacaatagaccgtctgcaagctgaggagcaaggaagccagtccgagtctgaaacctgaagaacttggagtctgaagttcaagggcaggaagcatccagcatsggggaaagatgtaggccagaagactaaaccagtctagtctttcacattcttctgctagcttttattctgaccacactggcagctgattagatggttcccacccagattgagggtgggtctgcctttcctagtctactgactcaaatgttaatctcctttggcaacacactcacagacacacccaggaacaatactttgcatccttcagtctaatcaagtggacactcagtattaaccatcacagagggaaaacataaagttgctttctccatgcttctgacgaattaaaaccatttgggatggggaaattcaatggagacagatactatggaatgatgaaaacagcctgcatgctagttgtcaagattagccccctcctagtcacctaatagaagagtgtgaaagaggaatattccaacacaa

SEQ ID NO: 313117 - DNA, 611 bp, Homo sapiens
acataataagattagggtggggtgaccagccttctctgtgctacgtaaacatcatatctggttgaaccaatctgtgggtcctggtaaatcagacactgcctcctcaagcctacctataaaattggctgcagtctgctgcttttccccttttggatgtctctatcacaagagagagacagctgctcttctctctcttttcttctgcctattaaaattttcactccttaacccaatccatgtgtgtgtgtctgtgtcattagacttctcagtgggagatcatgaaccccaggtattgggggaaccagcccccagtgtttcaacgtaggttcttttatattttccctaagtgtcggccagtctgagaaataaacagaaagagtacaaaagagagaaattttacagcttggtcttgggggtgacatcacatgttggcaggttccgtgatgcccccaagccrcaaaaccagcaagtttttattaacgattttcaaaggggagggagtgtacgaatagggtatgggtcacagagatcacatgcttcaaaaggcaataaaatatcacaaggcatatgggggcagagcaagatcacaaggccagggtgaaattagaatt

SEQ ID NO: 313118 - DNA, 611 bp, Homo sapiens
acataataagattagggtggggtgaccagccttctctgtgctacgtaaacatcatatctggttgaaccaatctgtgggtcctggtaaatcagacactgcctcctcaagcctacctataaaattggctgcagtctgctgcttttccccttttggatgtctctatcacaagagagagacagctgctcttctctctcttttcttctgcctattaaaattttcactccttaacccaatccatgtgtgtgtgtctgtgtcattagacttctcagtgggagatcatgaaccccaggtattgggggaaccagcccccagtgtttcaacgtaggttcttttatattttccctaagtgtcggccagtctgagaaataaacagaaagagtacaaaagagagaaattttacagcttggtcttgggggtgacatcacatgttggcaggttccgtgatgcccccaagccgcaaaaccagcaagtttttattarcgattttcaaaggggagggagtgtacgaatagggtatgggtcacagagatcacatgcttcaaaaggcaataaaatatcacaaggcatatgggggcagagcaagatcacaaggccagggtgaaattagaatt

SEQ ID NO: 313119 - DNA, 551 bp, Homo sapiens
agattggagcaaatcacaaaatgaccaataagtggaatgaaacaaatctgtggscaagcattagttacaattggattaagtcatctgagttatataaaattaggttctgtttgtgttcatttaaaattaaatgacaagttttcactaaggcatcaatatattacagatgttgtactccaaaggaagttctcaactatatacagaacatacaaattctctgaaactggatacatgactctaaacctcctgcccttaccaaggatatgaaagagttgagttgctggagtatgaagagaatagttgaagattttttaaaagaggcttcatgatagactctaagtcaatttcccacttttctcaagggggaagagtatggagtatccaattcttaccttacacctaagaggagagggcactggtgtgactgtttgtttttgtttttgttttgagataggggctcactctgttacccaggctggtgtgcagtggtacaatcacagctccccacagcctcaggctcctgggctaagctatcctcccatgtcagcctc

SEQ ID NO: 313120 - DNA, 615 bp, Homo sapiens
atatttccaaataagctgcagggtaaaatataatcatgaagaaaatgaaagtattttaaactaaattaagacagagcatatctaatttgtagaatgtggctatagcagtacttacaggaaaatatacagtttgaagtttttatgtaaggaaaaaggtcgaaaacaatatagaataagacaagaaaaattaaaacagtagaaaataatgaaatagaagatagacaattgagaatatatattttaaaaaatttgttctttgaaaaaataaaattgctaaacgtatagttaggttaatsaagaaaaatagagtgaaaaaatagattacaatattaggaacgaaagtggacttactacctcagatcctacagatgttaaaaagataacaagggtacattatgaaaagctgcatgccaataaatttgacatctctgataaaatggggaagttttttgaaagacatatattatcagaactgacacacaaggaaacagaaaatctgaatatctttatatgttaaagaaatttaatttgtaattacatttccatgaagaaaaccaattccaggtccagatagttatcctatcaatcatttaaaaagaaaaaaaaatatacaca

SEQ ID NO: 313121 - DNA, 568 bp, Homo sapiens
ctgtaacaactgtttcagtactgagtggttaagttaaatatgaaaatccagtgcccttatacaaaggctggaatataacaraagcccaccaatagttttgcctaggcctttcctgaacctcaaagcatgattaaacaagttttattggggatctgaagaaactccccaggcccgcacaaacaagtttattgggagtctgaaggaactccccaaaactctgtgatttagcaggaaacaagataagtgtaatcaccccagcacctggacccacttagattaagtaaatgtacagaggctccagaggaaggtcttcaagactcaggccttagttatagattaaaagaagttaatcacttatatctttagatgaatgcacacttaaacatagacatatagcttagaaggtatataagctctggaaaactttgtaatttggagttggtctggtgataatttccaggccttctccctgtaaccggttacagaaataaaaactctcttcctcccaagttcatctgcatctcattattgggccatgagaaatagcatccaaccctcagtttggtct

SEQ ID NO: 313122 - DNA, 619 bp, Homo sapiens
tggtgttattagtaaataaaaagtttcttcatatagttgacaaaattttgtccattcagctgctacccttaatcagttttggcagttgggtcacctctattcatgcttgtcacattattttggtcttgtcttaggctaggttcttgtttccttccctctgtgtttgtctctcatcattgtgctgatccagcacaacttgtacccaagttctgagacagaataaaagaaatcaggagattaatcaaagatatagtacaatattgtaatactgcaatgaacctcttaataaaaaaatgagcaaaaacaaaccacagagttcataaagtctagaagtgtctgttccatcaaatgtgcagacatcaaaacagaacaaaaagaaacataaaaaaaatcaaagaatcatgacatygctaaatgaaaatgaatacaatagttttccagtaactggcctcaaagaagtggagatttattacttatttgacaaagaattcaaaatcttttttttaagaaagctcagcaaaaaagagaacatagacaactcaaataattcagaaaacaatgcatgaacaaaatgagcagttcaataaagcaacatatatcattaaaaaagacattctga

SEQ ID NO: 313123 - DNA, 560 bp, Homo sapiens
tgtgtagtaggctatcttatccagctttctgtaagtacactctacaatgttcgcacaacaaagaaatcacctaaggacacatttctccaaatgcatccctgtcattaagtcattaagtacatgactccttgctttagcaaaggaatgaaacaaaawtgctgctatttgggaactggcctgcactcccagaatttaggtaaacaatgttttgtttttgagccagctgtgaaccttgcactagagaaaaggcatgagacctgtgttaggtgctctcttacagcctcttcaaatggcacaatcaaaagcaccagtaaaagcagaggcaaaatctggcctcaccattggaaaagtcttctgaaggataagggagtgaatgactgctagaagagaatgattggccttataaaagtaactgcaaataaaagaactccagtaattggtggaagaactcagtgatatgcaaatgtctgataaaagtccattttaaatacaacaagtctcaaggagcacaaagccatcttacaatagttcttgtcagctacaacttatcctgttcctct

SEQ ID NO: 313124 - DNA, 520 bp, Homo sapiens
atgtgcagataggggaaaaccacagagtggggtacagaagtttatatagcatcttgaggttatagaatataaccttatagtataagcttatataccatctcgaggttatasaaaggttgcacactgcacgctcagagcatggccaaaaacgggttatggtggtaaatcatgtttaagtggtgagacaggttatgagaaggagacgagacttggctagcaaaaggcagtcttgttacataaattaaaccccacaggcagtagccctgacagagaacagatggtaaatgtttctttcagaccttaaaagtgccagactctcagttaaccttttctagatctggacaaggcaggcctggctgcatagatgcagatgctctgcagattcaatcctctgagacacaagacagctttgcagaattactttggtttgctggctttctgaacagccatctcaaaatatgtaaagaagtatgttttggtgatgtgggctcttttttggttccatatgaactttaaagta

SEQ ID NO: 313125 - DNA, 590 bp, Homo sapiens
tcacccctaaacctgctgtcttctaccttctgcctaaaatgaccctccagttgtgcctgtcccagctaccctcatcatcatagtgcacctagaaattccttctcttctctcaagtctctgatcaagacacataacttctctcactgcccccayacacactaatttctttccctgcaaacctatagcacttttcaaaaagttaaatagcccactaaagtgtctgacttttctgtcctccttaccagcctatagcagaggtttactcaaagtttctctgttcccagcagctgccccttcctgtggccatcttctctgcctatctaaatcctgaccttcaggtttagttcaaaatatctgtctcccaggaagccttccatgaacccctggcttgattcatatgccactcctcagtgctgtgcacatttctctcacagaatgtaacatgtactgaaatgatcaattttcctagagtcattagattatagtcatgtttctccatatccatatctatagcatctaacatagtatatggcctatggcgtgctgagtaaatgacaagccgaatgccttatttcttagccaaaattaat

SEQ ID NO: 313126 - DNA, 585 bp, Homo sapiens
ttcttagccaaaattaattcattctgttactattcttctgggaagaggtggwaaataggaaaaaaattttaattctgaaaggttattctctttgcaatgacaattgccttttgttaatcatctctattgtttttgcacacaataataataggaattattttataactgaagcctcagaaatcatctagaacaaactgtacaaaagcacaaaataatgtgtcaatgactcagggacactgaaaactctatgtgttcaaaaacaggctcaatattttttcttacactgcacttccatcttcttgtatagtcaatgtattaggcctgttttggagtgtctgcctgtgacagttagttttatgtgtcaatttggctaggctatggttccctgctattcaaaaactaacctaggtgctgccgtgaaggtattttgtagatgtgattagcatcttccatcaattgactttaagtaaaggaaattatcctcaattttctaagggggcctcaactaaacagatgagaggcctggagaacaaaactgaggtttctctgacaaaacagaaattctacctctagactgcagcatca

SEQ ID NO: 313127 - DNA, 585 bp, Homo sapiens
ttcttagccaaaattaattcattctgttactattcttctgggaagaggtggaaaataggaaaaaaattttaattctgaaaggttattctctttgcaatgacaattgccttttgttaatcatctctattgtttttgcacacaataataataggaattattttataactgaagcctcagaaatcatctagaacaaactgtacaaaagcacaaaataatgtgtcaatgactcagggacactgaaaactctatgtgttcaaaaacaggctcaatattttttcttacactgcacttccatcttcttgtatagtcaatgtattaggcctgttttggagtgtctgcctgtgacagttagttttatgtgtcaatttggctaggctatggtyccctgctattcaaaaactaacctaggtgctgccgtgaaggtattttgtagatgtgattagcatcttccatcaattgactttaagtaaaggaaattatcctcaattttctaagggggcctcaactaaacagatgagaggcctggagaacaaaactgaggtttctctgacaaaacagaaattctacctctagactgcagcatca

SEQ ID NO: 313128 - DNA, 591 bp, Homo sapiens
tacagactctaaatgcccttataaggcaaagcatrttggactattttctgattttaggagctatgattgttttactttactccaaataattatgggtaatatttatttagtgctttacagggctgggatgggggtaaagggagcaaggactaagacattgccttgggtacaaaatttaagaggatgccaaaaaactcagtaaagataggtaatattataaaaaatcaaaatctatgataaaatattaaaattttaatcactattgtattattactatatatttatatattattgtacattatttatacctcatagttcttcacttaacttatataatgcttattttaatatttatcttattttttctgaaaaattataaatttgggggtattaggatgtaggggcaggacatgatacctttccttgtccatcataagcatcacaatcaacactcctataacaaaagacaggttaatgagagaaaaccataacaaatttatttaatcaaagttttacataacataggagacttaagaaatgaagacccaaagacccagggaaaactgttcttttttatgcttagatttgatg

SEQ ID NO: 313129 - DNA, 591 bp, Homo sapiens
tacagactctaaatgcccttataaggcaaagcatattggactattttctgattttaggagctatgattgttttactttactccaaataattatgggtaatatttatttagtgctttacagggctgggatgggggtaaagggagcaaggactaagacaytgccttgggtacaaaatttaagaggatgccaaaaaactcagtaaagataggtaatattataaaaaatcaaaatctatgataaaatattaaaattttaatcactattgtattattactatatatttatatattattgtacattatttatacctcatagttcttcacttaacttatataatgcttattttaatatttatcttattttttctgaaaaattataaatttgggggtattaggatgtaggggcaggacatgatacctttccttgtccatcataagcatcacaatcaacactcctataacaaaagacaggttaatgagagaaaaccataacaaatttatttaatcaaagttttacataacataggagacttaagaaatgaagacccaaagacccagggaaaactgttcttttttatgcttagatttgatg

SEQ ID NO: 313130 - DNA, 518 bp, Homo sapiens
atcattccctcttgctggaatgtcccctttaccattctctttcaaaatcctccccatccatcaaggtccatgatgatggctaacatgctctcatcttctcccctcctctgagcttcagtagtactttgtgtgaatgtctctcaggatacctactttatttatttcatttttatgtattctttgtggctgtcacttttcctgctaggttttagttagatgaaacagtgaggaygtgattaaaaatatgggtttaaatctttgccccttaactcctgtggggccttgcgcaattactggacttaaaacttagttttctcatctgtaaaatggagatgataacagtatttgcttcatacaattgttgtgaagattatataaattaatacatttaaaacatatgaaagaatgcctgctccataataagtactcaaaagtgcttatttgtagtatttattttatcttaataactctcacaatgtcaagagtatagccttgtatgtagcaaatattaaaaagac

SEQ ID NO: 313131 - DNA, 544 bp, Homo sapiens
caatagatttgaacaagtaactccgaagaaatataaatggcaattaaatgtgaatatgtaaataattaaatgtgaacttatgaattatatcacaaataatttttaaatscatgtttaaaatagtgtaatcgtttttctgtggaaataaaaagattgaaggaaagatgatacctaggactgatgagggtaaattaaaaacaaattggatattcttatacactcgaatgtaagttgttatttctttcttgaaatgatttgccgtaggtataaatataagatgcatctggcctaattactttgttccttgaaaattttcctaaggaaataatacaatgtgtgtgtgcatgtgtgtgtgtatgtacatgtaggtataaggaaatttattacaacatcgtaaaaacaaaaagtccattaactgtctattgatagggaattcattaaatatgttacaggatatcggcgggcgcgatggctcacgcctgtaatctcagcactttgggaggccaaggcgggcggatcacgaggtcaggagatggagaccata

SEQ ID NO: 313132 - DNA, 417 bp, Homo sapiens
ggtgtcaacagtaaaatatgttcatgcttgatgtccatttgtacagtattaattatctttctcttaaagtgagcttgtatgcaagagccaaacctcatggttttataacaagaagaatcaagcttccatccttctttygggaactaacattaaaaattctcccatgaagtgaaaaacaatgcaggcatttaataaaagtatcttaacaatgtgagtcatattgtatgaagcttttatgatgaataagatcctttaatggtcaatgagcagaccgtaactctatgaacatgcagtagcagtttccagccaagactgacgttccagagtcagactgcagtccttagaaaagcaactaacagaacaagacagggtaccagaaaactcatcagaatttcaggatctggcacacatgaggat

SEQ ID NO: 313133 - DNA, 609 bp, Homo sapiens
gaaaaattgcattttaagcttacttttctaagagagagataggagtcttgttatgttgcccaggctgrctttgaactcctggcctcaagcaacacttctgcctcagtttcctaagggactatacgcaggtctcgccacacctggctttaagcttcctctttgatggaagagtgtgtatgttgtttctaggaaaacaaaaactcaagtattattagaagaaaagtaaattattatgaatagacatgaaatttttgtacctataaaattatttcagatgaatggtcacctacatgacaggccaggcctgactcgaagcaaggcagctgatgaacagtattgacaaaattcagtccttataatagtccccacttagccacagttttgttttctacagtttcagttacccatggacaaccagggtccaaaaatataaattggaaatttccagaaataaacaattcatgagttttaaattgttcactgttgtgaatagcaagcacctgccccttagtcacttagtagccatctcggttaccagatcaactgtggtagtatcgcaaggcttatgctcaagtaacccatattttacttaaaaagcacaaaagcaag

SEQ ID NO: 313134 - DNA, 432 bp, Homo sapiens
tctacgctgccatgaggggcgcgaacgcctgggcgccactctgcctgctgctggctgccgccacccagctctcgcggcagcagtccccagagaggtaacgcgacccctgcccgggctccctttctctcctttcccttcctccacccctgcagcctcgcctgctgctttactcaacccgcttcggcgcgcctgggtgacccagcgctcgaccctgcgctcccgcgcggtgcaggcgtccgccaccctcgggtaggctaagcccsggacttcgggacccatccttgctcgcggggctccctcctgggtccccagcccggcctgccggatggccctgcagctggcttggccaccacgtggcggggcttaatctgacttgtgtctcccctctcctcgtgtctatggggccagagggaagcactggggcccaaatat

SEQ ID NO: 313135 - DNA, 586 bp, Homo sapiens
tagttatgggaccctgccttctttgtgagtatataattcaaaactgacaaagtagtatgatgacaaaagacagagtgcctgttgattcaggttttatccacaattgtaagtgaaacaatgtcatttacaaaaatcatcagggctttccactgtaggacaataggtttcctacatgtcaaatcaaatgttaactctcatgtttaactctgatatcttcctcttccctcatacaaatctacataaatcaatgcatgcatatgtagggctgtttttttccctgtttcttatttaacaacatgaaattaaagccttctggctcragagagtgaaccaaacatacacatttgccccctgctgttccagacaccatcactgtgtagatatttctgatatctttaaaagtggtaggggtggataaatttaaaacatcaaagagaacagaagagaaagcaaccaatggacagtacatttctggaagacagataaaacaaagcagaaaaagccaaagcccaggatacacccaggaggaggatgcagagaaggttgaaagagaacccttgcaacagtgttttacaaggacatcaca

SEQ ID NO: 313136 - DNA, 564 bp, Homo sapiens
attcccatttttagccacccagtctgtaatactttgttaatgcagcctgagcagaataaaatagaagaatactgggtgtttcatagaattaaagagttacaggaaacagtcggagccaggaatctcaaggactagaacaaggacctcaacacctgcagaatacacacactatcctccccacacttccagcttcagaatttaaaaatgccaaggatggcctcaactgatccagttgaggtcgcattcccaaccctaagccaatcatttaattctcctagttcagtgatgcatctctaccatccttcgccggtctgtgtccccagatcctcytgtggttgagtttcccaagagagtaaacctggtttctgccaggacaagagagaggctgctgaaagatgaggaaggaatccagaggtctgactgctttctccaaggactttccataaacctcctgttttcagctccgcctcttaccttttctttcagaagaatctggtgcctccaattctggggactttacgggtgctgtgccatgaactagcttccttcttaagctccccatct

SEQ ID NO: 313137 - DNA, 567 bp, Homo sapiens
agcactcttacatcaaaactttttaaagaagctcatgcacttttttttaaacttactttgtctgatgatatgggtactgtaacgaccagcatccctattttacagataaggaaactgaggcacagagttgttaagtaactttggcaatcaaccaggtaccaagtgggtgaagcaagggtctgagcaggcagttaggtcctgaggccatattgttaaccattgtgctatactgacttctcttgtagaaggtgcctaatrcatatttcttgactggaactgaaactgttgaatttcccatgtggcccagctagcaagaaaacaggctttttatgttgtaaaaaaataaatagctactccgagttaaaagagccagccacaatcaaaattccttcattttcctgaggctttgattaccccaagataattctagtctgtagaatcactttgctgtcatcagcatacataattaaatatttagtaggaaaattaatatatttaaatttgtttaaaattaagctgaccactaatagctctgcttatcagtagaaactttatatttttatagga

SEQ ID NO: 313138 - DNA, 465 bp, Homo sapiens
actagtgatgaagtctttcagctaaattctgtcttaaaaagtctttatgttacctttgtttcagcctcatgaaagatacttttctgggtaaagaattttaggttgacaggttgtttttttttcttcctcttttgaatactttaattatgttgttctactgtcttctcamttgcattgtttctgctgagaagtctgctgtcatccttatctttgttctgtctgtaatgtaatgtgtcattttctttccttttttttttttaatatatacacttttttacggcatttgagcattatgcttttaatttgccttggcattgttttcatcatgtgtatattgctcagagattgttgagttccttagatctatgggcttatagttatccttgaatttggaaaatgttcaggcattactttttcaaaatgtttcctgtcttcttcctctccctcttttgggcactccaatta

SEQ ID NO: 313139 - DNA, 465 bp, Homo sapiens
actagtgatgaagtctttcagctaaattctgtcttaaaaagtctttatgttacctttgtttcagcctcatgaaagatacttttctgggtaaagaattttaggttgacaggttgtttttttttcttcctcttttgaatactttaattatgttgttctactgtcttctcaattgcattgtttctgctgagaagtctgctgtcatccttatctttgttctgtctgtaatgtaatgtgtcattttctttccttttttttttttaatatatacacttttttacrgcatttgagcattatgcttttaatttgccttggcattgttttcatcatgtgtatattgctcagagattgttgagttccttagatctatgggcttatagttatccttgaatttggaaaatgttcaggcattactttttcaaaatgtttcctgtcttcttcctctccctcttttgggcactccaatta

SEQ ID NO: 313140 - DNA, 624 bp, Homo sapiens
tctatttgctaaaatttttattaaagacttttgcctcttattcatgagggatattggtctgtagttttctgttatttgtaccatcattgtttatttttgacattaaactaatgtcataaaatgggaagtattttcttcttttctgttttctggaggagattttataaygctgttgtgaattattctttacacatttggtaaaatcctttagtaaaagtatctgggtctggagatttcctttttgggatagttttaaatcaatattgaattctttaatagttacagggctcttcagtctacctatttcatataaggtgaattgcgttagttgttcatagtgttcttttattcttcactttatgtctgcagggtctgtagtaatatgtcctgtttcatttctgaaattaaccaacatttgctttttctcttcttttttcttagtcttgccaaagatttgtcaattttgttgatcttttcaaagaaccatctcattgtttcattgatgttctctattgtttttctgttttcgatttcactgatttctcttgtttattattttcctcctactgcttggtttgtgtttattttattcccttttttttctaggttctttaggtgggaatt

SEQ ID NO: 313141 - DNA, 624 bp, Homo sapiens
tctatttgctaaaatttttattaaagacttttgcctcttattcatgagggatattggtctgtagttttctgttatttgtaccatcattgtttatttttgacattaaactaatgtcataaaatgggaagtattttcttcttttctgttttctggaggagattttataacgctgttgtgaattattctttacacatttggtaaaatcctttagtaaaagtatctgggtctggagatttcctttwtgggatagttttaaatcaatattgaattctttaatagttacagggctcttcagtctacctatttcatataaggtgaattgcgttagttgttcatagtgttcttttattcttcactttatgtctgcagggtctgtagtaatatgtcctgtttcatttctgaaattaaccaacatttgctttttctcttcttttttcttagtcttgccaaagatttgtcaattttgttgatcttttcaaagaaccatctcattgtttcattgatgttctctattgtttttctgttttcgatttcactgatttctcttgtttattattttcctcctactgcttggtttgtgtttattttattcccttttttttctaggttctttaggtgggaatt

SEQ ID NO: 313142 - DNA, 574 bp, Homo sapiens
tctggtttccataagttctaatgaggaatctgttgtcatttgaatatttgcccctataggtaaggtgtcaattttttttttctggctgctttcaaaaattttttctttaattttcagaagttgttttggaacagatttctttgtgttatcatgcttgccattcactttgcatcttgcaagtgtatgttcaaatgttttcctagatttggtaagttttcagccatttttaatttgagcactttttcagccctgcctttttttctcctttctttctgggactcaatgacagaaatttagatcttttgttatagtcccacaggtcactaaggccctctttatttttgtgttttagtccacttcctctctgctgtccagattgggcartctctatagttctgtcttccatttcacaaattcatttttacgttcctttcattatgctgttgagcccattaacagagctttcctttcaattactgtaattttcagtactaaaattctaatttttaaatatatctcctatttctttactgaaactttctatatactgggtgaagctttctattttttcatt

SEQ ID NO: 313143 - DNA, 434 bp, Homo sapiens
tcattcttttgagtgtttcttttcccagcctcaggcagtttcttcacatgcatgtatagatagcactcagctgtacactccaggggatgctctgctgatctccaaagtcccatctctatgtatgtctcttctgtctagctctctgacttgcaaactctatccactttggtcacaactcaaggactttaccaagstctgtctgtatttcctgtccttgcctggaaactttctccagtcagttaactatggcaatcatagggcttacctttttgtattccatctccttgagatcactgttcttcattgactgatgtcctactgaaaactgttttataatatattttttggttatttcaggtggtagggtaaatctggaccctgttactcctttatggtcagaagcttagtatctgtttttggtatctacaaaatgt

SEQ ID NO: 313144 - DNA, 468 bp, Homo sapiens
agacttgaatttaatatgttcagggaaaagggatctatcttcatctttcaacactktaaatcagataagagggcacattttgttttcatcactgttaacaaaactgtagcatggacattggtttttataacaatccttttgccataattttattcttataactcatttgcttgaatttaatcttgttcttttgaaatttatttagcaaacatttatttccttttggttctgcctatctatagatttcttccattaggaaaatgtttataatcctctgttctaccctcaaggaacacatctttatcataaaaaatactggagttttcttccatctgtgagtttgtgtataaggctagacctatgagaagagtcagatgatgagggaatacaagagatgttattgttataaagcttttcctatctttttcaggcagaatcataattctctaccagctgcttattttagag

SEQ ID NO: 313145 - DNA, 603 bp, Homo sapiens
gaaattgattgtaaagagccatgaagggaatttctttggtatgggtgctgcttatatgggtgcatacatttgttgcaacccactgaactgtaaacttaagatgtttgcttttcactgtgaataatttataccttgataaaaataagaggcagggtttgaaaaaaaatcaccagatgtggttttagttcacctaattgccaaaatacttgttgatattttcatgtgcttgagtcagtgatttatttttcatatatctggttactctgagtaccatctttgacataactttaaagcatttccctattatttaactcttttgtgagggcaaatttatgaaaagtttactgtaggacaagctttctcaaaacattccaactaaatcaatcattactgcctccaagttatctttataaaagtaatatctatgccccaaactgagtatacctatgatattscccaatatatcatgtattaaaatggagtaatggagttgttaatgataatgtttcattcatatatataatttttcctctatcaataaaatataatatgtaccctacatactagatagaattaaattttatcataaaaaccaagaaaaat

SEQ ID NO: 313146 - DNA, 465 bp, Homo sapiens
atgaggccagttttcccaaggggcttttattggctctgtaagtcaagtttgatacctttaagaaaagcatgctattcgagtcaaagccttggcaaaacaaccagtttctccagttgtgtcctgttgccaaaaaaaaaaaaaaaacaaaaaaaaaaacattcttattacacttgtgcaagtaaaactatgttgccgtaaattaagattactcacaaatagtttcgaaattctggagaaatcagctagagagaaacaaatatgttccaaatttggtttacaggaaaatactttattcaatggtttaaagttgtaaatagctcaaaagaaaatcttcttractctgaaaaccaaaacaaagaattggtaacattttaagcaaaaagccaaaaaagattacttcagttttctattagttcagtccatgcagttaactcctgtcctgacttatcatcaccaacatttcag

SEQ ID NO: 313147 - DNA, 594 bp, Homo sapiens
  misc_feature (1)...(594): n = A,T,C or G
aagcagaggtccccagtgtttttggcacaagggaccaaatttttcnctggacggatagtgggggagcttcaggataaaactgtcccacctcagatcataggcattagagtctcatgaggagtccgcaacctagatctcttgtgtgtgttcccaataaggtccgtcctcctatgagaatctaatgctgtcgctgacaggaggtggagctcaggcagtaatgyttctcacgcaccgctcacctcctgccatgtagtccaggtcctaacaggtcacaaaccagtaccaacctgtggcctgggggttggggatccctgtcctaaagtacagaaaatatgaagcattccagtatttaattgaaatttgtgaataatttctcatctcagggtcaaaacttgttaatggcaattaagaaaaaaattgtaaaccagttgtaacttttggaaaacaattctacagaatatcttcaaagatccaaaccaaattactaaatttcaatactccttcacgatttcacagatgtttggtaatctaagaaacactcacatttctacaatcattgtgtgaatataaattattaattaatgaatatataag

SEQ ID NO: 313148 - DNA, 473 bp, Homo sapiens
agacacttttcagaagaagacatacaggtggcaacaaggatatgaaaaaaatgttcaacatcactaatcatcagagagaagcaaatcaaaaccatgtcacaccagtcagaatagttattattaaaaagcaaaaaaaaaaaaaaaaaaccaacaacagawgctagcaaggctatagagaaaaaggaactcttacacactgttggtaggaagataaattagttcaggcactgtctccacagtctggagatttctcaaggaacttaaatcagaactaccattggacctagcaatcccattactggggtatataaccaaaagaaaagaaatcattttactaaaaagacacatacacttgcatgttcatcacagcactattcacaaaagcaaagacatagaattaatctaggtgcccataaatggtggaatggataaagaaaatgtggtacatcctggcaaagacacaatgaaaaaag

SEQ ID NO: 313149 - DNA, 626 bp, Homo sapiens
taaataattaccttcctgttatgttttatcaatttagatttttagatactggtttcttaaaacaagcctttattactattaaaaataatagcaaacatttatatagtagttactctgcactaggcactgttctaagtactgtatctatattcatttaatattacaagtccctatttaaaagtgcagagctgtgactgaaatctaggcaatgaatttccaaaagttcattctcaaactattatacttcctctcaagattggtaaaagggaatgctccagcaatacagttgtcaattagctagacagaccttcaagatccaacagtatcttataatccaacaatctcttaagcgtttaacacattatgagtcctaaccctgaactgttctttagctgtctcctgagtctttatcacagatgagactgcatatgctttggggatcattaccaaggagacatttcacactttttttgattccmaaaacaagacacataaaatgaatacttgttgatatagctgaatttaaaataagcaagcttaattttttgggcttaccaataatgtaaacatagaaatacctgcctattagcccttgataaaacatgcctacctgaaaacagacaaag

SEQ ID NO: 313150 - DNA, 564 bp, Homo sapiens
tgaaccattgctcctaggtaaaatacaggattaggttcctgcaagcctctggtgacaacattttggtcaatggattgcaatcttgtttcatgtgtatttctgtttagagaggctttttcaaatatrttgttgacttgttaacactgaactcacagactactgcagtattcacagtactcccactggtacccaaacaaagctaatctaacccatgtatggcacatgacagccttcttgtatttaagaacactaaatagcactttaacaatacagctgggcgattttaaacactgaaagcaccaacaaaaagcacaacagtatgaaaaatgtggctctaaacagaatataaaaagggcaattatttgcagtacaagagctgaaacaaggcagagtatcaccttgttcaacctcagttgggaaagtgcaacacaaaactcaaattttttcatccctaagcacatgtctgcaaatgaccacaaaagcaccatgagtactgattttgggattagaaacacattttatgaagtaggcaaattcacaaaaaatggaatccaggaataataa

SEQ ID NO: 313151 - DNA, 602 bp, Homo sapiens
aactttctaaacacttttcccccaaattgtgtatcaaatacaaacatacaagttgccagtaatcagaatatatccaagtaccatgaaacagcagctagtacattattttaacattggattgcacttaaagttgtagtagtccattgaagatactatcatgaaatgtttttctatttccttattcaagtgttttcctactcaatttaacagtaactgttattacagtaacataccatacaggaagacataacaattgcagggaaagaatgccatctgctgcttcatatgtgtactcaacagtaggaaaaaggttgaataataagtaattacacaaaacaatttagaaatccatatacacagataaagcttgaaagtttagataattccccrtttttattttggacaatttgaaaatacatcaatgagaacttatcttttaaaaaatttctagatttgcaattattatgggtacatcacaggtatatatatatatatgtttatggggttcatttgatgttttgataaaggcatacagtgtgtaataaacatcagggtaattggggtatccattacctcaagcatttgccatttgtgttaggagc

SEQ ID NO: 313152 - DNA, 560 bp, Homo sapiens
cattgtgactccaggcaccttcaggtgtcagtaaaggaatgatgattaatcagccattttcttgtgtttctgggagcctgaagttttcaggtacatgaggattaattctatatttgataaaagagccagttgatcagttcgaataggtaattaactgctaagcttgtaagaaacatttcaacttgtgatgagaggatgatccttaggcaatctcagtgtggcagaagctataatcaatgtatgcatctcagataaaattatagtctcatctaccctttgctcaacatttttacactgacccagtacctctaaaaagagaatgtagtagaaatcaggaakcctctgttctagtgtgactctgcccctaattttctggtcacataaattggaaggtcacataaccttttaaggcctgagctttcttgtctgcaaaatgagggtgatagaacctattaaacagttattgtgggaattattttagttaacatatgtgaaagaatttgaattcttaaataacttctgctttgccagacaatttaggtatcttatttgctagtaca

SEQ ID NO: 313153 - DNA, 639 bp, Homo sapiens
tatcagagaccccatcctttagtatcccctttttaactctcaaattctgagagtgttcgttttgtctgtgttctgtagcacccatttgttccctgttttaatatttattacactgctttgtaattacttgttagtgaatagactrtaattttggttagtactatttctgccttgtttattgttatctgaaagagcctggcatgtatgtattgtttgtatgctttcaacttactgttgaatgtgtgtatttaatagaattctataggaattcggcctagatctcatgtataatactttcaggtaataaaggatatattcttgagttggaaaatgatgctgacttgagtgaaattattcagcagttataaataaggtgtaatattaagcatcttgaacattttataaaagcctgtatagacaacagaatataatttatagaagtaagttcttcaggaaccaaggtggaattactaaagtgtcctaagtgatgtatgtgatagaagtcctatatgtgagaaagaatgttgtaaatagtagccataggcatttattgagcaacaagtctgtgtcaaatactttgctcagaacttgaaaggcattatataatttcattgtcacaaaaatgctatgaaaatagcg

SEQ ID NO: 313154 - DNA, 639 bp, Homo sapiens
tatcagagaccccatcctttagtatcccctttttaactctcaaattctgagagtgttcgttttgtctgtgttctgtagcacccatttgttccctgttttaatatttattacactgctttgtaattacttgttagtgaatagactgtaattttggttagtactatttctgccttgtttattgttatctgaaagagcctggcatgtatgtattgtttgtatgctttcaacttactgttgaatgtgtgtatttaatagaattctataggaattcggcctagatctcatgtataatactttcaggtaataaaggatatattcttgagttggaaaatgatgctgacttgagtgaaattattcagcagttataaataaggtgtaatattaagcatcttgaacattttataaaagcctgtatagacaacagaatataatttatagaagtaagttcttcaggaaccaaggtggaattactaaagtgtcctaagtgatgtrtgtgatagaagtcctatatgtgagaaagaatgttgtaaatagtagccataggcatttattgagcaacaagtctgtgtcaaatactttgctcagaacttgaaaggcattatataatttcattgtcacaaaaatgctatgaaaatagcg

SEQ ID NO: 313155 - DNA, 590 bp, Homo sapiens
ggccctacctcttaatatcatcatgctgggaattagatttcaacatacgattttgtcagggacacaaacattcagaccatagcatttcacatttgccccacaaagtgcatgtccttctcatatgcaaaacacgccattccattctagtttagtccccaaagtcttagtttatcctacaatcagctccaaagtctgaagcctagagtctcatgtaaatatcatctaaatgagatgtggttgagactccacagtgattcattctgagccaaattacccctctagctgtcagcctgttaaatcagataacatcatatgcttccaaaatacaatggtgggacagacacagggtagwccttgccattccacaagggagaaacaggaatgaaggaagaaatgacaggtcttgaacacgtccaaaacttaataaggcagcattaaatcttcaggctccagaataatcttctttgacttaatgtcctactttctgaacacactggggtagggattaggctcccaaggctctaggtggtagagttctcatatactggagttgggtgcttgctgctctcccaggatggaatcacatgcca

SEQ ID NO: 313156 - DNA, 579 bp, Homo sapiens
tttcgagtctcactcagcctcccaagtgattctcatgcctcagccacctgagtagctgggattacaggcacctgccaccacgcccagctaattttttggtagagacggagtttcaccatgttggcaaggctggtctcaaactcctgacatcaagtaatccacctgccttggcctcccaaagtgctgggattacgggcatgagccaccatgcctgactcaaaacaacagattttcaatgtagatgaaacagtcttctgttgaagaaaatgccatctagaactttcctagctagagaagagaagtcaatgcctggcttgaaagcttcaaaagacaggctgattctcttagtacaggctaatccagctggtggctttaagttgaagccagtgctcacttaccacctgaaaatcctagagccattaagaattatgctaaatctatcrgtgctctagaaatggaacagcaaagtctggatgacaggacatctttttacagcattgaacgttttaagcccactgttgagacctactggtaagaaaaaaagattaattttcaaaagattattgctcattgaccaca

SEQ ID NO: 313157 - DNA, 552 bp, Homo sapiens
ttttaaccctggctaacagttcatgacaactaagagttgtaaagtgtctaggaatatttttcagtccagtgtcttattcttatcccctagaacctcctgttcaaacttccataaaaaacttcctatctcttgcaagaatttcggagagacaatctccagttgtgctgggacaggtaagcgttctgggaatataattaatcctaattaaatcagttatcctatttttagccacaccccgaactgcagcattcaaaggtatctagagtctccaagttytgggcttttccagggttcttagtgcaaatcacctaactactagctttcttcactgcaggaatttaaggttagaatctctcaggtacattaagacagataccgcttatacatctggttgctagtttcaagtctcctaacatactgtattagtccgttttcatgttgctgataaagacatacctgagactgggtaatttatgaaagaggtttacggacttacagtttcacatgtctggggaggcttcacaatcctggcacaaggcaaggagcagcaag

SEQ ID NO: 313158 - DNA, 552 bp, Homo sapiens
ttttaaccctggctaacagttcatgacaactaagagttgtaaagtgtctaggaatatttttcagtccagtgtcttattcttatcccctagaacctcctgttcaaacttccataaaaaacttcctatctcttgcaagaatttcggagagacaatctccagttgtgctgggacaggtaagcgttctgggaatataattaatcctaattaaatcagttatcctatttttagccacaccccgaactgcagcattcaaaggtatctagagtctccaagttctgggcttttccagggttcttagtgcaaatcacctaactactagctttcttcactgcaggaatttaaggttagaatctctcaggtacattaagacagatmccgcttatacatctggttgctagtttcaagtctcctaacatactgtattagtccgttttcatgttgctgataaagacatacctgagactgggtaatttatgaaagaggtttacggacttacagtttcacatgtctggggaggcttcacaatcctggcacaaggcaaggagcagcaag

SEQ ID NO: 313159 - DNA, 547 bp, Homo sapiens
tgatatatccatagtaaccaaaacagcatggtattggtataaaaacagacacatagaccaatggaacagaatagaaaacccataagtcgtatgtttacagccaattggtttttgacaaaggtgtcaagaacatacattggggaaaggataccctctttaataaaatggtgctgggaaaattgtatatccagatgtggaagaataaaactggacttctacctcttaccgtatacaaaaatgaaatctagatggattagacttaagacctgaarctataaaactactagaagaaaacatggggagacacttcaggacattaatctatgcaaatattttatggctaagacctcaaaagcacaggcaacaaacataaaaatagacaaatgggattatattaagctaaaaagccccttcacagcaaaggaaacagtcaacagagtgaagagagcctgttgaatgggagaaaatatttgcaaactgaccagggaggaatagaatatgcaaggatcacaaataacagtaaaaaaaacaaaaacaaaaaaaaaat

SEQ ID NO: 313160 - DNA, 547 bp, Homo sapiens
tgatatatccatagtaaccaaaacagcatggtattggtataaaaacagacacatagaccaatggaacagaatagaaaacccataagtcgtatgtttacagccaattggtttttgacaaaggtgtcaagaacatacattggggaaaggataccctctttaataaaatggtgctgggaaaattgtatatccagatgtggaagaataaaactggacttctacctcttaccgtatacaaaaatgaaatctagatggattagacttaagacctgaaactataaaactactagaagaaaacatggggagacacttcaggacattaatctatgcaaatattttatggctaagacctcaaaagcacaggcaacaaacataaaaatagacaaatgggattatattaagctaaaaagccccttcacagcaaaggaaacagtcaacagagtgaagagagcctgttgaatgggagaaaatatttgcaaactgaccagggaggaatagaatatgcaaggatcacamataacagtaaaaaaaacaaaaacaaaaaaaaaat

SEQ ID NO: 313161 - DNA, 618 bp, Homo sapiens
ccatttccaactgattccactttatactcccaccagaagtatataagaattccttttgactcacatttttctgtaagatttcttatgatttattcccagtagacaggaaaatatatttcatgtggtctacttcttttattggtaatgaagttgggttttttgtatatgcaccatttatgtttttctgccagatgcctatttgctattgatcattttcctaaagaactgtttattttactgatttgtaagaattcttcccatattcttgtagatggtgattcttgcttagtgtgtgttgcaaacatcttctaaattcttgtctcttttttaagtcaattttagtattttttctagaaatttattcatttcctcatttattgacctcyggaaatagcaagaatgattttaccttttaaatctttgctgtatccattattaaatttcctctatttgttcctaatagtatatatttgtgaattctttcttcctaatcacaagaggtttgttactcttgtctttttaaagatctaacttctgattttttaattctactgtatctttattttttagttcattaatttctgcttcgtttccttctttctccattctcagggttta

SEQ ID NO: 313162 - DNA, 540 bp, Homo sapiens
ccctagcctttcccagactttaatattctctattctactttttacttctatgagaccaactctttcttagcctccacatgtgagtgagaacatgcagtgtttcactttctgtttgggcttattccacttaacataatgcctgcagttgcatccatgattctgtgaatgataggatttccttctgttttatggatgaatagtgttcccttgtgtatgtgtaccacattttctttatccatttatccacgaatggacatataggctgattccatatcttggctattatgaatagtgctgcaacaaacatggcagcgggggtggtggtrcagatgtccctttgatatactgatatctttcctttggataaagtaccagtaataggactgtcaaatcataaggtagttctatttgtagtattttgaggaacctccgtattttctccatagtggctatactgtcacattcccaccaacagtatataaacagtattttgtccacattcccaccagcattttttttgctctttttgataatagccat

SEQ ID NO: 313163 - DNA, 516 bp, Homo sapiens
tctttttttcttttttgagacagagtctctctctgatgcccaggctgcagtggcacaatcatggccatgccttgcatggctctctgtggtctcaacctcctgggctcaaaacagtcctcctgcctcagcctcctgaggagctaggacttttgtgttccatctcaaaaaaaaaaaaaaagttgaatgttccagagttaatacttctgcagcaagctattgcttctgcccaggctggtgtcagactcctgagctcagtcaatccacccacctcggcctcccaaagtttgaggattacaggygtgagccaccgtgctcggccagcctttgtctttttttaagagatgaggtctctctctattgcccaggctggagtgcagtagtgccctcatagctcactgcagccttgaactcctggactcaagtgatcctccctcctcagcttcctgagtagctgggatgataggtgtgagaccatttgcctggcttctcccaggcttttaagctgctttgtcctga

SEQ ID NO: 313164 - DNA, 516 bp, Homo sapiens
tctttttttcttttttgagacagagtctctctctgatgcccaggctgcagtggcacaatcatggccatgccttgcatggctctctgtggtctcaacctcctgggctcaaaacagtcctcctgcctcagcctcctgaggagctaggacttttgtgttccatctcaaaaaaaaaaaaaaagttgaatgttccagagttaatacttctgcagcaagctattgcttctgcccaggctggtgtcagactcctgagctcagtcaatccacccacctcggcctcccaaagtttgaggattacaggcgtgagccaccgtgctcggccagcctttgtctttttttaagagatgaggtctctctctrttgcccaggctggagtgcagtagtgccctcatagctcactgcagccttgaactcctggactcaagtgatcctccctcctcagcttcctgagtagctgggatgataggtgtgagaccatttgcctggcttctcccaggcttttaagctgctttgtcctga

SEQ ID NO: 313165 - DNA, 600 bp, Homo sapiens
acttttcattgctctgttttaatgcatttttacattagaagcacctgaaagtaccaagtgctagcaggaatctaggccactagaaagatactaaaaaatgtcaatagtatgatcctaaactaygatttttaaaaaattatttatgatataaaaatgaattaaacaccaggtttctggtattactagtagcactttgaagtttatgaaatataaacataagagagtgaaaatgctgaaatgataatggaatttgttcatatgtattgatagcataggaaactcatttttcattcaatcctgagactctgacttaattgttttgaggttgcatctgagcactgtagttttataagctatcctggtgactctcagtatgtagccaaagttgttacattgttaatacttttcattttaacttaaattccttaaggtttctgtaatcagtcacatcaaggtaaaaaatatttataatcacatgcaagacaatagaaaaatcatttcaatgatagacataaaaccataattggattctacacaccagaccacatgagacaaaatttctgctttagatgatggtcttgccagaacaacgtaaattgt

SEQ ID NO: 313166 - DNA, 515 bp, Homo sapiens
tgaatactatctccaaaatctaagaatgagaaactctgttttcttacttagaatttgttacatgttcctataggttttaaagacattsaccagaaattttctggaggtctttcattcatatctttggcaacatgttgataataactacggcagctattacttattcacctaatgcactgccagacactctggtaagtgcttcacacgcatgacctcactaactcttacaacttcatgaatttagaattatttatgcttgttaggaattttttataaaagaaactcaggtagaattattttatcagtcgtcatgtttcttacatgagagagagaaagggaatatttttctctaagtgccagacactgtcttaagcactggaaatgccaaagtgaacaagacaatacaggttcctgatctcatagactttacattccagtggtttagacgaatgatagaaatgtaattaaatcattaagataagtacaactaataatataaacctatttataaatag

SEQ ID NO: 313167 - DNA, 578 bp, Homo sapiens
tgaatacataaacactctattatatacactttaaagagacaatgaataaaaaatattattcttccatcacagagagtaattatcactctaaaatatattttctacgtgtattgaccctgaattgagagaaaatgtataacactcatatcttttaatattatgcttgttttaatctatctctatactaaagtaataactgaaggcatattaaaaataattagttttaaaattttagagattcttactgtagaagagaaatggaaaagagttagagtcacttraacaattcggccatgaaggcacaggctataataagacccatcggcaagcttcagccttctggtgtgtttttgttaaaaacaaaatagaatcattatttctaactcaggagaaattgtatacacaccggtttgtgggcttctttggaatcaaaagaaaagctggcaacattagacctgcattctgcaagaaaatagtggctacttccccttccagattgggcatgaatgtctctgctcttcttgtttctttcccaacacccctgatgggccccaacacccttgttgggccccaaaacc

SEQ ID NO: 313168 - DNA, 542 bp, Homo sapiens
gaaatgacagatgaagtaaaacttatttgtcaagacatctgcatagtgatgtcttgaaaaagaaaaaaaaacctctagatttcacacgaaccattttgaatacaaagtttgctrtgttggggccaaaatacgctcattttttttacagctccttgaattctgcctgccatcaacaaaatcaagcaccatgtacttcttacagcctttccagttatccaacctaacactaatacctctcattttgtttagtaaccagaggaccagcttcctgggccttgattatatcaatttggagcatgattatataatgtcttatagagttaaacgagtttttcttacatttattcattcgttattcaacaaatattagctaatttgtttttatagatgaggcagtgatctaggcactataaataaaacatgaagatgatagacacagattctacaactgaagttccttttttacagtagataggcaaaaactataaaatgtaattaacgggttataggaacacagagtaggagtgtctgaggcatgaagg

SEQ ID NO: 313169 - DNA, 582 bp, Homo sapiens
ttgggctcaagtgattctcccacctcagactcccagttagctaggactacaggcatgtgccaccatgtctggctaatttttaaaaattttttctagagatgaagtcttcctatgttgccaggcttgtctcaaaatcctgtcctcaggcaatcctcttgtcttggcctcccaaagcactgggtagagctcatttaatagtagtgtgtcttaatttcaaatgaaaattgctcattgctggcaagtagctgatttttgtttgtttgttgttttctttaataatttaaacttttattttagattcaggggatacacgtgcagatttaytacatgggtatatttgcatgatgctgaggtttggggtatgattgatctgatcacaaggtactgagcatattacccaatagttagtttttaacccttgaatcaccctttccctacctctcctgtctagtagtctccagtgtctattgttgtcgtctttatgtccacgagtgcccaatgtttagctcccacttataagtgagagtatgtggtatgtgattttttgttcccacattaattttcttagaataatagtctcca

SEQ ID NO: 313170 - DNA, 610 bp, Homo sapiens
acaaatatccaaagtatattattcgtatttagaaaaatacaatagtgtaccataaccaaattggcaaagattaaaatgtctgaaaatagcgattgtgcacatgaatatggatatcataaactcacatacttggctcatggggaagttaattggttcaatagctgtaggcaatagttgataggatttggacaagccacacccacaaggtcacatgcagtcaacctgctgggttcaaaccccactcatttacttaatataarctcttgccttaatttatttgcaaactgaggataatcattaaagctatttcttgacaatcttatgggcactaggttagctaatatatgtagtatctgtaaagtgcttaatacaatgcctggtttaatcagggaagtttacacaggagattccactttttataaaacattttatttttgctttgtttctttgaacaatatctgaattaaataggatcatgttaaattttgtcaagcatgtgttgcatcacaagtgttcaggttgttttatttgaatggtttaatatataaactgcagcttttctatactagtcctaatctgtttactttttttttcttctgaccctggtact

SEQ ID NO: 313171 - DNA, 553 bp, Homo sapiens
aacataactatatgtctgtaaacttagttgtgacaagtatttttgtgtttcaagttttatgtttctaatattttaagttcactaraatcacaaatacaattttctagacttttaaccttttaacatttattttgtacacatgtttctatgctttttagtttgaactcagcacatttttttttctgagctctgtgagaagcctaaaaggatcatgtagattcaaaaagaaaaaaacaaaagaaccaaacaaacaaacaaaagttgtactttataaccatttattaaaagacatccagaatgaaagaaggttgcagtctatcttgtgccttagaagaccatattcttggttttccatgctgtctctcatctggaggcagtgtggtcacttaattttgctgccaaatacatccaagtttgagattcagtctcgccacctaccagctgcatggcattggcaaatttacttcctcttatggagcttcagttgtctgttaaatgaaagtacaaggaaagtaaagtaatgctgttttttaaaaatttagcaaataaaaaa

SEQ ID NO: 313172 - DNA, 490 bp, Homo sapiens
tagaaattaaagttccctagggctgggcacagtggctaccacctgtaatcacagggtttggaaggctgaggtgggtggattgcttgagtccaggagttccagaccagcatgggcaacatggcacaaccccatctctattaaaaagaaaaaaagaaattaaagttgccacaaaacaaaagaaaaaaaataaaaaaaatcaacaacatacytaatatcctctactaaaataaacactgcctattaaagatactacacttcactgtatagctgattaaggcggttctgaaattgggaacttagtgaattaccctttactttcattagaacactacaacaaattgccattgatagtgtttttactctggactatcacacgtgttttatcagcctgaaacactttctgcaattgcttccagatggaaaaccttacttatctttttatattagcccgagtatcatttcctttcttcctctgctgccaaattttatg

SEQ ID NO: 313173 - DNA, 607 bp, Homo sapiens
cattagttgttaaggattatggtctccagctccatccatgtccctgtaagggacatgaccttgttcttttttatggctgcataaaattccatgatttatgtcagaatcccataaagtgagaagagagagcattagtccagacaatttgaagagctactggctaaatattttctaaaactggtgagatatagcccacataatttatctctaaataaccctatatgaaaaaacaaaacaatataagaaagaataacaaaaaagcacctgggtcatattwtgttaaaattcttgagatttaaaaggaaagatacattttaagtagatagagggaaagtaaaggacatataaccttcaaagggactaccatggtggcactctgaaaggacagaaggcagaggagagaggatggtgtgacaacattctcaatgtatgcaaactggaaagttgcttaactattataatattattaaaaatagaatttaagacaagttaatattaaaagcataggatttttttcttactaaaatgggactaaattaaacagagaaatgcaaaaatgcaaaatgtttatgcacctgacaatgtagtttcaaagcacctgacaagg

SEQ ID NO: 313174 - DNA, 584 bp, Homo sapiens
tggaaataaaattttcatttattcacatatcacattggggctggaaaaagttctataggcatctaacgaaaaacttttagaactaagtcaatatcaaacagttacctgggtaataatgtatatttctatgtattagcaaatattaaaatgctttagttgtagtaatatcaaaacagtaaatgtgtagaaataaatttaatctaaaatactgatttttattcttaatagttaaagaaatcaaaataagtgtaatatcaaaacagtaaatgtgtagaaataaatttaatctaaaatattgatttttattcttaaaatttaaagaaatcaaaataagtggagagatataccacattcatataaaatcataatcattaggcaaatagattttcttattggraattgataaaaattgactattaatagccagatataaaagatttatatgatatcattaatgtaaaattttaatccagtgatattaatatttaatttaaaaattcagaattgtactgcctttttggggcagtggatgaggtgtattgattttgataggggataaggaaggctttcattgtgctagaaat

SEQ ID NO: 313175 - DNA, 551 bp, Homo sapiens
gtgttttcacattccattttctctttttgtctttgaggctgatttggctggtatgaagatggctccgacagcaggctcactgcctatgtaaaagccccatgtacccaacctcacaatttcagatttgccttgcttatggaaaacacattgtaaataggtgtagttcttttttcccagcttactgcggtgggagaccatgggttaacacttacgaaaagattttgcatgtgacctctctgattagctatggaaaacaaaatccaattaaagcagcaccccctcccccatataaaccctaccaatcttgcaccttcccttagcactccttcacaccgttcttttcctgctggtattgctcagctrttttaaatattgttggttattgactgaattacagatatttctatatctttatctgtatctataaatcttcatatattttatctggctcatcctatgaaagaatatttaatagctgttatctctattctggccccaaaagaatgtgttcttgagaattggacaaatgtgcaaaatcctatgagacacac

SEQ ID NO: 313176 - DNA, 588 bp, Homo sapiens
atttgccctttttgttcttcggccttccaccatgtgaggatggcagtgtttatcccctccagagaacacagagacaagttgccatcttggaaggagagaaactgggtcctgaccagacactgaacctactagtgccttgatcttggacctctagcttccagactgtgagaaataaatttctgttctttgtaaattacccaatatgaggtattttgttacagcagcacaaactaagacattacaataattcaatccaatggggacacctgagaacttctcattatcaatatttaaaacttttccaacycaatttgaagtatgtccctccccaactatgatctacaaggtttaatatcactccttctagtactatgactctgaaaaatatttccagcctccccaggatctatattattcactatttctgcttatccctcactttcccttttatgtcctaatttacttcttcactcaatttaggttctatggtccacccttataatcattcctttacatacatgctcaactccctacaccttatttcacactagcaaagccccatcctggttaaatacaactctgactaat

SEQ ID NO: 313177 - DNA, 625 bp, Homo sapiens
ttcttttaaatgttgaataatatttcataatgtagttataccactatttacctgttcagctattgaaagacatcttggttactttcagtttatgatgattgtgaataaagctgctatgaagggttgcgtgcaggtttttgggtagatgtgttttcaactcaggcaaataattaggagcttgattgctggatcatgtgataagacratgtttagctttgtaaaaaactaccaaactctaatccaaagtataaaatgttgcatttgtaccagcaataaaataagtatccctattactctatatccttgccagcattttgtattaacaattttatggattttagccattctaataattgtataagtggtatctcctcattgttttaatttgcagccatctaataacatgtgatgttgagcatgttgtcatatgcttatttgttgtatatttatcattggtgtggatatgtgctcagctctgtttacccattttgtaattggattatttgctttcttattgttgaattttaagagttctttggatattgttgtacacaagtcctttatcagatatgtggtttacaagtatctttttttcccaatcagtggcctgtctctttagtctctc

SEQ ID NO: 313178 - DNA, 540 bp, Homo sapiens
gaggaacctctggtcactggagcagtcagaacacccaacatttgtcagttaggctcaccatcttatatgggtgcagtttgtgatgctccaaaacaactgcagtagtaacatcaaatattcctgatcacagatcaccacaacatataataataatgaaatgtttgaagtatcacgagagttaccaaaatgtgacacagagacacaaagtgcacacgtcatkggaaatattgcaccgatggacttgcttgacccgagattgccacagaccttcaatttgtaaaaacacagtatctgtggagcacaacaaagtgaagggaaatgaagtgaggtatgcctgtatatatatgaatggtgtgatgtctgaaaacatgttcaccaaaatattattagtgttattatagaggattgattttctttgaaatgcctggattgttggaaattttttacaactttttcttaattaaaagctataacagtatgaatttcagagtaaaatttcagttcatacaatagcctgtgtcagcaagatttaatctcttt

SEQ ID NO: 313179 - DNA, 540 bp, Homo sapiens
gaggaacctctggtcactggagcagtcagaacacccaacatttgtcagttaggctcaccatcttatatgggtgcagtttgtgatgctccaaaacaactgcagtagtaacatcaaatattcctgatcacagatcaccacaacatataataataatgaaatgtttgaagtatcacgagagttaccaaaatgtgacacagagacacaaagtgcacacgtcattggaaatattgcaccgatggacttgcttgacccgagattgccacaraccttcaatttgtaaaaacacagtatctgtggagcacaacaaagtgaagggaaatgaagtgaggtatgcctgtatatatatgaatggtgtgatgtctgaaaacatgttcaccaaaatattattagtgttattatagaggattgattttctttgaaatgcctggattgttggaaattttttacaactttttcttaattaaaagctataacagtatgaatttcagagtaaaatttcagttcatacaatagcctgtgtcagcaagatttaatctcttt

SEQ ID NO: 313180 - DNA, 540 bp, Homo sapiens
gaggaacctctggtcactggagcagtcagaacacccaacatttgtcagttaggctcaccatcttatatgggtgcagtttgtgatgctccaaaacaactgcagtagtaacatcaaatattcctgatcacagatcaccacaacatataataataatgaaatgtttgaagtatcacgagagttaccaaaatgtgacacagagacacaaagtgcacacgtcattggaaatattgcaccgatggacttgcttgacccgagattgccacagaccttcaatttgtaaaaacacagtatctgtggagcacaacaaagtgaagggaaatgaagtgaggtatgcctgtatatatatgaatggtgtgatgtctgaaaacatgttcaccaaaatattattagtgttattatagaggattgattttctttgaaatgcctggattgttkgaaattttttacaactttttcttaattaaaagctataacagtatgaatttcagagtaaaatttcagttcatacaatagcctgtgtcagcaagatttaatctcttt

SEQ ID NO: 313181 - DNA, 540 bp, Homo sapiens
gaggaacctctggtcactggagcagtcagaacacccaacatttgtcagttaggctcaccatcttatatgggtgcagtttgtgatgctccaaaacaactgcagtagtaacatcaaatattcctgatcacagatcaccacaacatataataataatgaaatgtttgaagtatcacgagagttaccaaaatgtgacacagagacacaaagtgcacacgtcattggaaatattgcaccgatggacttgcttgacccgagattgccacagaccttcaatttgtaaaaacacagtatctgtggagcacaacaaagtgaagggaaatgaagtgaggtatgcctgtatatatatgaatggtgtgatgtctgaaaacatgttcaccaaaatattattagtgttattatagaggattgattttctttgaaatgcctggattgttggaaattttttacaactttttcttaattaaaagctayaacagtatgaatttcagagtaaaatttcagttcatacaatagcctgtgtcagcaagatttaatctcttt

SEQ ID NO: 313182 - DNA, 408 bp, Homo sapiens
aacgaaaaaattctacttacttgatactacacatattttaaatcatgttagtatgttttctagccatacacatggcattaagacttttatttacaggactttctctgcaaggtggccaaacagaacccaccagtgattgtctccacacaggaacaacaaattgaacatctatccacgcaagaaagcaccttaagaaccaagaaatcaggtaagcaattacagtacctggtttgaatgtaataccaaggaaagaggcattgaagagggtaggaaagacagtcatttcctataccacccctcccctaaccacaggtggagcagtgtggagcatctgtgtgcttaggagagtgasagcaaagtgagtatggaactttgcattggaactgttgccctgacacagagtaacaa

SEQ ID NO: 313183 - DNA, 535 bp, Homo sapiens
catcactcctcaaaacccaggcagcccatcatggagtgagacttcttactgaggggaacagaaggaagagagcaagagactttgcctggtaacccagggaattctgccttagctaccccaagaccaccaaggctgtctttgtaggaatctgccagagtcacagcattcttggaattaaggcaccctctagtgcttaaatggctgccakaactgctgacataggtcacaacactaaatcccctttgatttcttggaaagccctctcaagaaggatgagtacaaacaagcccagagaagactggaatctatacataacccttcaatgtccagacatccacaaatgtccacaagtgtcaagaacatccaggaaaatgacctcaccaaatgaaataaataaagtaccagtgattaatcctgtattgatagaaatatgtgccatttcaggcaggaaattcaaaatagctgtcaggaaaagtcaacaaactttaagataacataaagaaggaatgcagaattctatcagagaaatttaaca

SEQ ID NO: 313184 - DNA, 512 bp, Homo sapiens
cagggttcaaattcaggcagtctgattccrgagcccatatttataccattaccctctactgtcttactgtgagtgagcagccaaaccatcgcatacacagggagaggaaatgtttgctgagtatatacttgcactgattgggtgtgttagcgggattctttgatcttgacctatgttggtttttcttatttgtgttgtataaaggaattggaaggaaagtagatgtgaacaagccgaacaggtttcctagaataggtggctcttaaaatccaattttctatatttaaccaaattgctttgttttgtcacataactttttctttaaggaaaatattaatagcaatagctaataatgattgttcttaatctgtaacaggtggtaagctcagtgctttataatcatatccatgtttactatgcagggctccaaggcccacctatatttccaaatgtgccgtatcttctttcaagatgaagtatattttctaagaaccaagattgaatctagaaaa

SEQ ID NO: 313185 - DNA, 576 bp, Homo sapiens
ttgtgtgtgtgtgtatatatataagaggggagagagagggattaaaaaactatatactcctcataatcctaataatattggagtatagctttttacatagaaaactggacttatattcckgctttgttactatgcatatgagtcaaaattgcatagctgtttgcctctaaaataaaaaactagcaagacctcattacatacacagaaaagtggaataaatgtagttcctaaaaacgtcagaataaaaatttataatctgatgatttacagttcattccatggttttagtgtgtaaaggataaagatacctagtggaaacagatgaattgggtcaagtgagatgggaacccattaaaattctagcctgaaccttggaggtctggagaagcttggccacccaagtgatatattatataggccattatttgcctctgagtttcctaattttttcatctgaccgagaaaatggaatcctcaaaaatcccccctaaaacccctcattttggaatccatgttggaacagttaagaagggatggaaaatcactgagtagtatttgcctatttgaggtttaaaa

SEQ ID NO: 313186 - DNA, 576 bp, Homo sapiens
ttgtgtgtgtgtgtatatatataagaggggagagagagggattaaaaaactatatactcctcataatcctaataatattggagtatagctttttacatagaaaactggacttatattcctgctttgttactatgcatatgagtcaaaattgcatagctgtttgcctctaaaataaaaaactagcaagacctcattacatacacagaaaagtggaataaatgtagttcctaaaaacgtcagaataaaaatttataatctgatgatttacagttcattccatggttttagtgtgtaaaggataaagatacctagtggaaacagatgaattgggtcaagtragatgggaacccattaaaattctagcctgaaccttggaggtctggagaagcttggccacccaagtgatatattatataggccattatttgcctctgagtttcctaattttttcatctgaccgagaaaatggaatcctcaaaaatcccccctaaaacccctcattttggaatccatgttggaacagttaagaagggatggaaaatcactgagtagtatttgcctatttgaggtttaaaa

SEQ ID NO: 313187 - DNA, 576 bp, Homo sapiens
ttgtgtgtgtgtgtatatatataagaggggagagagagggattaaaaaactatatactcctcataatcctaataatattggagtatagctttttacatagaaaactggacttatattcctgctttgttactatgcatatgagtcaaaattgcatagctgtttgcctctaaaataaaaaactagcaagacctcattacatacacagaaaagtggaataaatgtagttcctaaaaacgtcagaataaaaatttataatctgatgatttacagttcattccatggttttagtgtgtaaaggataaagatacctagtggaaacagatgaattgggtcaagtgagatgggaacccattaaaattctagcctgaaccttggaggtctggagaagcttggccacccaagtgatatattatataggccattatttgcctctgagtttcctaattttttcatctgaccgagaaaatggaakcctcaaaaatcccccctaaaacccctcattttggaatccatgttggaacagttaagaagggatggaaaatcactgagtagtatttgcctatttgaggtttaaaa

SEQ ID NO: 313188 - DNA, 578 bp, Homo sapiens
ggaccaggcaaatgtcaaattggtttacaatccataagtaaatagccttgaggagatcattttgtactccaaataytaagttttttctaaatgtattatctattttactttgttgtggttattatgttgttttgaggtatttgttctggagctttttttgttttttttttttggtaggaagaggcaggagatacagaaatagtgacatttgtgcacattccaaagctgagaagtaaaatcaatattactcaagaagcaactctgaacatgtttatctcagtgtatttccttctaagcttcagtaatgagcctctaaaattgttatagtatacacagataataatcagtgagttttttcacatagcttctggaaaaactgctttgtgttccagttttaattagtgtattattatccattgctaatttgaggggtttagtctagaattagtgcacagctgcagagaatgcaagcacatgaattgctggattagctggagttcaaacaaaggggaaggagtaaatgaggggagatgcaacaaaccgtatcccccaaataacttccaaaatttcccagctat

SEQ ID NO: 313189 - DNA, 585 bp, Homo sapiens
gagctaatttacctattctatcatcatgcagcagagctctgcctttctgatgtttattttccaagggtactttttctaatcaatagaaaagtggatgtccagggcaagagttttggggaggtttggttggttggtggtaatttttaatccagtaacagccattcatttacgttccaccgaagaaagcttagtcttgaccatgtatctataagggagtttgagtaatgcagttacatatgcccagcctaggaagaatgagacaccaactgcctttgtcacatgaagctcccaaacaatatgctcaattaatatttctgttcttgtagttcatggactcagaggtctgctcttcatctgaatccttaagatgacaaatattttttcttgttttgctgtattttttttcattattattattattatactttaagttctagggtacatgtrcacaacgtgcaggttttgttacatatgtatacatgtgccatgttggtgtgttgcaccccttaactcatcatttacattaggtatatctcctaatgctatccctcccccgtccccccacctcacaacaagggggtgatg

SEQ ID NO: 313190 - DNA, 581 bp, Homo sapiens
tctgtttctaaatgtgcttttcttcacctagaccaggggttttcaaacttgttttgtaaaaggccaaacaataactaattttaggctttgtgagccataatgcctctctgacaactactcawtctggcctttgtagcacgaaatcagtcatagacaatatgtaaataaatgagcatgactatgctcccataaaactttatttacaagaacagagagctggatttggcccaagaatcattgttcgcaggctcctttcctaggcttgaaaacaaaatcccagtttttgtcccgcccggtgtgtttggggaaaatgtacccatgaacaacacctctcacttctttatttttattttttattttactttaagttctgagatgcatgtgcagaatgtgcaggtttgttacaaaggtatacgtgtgccatgaacacctctcccttattaaggccaggttgcatccctcttattccactctgtaatccacacacataatgttcagtacagagaaggcattttagttgttttttgaaaatgatgagctttcttctccgtacatctgtacaaatgaggacacatttcttg

SEQ ID NO: 313191 - DNA, 480 bp, Homo sapiens
tagaaaaagcttgtgatgaatgtcacattgtcaggacagattagtacttagtgatatggggagaggggtgtgataatagccccagtgatatgaaacttgggtctgtatgagagcatttactatgccagcaatygcaatggataattcactgctacatatggtgagaatgtgctaaaagtgagttgttaatctacagggcaaatttccaattgggagtgggcaaagccttgactcataccatgtcatacattgctgaagagtttctttttagggtagcctcaaaccactattagtaaaattacattaaattcagaaaaaataaatgtgtcatcttgattgctgcccaacctctatgccattattctttgtgtattattttctagagttggtgccatttactttgatttatctagtcattttctctaggaatcctgctcaaaaccaagagaaaagacatgttcctgaaatggttaattcatc

SEQ ID NO: 313192 - DNA, 480 bp, Homo sapiens
tagaaaaagcttgtgatgaatgtcacattgtcaggacagattagtacttagtgatatggggagaggggtgtgataatagccccagtgatatgaaacttgggtctgtatgagagcatttactatgccagcaattgcaatggataattcactgctacatatggtgagaatgtgctaaaagtgagttgttaatctacagggcaaatttccaattgggagtgggcaaagccttgactcataccatgtcatacattgctgaagagtttctttttagggtagcctcaaaccactattagtaaaattacattaaattcagaaaaaataaatgtgtcatcttgattgctgcccaacctctatgccaytattctttgtgtattattttctagagttggtgccatttactttgatttatctagtcattttctctaggaatcctgctcaaaaccaagagaaaagacatgttcctgaaatggttaattcatc

SEQ ID NO: 313193 - DNA, 541 bp, Homo sapiens
tttagggtagcctcaaaccactattagtaaaattacattaaattcagaaaaaataaatgtgtcatcttgattgctgcccaacctctatgccattattctttgtgtattattttctagagttggtgccatttactttgatttatctagtcattttctctaggaatcctgctcaaaaccaagagaaaagacatgttcctgaaatggttaattcatccatttttctagttaccttctagtggagtctactcctgacatcttttttagatcatttctattcttttatcctgtagcatctttctttctgctcttatcacaaagtcctcctgctagaaagcagtaattgtgctgattgacacctttacaaggagttgaagattttgtttgttttggttttgtttaattgggatactttaatatagagtatatagaagtctartatataaaaaagtggattaaagtttttacatgctgaaaagcctaattctgtataaagatgatctatttcacatatatcatcaatgcttaaatattattaaaagac

SEQ ID NO: 313194 - DNA, 619 bp, Homo sapiens
attggactgactttcataaaaccagggatataagcacagtgtggggtgtgtattattgccacagagcacacgctagaaagcagcataaagagacaagctttatctctctgcctgaaactctcttggaaccttctgggagtgcacattctaaatcaagaatcaaaacgttttcccagcacaactgcaaattgaaaataggcacttgaacacaggcagagatgtaaaggaagaatgactttgaaatgcctacaacgcaccccgagccaccctgggtctttctgtagacataaggagtattcatctacggtaaagggtatgtagcacttggtagaaacaaatgacagctgacaaaaagatccattaratgcctgaacttgccccttgccagcacagagtatttttcttttcctattttgccagaataaagagagggcaagacatttttatttcaagaagtgccccatagccatagatttttgtttctgttttcctctagcactttctagtatactataattgaaacaacagcctaaaagcatttcttttattaatcttagtagtgtaaaacattgaagaaaacaaacttaggaatatattattgtgctgcatggttaacaac

SEQ ID NO: 313195 - DNA, 619 bp, Homo sapiens
attggactgactttcataaaaccagggatataagcacagtgtggggtgtgtattattgccacagagcacacgctagaaagcagcataaagagacaagctttatctctctgcctgaaactctcttggaaccttctgggagtgcacattctaaatcaagaatcaaaacgttttcccagcacaactgcaaattgaaaataggcacttgaacacaggcagagatgtaaaggaagaatgactttgaaatgcctacaacgcaccccgagccaccctgggtctttctgtagacataaggagtattcatctacggtaaagggtatgtagcacttggtagaaacaaatgacagctgacaaaaagatccattagatgcctgaacttgccccttgccagcacagagtatttttcttttcctattttgccagaataaagagagggcaagacatttttatttcaagaagtgccccatagccatagatttttgtttctgttttcctctagcactttctagtatactrtaattgaaacaacagcctaaaagcatttcttttattaatcttagtagtgtaaaacattgaagaaaacaaacttaggaatatattattgtgctgcatggttaacaac

SEQ ID NO: 313196 - DNA, 505 bp, Homo sapiens
ttaacaacaacaaccacaaccacaacttgcagctaaggaaatcattccccttttgggggaagtctctatcataaaaaaaaaaaaaaattcattgctgcgtatcagtcaataacacttcctgggcatattcctgatgaataactctgtactaggtgcagctggcaagctgaaaaagcaacaaccatcaaaggtctggggtccagttagaaaaactggtcaacctagggagggaaggtgaatgtaccaacacactctttgctgaaaagagaaataaaagttaaaggatgagcttgaggcctgaggcctttgtgagtaaagaatgagcagctaggtgagtggtttctcctttatgcaggagcrtttgaaaggatctgcagagtatgctggcagagaaaaggagagagggaataaaatgtctatggcccggagaaagaggcatgttctggatgaagaactgggaatgggcttagattttgttgcttatacattatctgtgagagaagtg

SEQ ID NO: 313197 - DNA, 609 bp, Homo sapiens
aagttttttcgtctcttgtgccttgtttctatgttgttttgggtacatggaaatccattccacatgaactcatatgcagatcacagatttgacagaaacaatacaagtggttaaacagcaacatcgttgggcaagtgtctttctactctacggtgcacattatttttgaaccactcagtaacttctctagctgcttcaggtaaatgcaactttagttcattgaaacctcctgtaatgtcatcaggtagaaaaaatgtcaatgcagacaaatgacctatttttaaactgaagcttttttcattgttggattgcatggccaatctactcatctgaattttcctccagatgcgttgtgctgaatcaaaaaaaaaaaaagartagactttattggtaacaccttgtaattagcttttagaagccttgatcacacctaatttcaaatctgttattatgatttggaatgcaattgaaatccattttctttgcatacaaataataacaaggtaatatttctgcctaacatgatgcaactattctgtgattgtgatgttctggattttagacattaggattttgatctttcagaatttcagcattcaggattatgat

SEQ ID NO: 313198 - DNA, 617 bp, Homo sapiens
agagaaaagacacattacctacggaggaacactatctttaatgctggtggatttctcatctgaaaccatggagaccagaagggagtggtatatttttcaagggctaacaaaaaaaataaataacaactgtcaactatgaattctacatccagtagaactatattttataaaagaaggataaataaaggcaatctcagatgaagaaaaattaaaagttttgtttttaacagaatggcttaagggagttttttaaacagaaaacaaaaaagtattaaaaatctattttgaaacatcagtaagaaagaaagaacaatttataaaagcagaaatgtgggtaaatagaagaatctgttcttttcatgaattttctaagtcatatgtgaagattaaaaccaaaattatatcaccacatgatacatagcatagtaatatttaaaagtagggattgtagagggaactaaaaggaagtaagctttcaccaattcactcaatgttaaaagttcgcttatagaagaatgatgatgtagtacacaaagaaaccacaaagaaaattatacaaagcaacacattcaataatackataacaaataaagttaaaatcctaaaacagttaatgt

SEQ ID NO: 313199 - DNA, 503 bp, Homo sapiens
tatctttttggtgatgaaactactttttatcttgactgtaccaatgtcaatattatggttgtaatattgtagtatagttatacatgatcttatgtttggggaaaatttgctatgaagtatacagaatgtctctgtattatttcttaaaactacatgtgaatttatctggaaatacagagtttaatttttaaaaaagacattgtgagaaacagarcaaagttattttaactttcatagatagaatcaatattcagcgttctcctggtaatgaattctttcagcttttatcttttagaatttttttttcttctttgtttttgaaagatattttcactgaaaatagaatgctgggttgactttttgttttgtccctcactttaaagatgtcactctattgtcttctgatatgtaccctttttgatgagaaacattgttcctttgtaaagtttttttttttctctccaaatgccttaataactgtctctttctctttgattttggtt

SEQ ID NO: 313200 - DNA, 547 bp, Homo sapiens
aaaacctctgaaaacatttttctccataaaaacaccaagaacagtggtaaatagtcaaaataaacattttctgaactctttaatcagtcttacaacaatgtgagagcatttattcaagaaatatggctgaatcttggtatgaatggtaagataatagtagataaactcgccttatatccatccttgtctttccagcttagtggaagccttgaaaattatcagccttacaactatgacagctatgamaaccagtagcagccactgtcaggacaaaacttgtttgaaggtcccctaaaatacttgtcactaaaaaattacatgatagctctctgtaaaaacccaatttgcagggcttgtatttgtttgacctgaccagaattcacccaatgggaaaagccctatccatagggtgtttgttaaaaataataagcaacatttgtttaactttgaagttttcaacaactcagtggcctggggggcattaacagttttacaaacaagggactagtaaaataatagaaaaggaaaatctgtccactgggacttt

SEQ ID NO: 313201 - DNA, 511 bp, Homo sapiens
aatcttggtatgaatggtaagataatagtagataaactcgccttatatccatccttgtctttccagcttagtggaagccttgaaaattatcagccttacaactatgacagctatgaaaaccagtagcagccactgtcaggacaaaacttgtttgaaggtcccctaaaatacttgtcactaaaaaattacatgatagctctctgtaaaaacccaatttgcagggcttgtatttgtttgacctgaccagaattcacccaatgggaaaagccctatccatagggtgtttgttaaaaataataagcaacatttgtttaactttgaagttttcaacaactcagtggcctggggggcattaacagttttacaaacaagggactagtaaaataatagaaaaggaaaatctgtccactgggactttgaaaagcttatgcatatttgagggggatctaaaaagccacatgcttgtgcaggaatctgmaaattgtagggtaagacctgaatttaagatgca

SEQ ID NO: 313202 - DNA, 548 bp, Homo sapiens
gctgctgtttgtttattaagttgatatttgcagaaacactttttgaggcactcaaaagactaactgcaaaggtttatagatttgatttacacccacctacacctccaaagggacgtgatgcagctacaaactttagtagagtataaatctggaaaatcttccaaccagctctgygtaatattagctccacaggaggataaaaagtataataaaggagagaaaagacatctcttttaaattttatatttaaaattagtccataggtttaattggctaccctgatttctttagcataggtcttcataatgaaatgtacattgttactctacaatgggtccaggacatgttatgtttctcatatatacttggtcactgaaagctttttgttgttctttttaacgtttaggctcggggacatgtgaagctttgttacataggtaaactcatgtcacttgggttcactgaacagattatttcatcacccaggtatttagtttggtatccaatagttatcatttctgctcctttccttcctctcaccctatacc

SEQ ID NO: 313203 - DNA, 553 bp, Homo sapiens
tattagctccacaggaggataaaaagtataataaaggagagaaaagacatctcttttaaattttatatttaaaattagtccataggtttaattggctaccctgatttctttagcataggtcttcataatgaaatgtacattgttactctacaatgggtccaggacatgttatgtttctcatatatacttggtcactgaaagctttttgttgttctttttaacktttaggctcggggacatgtgaagctttgttacataggtaaactcatgtcacttgggttcactgaacagattatttcatcacccaggtatttagtttggtatccaatagttatcatttctgctcctttccttcctctcaccctataccctgaagtagacctcagtgtcagttgtttccttctttgtgttcatgagttctcattactttgctcccacttatatgtgagaacatatggtatttggatttctgttcctgcattattctgctaaggataatagcctccagctccatccatgttccctcaaaatacattatctcattcgtttttat

SEQ ID NO: 313204 - DNA, 616 bp, Homo sapiens
attaacaataattctttgatatcatctaacagtctgttcattttcacatttctttgtctcaaatatgttgttttacagtcaagttttgttgttgttattgttttgttattttgtattgggatctatacagtgtctacayatttgatgataatgcctttttctctccatccccccttttaaaattgtagtataatttatataccatgaaaagcatgaatctaagtatatcacttagttaatttttgaaaagtggatacacttgtgtgacccacaccgttatcatgatggagaacatttccatcgctgaagacagttttctcacgtccctatctggtcagttccccacctcggaggcaatcacttttcatagattggctttgaacttgctctagaactttatataaatactataaagtacaaatcttttttgtgtctgtctttttgacttggcgtaaagtctttgggatttagccatattttggttgcactagtaattcattcctttttaatgctaaatattattttatggatatattatgatttgttgagttatttactgtagattgtttcttgtttgaggctattatgaagataggcactgtaaagctataaacat

SEQ ID NO: 313205 - DNA, 660 bp, Homo sapiens
actaaaatttttatttttgtatctactatgtctctcttggtataatcaatatttactctagtttgttgagtatatggaatagtgttatattaatgctttccatatccttgactactaatgccatcattggtggcatatctgtgttagtttcaattgacttattttttccctcattatgggttgtatttccctgcctctcaagatacctgataacattgtattggatgccagacgttatgaatgtaccttaggtggggattatttttgtattcctaaatatattcatgaactttggtctggggcatagttatattacttggaaacagtttgattctttagctcgtgcttttaagcttttcaggttggaccttcagcacagcatttcgtttaggggtaactatgccccactaytgaagcaagacccttagtagttctctatctgatgtcccatgacttatgaagttttttattctgactggtgggaatcagcattagtccccgtcctttgtaagcttcagacatttttccctctaatccttttagtgatctttttcctggctcaaggtaagtttctcacatgaatgctctgatcagtaatcaactgaatattcaaggcagactgtctatgaactttctaatttatctctctgagcatctatg

SEQ ID NO: 313206 - DNA, 560 bp, Homo sapiens
gcaaaggtgactcttgctatgttttagtaaagagactggtggcatttgccacagagacttgtggaactttgaacttgagasagatgatttagggaatctggtagaagaaatttctaagcagcagagcattcaagaggtgacttgggtactgttcagcattcagtttgatgaaagaagcagagcataaaagttcagaaaatttgcagcctgacaatgtgataaaaaagtaaaacccattttctggggaaggaattcaagctggctgcagaaatttgcataagtagcaaggaacctaagttaatcctcaagaccgtggggaaaatgtctccaggccatgtaagagaccttcacagcagcccttcccatcacaggcctggaggcccaggaggaaaatgtggtttcatgggccagggacttggtgccttgtgtcccagctgcttcagctatggctgaaagggccaacatacagcttgggctacggcttcagagggtagaagccccaagccttggcagcttccacgtggtattgagcctgcacgtgcacagaagtcaagaattga

SEQ ID NO: 313207 - DNA, 497 bp, Homo sapiens
ataccattgatatagagattagtggatgtgtataagtattttcaatctatggctttagagataaaatggtaagtgtaatgactgattacaagagctaaagtaattgccaaaattcaggggaataataaagcttagaactgtcamctttatattctgtcttgccctttctgtcaagtgtaggattattaaagtcattacctcagaaaaaatgtccactgctatccagtctgtagcctcacatccctcatttccaaccttgcacccttcttagtacacacaaaatgaaattgtttgccaactgtactcagtaaagattagagcacttttgcaaacaaagtttggttcctggacttgaactaaagaaatgaactatggtttacgtgaacaattactggggtgcagaaaggatgtttgttcaaataagaaatgaagttaggaaagaacaagcccagagtgttgtttattatcatcatgtaatgagaacgcttcattgtttt

SEQ ID NO: 313208 - DNA, 602 bp, Homo sapiens
actaagtaagcacggaaagagcttggaatatcctatttctggagtgaaatgcatctgtgaattataatagctgctagtttcatgatccttcactcctaatccagttcccaatattgttgaaagaattgtcacaacacatcacctttctatctcagaccactgaatttttcatatcattatcaagttatactcattcaactcttctttcccactttggagagatggggtacgattagaatgaaaaccaaagtacagccaactactggttatgtgagaagacttaaccatgagtaagaagtagtaagacttttccacccaagttttggtctttttagtccagccgatgttaacarttatcattacttggccagtgcccaatcatgactccaaattagatacctgcaccttacctggtcgtggccacacaagttattccacaccaacatatgtaacaggagcaataattaccctaggtaacacacagtgctactcagcactcagtaggcactcttccaagctatatatgagtattagctcacttagtctttacaacaactctgagattctgttataatcctgtttcagagacatgccaactgaag

SEQ ID NO: 313209 - DNA, 549 bp, Homo sapiens
tgctgtgtggacatgccaaatggattcatctgctctttatatgcattccctagacactgtacactaataactcaaggaaatggtctgtcatctttctcaaagcaaaaaaaagyctttgcctctggtttttcaatcccttgtcctttcttatttcactatttttataaattattaacatttgacttctttcttaggtaggagaaataaacgaaattaggcttgtttgtttttatatgggaatagtagttatttaagcctaataaatcaccagcctgatgaatcaggacctgggaaccagcctgacttgagagtcatgcattaaacatagcctccggggaacctatctatgaagaagctgtatctgattctctcttttgcttcatagattgttagactcagggatctttttttttttttgagatggagtcttgctctgtcgccaggctggagtgcagtggtgcaatcttggttcactgcaacctctgcctcccaggttcaagtgattctcctgcctcagcctcctgagtagctgggactacaggcacccgc

SEQ ID NO: 313210 - DNA, 549 bp, Homo sapiens
tgctgtgtggacatgccaaatggattcatctgctctttatatgcattccctagacactgtacactaataactcaaggaaatggtctgtcatctttctcaaagcaaaaaaaagcctttgcctctggtttttcaatcccttgtcctttcttatttcactatttttataaattattaacatttgacttctttcttaggtaggagaaataaacgaaatkaggcttgtttgtttttatatgggaatagtagttatttaagcctaataaatcaccagcctgatgaatcaggacctgggaaccagcctgacttgagagtcatgcattaaacatagcctccggggaacctatctatgaagaagctgtatctgattctctcttttgcttcatagattgttagactcagggatctttttttttttttgagatggagtcttgctctgtcgccaggctggagtgcagtggtgcaatcttggttcactgcaacctctgcctcccaggttcaagtgattctcctgcctcagcctcctgagtagctgggactacaggcacccgc

SEQ ID NO: 313211 - DNA, 486 bp, Homo sapiens
acggcagaatggtccaggatgatttgcctaaaagcttgtaaccaaaatggtcagagacagaattgctagccattagtgtctgggtttcaggcagagcacaggaggacagactttggaatcctgactatcactaacaagttaggtaaccatgggcaagttatttaatctctgaaccacctgtgagatggggaaaataataggaacacccatgcagggttcttgtgaggactaaatgaagattgttcacctgtgattgttaaacataggaatggcctcagagtaaatgctcaayaaaggaaagctaaaataattagaggcttaaattcacaacttttgaagtgtttctttaaaccaggttaaataaattcagagcctagagacagatatatatatacaaatgaatatttgatttatgcagagcagtgggatagacattttaataaatgaataaatggtactaacacaactgagtgtgcaaataagaaa

SEQ ID NO: 313212 - DNA, 478 bp, Homo sapiens
gatcctagcaagctattcagggtaggctaaagtcattttcttaaagtttattctaaatttagaaacacttgcattttatcctttgttaataatagtcttctagctaacctaacaagtggacataataaaggttattaaacattcataggattcctaatttcaagaagaagttctataaatatagtatacgtgaaggtaatgtatcaagggttttgaaatttgggataaagctgtatgggttattttcattaaaatggttttctctgtctgaacaatctatgttattcatttctatatatcatgttctgatactgttttaagccattttttgaccttacagcaatcggattcattaaaatttattacagctttattaaatacrggtagcaatataaaatatgcccagactaaatcatttgtgacaattctggtgtcgatctatttaaaataaagataatgccctcatgctaacttagta

SEQ ID NO: 313213 - DNA, 554 bp, Homo sapiens
ttttcttttcttgactctgtcaatacaagcgccttccctttgcactttcatttttgctttttctgctctacttcaccttcgattattttttccaagtgcaagttccacttaatacttttacagctkggaatatctacttttcttttaaagcttttggttttactcctttccttgagtgctttctttctatcattttgaatatatcctgccaccaaaacatcttgaaaaggaagctaggcatcttttattttgaccattacttttattttgattttttgttctagaaatatatgttccccccatatatatatatacacacacacatatgtatatatgtagaaatatatatatttcaacaaatgtatatatttcatagattttgagaaattaattttagccaattttagtagtaacatagatcagaaaagcgatataaagctctattttttttgttcatgagcctcttaattctattggaatacgtgtgtgtgtgtgtgtgtgtgtgtgtgaatttaagtgtattccaacctactggtatttatatatcaataagc

SEQ ID NO: 313214 - DNA, 607 bp, Homo sapiens
tgttttttcttctaatgccaggaaacctctctgaaggcaaagctgggctccgacagtcttgatgagctcattttgaaaatatgactatatacagggtgtcattcatttagtctctcatcttagcctaatatccacattggaaactgcttcctttgaggacgttcttgactatcttcttcaatgaagtgtgcctttggaaactgtcatgtagtgaagccccaagtctatgtgtatagyccttctaatagttcaaaaggaagctttctctccttaaggaggactttaaaaataattttctttgttcttagagtccagtcttgtctctacccagtcagtcttacaattttagactgtgttatgtctgtaacaatacattttcatagtcattcattcacttgtatactcattaaataccactgtgttggacattttcattttaaagaatatttaatcatgattcctcttaattactatacaccagaaattatcatagtgtattgaagctgtgttacaaattcctaatggggcccataagaaagatacctagtggccaggtggaaaagcaagtgatctagttcaatgaatggtatatttaggtcttccacag

SEQ ID NO: 313215 - DNA, 607 bp, Homo sapiens
tgttttttcttctaatgccaggaaacctctctgaaggcaaagctgggctccgacagtcttgatgagctcattttgaaaatatgactatatacagggtgtcattcatttagtctctcatcttagcctaatatccacattggaaactgcttcctttgaggacgttcttgactatcttcttcaatgaagtgtgcctttggaaactgtcatgtagtgaagccccaagtctatgtgtatagtccttctaatagttcaaaaggaagctttctctccttaaggaggactttaaaaataattttctttgttcttagagtccagtcttgtctctacccagtcagtcttacaattttagactgtgttatgtctgtaayaatacattttcatagtcattcattcacttgtatactcattaaataccactgtgttggacattttcattttaaagaatatttaatcatgattcctcttaattactatacaccagaaattatcatagtgtattgaagctgtgttacaaattcctaatggggcccataagaaagatacctagtggccaggtggaaaagcaagtgatctagttcaatgaatggtatatttaggtcttccacag

SEQ ID NO: 313216 - DNA, 632 bp, Homo sapiens
gtatttgagcatcgcagcccttagttatcagagagatttgtaaatctgggaaggatttttgggggacttgagtgaaacagaagtttctgccttaatttaaaaaaaaagggaaacttgaacaacaaaacacaataacagaaaagaattggacatctatggtatttttctacctttctggattacaatcaattatgtattatgatgactttttaatctttctctcagaaagaaaatattcagttgcacacagaagcaaaaaatattagttctcaaataaaaaacttataattaaaataagacagtagagctttytaaagtgtactcataaaatattaatagatatcctgccaacactttttaaacataagaaatgcaactgtgaaagacatagagcaaaattagtaacggaagaaattttctcacaagtgttattaatggcatgaacagaaatccaattaaatgtaatctgtttcctacaataaaagtgtcctggcacagaagtataaatttttttttttttttttttttttttttagcaaatctcatccatgacacaaatcaaaaagacacttgcttaggagattcctcaaatagttgaataaataaatacatcttattgtttgtactggcac

SEQ ID NO: 313217 - DNA, 546 bp, Homo sapiens
attttgttttgttcttgcatgtgggacagaatatatatgcctagaataaaactgacttttggttttaatgatttagttaagcacatgccttttatcatttcatcaagcccatggattttatatttcctttacatagttcaacaatgyaaatattaagtttacagataagaattcaattagcatttcaaagaggtcaaattaattccctctccgatagttgctgttatttcaggctacgaactgaaactcaattctgtaactatacaatttttaaaatcatacctatcaatttattcgagagaaacagcattggccctttttaactgaatagttttttaactaaaatcttgaatctctttttatatttcaattttctttaaaaggttgttatgagggactttaaagtaaatatttgtgtgcttgggaccatgcctggcatgtaacaaatgccccataaacataataataaataataaaataccaaaattaaagggaggcattcttttctcagtagtattgcttgcatgattccagaattatcataaa

SEQ ID NO: 313218 - DNA, 610 bp, Homo sapiens
aacctataattagctctttaattttttttatatctttatccctttccattaccaaattagaaayataattgcttaccaaaatgcacagtgaattgttttcgagggttaatattgtgcatgttcccagaagccagttatgtttggaggatttgggggttgtgatgaactgtacctagattgatgtatgcaattaaaatctttctaacctatgtatcaagagaattgtttaagcattgaagagttaatacggggaaatgagtttcatttaatgcacataattccagtgctgtgaaaacatagggggaaaaatcaattgaggttcatatacaaaacaaacaaacaaacaaacagaaaaccacacacacacattcagagaagttatttatttattttgtatgtgtgtgtgaaagacagagagacagagagaaatagacagagagagaaagagagagaattagaaatgattgaattaaagtgatttaaaaatcctgaatccagcgtatggtgtgttgtgatgatagatgttgaatcgaagttttgtcaaaacacaaaatgaacgttatataataataataaagatttgaatctattctgagttagatgaaaagag

SEQ ID NO: 313219 - DNA, 610 bp, Homo sapiens
aacctataattagctctttaattttttttatatctttatccctttccattaccaaattagaaatataattgcttaccaaaatgcacagtgaattgttttmgagggttaatattgtgcatgttcccagaagccagttatgtttggaggatttgggggttgtgatgaactgtacctagattgatgtatgcaattaaaatctttctaacctatgtatcaagagaattgtttaagcattgaagagttaatacggggaaatgagtttcatttaatgcacataattccagtgctgtgaaaacatagggggaaaaatcaattgaggttcatatacaaaacaaacaaacaaacaaacagaaaaccacacacacacattcagagaagttatttatttattttgtatgtgtgtgtgaaagacagagagacagagagaaatagacagagagagaaagagagagaattagaaatgattgaattaaagtgatttaaaaatcctgaatccagcgtatggtgtgttgtgatgatagatgttgaatcgaagttttgtcaaaacacaaaatgaacgttatataataataataaagatttgaatctattctgagttagatgaaaagag

SEQ ID NO: 313220 - DNA, 513 bp, Homo sapiens
aatgtgcttgctgttttatcacaataagtttcctcattttaaaactgaatgagatgaaaaaagtttatagtttttcccaatataaascaacaaaaactccaaaaaataatgttgcttttaattcatgaataatattcaatatgcaaacttcccctcctgttttccccagtgttttaataaccctcagcaaattccttatccttacataaagtaactacgaagaaaaatggtgtcaattggttaaacagactccagtaatgggagtctaccctttcatcatcttagccaaaaaaaaaaaaaaatgaagatgcatttttttccctattttcacaaaaggcagtgtctgtttcataggatttcctgcgaccatctcctcaatgaccctgtcattatcagtgtgagtagtgagaaaacgaaaaccaaagctgcagatgtggctcctttggaaggcaatttacttacctaaaaatactcacacgcatatggacatccccctcccttaacgtaacagat

SEQ ID NO: 313221 - DNA, 513 bp, Homo sapiens
aatgtgcttgctgttttatcacaataagtttcctcattttaaaactgaatgagatgaaaaaagtttatagtttttcccaatataaacmaacaaaaactccaaaaaataatgttgcttttaattcatgaataatattcaatatgcaaacttcccctcctgttttccccagtgttttaataaccctcagcaaattccttatccttacataaagtaactacgaagaaaaatggtgtcaattggttaaacagactccagtaatgggagtctaccctttcatcatcttagccaaaaaaaaaaaaaaatgaagatgcatttttttccctattttcacaaaaggcagtgtctgtttcataggatttcctgcgaccatctcctcaatgaccctgtcattatcagtgtgagtagtgagaaaacgaaaaccaaagctgcagatgtggctcctttggaaggcaatttacttacctaaaaatactcacacgcatatggacatccccctcccttaacgtaacagat

SEQ ID NO: 313222 - DNA, 546 bp, Homo sapiens
ttccagaacagctacaactcaactgtccccccctccatgcatgctattctttccttattggccttcttggttattagaaaaagtgtctgtgtattcagaacctcagccattcgaacaggcgtttctccctcattccacaactggctagcctccaggtactgtggtgttaccttagaaatgtctgttacctctgttctytggattccattttaacagatattgttctaattcctttgcataaggttttcccctttctagtttttctctttctttttcagtatagctttcataatttcaacaaaataccctttccaatgcaaatatctaatatcatcccctactcaaaaaaaatttgacttttaactgcttgcataataaactatattatttttagtgttttccacaatcaggactttatcaaatgtcacatcctccaggcagttcaagtactttgaagaattttctctcctctatgactttccacatgttgttttatttctccacgtatgtattctacgtatatttcaaaaatactaatcaaaagtc

SEQ ID NO: 313223 - DNA, 570 bp, Homo sapiens
tgatagttttgacttcatttaatgctttcactctgaagttttctacataagaatgtgaagaaatttaacacaaatcaatgaattaattaaagtgcttccatgctatatccaaagaaagtaaaaacttattgaactaattttcaatttaatgtgtctctaaataagcatagaatttcagaactgttggatattatgccagactatttcctgctctctgttaaaatcaatatgaaattatagcacacttattaatggcaaagatcatagaatttatataagccttcgtctttgccctcaagaaattaacaactttggttgcrgagacacacaacatccaaacacataaaaaaactgaggaatgacaacgtttaatgcatcataacgtgcaaattgaggagagaatcatgatacaagataaatgctcccttgagaaagggaactttcattgttgaccagagttaatggaggtaggcttctagaattaggtgggcactgagatgaccgctgaagggtggtataatttagataagtagaaaaagaaagaaaatacattcaaggtcaagaaaataa

SEQ ID NO: 313224 - DNA, 570 bp, Homo sapiens
tgatagttttgacttcatttaatgctttcactctgaagttttctacataagaatgtgaagaaatttaacacaaatcaatgaattaattaaagtgcttccatgctatatccaaagaaagtaaaaacttattgaactaattttcaatttaatgtgtctctaaataagcatagaatttcagaactgttggatattatgccagactatttcctgctctctgttaaaatcaatatgaaattatagcacacttattaatggcaaagatcatagaatttatataagccttcgtctttgccctcaagaaattaacaactttggttgcagagacacacaacatccaaacacataaaamaactgaggaatgacaacgtttaatgcatcataacgtgcaaattgaggagagaatcatgatacaagataaatgctcccttgagaaagggaactttcattgttgaccagagttaatggaggtaggcttctagaattaggtgggcactgagatgaccgctgaagggtggtataatttagataagtagaaaaagaaagaaaatacattcaaggtcaagaaaataa

SEQ ID NO: 313225 - DNA, 570 bp, Homo sapiens
tgatagttttgacttcatttaatgctttcactctgaagttttctacataagaatgtgaagaaatttaacacaaatcaatgaattaattaaagtgcttccatgctatatccaaagaaagtaaaaacttattgaactaattttcaatttaatgtgtctctaaataagcatagaatttcagaactgttggatattatgccagactatttcctgctctctgttaaaatcaatatgaaattatagcacacttattaatggcaaagatcatagaatttatataagccttcgtctttgccctcaagaaattaacaactttggttgcagagacacacaacatccaaacacataaaaaaactgaggaatgacaacgtttaatgcatcataacgtgcaaattgaggagagaatcatgatacaagataaatgctccctygagaaagggaactttcattgttgaccagagttaatggaggtaggcttctagaattaggtgggcactgagatgaccgctgaagggtggtataatttagataagtagaaaaagaaagaaaatacattcaaggtcaagaaaataa

SEQ ID NO: 313226 - DNA, 529 bp, Homo sapiens
atatatgcacacatatatgtgcaaacacaataatacattatatgtattatatataataatatataatatatataatatatacaaacatataatgtartacattatatgtttgcacatatgtgcaaacacaataatacattataaatcataggcaaagactaatagatgtatacatacacagtcacaaacaatttttcattgttacaaagggatcgttgatacatatgttaagtttgataagaaccactttgagtcttaattgtactttctccaggtaccaaataatttgcattttgcatattagttttcatttattctaaactatattaaattcagggtttttcacattatcagtattttgtcaagcgtgttgacatatttttctaacatggatctccaactttgtgattcctacttttattcatttaaactggtttctgaaaatttatggttcctagagaataaattacgtttcacctggattttgcattctaaaagccaagaccatgtataaagcacatatgagatt

SEQ ID NO: 313227 - DNA, 529 bp, Homo sapiens
atatatgcacacatatatgtgcaaacacaataatacattatatgtattatatataataatatataatatatataatatatacaaacatataatgtaatacattatatgtttgcacatatgtgcaaacacaataatacattataaatcataggcaaagactaatagatgtatacatacacagtcacaaacaatttttcattgttacaaagggatcgttgatacatatgttaagtttgataagaaccactttgagtcttaattgtactttctccaggtaccaaataatttgcattttgcatattagttttcatttattctaaactatattmaattcagggtttttcacattatcagtattttgtcaagcgtgttgacatatttttctaacatggatctccaactttgtgattcctacttttattcatttaaactggtttctgaaaatttatggttcctagagaataaattacgtttcacctggattttgcattctaaaagccaagaccatgtataaagcacatatgagatt

SEQ ID NO: 313228 - DNA, 580 bp, Homo sapiens
ttttttatggttgtgtagtattctatggtatatatttgccacgttttctttgtctagtctatcattgatgggtgtttggattggttccaactctttgctattgtgaayagtgctgcagtaaacatatgtgtgcatgtgtctttatagcagaatgatttataatcctttgggtataaacccagtaatgggattgctgggtcaaatggtatttctgactagaaatgttgagaattaaaatgttattgcttataagaaaattaatcaacagtagttcaaatagtacttctttttttttttcctttttgttatagtttctgatatggaatgggcatcttttctatgtctttgtacatcattatacttttttctgagtttggatcaacttctaacaacttattcttttgtaaagaaatgtctgagttttcctgtaatgtcaagtttcagagcatcatttcttctgggatatcttcatcatttttgacacaacttcttccctcatttatgtcaacaagttcattttcacaaagttcctctggctgtgtatcagagtccctctgaaaagtgagagtgtgaacattca

SEQ ID NO: 313229 - DNA, 580 bp, Homo sapiens
ttttttatggttgtgtagtattctatggtatatatttgccacgttttctttgtctagtctatcattgatgggtgtttggattggttccaactctttgctattgtgaatagtgctgcagtaaacatatgtgtgcatgtgtctttatagcagaatgatttataatcctttgggtataaacccagtaatgggattgctgggtcaaatggtatttctgactagaaatgktgagaattaaaatgttattgcttataagaaaattaatcaacagtagttcaaatagtacttctttttttttttcctttttgttatagtttctgatatggaatgggcatcttttctatgtctttgtacatcattatacttttttctgagtttggatcaacttctaacaacttattcttttgtaaagaaatgtctgagttttcctgtaatgtcaagtttcagagcatcatttcttctgggatatcttcatcatttttgacacaacttcttccctcatttatgtcaacaagttcattttcacaaagttcctctggctgtgtatcagagtccctctgaaaagtgagagtgtgaacattca

SEQ ID NO: 313230 - DNA, 549 bp, Homo sapiens
tgaaacgtaaaagaatcaaagattttacaacctactagaatctaataaccttggctaaaacaaaagttaaatcgccaaataccgtggttaaaaaggataacttttataaagcaatttttaaatacttcccatttgtattttagaaattgtctcrtcaatttttggttaagaaacaaaaaaaattcagatgcaatttagtatcttctaacagagaatgttatctgagacgtttaaattgtaaatccttcacaaattatgaaaggagaataaaatatctgtgatttgaaagactgttcttacctttctaaaaaatatttttgacaaccatcattagtatagtgatctaaaattcactatatatttttatataaacaatcccaattatttgtatttaatcgaactggggatctttatctttccaatgtgacagagatatagaaggacttaccccaagatctcgaagttgcaaagcatggaatgtgtattgaatttcaggtctcctgttccaaatcctttgtctacaccaccatactgtaatctcctaattca

SEQ ID NO: 313231 - DNA, 536 bp, Homo sapiens
agctaagcagggctctctagaagactcaagacaaaaaccagttcagcactaccctcctatcttggcataaagccttataatgaaggtgtttttgattaattaattaattaattwattttgcatctaaaaagaggaatggttctcttctaaggtcagtaaatcagtactctaaccaggggcctgtggactttttctgggtaaagttagagagtaaatattttagctttgtaccacatacagcctctatgccaactcttcaactctgcccttgcagtgcaaagcagtcacggacaataggtaagtgaatgagattttagttacacaaatacaggagactggatttggcccacaggtatggtctgcccacctctgatctcactcattatctctgtgtatgttgtacttttagctctgtgataaatgccttataattcttcatattgaaaaacagatatcccagttgcctgaataatacaatatatcccagttgcctagagtaatacaatgtatagtaatacaatatagctaatacaatt

SEQ ID NO: 313232 - DNA, 620 bp, Homo sapiens
atagttaatattaagtgaatatttcaacagtatgcattaaagtcattgagatgtaaattttcagtgaagacttcctcatagacagggaatctgaaggttrgaagaattggctgctgcaggcattataagacaggaatagaggcaggtcagggaagttgtttgcagaacattcattaggcttaatagaaggagagaaagaaaaactacagagtaaaagcataaaaaagacagtcacccatggtttccaggatcccttaaaaagaaaacctgagttatcatctccagctatacaatcaaatgagtcagtaaaaccgttattgataatgagcaaggatctccctttgtccctgcaacgcgacacattgggaaactttttttacacctatcagttgccttcttccctttaaaaactggagaaaagcattttagtgaatgttttgacatgcaacatacttgttacagattattcttctgcatcataccttctgaatatggactttagagcttggcatatttgcttctattaattaaagggagagtatatttgttccccagatattaaataaagtactgaatcaaagaccctgagcaatttaaacctaattcctgaccttttaata

SEQ ID NO: 313233 - DNA, 620 bp, Homo sapiens
atagttaatattaagtgaatatttcaacagtatgcattaaagtcattgagatgtaaattttcagtgaagacttcctcatagacagggaatctgaaggttagaagaattggctgctgcaggcattataagacaggaatagaggcaggtcagggaagttgtttgcagaacattcattaggcttaatagaaggagagaaagaaaaactacagagtaaaagcataaaaaagacagtcacccatggtttccaggatcccttaaaaagaaaacctgagttatcatctccagctatacaatcaaatgagtcagtaaaaccgttattgataatgagcaaggawctccctttgtccctgcaacgcgacacattgggaaactttttttacacctatcagttgccttcttccctttaaaaactggagaaaagcattttagtgaatgttttgacatgcaacatacttgttacagattattcttctgcatcataccttctgaatatggactttagagcttggcatatttgcttctattaattaaagggagagtatatttgttccccagatattaaataaagtactgaatcaaagaccctgagcaatttaaacctaattcctgaccttttaata

SEQ ID NO: 313234 - DNA, 608 bp, Homo sapiens
tgtaaacacatgtaaagcacttatgacaatgcctaccacatagtaattcttagtaaattattctaatgctactatttttgctgctgcaaccaccactattactcctcttcctctcactcctcctcccttcttttacccacagtctagaaatgggtgctccctagagttctgttctttgctcttatctcctctgagttccctccagggccatcatgtctactgtcaagttttcaaatcaccacatgtatttttatatttctcaaatcttcatttccaatccctcacttgaattctagagtggtgtatataactacctactgaacaactcttctttgatatcaggttggtatcttaaagtcaaagtttatgaatctaacatcaatagctttcctcaaaacatgatttttaattcatgtcttattaagattrgtgacttcccattcagtaatcatccaagacagtagtcacagcctgcttttccccttgcttttctttttaattgactgctgtgtcataagaaagaggttttgctgcaagtaacagagaccataagtaaaatggcttaacatgatcatttattttattttatatattctcagaggctcttg

SEQ ID NO: 313235 - DNA, 608 bp, Homo sapiens
tgtaaacacatgtaaagcacttatgacaatgcctaccacatagtaattcttagtaaattattctaatgctactatttttgctgctgcaaccaccactattactcctcttcctctcactcctcctcccttcttttacccacagtctagaaatgggtgctccctagagttctgttctttgctcttatctcctctgagttccctccagggccatcatgtctactgtcaagttttcaaatcaccacatgtatttttatatttctcaaatcttcatttccaatccctcacttgaattctagagtggtgtatataactacctactgaacaactcttctttgatatcaggttggtatcttaaagtcaaagtttatgaatctaacatcaatagctttcctcaaaacatgatttttaattcatgtcttattaagattggtgacttcccattcagtaatcatccaagacagtagtcacagcctgcttttccccttgcttttmtttttaattgactgctgtgtcataagaaagaggttttgctgcaagtaacagagaccataagtaaaatggcttaacatgatcatttattttattttatatattctcagaggctcttg

SEQ ID NO: 313236 - DNA, 579 bp, Homo sapiens
tgtctctagggtagaattgccagaaactcaagttgacatcataccatttcttactcccagcatgtgcctttattttgacattcatcaaaaattctgtcaccgtatgtctgtaggtacataaaggtctttaggtatgagcatcaatttgccataaataaagaaaaagcagtttagctatcccttgatagcaatttgtgtttaaatttgacatccgcaggcacaaaaataatgttttgttgtctaacaattagattattagaaggtatgtatatatgggcatataaacaactaaaatcartaatgatctaaacttcagacaaactattttccatctaagctgtaaaagttagctaaatagatttgtactaaaataattaaaaatggcaaatgacaaaatgtgggactagtcattgcagttttttgaaggtcaagacaaattttaacaatgcacaatataatatttgtctaacagatttagcatagctaaattgaaagctctgtcagcacggcagaaaatcagaatttaaattattgagtaatggcactatcattaaaaatgtcaagcatcaagtttatttt

SEQ ID NO: 313237 - DNA, 532 bp, Homo sapiens
ttggatttaagaaaaacatagcccatagaaatgtaaaccttaaaaggccactattgctaaagctcaatttggggacacttttcgttaacactgctcaacatgagagaaatgcaaccacgatggacttgcccagattcttttaatagaaaatgttggcatcaatttccaatggaatgcatttgcagtttcattcttgcacttaaactgttacaaattagaaagattwtctaaaaataaaagaaatgtttctttgggacaaagctcttgttgattctctcctcgaaaaccattgcattttgttggggaaattgagctcattgcatgagccttgggaaagggaaagggaaaagtgctttcaataagagagaacattgttttctttgtggagttttcgatgtggcagcagggttaccagtaatacttgaggcaaatgatcaaaatatcaggtatgcatttcatgccaaggattctgtttctcagaccctccaagatgaatgttttctcctggcactgagggcttagcattgttctc

SEQ ID NO: 313238 - DNA, 364 bp, Homo sapiens
catgattgatttttaaatatttctgtatttttcttaccagtattttgtttagaagtttgcaaatatgctcagaatttagattgaacaatagttttttctttgtgctaacattatccagtttggatattaagaatatgccattttatggaayaaattggatggatttctgtattttcctaagctgttgaacaatttaaataaatttaaaattattatttttgatttttaataaaaatctatgcaaaaccatcagatcctagtatctcttaggagatttacgactacttttccagcattgtttatgttcgtggatctattggtttttccatctcttcttgagttgatgtggacattgaaattcgag

SEQ ID NO: 313239 - DNA, 558 bp, Homo sapiens
gaatgtgggacattgatgagattagacctgaaggattttcaggaaacctgtgacaataacactgcaaatactggcataatttttaaagaatgggaaggtaagaagcgtcctgcaggagcatgccgaattctgtgtcactcagtggttccgtctccccgtggctgyatggaggtcacacgagggagatgtgccaactgcacacagaactaactgcctaggcagctttgccaggagtatttatggctctgtcttaaatctctgattttgatatccacaaataggatagcatcatagttttggactctttgacaccaatttcgacctgtcatctacttagcccatagccattaccataatctcaaaatcaagcattccactcttagacattatttcccacctttactgtcagcccatctagtgcccagatgccaataacaattccaactcttttggatttccaatttatggaaacttccccactgccttcaggtgtctttttacctgactgatttccctggtccaacgtaacgaacactccctcaaatgtaagctctatat

SEQ ID NO: 313240 - DNA, 558 bp, Homo sapiens
gaatgtgggacattgatgagattagacctgaaggattttcaggaaacctgtgacaataacactgcaaatactggcataatttttaaagaatgggaaggtaagaagcgtcctgcaggagcatgccgaattctgtgtcactcagtggttccgtctccccgtggctgcatggaggtcacacgagggagatgtgccaactgcacacagaactaactgcctaggcagctttgccaggagtatttatggctctgtcttaaatctctgattttgatatccacaaataggatagcatcatagttttggactctttgacaccaatttcgacctgtcatctacttagcccayagccattaccataatctcaaaatcaagcattccactcttagacattatttcccacctttactgtcagcccatctagtgcccagatgccaataacaattccaactcttttggatttccaatttatggaaacttccccactgccttcaggtgtctttttacctgactgatttccctggtccaacgtaacgaacactccctcaaatgtaagctctatat

SEQ ID NO: 313241 - DNA, 581 bp, Homo sapiens
ttttatgacttgtgctgaagcagtcagtaagttatcatagttctcatttgagtagttgtaggcctctcaattgcttcctaagtaaaaagtttttctggccaattttaatcttgctcagaaacatgaaaaygtatttcctgtgtataccatggacaaagttcctggagaaaacatgtttatctaactttagtcactttttttctgaatcatgtgatggttttgacttaattcaactgtattaactcaaagaaatccaaattttcaattcaaccagaaacaaatggaattgtacttgcatggaagaaccaagattattttcttttaagtaacacagttaggtttttttcctttcagaaaatatattagagaattgtttgtgttaactattttaacattgtgcatgtcagtagtaattaaaaccttaaaatcaaaaagtagatttttaactttgaattgagatattcctgactggagggattgtttctcctctttttctttctctgtttccttctattcatcctcttttatcttcctcttctttcttacattctcttgttgaagtatctgggtgatcatttttt

SEQ ID NO: 313242 - DNA, 542 bp, Homo sapiens
tagaaacgggttttcaccatgttggccaggctggtctcaaactcctgacctcaagtgatctgcccgcctcggcttcccaaagtgytaggattacaggcgtgagccatcaaacccagcctgcctttctgttttaataccatgttacaaataagtcaaaagtcaaagaaaaattgtcaacctccaaattaagaaaaaaaaactgcaaacatttctttgtaaaattaattcctttctgtcctttggatgaagtttagtatttatggaaaagaatcagcactaaaaatttaatgtgttgctccaacttggcagcacacacattttggtactgttccaactttaattctcgactaaaataaaatgtagttcacctacaaagcagcattctcagcacagacccagatatatcagtcattgatgtgacaccatctagtaggaaaaaaactaggtgactggtttcactaactttcagagtagaaagattctcaaaaccacagccctaccaagtttgtcaacacaacttcacaatgtcttttttcctgcag

SEQ ID NO: 313243 - DNA, 542 bp, Homo sapiens
tagaaacgggttttcaccatgttggccaggctggtctcaaactcctgacctcaagtgatctgcccgcctcggcttcccaaagtgctaggattacaggcgtgagccatcaaacccagcctgcctttctgttttaataccatsttacaaataagtcaaaagtcaaagaaaaattgtcaacctccaaattaagaaaaaaaaactgcaaacatttctttgtaaaattaattcctttctgtcctttggatgaagtttagtatttatggaaaagaatcagcactaaaaatttaatgtgttgctccaacttggcagcacacacattttggtactgttccaactttaattctcgactaaaataaaatgtagttcacctacaaagcagcattctcagcacagacccagatatatcagtcattgatgtgacaccatctagtaggaaaaaaactaggtgactggtttcactaactttcagagtagaaagattctcaaaaccacagccctaccaagtttgtcaacacaacttcacaatgtcttttttcctgcag

SEQ ID NO: 313244 - DNA, 604 bp, Homo sapiens
tatacattgttggccgcacatggtggctcaygcctgtaatcccagcactttgggaggccaaggtgggcggatcacaaggtcaaaagatcaagaccatcctggccagcatggtgaaaccccgtctctgctaaaaatagaaaaattagctgggcgtggtggcatgcacctgtagtccgagctactcgggaggctgaggcaggagaatcgcttgaacccagcaggcggaggttgcagtgagccgagatcacaccactgcactccagcctgggccacagagtgaaactctgtctcaaaaaaaaaaaaaaaaaaagaaaaaaaaagaaatcatatacattgttactatgaaaataatgtttacactaagtgaatatatatgaggaagcattaatcattaaaatatttttcatgtgtttccttttgaggaggggcatatatcatgtatttatttcaaaaagagatttggggggataagtcctttttttgcttcattcgaatacattaagtactctacttaaatactctccacaaaattgtatcctaaatgattctgagaaaatacataattttaatagtgtatgtgttggcgtgcatttggaaaggttct

SEQ ID NO: 313245 - DNA, 604 bp, Homo sapiens
tatacattgttggccgcacatggtggctcacgcctgtaatcccagcactttgggaggccaaggtgggcggatcacaaggtcaaaagatcaagaccatcctggccagcatggtgaaaccccgtctctrctaaaaatagaaaaattagctgggcgtggtggcatgcacctgtagtccgagctactcgggaggctgaggcaggagaatcgcttgaacccagcaggcggaggttgcagtgagccgagatcacaccactgcactccagcctgggccacagagtgaaactctgtctcaaaaaaaaaaaaaaaaaaagaaaaaaaaagaaatcatatacattgttactatgaaaataatgtttacactaagtgaatatatatgaggaagcattaatcattaaaatatttttcatgtgtttccttttgaggaggggcatatatcatgtatttatttcaaaaagagatttggggggataagtcctttttttgcttcattcgaatacattaagtactctacttaaatactctccacaaaattgtatcctaaatgattctgagaaaatacataattttaatagtgtatgtgttggcgtgcatttggaaaggttct

SEQ ID NO: 313246 - DNA, 626 bp, Homo sapiens
taaaaatataaaaattagctgggtgtgctgggtgtggtggtgagtgcctgtaaccccagctactcgggaggctgatgcaggagrctcacttgaacctaggaggtggaggttgcagtgagccaagattgcgtcactgcactccagcctgggtaacagagtgaaactctcgctctcaaaaaaaaaaaaaaaagaaaaaaaaagagtgaaaagcgtgactttcaggaggcggctctgtgacttccatatcctttcttgcttagagcaaggatcctgtctaagtaagtttgggctgctacaacaaaaatatcacaaaccaggaggcctaaacagcaaatgtttattactcacggttctggatcaaggcgccagcaaatccagtgtgtggtgagggcccacttcctagtctgcagtcagctttcttcttgctgtatcctcatacagtggagaacagaggcagaaagcaagctcatatgcctctcttataatcatactaattcccagtcacatgggctccaccctcatgacctaatcacctcccaaaggccttacctcctgatatcatcagatggagggttagggtttcaatatatgaatttgggggctggggggacgcagtccaaatcaga

SEQ ID NO: 313247 - DNA, 626 bp, Homo sapiens
taaaaatataaaaattagctgggtgtgctgggtgtggtggtgagtgcctgtaaccccagctactcgggaggctgatgcaggaggctcacttgaacmtaggaggtggaggttgcagtgagccaagattgcgtcactgcactccagcctgggtaacagagtgaaactctcgctctcaaaaaaaaaaaaaaaagaaaaaaaaagagtgaaaagcgtgactttcaggaggcggctctgtgacttccatatcctttcttgcttagagcaaggatcctgtctaagtaagtttgggctgctacaacaaaaatatcacaaaccaggaggcctaaacagcaaatgtttattactcacggttctggatcaaggcgccagcaaatccagtgtgtggtgagggcccacttcctagtctgcagtcagctttcttcttgctgtatcctcatacagtggagaacagaggcagaaagcaagctcatatgcctctcttataatcatactaattcccagtcacatgggctccaccctcatgacctaatcacctcccaaaggccttacctcctgatatcatcagatggagggttagggtttcaatatatgaatttgggggctggggggacgcagtccaaatcaga

SEQ ID NO: 313248 - DNA, 536 bp, Homo sapiens
gtaaagaaataagaggagtaacttctcatcctgtaaaccttaatttgcaacaggtgaccccaagctcataaacattatttctttcattttgataccagcctagaaacattttaagcttttgatctatttattgtaaattatgggatgcaatgccactttgtatttgcacaatgattagggataaaataggttttccaaactataattagacacagagaaagaggtctttttcctcttccatctcgtaaataattagagacccaaacccacattaataggtgttcccacaggatcttattttaatctctggcaaacaacttgctcaaattctaaggaaaaaagttaataatcttccaggtattaatacttcatgatatgcttttgttacgaagaataccaccamcactaacatcaacaaaacaaaacaaaaaccctgtatgactatcattaaaatacacattcaacaaagatggactcagttttatacttcagaattgtgggagacagaaaaatgaaaatcttaaaggctggccttt

SEQ ID NO: 313249 - DNA, 623 bp, Homo sapiens
ctataattattggcatttgtgggaattgttctaagaacatttagccatttyaatccaattttctttctttatgggccttaacaaagaggggaatatacacagaggctttcaatccacagccactcttttattctctcttattggagaatagaaaccagacctatggcttatctcaaatataaatcttattcaacatacaacaaaggggacacatatattcacaatgaatttttgtcatcttgtgtcttcaaaagagattttaggttggctttggctgcaaaaaaattatatgttgacttttggttggaagctttgttctgaaatattttatcaaaatgatattcttataaagggctactttgtaaataatactaaaatggccaaatttgtaagacttaagttatgaattttttggtattactttattcagttttaacatagttttgcatatgatagatgaccataaatatatgcagttgatttattttattggcatctgtgtattgtcaaagtagatatgttaatgatgcattcactcaggcaactttccatagatactgtttttggagtctctatcaaatggcctttaaagctgcttaactacaataaaactggcatcatta

SEQ ID NO: 313250 - DNA, 623 bp, Homo sapiens
ctataattattggcatttgtgggaattgttctaagaacatttagccatttcaatccaattttctttctttatgggccttaacaaagaggggaatatacacagaggctttcaatccacagccactcttttattctctcttattggagaatagaaaccagacctatggcttatctcaaatataaatcttattcaacatacaacaaaggggacacatatattcacaatgaatttttgtcatcttgtgtcttcaaaagagattttaggttggctttggctgcaaaaaaattatatgttgacttttggttggaagctttgttctgaaakattttatcaaaatgatattcttataaagggctactttgtaaataatactaaaatggccaaatttgtaagacttaagttatgaattttttggtattactttattcagttttaacatagttttgcatatgatagatgaccataaatatatgcagttgatttattttattggcatctgtgtattgtcaaagtagatatgttaatgatgcattcactcaggcaactttccatagatactgtttttggagtctctatcaaatggcctttaaagctgcttaactacaataaaactggcatcatta

SEQ ID NO: 313251 - DNA, 537 bp, Homo sapiens
aggtggccctaaattcaatcatgagtgtccttacgagagaggcaggggaggattccataggcgcagaaaagaagtcagtgtgaccacagaggcagagggtggagtaatttggctgcaatkcagggaactccagcagccatcagaagctataataaaagtggcaagcagcatgtttttccctagagtctctgcagggaacatatccctgctgacaacttgatgtcagctcagtaatactgatttcagacttctgccctccgtaactgtgagaaaataagtttgttgttttaaaccaccaagtttgtggtcatttattatagcgcccagaaggcactaaggtaatggccaagaattttttttttcaaattttctactcttttttaagtaacaggcacaaacttctctaaatattttttaatttttatccctaatatctaacatgtcaagttctgttgattctatttaatacatctctctctaaattattccttcttttacagacccactgccattgtccttgcacaaatgacttttgat

SEQ ID NO: 313252 - DNA, 644 bp, Homo sapiens
ttgtcattacacatagggatttaagtatcagcttgtggcactattgtgtgacaggagggttgggaaattgcaaaataatttaggaattttaaaatctaatgaagaaaatatcaggcctaaatgtatgcattgtgaattctatacaactagaaacctttaagtgaaaaaacacaatggctatttaggtattcacattagataaattttgtctctagtgatctacytacacattataaactttttctatactcttgttaaattcatccatgaggtaattaaataaattctgtaattagccctcaattttatgtttattagaaatagtttgactgtgtgtctttttcttttatactcagattattgattaaatgaattttcctatgtaataaattctaatacatattaaaatctatttattttggtgtccagtgtatattctctcattcactgaatatttaccaaacagttttcatgagacaagtactttctagattctagatgtgctgcttcaaataaactcattctatatctttggattatcagacctcgtattattataaaaccagtaagtgctaagagacatctaccccagagtaaggactagtaaccatggtaactaggggagtcatgtcataaattaattt

SEQ ID NO: 313253 - DNA, 644 bp, Homo sapiens
ttgtcattacacatagggatttaagtatcagcttgtggcactattgtgtgacaggagggttgggaaattgcaaaataatttaggaattttaaaatctaatgaagaaaatatcaggcctaaatgtatgcattgtgaattctatacaactagaaacctttaagtgaaaaaacacaatggctatttaggtattcacattagataaattttgtctctagtgatctacctacacattataaactttttctatactcttgttaaattcatccatgaggtaattaaayaaattctgtaattagccctcaattttatgtttattagaaatagtttgactgtgtgtctttttcttttatactcagattattgattaaatgaattttcctatgtaataaattctaatacatattaaaatctatttattttggtgtccagtgtatattctctcattcactgaatatttaccaaacagttttcatgagacaagtactttctagattctagatgtgctgcttcaaataaactcattctatatctttggattatcagacctcgtattattataaaaccagtaagtgctaagagacatctaccccagagtaaggactagtaaccatggtaactaggggagtcatgtcataaattaattt

SEQ ID NO: 313254 - DNA, 622 bp, Homo sapiens
ttatttttactcttcgaatatgtttctggctacaaaatgtaaagactcccaattaccaatatgagaaataagagaaataatggaaaaatagttataaaattaataaaccattgtagaatatttgcaaaatatttttacaggaggtgaaatgtagtaatggattgttttatagtttggtccrtttttgaattgggaatttaaaaaagtaacctagaataaagtatgtctattcttgtaactccagacattccattgcagtgagattagcatggatttggggtgaaaaagtagtatatactttcaaatgaccaatgaaaatacagtttacctttcaatagtcttatgattatgttatttaaagatgtttggaagatcaaaaggaaaatatgcagtagacatagttattgcaatttgcacatggtttccataaaccagatgatccatcagagttaacatggttctttacttttaattatctatttttcttagtatgttttcctactggatagcggccgggagtactccacctaagaccgcatgctctgtcaatctgttaccaggaagctttcaaaccggttttgattacgagcaaatctgtctacaggaagacacgccctgcctt

SEQ ID NO: 313255 - DNA, 622 bp, Homo sapiens
ttatttttactcttcgaatatgtttctggctacaaaatgtaaagactcccaattaccaatatgagaaataagagaaataatggaaaaatagttataaaattaataaaccattgtagaatatttgcaaaatatttttacaggaggtgaaatgtagtaatggattgttttatagtttggtccgtttttgaattgggaatttaaaaaagtaacctagaataaagtatgtctattcttgtaactccagacattccattgcagtgagattascatggatttggggtgaaaaagtagtatatactttcaaatgaccaatgaaaatacagtttacctttcaatagtcttatgattatgttatttaaagatgtttggaagatcaaaaggaaaatatgcagtagacatagttattgcaatttgcacatggtttccataaaccagatgatccatcagagttaacatggttctttacttttaattatctatttttcttagtatgttttcctactggatagcggccgggagtactccacctaagaccgcatgctctgtcaatctgttaccaggaagctttcaaaccggttttgattacgagcaaatctgtctacaggaagacacgccctgcctt

SEQ ID NO: 313256 - DNA, 569 bp, Homo sapiens
atttgggtttacataagaagtaaatggaacagtcagtcaggactacatcttaggtcttacagttctaatcttagtgtacatggcctctggtctgtaaaatgcaattacatgatacccagagatactgaacttttaggttgtacatccaaaataaagagaggaacgccttagctggaacaaaaagaagagtatatgtaacttaagatctttcattgtgctatgcctcttccatgtttgagttacagggttttcgtgtggtcactaagtaaagaaaacagggggatgagttgatgcttgctaggtggggttgttggccctgacctgacttggacttctcagaaatatcacagtgttaagaataatcaattttgatcttacaactgcagcagccctaatagatgaagagtggtttattttttttttaagtctatgtgtttcaagccagctagarcgttgctttgttaatcaaataaactattatttgtttctgaaacagtgggggagggaaatataaacataataactgataatgtcataattacacaaatgagtttttaatactcctccag

SEQ ID NO: 313257 - DNA, 431 bp, Homo sapiens
caaagtagacaagttgaaagcatttgtctaatgatgccaactacccattgcacctacttctctggaatgttgtgaggctcaaagtgaaataatgtatgcaaaattaaatgataaaatgatatatgtaaagcttatttagtcaattaacattgatattgaacggctaccatgtgccagccaatgtctcaggcacttagtagctgactacagctacttctagctgtccattatttatttcaactcttcatatcagataaatatctatatttacatctattcacctatctatatttcagactgacttgttaacattaattacttattcaatcctccttttaaaaaatattttccatcatctttttttttacaygtttcctcctcttcaagacttgatttatgttctttcaactaattcataaaaaccaacacaa

SEQ ID NO: 313258 - DNA, 590 bp, Homo sapiens
caaagtagacaagttgaaagcatttgtctaatgatgccaactacccattgcacctacttctctggaatgttgtgaggctcaaagtgaaataatgtatgcaaaattaaatgataaaatgatatatgtaaagcttatttagtcaattaacattgatattgaacggctaccatgtgccagccaatgtctcaggcacttagtagctgactacagctacttctagctgtccattatttatttcaactcttcatatcagataaatatctatatttacatctattcacctatctatatttcagactgacttgttaacattaattacttattcaatcctccttttaaaaaatattttccatcatctttttttttacatgtttcctcctcttcaagacttgatttatgytctttcaactaattcataaaaaccaacacaaaggtctctactacggctttgaaagctaactggaacctcattgtgcattcataatttgttgattttagtgttcatagggatcacctggggatctgggtaaactgtggaatcgtattcagtggacctcagattctgcatttctaacaagctccaaactgct

SEQ ID NO: 313259 - DNA, 590 bp, Homo sapiens
caaagtagacaagttgaaagcatttgtctaatgatgccaactacccattgcacctacttctctggaatgttgtgaggctcaaagtgaaataatgtatgcaaaattaaatgataaaatgatatatgtaaagcttatttagtcaattaacattgatattgaacggctaccatgtgccagccaatgtctcaggcacttagtagctgactacagctacttctagctgtccattatttatttcaactcttcatatcagataaatatctatatttacatctattcacctatctatatttcagactgacttgttaacattaattacttattcaatcctccttttaaaaaatattttccatcatctttttttttacatgtttcctcctcttcaagacttgatttatgttctttcaactaattcataaaaaccaacacaaaggtctctactacrgctttgaaagctaactggaacctcattgtgcattcataatttgttgattttagtgttcatagggatcacctggggatctgggtaaactgtggaatcgtattcagtggacctcagattctgcatttctaacaagctccaaactgct

SEQ ID NO: 313260 - DNA, 590 bp, Homo sapiens
caaagtagacaagttgaaagcatttgtctaatgatgccaactacccattgcacctacttctctggaatgttgtgaggctcaaagtgaaataatgtatgcaaaattaaatgataaaatgatatatgtaaagcttatttagtcaattaacattgatattgaacggctaccatgtgccagccaatgtctcaggcacttagtagctgactacagctacttctagctgtccattatttatttcaactcttcatatcagataaatatctatatttacatctattcacctatctatatttcagactgacttgttaacattaattacttattcaatcctccttttaaaaaatattttccatcatctttttttttacatgtttcctcctcttcaagacttgatttatgttctttcaactaattcataaaaaccaacacaaaggtctctactacggctttgaaagctaacyggaacctcattgtgcattcataatttgttgattttagtgttcatagggatcacctggggatctgggtaaactgtggaatcgtattcagtggacctcagattctgcatttctaacaagctccaaactgct

SEQ ID NO: 313261 - DNA, 566 bp, Homo sapiens
actgtttcgaggcacccacttttgggacaatttgttacacatcaatcgtaactggaatcaacctagcgtcaggattaggactcagatcccaactktatttgcatgcttctaggaaacctactcttcctttttagatctcaattaatcatttggtaattattaacagtaataacttacattttcaaaatacttttatctacctagtcacatttctaaattcacaaatcgaataactgtcattgttattgtgcctgaaaccattgcctgaagtctcagaattaggcttctgcaacacaagcacttgaacccaagacttactatgggttctgtataagtcaacgaaacctccaacctaaaaatttgcgtacactcctacctctgacccacttcacctacaatgagaattatctattaaattgatgatctctaaaatctgatctggctctttgattccaagactatataatgcttagataataataattcctttccatttcaatctatggacgtaatggaggaagtaataatgtgaagaaggccagctagcagcttttaaaaatggagtg

SEQ ID NO: 313262 - DNA, 538 bp, Homo sapiens
gcattgtcatagccagatctatcaaatgtgttcaaattcataagagagcaatataaccatggaagagagttattaacatttactttcatcgaaatatgtgggctcctaaatactgttttttctttaaygtattttttctgatattcatttaatcaagacaatatgtgaactgtttgtccaggtcaaatgatgaataaacatgtttgaaaccctcaaaacatttacattatagttgggcacagtggctcacacctgtagttccagcacttcgagagtccaaggcaggaggatcgcttgagtccaggaattgaagaccagcatgggaaacatggcaaaaccctttctgtacaaaaatgaaataaagaattagccgggcatggtgccgcatgcctgtggtcccagctactcaggaggtggaggtgggagaatcgcttgaacctgcgatttctagctgcagtgaaccataattgcaacactgcactccagcctgggcgacagagtgaaaccctgtctcaaaaaagaacaaaaatttacatta

SEQ ID NO: 313263 - DNA, 624 bp, Homo sapiens
acacacatatatgtatgttttaaaaacacctactaggtaaagttttccatgattattgctcttctctccccacccctgacattataccttgggttttttcttttttttttttttaatttgaaaatccgtgttaagaaatgggactggatttttctatacactaatttttattcagatttattttaagtttactttgttattactggatctattgatctagagagcagtgaagtgagcatacagtggccactgcactacaatttattcctgttaaggggtrctgtaatcatcatggcatggtcatttgccagagtggactattactaaatcatgtggatgatttgtaccagttccagaggattcaatagttttccattttcattagtgggaatctatgtccttcaaaatcaatgatttatatttaagtcaacaactgaaacaagaaatttgaattggagcagtaatggaatgagagtgaaatttttctgtgtgcactttctgtttcatcatagtgcgttaaaattttggcatcgatggaaattctaaagtactatggtgacagtcttcaattctgataaaaagcatttaaataccataaccaatgtaaagttaaaggcgaaatga

SEQ ID NO: 313264 - DNA, 624 bp, Homo sapiens
acacacatatatgtatgttttaaaaacacctactaggtaaagttttccatgattattgctcttctctccccacccctgacattataccttgggttttttcttttttttttttttaatttgaaaatccgtgttaagaaatgggactggatttttctatacactaatttttattcagatttattttaagtttactttgttattactggatctattgatctagagagcagtgaagtgagcatacagtggccactgcactacaatttattcctgttaaggggtactgtaatcatcatggcatggtcatttgccagagtggactattactaaatcatgtggatgatttgtaccagttccagaggattcaatagttttccattttcattagtgggaatctatgtccttcaaaatcaatgatttatatttaagtcaacaactgaaacaagaaatttgaattggagcagtaatggaatgagagtgaaatttttctgtgtgcactttctgtttcatcatagtgcgttaaaattttggcatcgatggaaattctaaagtactayggtgacagtcttcaattctgataaaaagcatttaaataccataaccaatgtaaagttaaaggcgaaatga

SEQ ID NO: 313265 - DNA, 619 bp, Homo sapiens
gattttagaatcatagaatatcagagttggggaaagatcctatctggtaactttcttcttatttgattgaaagaaaggtcagtctttatagaaataatttcatagcttagtctaattcatcgtatatcttagtttaaatcttcccattttctggtgaatcatgtttttaaaaggaaaaacctgatagaaagcatgatttgtattaattcccttaaattagtaaatgttgctccttaaaaaggcaagctgtaaaactgccagagatcttcagttggtggggataaggacaataagatggaagatcaagactagagwcagataggaagcaccctctatatagtttatagggctgtaattatttgcgtttgaaagaaatctatgtttttaaaaggcagtattttctgtggctgtttgaatttcttattttttgccttcaattagaaatgggaaaagcttggaacttagaatatcctctttttttttttcccgagaggtagtaattgtaaacattgtttcatctattatgggtcactttaaaaataatggaaaatagtttggatgcaaagctggcacgaaggctcaaaatacacaagagaatgtgattcatctgaaggagttt

SEQ ID NO: 313266 - DNA, 599 bp, Homo sapiens
tgtttcctactgctgtttgataaaaaacttttatatatgtctattagttccatttgatttttagtgtttaagtctgtttccttattgattttgtttctagataatctgtccttgttaaaagtggggtattgaaattccctacgattattttattgctatttccttcttcagttctgataatatttactttatatatcatgatgctctaatattgagtgcacatatatttataatggtaatgtccatttgataaactcatgactttgttcttttgtaataactttctttgtcccattttacagtttttgacttaaaatctacttcatctcatatatatataaccaactctgctctgttttggttacaacttgtgtagaatatcttttttcatccacttactttcaggctgtgtatattctgaaagctgaagagtgagtctctkgtagaatctcgtttttttatcctttagtcactgatatattttgattgaaaaatttcagtccatgtgcatttgtagtaattagttattatggatagttaagagacttactatgccatttgttagtttggggtttttcttttttacaattttgtagtgg

SEQ ID NO: 313267 - DNA, 618 bp, Homo sapiens
gatatattttgattgaaaaatttcagtccatgtgcatttgtagtaattagttattatggatagttaagagacttactatgccatttgttagtttggggtttttcttttttacaattttgtagtggcttttattctccctctctttgctctccttcttggtgatttgataaaatttttacttgtgtgctttgatttatttttctttatcttttatgtatctaacatatgttttacctttgtgatttccatgagacttatataaaacttgatagttraaacaatctatttagcctgataacaacttaatttttgttacatataaaaactctgtattttcattcctgaacatacattttatgatattgatgtcacaatttacaactttttatatggtgtatgcattaagtaattactgtagccataactatattgaatactttgccttttaactttcatagtagagttaaaagtaatttgtgcaacataattacactactagagtattgagactttgactatatttttcccttaaccgttgcatgttttcatgttgctaattagcaactcttcatttcatttcttgaaaaatgatgaaatctcagtgtttgtttgtctggg

SEQ ID NO: 313268 - DNA, 618 bp, Homo sapiens
gatatattttgattgaaaaatttcagtccatgtgcatttgtagtaattagttattatggatagttaagagacttactatgccatttgttagtttggggtttttcttttttacaattttgtagtggcttttattctccctctctttgctctccttcttggtgatttgataaaatttttacttgtgtgctttgatttatttttctttatcttttatgtatctaacatatgttttacctttgtgatttccatgagacttatataaaacttgatagttgaaacaatctatttagcctgataacaacttaatttttgttacatataaaaactctgtattttcattcctgaacatacattttatgatattgatgtcacaatttacaactttttatatggtgtatgcattaagtaattactgtagccataactatattgaatactttgccttttaactttcatagtagagttaaaagtaatttgtgcaacataattacactactagagtattsagactttgactatatttttcccttaaccgttgcatgttttcatgttgctaattagcaactcttcatttcatttcttgaaaaatgatgaaatctcagtgtttgtttgtctggg

SEQ ID NO: 313269 - DNA, 633 bp, Homo sapiens
tttgagtttggcatggtatggtatagcaagtgtactgtattttaattgtttgtattctgggagtcatcaggatctgaaaatcaatcagctggagcattcattgaactcttatagtactctcttgttaaggtgctaggaaagcttggtccaagttcatctgtaagcaggtcttcctaaagtatagyggtatgctaatagctcatctgataatatgtattcacagggtaagtatattttatttatcacatcatatatgtttggtgattttgttgtagtgctatggcaatggacagttggtggcttttcttttttaaaaaaattaagttaactttaaataaatatttatttcctactgcaattgttctagaagtttaaacaacttagaccgagactcacctatctgagagagaaagaatgatgttttcatggtctgtttacatatgacactatccatattcataattttcactcctcccccttgccactgccagaaatgtccaagagtgccaactaagtcagccctatttacctagctgcttcatgtcagcaaaagttaaatacagatgtatcacactttatctaaaaagattgttggtcttaatattcagattaatttggatctgctacaattgt

SEQ ID NO: 313270 - DNA, 633 bp, Homo sapiens
tttgagtttggcatggtatggtatagcaagtgtactgtattttaattgtttgtattctgggagtcatcaggatctgaaaatcaatcagctggagcattcattgaactcttatagtactctcttgttaaggtgctaggaaagcttggtccaagttcatctgtaagcaggtcttcctaaagtatagtggtatgctaatagctcatctgataatatgtattcacagggtaagtatattttatttatcacatcatataygtttggtgattttgttgtagtgctatggcaatggacagttggtggcttttcttttttaaaaaaattaagttaactttaaataaatatttatttcctactgcaattgttctagaagtttaaacaacttagaccgagactcacctatctgagagagaaagaatgatgttttcatggtctgtttacatatgacactatccatattcataattttcactcctcccccttgccactgccagaaatgtccaagagtgccaactaagtcagccctatttacctagctgcttcatgtcagcaaaagttaaatacagatgtatcacactttatctaaaaagattgttggtcttaatattcagattaatttggatctgctacaattgt

SEQ ID NO: 313271 - DNA, 539 bp, Homo sapiens
tttaatttataaatattttatttcttattttatttctaaatctagaaaaccatttaaaataagaacacttcaagaaattctttgaatgatttttggtaaattcaattttttttttttactaacatctcaacaacagtaactgccatctacagaaatgtagaactacattagctggtgacttttcataaagtcacctacatagaaaatattggaagccagtccctatgacaccgcagataaatcaaatagactttgcttgtacataataaattcctcaaaacagcaaaggatgtctgtttgtaacttttacaataaacattatttttaaaataaccttcaatataaacaataagagagaacacggcagaatgaaatgcagaacataagtcagatataaacaagcaaaaggataaagaaaactcatttgtgttcacatcaaccttattgtcttgtaaggtttttgcctgtccaattttcatktggtggcaggtttgccatgtttccgccctcccggctcccgtgttttatcttcacattcc

SEQ ID NO: 313272 - DNA, 561 bp, Homo sapiens
ttacttacagatatatttataatttgaaataagttaaccaacaatagactgatgatatgtttatagagaacatacttggtcacttgttaatgaagaaaattaatcactgtttttatgtaatcagtgcttcaaaagtacttgagggtacttgaaagcagttgattttcttaggtagattatttrtgctatgaatttgcatagtgcattctgcatagagtgtaaagctacattttatcacatccccttaacactacaaattctatgttagcaaaatccaaattaatgaggcttctttgtttcccgatgctttgttaatattaagaaaatgccaacatgtccccatggcctgcatgtagctgattcactgctgtgggaagcttaccccaagccacattgccttcttcacactgagaggggaaaacagaactttcatagagcagcaaccccttcccgtggccaccgcatcttctactttcagctctctcttctcacgtctccacactgtgagctctattggttattatttcctctcaaacttccctttcattcatttttcatttt

SEQ ID NO: 313273 - DNA, 561 bp, Homo sapiens
ttacttacagatatatttataatttgaaataagttaaccaacaatagactgatgatatgtttatagagaacatacttggtcacttgttaatgaagaaaattaatcactgtttttatgtaatcagtgcttcaaaagtacttgagggtacttgaaagcagttgattttcttaggtagattatttgtgctatgaatttgcatagtgcattctgcatagagtgtaaagctacattttatcacatccccttaacactacaaattctatgttagcaaaatccaaattaatgaggcttctttgtttcccgatgctttgttaatattaagaaaatgccaacatgtccccatggcctgcatgtagctgattcactgctgtgkgaagcttaccccaagccacattgccttcttcacactgagaggggaaaacagaactttcatagagcagcaaccccttcccgtggccaccgcatcttctactttcagctctctcttctcacgtctccacactgtgagctctattggttattatttcctctcaaacttccctttcattcatttttcatttt

SEQ ID NO: 313274 - DNA, 482 bp, Homo sapiens
ttttctctgaacatattttaaaaatggtcatttgaaaaaaaattaacctttggagtacttcagtggggatcctgcacagtcccccrgaactgtgtttctaagaaaatgacacattctacaaatattgagctatcctgtgtttattattcaagtatcagatacttttagtttatctggtcctcactttaatgtgtttaatttttttcaatagagaaaaggaaattaaatgtattacttctgcactgctaacctgctctttcacaaaggcatctctgaaaggcagccttgtgtttgtgttggtcactccattaaccatgtggagtactggggcgggagcactgtggtttctgtgcatcatggtggctccatctctctcgtggtctctccctctctctcttctttctctcttgtgttggtatgcaaacacagaagggcactttggcaagaggtggaaagaaggatttcactggtgaaaaagaatc

SEQ ID NO: 313275 - DNA, 490 bp, Homo sapiens
ccacaggacctagcattactaggwgcaatacatatataaacatacataattagtgtgttgcttatttcttttaaaccaggagttggtgagcagaatgataatgtcagttgctgcaatgcaataaatcaggattcctcattcagtctccagatctaagttagttcacagactgagaacccactgactgatgaggaggctgggagaacttgagataacccaatgacaccataaatgtgtaaataaatattcttattatcctttcttgaaaacacctaaagccacttacagataactgcactgggtcaaagataatatatagactttgcaaggactatggaacacagggtctaacactgatactaggggaaccaaaacatgatcacagcccctttattaaagcccctttattaaagtggctcatacctgtaatcccagcactttgggaggccaaggtgggtggatcacctgaggtcaggagttcaagaccagc

SEQ ID NO: 313276 - DNA, 552 bp, Homo sapiens
tacatagcaaattagaaacaatgtcatgttccagaattgcagagattagtatcactatcagggactttaattcaatttatctgtttggcctctgcaaaaccagatacagcatgatacatgatagtgggcacctataaagttaaccaagtagtagccccagtcacagctgctgtgctgaatgtgctatccttattggagagatcaacatagactgtggcacttggcaggcagatctggtgaatgctatatagctggcaaatgtgtctttcttaatcaccatcagtaaaggaaatcaaaagcagtttgcttttatgcagtaaagataccagttcaaattcacagtgttgctccagggctatgacaactctacttctctctgtcataatgcaatctatagaaaccttgatcaccttgacataccaaagawtattatgctgtttcactacagttgatgacatcatgttattagacctgatgatcagaaaacaaaaattaccctaataaaaaatatgcatgccacagggtagtgtttaatccctctgtcacttacaa

SEQ ID NO: 313277 - DNA, 544 bp, Homo sapiens
tgatggaccatcaagtgactgtgtgatccaagttcccatcatgagctggatattataagattcgccaaatcataagggtgggtaggctcagtagcaatcaactgcactgcaaaaatggtacattcacatttagtctgagtggrgccaaaaggcctaaagaagttgcatgataagatggcccagactcccatgacacctaccttttttgcaccaactctcctccaataatttacaactatggcctcgtaaaaactgtcttatagccagctgatggaggaaaaaaacctcaaacctgtttcccagatgggttggcccgctatgttggctctagctgaaaataggttgctactgtctatatccctcccaccaggagtagccctaaagaacagtaatgaagggaaattcttccagtgggcagagcttagtctaactctattttctaactacactttccctctctaagtaattttattcaaaataaagtatataacagttaatttctttttatgtaaatgactcctaaattatatcccagcccaaactt

SEQ ID NO: 313278 - DNA, 544 bp, Homo sapiens
tgatggaccatcaagtgactgtgtgatccaagttcccatcatgagctggatattataagattcgccaaatcataagggtgggtaggctcagtagcaatcaactgcactgcaaaaatggtacattcacatttagtctgagtggggccaaaaggcctaaagaagttgcatgataagatggcccagactcccatgacacctaccttttttgcaccaactctcctccaataatttacaactatggcctcgtaaaaactgtcttatagccagctgatggaggaaaaaaacctcaaacctgtttcccagatgggttggcccgctatgttggctctagctgaaaataggttgctactgtctatatccctcccaccaggagyagccctaaagaacagtaatgaagggaaattcttccagtgggcagagcttagtctaactctattttctaactacactttccctctctaagtaattttattcaaaataaagtatataacagttaatttctttttatgtaaatgactcctaaattatatcccagcccaaactt

SEQ ID NO: 313279 - DNA, 561 bp, Homo sapiens
gagaatttccttatgattagataccttgtgcctttatattttgtctgcagtagcatctatctaatacaataccttgaatayagtaggtcctaaataaatgtctttggaatgaacaaataaatgttcattgtattgtgctagccacggtagaaatatacacaagacctcagtccccaaggaatttatcttgtaggtggaaacataaattatttacaaatgtactgttagtaactatgcaaagtcaagcatgattctaagttcaacagtacaaaaagaaggataaggtaggtgagatcagcaacccagctaagagtacttttgatcagcagcctaccctctatctgaagtagttctaatagatactttccagtttttaggaaggtagaacaaaatggtagaaatagactattcctcaagtttgacagatacggacagtagttttgtttggtgccattgaatgccaagcatcagcattttcaaatctaaaataaggatagtaattcatatctcgcaaggattttttttgaaggggtattagagataacataagtaaagtgtttt

SEQ ID NO: 313280 - DNA, 622 bp, Homo sapiens
ctatcattttcttcagtttcttccattataactgttattccaggtagctctcctactagatggagaatttccttatgattagataccttgtgcctttatattttgtctgcagtagcatctatctaatacaataccttgaatatagtaggtcctaaataaatgtctttggaatgaacaaataaatgttcattgtattgtgctagccacggtagaaatatacacaagacctcartccccaaggaatttatcttgtaggtggaaacataaattatttacaaatgtactgttagtaactatgcaaagtcaagcatgattctaagttcaacagtacaaaaagaaggataaggtaggtgagatcagcaacccagctaagagtacttttgatcagcagcctaccctctatctgaagtagttctaatagatactttccagtttttaggaaggtagaacaaaatggtagaaatagactattcctcaagtttgacagatacggacagtagttttgtttggtgccattgaatgccaagcatcagcattttcaaatctaaaataaggatagtaattcatatctcgcaaggattttttttgaaggggtattagagataacataagtaaagtgttt

SEQ ID NO: 313281 - DNA, 604 bp, Homo sapiens
atcctgtttttttcacctaacaagcaattgtagggataaactccaaaaccctaaagtctggaaaactgacctaaatttggtttttcatctcctggtgatcacttagggtatgctgggattgccaccagtgttgcaactggtgagccagcaggccctggctgagtgaggagaagagccgggaggtgccaggagggttcaccaggctgctgaatgacctggtggttcttcacactatctgtggcatctatggagcagggttcccctgtggagggagaaggcactagaagcttggtcctccaactgagagtacttctgtgtccctttcctagcagaaccatctctgtgcagtaagtggcatcttttgtctacattaaagaacgtgtattctttgccagtgtctgctggtttcttttcctgagcctgttgtgacaaccctgcagtagatgatgataataacagcatctagcatctacggagcacttacttagtatcaggtaccttttaagcaattgacatacamtaactcctaattttcatggtaattatacaaagtaagtactgtcattttacagtccatcatttccattttatatttatttatttt

SEQ ID NO: 313282 - DNA, 520 bp, Homo sapiens
gacaaagctaacaggaagaaagtaataataaaaattagagaatagtgacaagaaaaataatgaagaaaataaatgaaacaaaagttgatcctttaaaaaaatcaatgaaattgataaagctttagctagactaagaaaaaaagagggaagatrcaaataactaaattcagaaatgaaagctggggacataactactgaccttataggaataaaaaggattataatactataagtaattatatgccaacaaattctatatactaacctatatgaatataaattcatggaaatatacaaattactaaaactgatttgagaataaatagagaatctgaaaacacctataacaactagatatttaatcagtaaccaacatcctcataaagaaaagtccagcaccagatttcacgtgaattccaccaaacatataaaaaagatttaacatcaatctttctcaaactattccaaattaacagaataagagggaacatattctaactcattctatgaggccacacca

SEQ ID NO: 313283 - DNA, 520 bp, Homo sapiens
gacaaagctaacaggaagaaagtaataataaaaattagagaatagtgacaagaaaaataatgaagaaaataaatgaaacaaaagttgatcctttaaaaaaatcaatgaaattgataaagctttagctagactaagaaaaaaagagggaagatgcaaataactaaattcagaaatgaaagctggggacataactactgaccttataggaataaaaasgattataatactataagtaattatatgccaacaaattctatatactaacctatatgaatataaattcatggaaatatacaaattactaaaactgatttgagaataaatagagaatctgaaaacacctataacaactagatatttaatcagtaaccaacatcctcataaagaaaagtccagcaccagatttcacgtgaattccaccaaacatataaaaaagatttaacatcaatctttctcaaactattccaaattaacagaataagagggaacatattctaactcattctatgaggccacacca

SEQ ID NO: 313284 - DNA, 509 bp, Homo sapiens
gcttgagtagacatttctccaaagaaaatatacgattgacaacaagcacatgaaaatatgcataatattattagtcactagagaaatgcaaatcaaaaccacaatgacataccaccttacaccaacaagtgtggctatcaaaaaatattatctatgtgtatgtgtgtgtgtgtgtgtgtgtgtgtgtgtgtgtgtgtgtgtrtatatatataaagtaatggcaaagatgtcaagacattgaaaccctcatatgttactgatgggaatgtaaaattggtctgtggaaaacagtttggtgaatcccaaaaagtttaacacagaatttccacatgacctagcaattccactactgagtatatacttaaaaataattgaaaagtggtattcaaacaattacatgtaaacacttgtttacaacaggactatttgcaatagcaaaatgtagaaacaacccaaatgttaaacaaattgtggtatatacacagaaggaaatgttattcactccataa

SEQ ID NO: 313285 - DNA, 627 bp, Homo sapiens
gtacctttgctgcaaaatctgactaggatatcatacacasaaatgcacacataaacacacacacacacacacacagagatggaggggcggggagagagagagagagagacagagattgacaagagagaaaggagaaaatggaagcagttcctaccaagcctaggttcaacagttaaacagaaccataacaagattctacaaggtcttaatataaatgtcttggaaaaaagtttgccacactcaaataatcatgtgaaacacaaaggccttcaacaaaatttaatataattgccagatttctcagtctttaaaatgccaatttaagtgtaactttccatgagggacatttggcaagtactatagccatttatttattcatcctaaaaatagtatatattgaatataccatgttttagatgctgacatattcatcagggataaagaaacctgcaaaatacaaacaaacactcaaagagctcacattttaatggcagaaacacacagcaaacaaataaatgcattatacaatataatgttaagcatatttccttgttaggaaggcaaaacctgagtagaaggacaaagagcaatggatgaggtacacaagtggtcagaaaatacttctct

SEQ ID NO: 313286 - DNA, 627 bp, Homo sapiens
gtacctttgctgcaaaatctgactaggatatcatacacagaaatgcacacataaacacacacacacacacacacagagatggaggggcggggagagagagagagagagacagagattgacaagagagaaaggagaaaatggaagcagttcctaccaagcctaggttcaacagttaaacagaaccataacaagattctacaaggtcttaatataaatgtcttggaaaaaagtttgccacactcaaataatcatgtgaaacacaaaggccttcaacaaaatttaatataattgccagatttctcagtctttaaaatgccaatttaagtgtaactttccatgagggacatttggcaagtactatagccatttatttattcatcctaaaaatagtatatattgaatatmccatgttttagatgctgacatattcatcagggataaagaaacctgcaaaatacaaacaaacactcaaagagctcacattttaatggcagaaacacacagcaaacaaataaatgcattatacaatataatgttaagcatatttccttgttaggaaggcaaaacctgagtagaaggacaaagagcaatggatgaggtacacaagtggtcagaaaatacttctct

SEQ ID NO: 313287 - DNA, 617 bp, Homo sapiens
cattaggagatatacctaatgtaaatcaygagttaacagatgcaacacaccaaaatgcacatgtatacatatgtaacaaacctgcacactgtgcacatgtaccctaaaacttaaagtataataaaaaaaaaagaaattacagtgacttgattaaggagtagtgataaagacattgcaaagtaactggagccagcatatattttgaaggtatttctaattgggtttgctgatagactgaatgtgaattataaagagaaagagaagaaaggatgactctaaggtattagcaaacaaatggcaagggcattattattacagtcactaagaaaattataaactaattataaaattaataatttataattattccacattataatgaaagtttgggccaatgcaataaaacaaaaaaaatgagaactagggggttgcttccaagaaggccaaacaggaacagctccgatcggcagctcccagggagattgatgcagaagatcggtgatttctgcatttccaactgagttacctggttcatctcattgagtctggttggacagtgggtgtagcccacagagggtgagctgaagtagggcggggcattgcctcacccgggaagc

SEQ ID NO: 313288 - DNA, 620 bp, Homo sapiens
gaactgggcggagcccactgcagctcagcaaggcgtattgcctctctattttcaacctctggcggcagggcatatctgaacaaaagacagcagacagcttctccagacttaaatgtccctgcctgtcagctctgaagagagcagtggttctcccagcatggcattcgagctctgataatggacagactgcttcctcaagtgggtccctgacccccatgtagcctgactgggagacacctaccagtaggggccaacagatacctcatacaggcaggtgtccctctgggatgaagcttctagaggaaggatcaggcagcaatatttgctgttctgcagcctccactggtgatacccaggaaaacagggtctggagtggacctgcagcaaactccaacagacatgcagctgaggggacagtctgtcctaacaaacagaaacctaacaaacagaaagtaatatcatcaacatcaacaaaaaggacatccacaccaaaagcccatccataggtcaccaacaccaaagaccaaaggtagataaaastacaaagatgggaagaaaccagagcaaaaaggctgaaaattccaaaaaccagaatgccttttctcctccaaaggaaaacg

SEQ ID NO: 313289 - DNA, 555 bp, Homo sapiens
agtagaaaaatgaatgcaggatacaagccttaggtcatggaaaatgagatgaaaatggctcttaaacttatagaaacaaatgcccaacctcaatcataagaagaaaatgagatatcactttttgacctgtcagattgaataggcagtaaaagttttattacatgttaataccattgaatgtatgaggaaacagtactcacgcatatctcaggcagaagtgtaaattggtacaatcggaggagagcaatttatcaggttataagcatacattctctttgataatgtaattcaatttccttagaataaaatctgtcatatcaatatrtttgcaagagtgaaaaatagtgaatgtacatgattatttgttgcagcattgcttgtatattagcaaaaaactggaaataatatgaataatctagtagggaaacgggttaaatgaattatgaatggccataaaatgaatagtatgccattaaataaaagatgaagaaacgtgttatatgctattaaaaagagatatcaagtaagtactgagggttttttttttaaaagcaa

SEQ ID NO: 313290 - DNA, 690 bp, Homo sapiens
gtcatatcaatatatttgcaagagtgaaaaatagtgaatgtacatgattatttgttgcagcattgcttgtatattagcaaaaaactggaaataatatgaataatctagtagggaaacgggttaaatgaattatgaatggccataaaatgaatagtatgccattaaataaaagatgaagaaacgtgttatatgctattaaaaagagatatcaagtaagtactgagggttttttttttwaaagcaaagtacatgctattatttgtgcagatttgttaaaggggagatggtatatttgtatttgtatgtgcataaagtatctctgaaagaatactccagaaattaatgataaaagtcacttagggaaggtgaactgagtggctgggcactagaaatggatgggagacttttaattatataatatttaatgctttttttttactttggagatgtgagtaaatgaatataagttagttaataataaaagcagtttttatggttaaaaaacagaggagggaagaatgagaatataatgaggttgtcaagacatcccaaagtaaagttccttaaccaaacagtctacatgtacaaaacttcaaaactagaaagtaatcactgacgttctgaatgacagtgtacacagccaaacacactgaatccaatttacatctaaaatattctgcttactaagac

SEQ ID NO: 313291 - DNA, 390 bp, Homo sapiens
tatatatatatatatatatatatatatatacactgtgagtctttttttaaatgatttaaaaactccacaagagccagtgaatacaaaatcaaaaatagttttaaaaaatagttttcatccctgaattgtgttgttgctttctttttgcaaaataataataataagcatattggagatttctctttgtatcacccatgcttaaattgtagaagcctgctcaaactcgtttccatcaaatatcctctttgatgctgacaaataagaacaactagtaaattcttgactaaaatmctactgatgaagtaaaattctaactcaaaatatttttcaacaacagtattaaaatttgcaacattaccaagaggttcaagcagtaagctaaaggtttta

SEQ ID NO: 313292 - DNA, 597 bp, Homo sapiens
actaggagggcatttaaatggatctaatgttaaaatgtttgttctgtgatcctgtgaaaagggaaatgaacttattcttttatgctaaaacttacagtctgtttctgtctcwaccactccacagaaacggctcatcaaggtcagcaatgaccttcaattttccaaatgcaaaaagcacttccctaccccatgttaagagaccttggtagcattcaatatagagtgctatgccctccttaaaacactcctatctcttagactccttcacctcagggacaattcattcttgtctcttttttctacttcttactttactcaacctctagatgtcagagaatgatcaactctcaaccttctcatttttctattctctctcagtgatttcatcaattcctgtgggtttaaatagtctctgtgctgataactcccaaatttaaatatccggtacagacttcctctgtactccagactctcatatacaatcagcataatttcaaatatattatgctaaaagaaattcctgattctacaccctgctcctcaatttgagtcttcccttctcagtacaacacactcagttgctccaaccagaacccc

SEQ ID NO: 313293 - DNA, 365 bp, Homo sapiens
ttaaaggagaaatccctctagataatacaccgagtaaaaaagctacatccaaattaattaaatgacatgacccaagcatctattttgaaattatcttaagtataktgggtttaacagaaaccacatatcatataaaataaaccgaattttaaaacatatatcattctataacgtttatgttgaccaacagtaaggaagttcactgtgcatatttgccgtggagagtcattccatgtcatttttctcacccatgcaatacataccctaatcaaaatatatgtgcatatgcataattgaaatggtcctcaaaattagccaatgagtggaatgctttcaagcattaatctataaaaatatgatttttt

SEQ ID NO: 313294 - DNA, 586 bp, Homo sapiens
gggcatcattaaaaacgatttcttccatatttactttgtgtttgctaattactaatttaaaattaatttaatttaaattaatactaaattacttcaaaggcaaatcctatataagattttaaattgaaaggcagcttaaatctgaggcagtctaaaggaagatggcctaaattaagggtctcaaagtaccaccaaatgtctaacaactgctcaaaaaagaaaaaaaaaaactcagaaaatacatagtgcaaattctcatgcaccaggaccacaggactgagccaccgcgcctcccacacagtgcaaattytaagctgaaaaaagtcccaatctaatttttgaaaactctatacttattttaatttaaaagccttaatattcctgtgtaggctaacaactgacaagatgacccgtaagttttatagagcattctgatatggacactaacagtcaaatatagagctcctggctgcatttaaacaaaagaaatattttcaaaaaaaaaaaaaagaactcacaaggacagtggccttaactcttaaattacattttaaaaaatacttcatgactggatacacagaatttg

SEQ ID NO: 313295 - DNA, 586 bp, Homo sapiens
gggcatcattaaaaacgatttcttccatatttactttgtgtttgctaattactaatttaaaattaatttaatttaaattaatactaaattacttcaaaggcaaatcctatataagattttaaattgaaaggcagcttaaatctgaggcagtctaaaggaagatggcctaaattaagggtctcaaagtaccaccaaatgtctaacaactgctcaaaaaagaaaaaaaaaaactcagaaaatacatagtgcaaattctcatgcaccaggaccacaggactgagccaccgcgcctcccacacagtgcaaattctaagctgaaaaaagtcccaatctaatttttgaaaactctatacttattttaatttaaaagccttaatattcctgtgtaggctaacaactgacaagatgacccgtaagttttatagagcattctgatatggayactaacagtcaaatatagagctcctggctgcatttaaacaaaagaaatattttcaaaaaaaaaaaaaagaactcacaaggacagtggccttaactcttaaattacattttaaaaaatacttcatgactggatacacagaatttg

SEQ ID NO: 313296 - DNA, 457 bp, Homo sapiens
taggcgccccacgacagctcggtctcgatgaccatgaccacgatgccgaacatgccgaagatgagcgcgtagtcgctgagccgcttgcgcttttcgaacagggcgcgccggtggcccagcttgtagccgatgttctggtttttctttttgctggacttggtgccactgctgctgccgtgcccgctcccgccaccgccgccgcctcctccagtgctgcctccgccgccggttccatagagcgccaggttgttggagttgttgtgctcgggcttagacaccacgatctcgggggctgaggacgaaacagcggcggcggcggcggcagcggctgcagacggggaggacgcgccgccacctcctccgacagacgcggggggctgcaggggctgcgcctctgagtccatctcgtgsaggttccggcgggacgcgctcaagttgctgagcggccgcatgacgc

SEQ ID NO: 313297 - DNA, 600 bp, Homo sapiens
tgtagcagttttagccctcatattcatacccaaatcattcagagggaagaaggtcatcctctgccccaactttccaaacaattttctagtatatctaattgaaccagcttccttcacatgcccaactctgaactayaaagaatggttaaagggaggtatgatgggaatgactcatcaaacagagaatattgataaataaacagaaattatttaaaagaatctaattgaaattttggagttgaaaagtagagtaaccatatgaaaaattcaatgataaatttgagccagcagaaaaagaatcaataaactgaaaatacactgatgaagattatgcaatctgaagaacagagaaaagaaagcataataataagaaaacccccagcacctcagagaaatgtgagacaccactacatgcaccaagagacatgaaatggaagaccaaaagaaaaaagagaaaaaagacagaaaaaatattcaaagaaataatagctgaaagctttccaaatttgataaaaacattcatctacacctccaagaaattcaacaaactttaggataaactaaagcaatccatacccagaaacagcatagtcaaaaagg

SEQ ID NO: 313298 - DNA, 600 bp, Homo sapiens
tgtagcagttttagccctcatattcatacccaaatcattcagagggaagaaggtcatcctctgccccaactttccaaacaattttctagtatatctaattgaaccagcttccttcacatgcccaactctgaactataaagaatggttaaagggaggtatgatgggaatgactcatcaaacagagaatattgataaataaacagaaattatttaaaagaatctaattgaaattttggagttgaaaagtagagtaaccatatgaaaaattcaatgataaatttgagccagcagaaaaagaatcaataaactgaaaatacactgatgaagattatgcaatctgaagaacagagaaaagaaagcataataataagaaaacccccagcacctcagagaaatgtgagacaccactacatgcaccaagagacatgaaatggaagaccaaaagaaaaaagagaaaaaagacagaaaaaatattcaaagaaataatagctgaaarctttccaaatttgataaaaacattcatctacacctccaagaaattcaacaaactttaggataaactaaagcaatccatacccagaaacagcatagtcaaaaagg

SEQ ID NO: 313299 - DNA, 591 bp, Homo sapiens
ttgtaaatccaaatagtatcatggctcagtgaatgtcctaataggaattttagtatataaataaggtgtggcattttattttaattgtggaaattagatttctcttaatgatatgtaagtaccagatcaagtatattttgtactgaattctacagttaaaaatcactgtcatgaaatgatcctaacagcaagaaaaaagtgggactaaagcattctctgaagatgactggtaatggcttctttttattaytattattattatactttaagttttagggtacatgtgcacaatgtgcaggttagttacatatgtatacatgtgccatgctggtgtgctgcacccattaactcgtcatttagcattaggtatatctcctaatgctctccctcccccctccccctcgtaatggcttcttgtggccattaattaattttctttgtaaccttttagctctcctatcaccctttggtatctcaaacatatacatacagcatcatgagaccgagccttttgtagaggtttttggtggcaatttagaaaatatatgttctcagttttgagagttggcagcaaaagtgcactcaacatgc

SEQ ID NO: 313300 - DNA, 591 bp, Homo sapiens
ttgtaaatccaaatagtatcatggctcagtgaatgtcctaataggaattttagtatataaataaggtgtggcattttattttaattgtggaaattagatttctcttaatgatatgtaagtaccagatcaagtatattttgtactgaattctacagttaaaaatcactgtcatgaaatgatcctaacagcaagaaaaaagtgggactaaagcattctctgaagatgactggtaatggcttctttttattattattattattatactttaagttttagggtacatgtgcacaatgtgcaggttagttacatatgtatacatgtgccatgctggtgtgctgcacccattaactcgtcatttagcattaggtatatctcctaatgctctccctcccccctccccctcgtaatggcttcttgtggccattaattaattttctttgtaaccttttagctctcctatcamcctttggtatctcaaacatatacatacagcatcatgagaccgagccttttgtagaggtttttggtggcaatttagaaaatatatgttctcagttttgagagttggcagcaaaagtgcactcaacatgc

SEQ ID NO: 313301 - DNA, 542 bp, Homo sapiens
ggagaaactcagactatcaggcatccctgcccatcagacatcagagggattagacagcttctcaaagcactttatacaaaaagcagatgggtataaatactctatccaccatagggattcactgttgtctttaggattgtaccactcattccctcaccacaccctgctgttccccccacaccatgttgttccccccacaccatgcatctttgtcctccaagtagccatggtattcaagtctttgtccaaagcccacttggagagatgagcattctttctgccactctgacttcattcttttgcccctctctcctttctgcatctaacccctagtaaagcagaccctaaaatactgtatgtattattttttatggaaaatttgagggtcttacctgcacctaaaattccctctaaatcctacctcttattttagttamgtcacagttgaaagatgtattcaggccacaagctacctttcattcatttctacctatgctcatttatgctttaatatttattagaacttggaaaatagtatatct

SEQ ID NO: 313302 - DNA, 591 bp, Homo sapiens
tgaaaatcaacagatatctacctcttacctcattagccaccccatcttcagccttagtataggtgctgtcccaggctgctgagttcaggctgcagggcatggggacaggacaatacaggcttccattcccatagggaaaccctaaacccacgaataatgctgagttttccaaagctatcattgcagtgctattctttaccctgctcatggattatatccatttctgtgggctgattctggtatctaacctccccatatggtratgtagaataataggaagagctacgtaggaaggaagacctgaatttatatattgatctatccattttcttgatatattacttactttttctaagtttcaacatttttatctataaagtgaggatggtgcatagcttctctggagtgtcacgagaatgacctatatttggtacttactaaaggacattgaaaggacctttggaacacaagcttgcccccaaatattcaaaaacttttacatgtgcaataagaatattctatttattggtccctacatacgtgtacatatttagaagaaatcagtggcagcttagatctttatcatcacct

SEQ ID NO: 313303 - DNA, 501 bp, Homo sapiens
atagaaatagcatttgaataatttgtattcacctaccaaattgggcttgaaaaataaaaaggaaagcatgacttaaaatatagatgttaaagcacaatgttggcttaatgcaccttaaaaaacgctattcataaaatgtcctkcaaaacgtactcaaagtgcatagctggttgattttgctcaaggaaatgactttaaagcttttgacaaaaaatgaaaatataaccagcctctctagcagggacaaattcagtgtatttaatattttattcccaatgactagctttattaaaggtacaatccagacatatagcattatggttttttgcctaatgactaacagaaggcaaaaacgttaaaaacttttaatatgtgagattatttgtcccagaaagacaaaactagttggaccgaagttacgagttcatgctgagctctacagggtaaaattcaatataagggtaaaattcagggtaaaattcaatataagccaagagtggg

SEQ ID NO: 313304 - DNA, 542 bp, Homo sapiens
ccttaaaaactccaacttcattctagtagcagaatcactggacaagctatttccttttcatggaaagcgctttctgtcactctgaatggctgccacatcctcatgattcagccctcagattaatattacattctcaaagaggcatttgtttcttcaatagccatccccagcaccccattcaggtgttctgcactgctgtcccttatttggattcttcataaagataaacaagttttaattattgtattcatatgtgtttatcttttccacctgcctcttccactagaatgcaaggcttgtgagtgttggtatagtgtctcgtccaatgatgcatctctagtacagtgatgcacatgaacttagaaatgaatgaatgaataactagagcatgtcacargatgactattatttgagcactcttcatgttctagctattctagtaggcatttcaaatacaatactcaattcctttacaagagaattcataacaaagctttttcaaaaacctagatatcatttcacttttctgctttcctgaacaa

SEQ ID NO: 313305 - DNA, 385 bp, Homo sapiens
tgtgtgtatgtgtatatacatacatatratttgtatatagaagcttgaaaatatgggttttaaatatcagatgaaaatctaaggaaatccacatttctgattaacctgttgtccaaaacagcattaatgttcccctcagcttgactgaactttagacaggcttctatctaacttgtggccacttatctacttttttgctttttttgagtatacaccttagacaacataattataaaattactatttgcccatttcagatgtaaatattttttaaatcctcttgccaaatttagaaccccggcatattttcctcaaggaccaaaaagccatctttttgaagtctaaataaatgtcaaggaagatagcaccgacagtttctatgata

SEQ ID NO: 313306 - DNA, 563 bp, Homo sapiens
ttattcagactagatttgttatatttttgctggttattctttacattgcratatgtaagtttgtttcttgttgcctgtcttatttgtaaagctagcatcccaacaggaaatgttaactcaattctgctagacgattgttaatgcctgtggtactaataagatggaaattgctgctgaactccaagagaagcttccctgagagggctttactttctgtcttctttgttgctcaaatgtggtctgggtccttgacattcactttcatgttttctgtcttacatgagacccgagacaaccaggacagacccatttaagcatgaagcaacaaatttaacctaacttcagagatgattgatcagcaatatttttataaaaggatcttgaacaaaatgtgggaattgattatacaaattggaatcatttctgtcacacccagtgaaaatagaaatgagaggcagttagaaaaacactcaggtcacaaaggactgctccaaaaactgtctccagagcaaaatggccctctgtaagttttgttgttgttgttgttgttgttttgttttttt

SEQ ID NO: 313307 - DNA, 560 bp, Homo sapiens
tgattttacaggctcataggtggaagagacttgccttgtctcggatgagactttggactgtgaacttttgagttaatgctgaaatgagtgaagactttgggggactgttgggaaggcataattggttttgaaaagtgaggtcatgagattctggagaggccagaggtggaatgatacagtttggctgtgtccacactgagatctcatcttgaattcccacatgttgtgggagggtcccggtgggagataactgaatcatgagggctggtcttttccatgctgttctcaagatagtgaataagtctcmtgatatctgatggctttataaggcagagcttccctgcacgagctctctcgttgcctgctgctatccatgtaagatgtgacttgctcctccttgtcttctgtcatgactgtaaggtcattccagccacattgaactttgagtccaattaaacctctttcttttgtaaattgctcagtctcgggtatgtctttaacagcagcatgaaagcagggtaatacaagtagtattgacatttcagctatatgaattctta

SEQ ID NO: 313308 - DNA, 560 bp, Homo sapiens
tgattttacaggctcataggtggaagagacttgccttgtctcggatgagactttggactgtgaacttttgagttaatgctgaaatgagtgaagactttgggggactgttgggaaggcataattggttttgaaaagtgaggtcatgagattctggagaggccagaggtggaatgatacagtttggctgtgtccacactgagatctcatcttgaattcccacatgttgtgggagggtcccggtgggagataactgaatcatgagggctggtcttttccatgctgttctcaagatagtgaataagtctcatgatatctgatggctttataaggcagagcttccctgcacgagctctctcgttgcctgctgctatccatgtaagatgtgacttgctcctccttgtcttctgtcatgaytgtaaggtcattccagccacattgaactttgagtccaattaaacctctttcttttgtaaattgctcagtctcgggtatgtctttaacagcagcatgaaagcagggtaatacaagtagtattgacatttcagctatatgaattctta

SEQ ID NO: 313309 - DNA, 537 bp, Homo sapiens
actattataacctgagctgcctctaaaatcttaataaactacacttttgtagttatctaaccctttaatagttgaaactgtgtccacaaccactttttataatccatagaaaaaacaaataatcatgggccctataattcactttttaaaaccacattccatcaaaacacaatacatgttagaagattaactagaatttatttttattatttatttatttttaatttccacttctattttagatagggtagtacatctgcaggtttgttacatgggtaaattacatgatgtggaggtttggggtatggatcctgttacccacatagtgagcacagtaaccaataggtagtgtgtcaacccatgctccctccctccccacccattagtccccattattactgtctttatgttaatgtccactgaatgcttagctcccacttatttagaatctataaaaatcttacacaaatcaacgagcaaaaaacaaactaccacrttaaaatataggcatacacttcttaaaagtgtatgaaataa

SEQ ID NO: 313310 - DNA, 614 bp, Homo sapiens
aaaaattttaattgaaaattatacatatttatagggtacaatgtgatgtgttgatacatgtatacattgtgtaatgatcaaatcagagtaattagcatattaatcacctcaaacatttatttttgtgtgtgtggtgggaacattcaaatttctgtcttctagctatgcagagatattccaaattacaattagaataagttctggtgttctgttgcacagtggggtgactatagttaataatatggtattgtaaatcaaatctctttcttgaggttgcagtgcactaggctaggatgttggcgaagagtagcatatgtatcttcaatttcaacctaagtaaaaaaaaaaatataaataagaagmagcataccaagaggcaatggcaaattgaataagcgggtcagtgatgctgggtaaatatctaaactacactatgagcttggggaatgttttgtgtgctgatgagaagaatgcatattctgcaattcttggatggagtgttctctaaatatctgttagatccatttgttctagagtgcaatttaagttcattatttctttgttgactttctgccttgatgatttgtttagtgctttcagtggagtgctgaagt

SEQ ID NO: 313311 - DNA, 616 bp, Homo sapiens
cttgcaggagtgagctggtatcacattgtggatttgatttgcatttctctgataattaatgaggttaagcatttttccatattcttgtgggtcatttgtatatcttcttttgagaattgtctatttatgtccttagcccacttttttgatgggattttttttttctttcttgccartttgtttgagttctttgtagtttctggatattagtcctttgtcagatgtacggattgtgaagattttctcccactgtgtgagttgcctactaattctgctgattatttcttttgctgtgcagtagctttttagtttaattaagtctcatctatttatcttactttttgttgcatttgcctttggtttcttggtcatgaagtcttcattctttttgcttagtatttctttggctatgtgggctcttttttggtgctgtatgaatttaaggatattttctttgtagttctgtgaagaaatgatggtggtattttgatgagaattgcattgaatttgtagattgcttttggcagtataatcatttttacaatattgattctacccatccgtgagcatgggatgtattaccatttgtttgtgtcatctatgatttttttcagca

SEQ ID NO: 313312 - DNA, 554 bp, Homo sapiens
agagaccatttatattcaacattaatgttgagatgtgagatactgtttcagtcatcgtattgatggttacctagtgacttktttttgcatgtgttatgttttataagtcctgtgaattttatgctttcaggagtttctattctggtgggtatcaatctttgtttcaacaattagaactccttttagcattttttgtagggctatccttgagtgacacattcccttagcatttgcttgtcaaagaaagactttatgtcttcttcatttatggaatttagtttgctggatataaaattctggctgacagttactctgtttaagaagactaaaggtagtaccccaatctcttctaactgtacggtttctactaagaagtctgctattagtctgagagcttttcctttataggttacctgatgctttgtctcactactcttagaattctttccttcacatgactttagatagcctggtgactatatgcctggtgtgtcttttgcaatgagtctcccaggagttaaattttttatatttggaagtcaaaagctatagca

SEQ ID NO: 313313 - DNA, 264 bp, Homo sapiens
gaacccagtcccagtttctgcagttcctgtaacagccacrttcccatacaagggctgcctgagctccccaagccctccaacaatcaccccccagtgccctcgaaggtctattcagagaagtcaccaagatgcagtcacccaggaaattcaaggacctccaacttaccaaaaggctttcggctgtacagagctaagcttcctattcccctcctaaacctacaatctagttttcatttctcaagaagcctttccctgtgctcacgc

SEQ ID NO: 313314 - DNA, 264 bp, Homo sapiens
gaacccagtcccagtttctgcagttcctgtaacagccacattcccayacaagggctgcctgagctccccaagccctccaacaatcaccccccagtgccctcgaaggtctattcagagaagtcaccaagatgcagtcacccaggaaattcaaggacctccaacttaccaaaaggctttcggctgtacagagctaagcttcctattcccctcctaaacctacaatctagttttcatttctcaagaagcctttccctgtgctcacgc

SEQ ID NO: 313315 - DNA, 528 bp, Homo sapiens
atgagcacattccctgctttcagcctgagagaccatagcattatctttctgtgataaatgaatcttatctctccccagtcaaggtgatttggccaaatccatatcagkttggttaaaacaagcaaagaaacaagtagaatttttctgataattaatcaagcttttgaaactttgtgtcacataacattcagaatcattagacaaacatacatgaagcatgaatgtggactgtcttctgaacaccttttacacattgtgattcgacttttctttttccagaagtatctgtggcaagatccagtagcgtagaagagaaaaggtgtggaggtacgttattccttttaagtagttgtaatggatgtactgatatattctaatcatttcccttcctgcatgttttctataatttttctgcctcttggccaagaatgaaaaaccagagaaagtcatggatcccaggcattctaccttggcataaaggcttaatagtcaatatttgatgtaccgatcggtggttctcaaaatggg

SEQ ID NO: 313316 - DNA, 664 bp, Homo sapiens
acttcctgctgaggaaaactcataacactcctgtttatcttcaggccttttgaatggtggccaggacatgacataaggatgtattaaagcacttttagaaatatttccatgggcaacaggaaatatgtgataaggaaggccaattaggctttctgtttacaaagagttggtatcaggttgagctgatgaatgatgcattgagttgtattatacttaccctctctccaacacaccctattccattcttctttgcataaaacaaggtttttcttgaatgaactgctgtcagtcagcatgaacacaaagataagaagcttgacccaggaagaccaccctatttagtgaaagccatatttcamtgttcatgatcccattaaaggaaaaaatatacatgcatatgtatgtatttatatatgtcatatatacacatatatgtatacataaaagtatatgtgtataattattttatatatatttttcagttgaccaaaaagctgaaaaagcccacttaatatggggccaaaaattaacataatacaactatataaatatatgaactagtgaagcatgttataaagattaaactgttttaacccccaaattacttattttttcattaagcaatgaaaaattaaaattttaaagcattacatgaataacctat

SEQ ID NO: 313317 - DNA, 486 bp, Homo sapiens
tagttggttctcacactgccataagaacatgcccaagactgggtaattgataaaggaaagaggtttaattggctcacagttcacagggctggggaggcctcagaaaatttatgatcacggcagaaagggaagcaaacatgtccttcttcacaaagcaggaggagagagaagaatgagagccaagtgaagagggaagcccattataaaaccatcagatcttgtgagaacttactatcaytagaacagaatgggggaaactgtctccataattcagttatcaccacctggtccctccaatgatgtggggattatgagaactacaattcaagatgagatttgggtggggacacagccaaactatattaccaccctaatcatgaatgacatctcagatctcagggagaatgaaggcaaacagcccctgtgatggcatctggctgataaaagtgagtgaagtcccagtatgcaagagaagcagtgagcctc

SEQ ID NO: 313318 - DNA, 577 bp, Homo sapiens
atgcattgcaaggaaagtcaatgtgatccaagataaggttgaatataaacacaaagaaagttctaaagcaatttgggaaatgaaggaagatataaacatcttttggaaggaaggaaggaacagaaggaaggaagaaagggagagagagagtgggggagtgagggagggagggggagagagagagagaaataaagaaaaaagaaagaagagaggaaagagasaaagaaagaaagaaaaagaaagaaagaaaaagaaagaaaagaaaagaagggagaaagagtgttatgtcatttgcagggacatggatgaagctagaggccatcatccttagcaatctagggttggaacagaaaatcaatcactgcatgttctaagtggaaactaaatgatgagaacacatggacacatagaggagaacaacacacactgtcagagggtggggaaaataactgctgctactaggcttaatacctggatgatgaaataacctgtacaaaatacttccatgacacacatttacatatgtaacaaaccacacatatacccctgaacttaataaaattatttgaaaaagaaa

SEQ ID NO: 313319 - DNA, 545 bp, Homo sapiens
ggttggtgatagagcaagcctcaataaatttaaaaaaatcaaaatcatgtaactgtactttcagaccacagtggaataaaaataaaaaggaatacaaagagctctcaaaatcacacaagtacatggaggttaaacaacttgctcctgaatgactttcagttwaacaatgacatcaaggcagaaataaaaaacattatttgaaataaataaaaacagaaagaaaacataccaacatccctgggatgtggcaaaagcagtgttagaagtaaagtttatagtgctaaatgtatacattaaaaagtttaaaaactgttcctatcaaactaccatgacatttttcacagaactgaaaagagaaacctcttgtaaaattcatgtgcaaccaaaaagaacccaagtagccaagcatcttaagcaaaagcacaagccagaggcatcacatgacttgatttcaaactatactataagactacagtaaccaaaagagcatggtactggtacacaaacaaacacagagaaccatgcaatcgaacagagaacccaga

SEQ ID NO: 313320 - DNA, 601 bp, Homo sapiens
acccttgcatttcaccatatacaaaaattaacttaagatgaattaaagatttaaatgtaatacctcaaactataagaatactataagagaatctaggaaacacaattctggagattagccttgggaaagaatttatgactaagtcctcaaaagcaattgcaacaaaaacaaaaattaacaagtgggacctaattaaactaaagagcttctacacagcaaaagaaacggtcaatagagtaaacagacaacatgcagagtggaaaaaaactattctcaaaccatrcatctgacaaaagtttaatattccaaatctataaggaacttaaacagctgaaaaagcaaaaacaaccccactaacaggcataagacatgaacagacacttctaaaaagaaaacatacacacggctaacaaacataaaaaaatgctcaacatcactaatcatcagagagatgcaaatcaaaacaacaatgtgatacaagtcagaatggctgtcattaaaaagtcaaaatgcaaaatatgctggtgaggctccagacaaaaaggaatgcttatacaatgttggtgggaatgtaaattaattctgccactgtggaaagcag

SEQ ID NO: 313321 - DNA, 601 bp, Homo sapiens
acccttgcatttcaccatatacaaaaattaacttaagatgaattaaagatttaaatgtaatacctcaaactataagaatactataagagaatctaggaaacacaattctggagattagccttgggaaagaatttatgactaagtcctcaaaagcaattgcaacaaaaacaaaaattaacaagtgggacctaattaaactaaagagcttctacacagcaaaagaaacggtcaatagagtaaacagacaacatgcagagtggaaaaaaactattctcaaaccatgcatctgacaaaagtttaatattccaaatctataaggaacttaaacagctgaaaaagcaaaaacaaccccactaacaggcataagacatgaacagacacttctaaaaagaaaacatacacacggctaacaaacataaaaaaatgctcaacatcactaatcatcagagagatgcaaatcaaaacaacaatgtgatacaagtcagaatggctgtcattaaaaagtcaaaatgcaaaatatgctggtgaggctccagacraaaaggaatgcttatacaatgttggtgggaatgtaaattaattctgccactgtggaaagcag

SEQ ID NO: 313322 - DNA, 513 bp, Homo sapiens
tccagcctaggagacaagagcaagatttcatctcaaaaaaaaaaaagtacagtccaaagagtgtgaatccagtggatatggtttctcttgatctcaaaaacgtcaggaggaggccaggcgctgtggcttatgcctgtaattccagcactttgggaggctgaggcaggcggatcacaaggtcaggagatggagaccatcctggtgaaaccccgtctctactaaaaatacaaaaaattagctgggcatggtggcgggcgcctgtagtcccagctattcaggaggcttmggcaggagaatggcgtgaacccaggaggaggagcttgcagtgagccaagatcaagacactgcactccagcctgggagacagtgagactccctctcaacaacaacaacaacaacaacaacaacaacaagtcaggagaaacaagaagaaactaagaaagaaagaatatcaagtaaatctttagccaatagagatttaatacaaatagaaaaattgtaagtgctgacttt

SEQ ID NO: 313323 - DNA, 568 bp, Homo sapiens
ggaatgtctcaatcctacatccatactgccagacctgggtatggttaattacaatgctgtgacagcctaaagcaaaaagcaagttaaaacatgtaacttacaaatggattcattagagagaacgttgccaattttattcttctagkgaagatgattgttatatctgccacattacataggattatccctttagtgattagatatgttttgaagaaggaaactaatttttttgggaacctggttcacattgctgtcatatcacctgtaaagtgctggggtcaatgtatactagaagtaagtcccccatttccctgcagtccactgtgctcacactgaaagagtggttttaaagaaataaaattacatacatagttgaaatacctaagactttgtcgtccagaaatctctaccaaaaaaatgcccaatgtcccttaaactcattattttattaaaacacagtgttgttcaagttagaattgaggtgggtcagtaaaaaataaacagcagagagaccagctctccagaaccaataattttttcaggaatagtaggaatttgcaatccagta

SEQ ID NO: 313324 - DNA, 350 bp, Homo sapiens
tactctcttgcctatacttaatgctattgattaaagaaaaggattagagacttgaaaaagtagaaaaatwtttaggggaaaaatccagaatacgtttcaatgttccagagtattgggtaaaataaataaaacaaatacaaattcttttaacacttatttgtcaaagaaagtttactgtcgtcaaagattgctgtttccccatttgtgaattagaattgtttctggaaaatggctacccaggaaatttattttcttatcctagcatctttaggtggggccagataactaattctggccaatataatgtgagcattggaaaacaatgcacgttacttctggtgtgagccttt

SEQ ID NO: 313325 - DNA, 350 bp, Homo sapiens
tactctcttgcctatacttaatgctattgattaaagaaaaggattagagacttgaaaaagtagaaaaatatttaggggaaaaatccagaatacgtttcaatgttccagagtattgggtaaaataaataaaacaaatacaaattcttttaacacttatttgtcaaagaaagtttactgtcgtcaaagattgctgtttccccatttgtgaattagaattgtttctggaaaatggctacccaggaaatttattttcttatcctagcatctttaggtggggccagataactaattctggccaatrtaatgtgagcattggaaaacaatgcacgttacttctggtgtgagccttt

SEQ ID NO: 313326 - DNA, 555 bp, Homo sapiens
cagtatatttctttaacttagacaagatagaggtggtgctatgtcacaattttagggaagaagatgctaacacctatacatggatgtatactaaaataataaccgttgtcaagacagtaatttcataactttttcagtggagttatattaaaatattgggttaaagtaaatatgaaaatgtcaaaaagtaaatttaggagagagtaatatagaagaaagatcttcagactagaaatcggcaggtccagccacatcccttgaccaactcttgtgtttcggaatgcaaaatgatatgatcactttggggaaaaatttagaatttttcttataaattacatwtatatttttccatatgactctgacaacactccttgataaatgaaatattatattcacaaataactatacacaaaaatgttgatagcagctctattcaaaatgttctcaagctgaaaactattcaaatgcccatcaatgtgtgaatggagaatccaactgtggtacatccacataatggaatatgacttttaataagaaagaacaaactatgaacac

SEQ ID NO: 313327 - DNA, 513 bp, Homo sapiens
aacttacaattatgacagaagatgaaagggaagccagcactttacatgtctggaggaggagaaagaggtgggggagttgccacacacttttaaacaaccagatctcacgaaattcactcactatcacgagaacagcaccgaggggacgatgctaaaccatttgtgagaaaccatccccaggaaccaagcgcctcctaccagcctccacctccaacactggggattacaatttgacatgaggtttcgtggggacacagatccaaaccttgaagaggatttcygcaaaaaggaaaagcaacagggcatatgtgctggacaagttgaatttgctgccctagatctgtttcctccctttttcactgtgctttccttctcaggatgacctttatgaaccgtttcatttggttccactctctccaaactccccattgagcttgtgcaatgggggagaatgaggtttaggtatttattcctggggttccctgccagccagaccatgggtttgtaggagct

SEQ ID NO: 313328 - DNA, 625 bp, Homo sapiens
gagaaataaattatacaatatgtggaaagaatagaaaatgtaggaagtcctcaaaaatgttacttctttctcatttctgctccaacacattttgacctctaaagccacatttagaccagaaaacacaatataacagatgggtgttgacctgcattttaaactgagaacaaatttcccatacaccgtccacaaaccaaatcagccctggcagttgattaaaaacaaatgtagtccccaatggagatgttgctaccagatttaaacctccagcggtccctcaagaaggaggaaaaaagagaaaaggaagaaaaaagtacatgttgattgtgttcaatgggccaagttctgtgtaatacaataatgcaatgtctctccagatagtcagtagggaccatagaggagattrtttttagggttctcagaccctatatgaaataatattgaagcagttggtgaaagaggtcatctctttcccgtcattctaaaaacattaagagaaagtctcaggggggtgctagcacgtctttaacgcctctctaacggtgtctaattcctcctttcagcaaagaatgaacctgccccactctcagagccttggcaggcaacagcgctagctagaatttta

SEQ ID NO: 313329 - DNA, 420 bp, Homo sapiens
agtaagacaagagagccaaatgtaaataataatatcaggtaattaattagatgtatgaacaaagttcaaatcagtgtagcttccaggctatatcaattacctcgcttaagccctctacgccctttacaacacaggactgtcacccctgcccagtttacgggccagccaaggmgggttcagaaacagcagggaatgtcctttgggcttacgctgtttgtgaccctgcttcttctcggatcctagtccatcttcatcttttttttcccaaaatggttttctcatttctgccactgaagttgaacaaattcaacatctgatttttcctttccctgtctcccctctgcccacaccctcccccagtacttcatcttcctgaggtcggctcgatcccaacttcatgtctgtcccatccagccctct

SEQ ID NO: 313330 - DNA, 420 bp, Homo sapiens
agtaagacaagagagccaaatgtaaataataatatcaggtaattaattagatgtatgaacaaagttcaaatcagtgtagcttccaggctatatcaattacctcgcttaagccctctacgccctttacaacacaggactgtcacccctgcccagtttacgggccagccaaggcgggttcagaaacagcagggaatgtcctttgggcttacgctgtttgtgaccctgcttcttctcggatcctagtccatcttcatcttttttttcccaaaatggttttctcatttctgccactgaagttgaacaaattcaacatctgatttttcctttccctgtctcccctctgcccacaccctcccccagtacttcatcytcctgaggtcggctcgatcccaacttcatgtctgtcccatccagccctct

SEQ ID NO: 313331 - DNA, 551 bp, Homo sapiens
gtgtggaatcagatgacagagccctctgtgaagaggagagaaggtggatccgccagcctctgcacctgtggaatatggtagccactagccacatgctgctgcttgcattgaaactaatttaaatggaatacaattaaaattttagtttatgcacattacaagtgttctacagcctgaggtggccagtgacaccatagtggtgcacagatgtaggatgcttctcccatcacagaaagttctgttggacagtgccccactggatttcccatgcagcagagaaaccctcagttrcagggcttgtcagattctaatgtaaatactatttatttcacccatgaaaaattatctctaacagcccttatccaagtccagcaaaccgtctgttgcaaatttacacagatattttaagggctaagtaaccacctctgaaggtgctgattccaaattagggcagttcatatcctggcttatgatcctggcagcattttttttttcattagcagctgcaaatagtaattcacttctcctagggtgggacttagagttaactt

SEQ ID NO: 313332 - DNA, 573 bp, Homo sapiens
ataagggacctttatacaaattagacaaaggtggcacccaacatttttagaaggaaaaaatgcacaaaggacctcctctctgggcatacctgttaccaaaatggacttcttcctcctggctttcctctcaaggactcaagtctcctgaatggaatgtgggctggattctagattcctgtagaggcccattggctaggtacccttatgcagtgcacaacctgaacaatcctataagagggcctgtgaattattgcctgtgcctatgatcattttagagtgagagagctatgwgttgtattggatgtctctgatccaaaaaagattcaataggcactggggcattataagatgatgggtgcccaacatacagaataattatgaggagggagagggagtgagcactataaactactactgggaagaactatatgacactgcaaggggcagggggacttggctagacagagaggaggtggttggtgcaatgtttaggcacgtggatcccaaaggcaggctccctggcttcagatccccgttattcatcttatgggccttataacaccgctgtgcctt

SEQ ID NO: 313333 - DNA, 617 bp, Homo sapiens
acttcccaaatttatctacagagtcaacataatcaaattcctagttgtagaatttacaaaaattgaaaaccatgatcaactggcttcaattcgatttgtattctcagttttctgcccaaactacacagatgggtttcaaatataatgagaaggttgtagaaaattcatgataatgttttctgtattttctcttctatctaagctttcgggctagaaggggtatgtcattcctacccacaaggaatatgaatatgtattcattcacctaacaattatttactaaacaaggttctacgtgtcaaactttgttctatgagctgggaacacagtcatgaacacagcagaaaataaatctttcttcttgaggagcttacattccagtggggatacaggtaattaaaaaaaataataataaatacatagtatgccatattgggataagttctgtagagaacaattaggctagataagaagaggaagagaggaagagagtgtctggtakatggtgaaggcattgggagtgggtggctggggtaggcattagctgaaaaattgaaattcatggtggtattttcttgctctccaatctattcccatccttgccaatacagcagctg

SEQ ID NO: 313334 - DNA, 600 bp, Homo sapiens
gactcttgacccaaatccagtcctctttccactcccagtcttctctttcctccaacatctggccaagcccaggttattatcagtgtttgctcagccctggaataggcacagatcatgctgagcatcacagatagtgtggaggagctacacattcaagtttgcagagtaaatcctaaaaagccttagagaaggaactgcaaggatgccaaatcaatctgaaggaggcctcagtagacaaggaggcatggggaagaccggctggggagacagatttttgagcgtcttttcacaaaatctaaaaattactaaccttctacatgtcaaaagatatttttttgtcaacacatgcaagaacaccctgctaagaagcccaaatgagcagatggatgagttcgcagactcgcagatgctggagttggaaaagtccctgctggcagtccccaaaggacggcccagaaaccccaccctrccctagcccctcaccaggctgagttcaatacctttcagagagccttcaagcttctggccttagactgaatcttgctctctagaaaccaggttgttggaaggttttttcttctttttataatgatccccctg

SEQ ID NO: 313335 - DNA, 536 bp, Homo sapiens
cttcctttgctcggctaaagaatcacagggggagagtagcccaccatattgttcccagtcccatctgtcccccttgctaagttttgggagactgaacacaattttgattttcgtacactctccagcatctcctaggctccctctttgtctcttctttcttcccacagtgcttatccccccttgctctgctcccrccccctggaaccatctttttgtgtttgcattttccctcctgctcctccgtgagaaggatcccatttctaagactcatgctttgccagggctgcttggcatagggctgccttctccccaagatgcctgccagaccagcttaggcacaaaggcaggtgccaccagccctccctttccctcagcatcagttgtcaagagctctgcttccatgaagctaccaaaatagaattgtgctctgacctctgcttagcagggttgccctcctgatggggaaacctgcatgttacatgccagaagcctggcccaatgaccactagggtgctcagaggccacagggtcccaac

SEQ ID NO: 313336 - DNA, 536 bp, Homo sapiens
cttcctttgctcggctaaagaatcacagggggagagtagcccaccatattgttcccagtcccatctgtcccccttgctaagttttgggagactgaacacaattttgattttcgtacactctccagcatctcctaggctccctctttgtctcttctttcttcccacagtgcttatccccccttgctctgctcccgccccctggaaccatctttttgtgtttgcattttccctcctgctcctccgtgagaaggatcccatttctaagactcatgctttgccagggctgcttggcatagggctgccttctccccaagatgcctgccagaccagcttaggcacaaaggcaggtgccaccagccctccctttycctcagcatcagttgtcaagagctctgcttccatgaagctaccaaaatagaattgtgctctgacctctgcttagcagggttgccctcctgatggggaaacctgcatgttacatgccagaagcctggcccaatgaccactagggtgctcagaggccacagggtcccaac

SEQ ID NO: 313337 - DNA, 536 bp, Homo sapiens
cttcctttgctcggctaaagaatcacagggggagagtagcccaccatattgttcccagtcccatctgtcccccttgctaagttttgggagactgaacacaattttgattttcgtacactctccagcatctcctaggctccctctttgtctcttctttcttcccacagtgcttatccccccttgctctgctcccgccccctggaaccatctttttgtgtttgcattttccctcctgctcctccgtgagaaggatcccatttctaagactcatgctttgccagggctgcttggcatagggctgccttctccccaagatgcctgccagaccagcttaggcacaaaggcaggtgccaccagccctccctttccctcagcatcagttgtcaagagctctgcttccatgaagctaccaaaatagaattgtgctctgacctctgcttagcagggttgccctcctgatggggaaayctgcatgttacatgccagaagcctggcccaatgaccactagggtgctcagaggccacagggtcccaac

SEQ ID NO: 313338 - DNA, 502 bp, Homo sapiens
cagaatggttttctgggattgacccagggtgttcccaactggctgactgcccaggctacctagggactctgctccttaaattccagcactgggccccttggtcactccagtcaaagttccagtggccccaggtgtggctcttcctatcactctggaatgcaaattgcagaccttggtagtgcccatgtggtgctaattctgcargtgtgcagaatgtaagagttatggaagcatggctttctctacctagatttcaagggatgttacagaaagcctgtgaacccaggcaaaaatttgcttcatgggtggagccataaagagcctccaccagttatacccaatggaaatgtaaggttggggccactgtcagggccccagaatacagccactagcagcctgcaatgcctgcctaagaaagccacagacaccaggatgtaactctacccagagacagcagccacgtggactgcacccagcaaagctgtagaggaggagttacctg

SEQ ID NO: 313339 - DNA, 704 bp, Homo sapiens
caataaggcaagtggatattcaggcagggagcagacacactactgtgagaaatcagtacctggaagaatactcgagtcctgcagatgggtgagatttcctaggcaccgtgttctgtctggaagggacaggcaccctcagatgataagggaccaacagttagagaggaagaaaaccaggagatacagtgccatggaagctaaaagaagacgagatttcaagaagtgctgaatactgttgaggtatcaagtacaattgcgactggaaactgtccactggatttaatgccatgaattgaggatctcagcaaaaatcatttttgtacagtaagccagactagggtgggaggaaagggagacagcaaattgagacaatagttttggggattcacagaatccagtaatgcatataaagcactcagcacagtgttaacacctagtggctgaacaataaatgttaatttccttgccttcctcatyttaaacaccaattgactttcccttttggatactgacagagatgaatgcaaatgtttcttttcatggctttgcaaaagtaccaataaaagtgattttctatcaccaagatacagcctgctgatgtgaaatatacccaggcctgcttattattgttgttgttctccaggacattgccgatgtcaaatcatgtaaatctatattatcataaaggcaattaattaattgta

SEQ ID NO: 313340 - DNA, 597 bp, Homo sapiens
actacctgggcaagttagccccacgcaacatgcactaaaacagaacctttgggttttaacccaataaaagatgttttaaactgtatctcaggtcctggccatataaagggactccacctgcccaactctggcaggttaattcttttccatgaccccttgtgggctcatctgtagagtatcagtaccaccgatcactgggcatgatgtgagaattagggcagatgatgaatgagcagtttgtcatgccgaaagcaattacgagggttcactagcatcaagatggtgataattattattattaacttgatgccataacaagggattaagccagccaaygaagaaagagaatatcatccgtttagtcattttccaggtgccttctggctggctagtttccactgaatcccaagcccatcacccactctttaagcctaccccacgattcatcactcttcccttgccttaggccttttattttctgttctgtggcaggtaaacacagatttccttctcaagaatcagcgaatgtgctctatttctgatgcataaactctgaataacttctccacacttccagattcttcacacctcgctctg

SEQ ID NO: 313341 - DNA, 597 bp, Homo sapiens
actacctgggcaagttagccccacgcaacatgcactaaaacagaacctttgggttttaacccaataaaagatgttttaaactgtatctcaggtcctggccatataaagggactccacctgcccaactctggcaggttaattcttttccatgaccccttgtgggctcatctgtagagtatcagtaccaccgatcactgggcatgatgtgagaattagggcagatgatgaatgagcagtttgtcatgccgaaagcaattacgagggttcactagcatcaagatggtgataattattattattaacttgatgccataacaagggattaagccagccaatgaagaaagagaatatcatccgtttagtcattttccaggtgccttctggctggctagtttccactgaatcccaagcccatcacccactctttaagcmtaccccacgattcatcactcttcccttgccttaggccttttattttctgttctgtggcaggtaaacacagatttccttctcaagaatcagcgaatgtgctctatttctgatgcataaactctgaataacttctccacacttccagattcttcacacctcgctctg

SEQ ID NO: 313342 - DNA, 576 bp, Homo sapiens
ggctactgccatcgaacagtcaggtctttcttgttggccacaactctcaaaacaacactttactcttgatatgatccacctcgcccctgttggcatttgcagtttgagccactgctggaactggaagacaatgccaaggaatctggacttatttccaagggcaacacaggcctgctgagggcaaggatggtccggstggacaacataatgaagacatgtggataaggtcatttcttttgagttccttctcctgaaagggttgaccccaaactaggcctgaatagaggccatcagaatgttctctggtcttgaaaagcagtttcctggcactcgatttttttctctctcctgccctgttaacaatgctgtatcctagatgttgagtcataatggctctacctaattttactaggaaatccacccatcccaagacctctcagcatggtggtcctttggcccacaggtgatttggatgtctagagatgtatgtgtctgtccaggaggcagctggctgttttataagctgctcaggagaacctattgaattgtatcacaatcttcaggcacttctgatcc

SEQ ID NO: 313343 - DNA, 523 bp, Homo sapiens
caagatgtttacttccttcctatctgctcttcttgtgaagaaatcgctcattcatcctttcgtttattcatcttttgaaatatgttggtgctcagtccctaccagacacagtactaggagatgtggacacaaaaataagagctatagcagctcaccgggacaagggaacagataagaacacaaaatgcagtgttgtggggtgagcatggctggggaaacagacctagcaaagactcactgagtcagagggcaggtcttagggcagagaagccttcttgtagaaggtgaactctgatttggggtttgaaggatgcataggaatttgtcaggaaacaaactggtgttctaacactgactcccattctccttagttaggcctgacaaagtgcattacagcaaattgtagctaagacttaactcagaaactctggatgcttttcctctattcactyatttaacccttatttttcagaggagaaactgagacccagagaggttacctgccttgccaaagttacacagc

SEQ ID NO: 313344 - DNA, 615 bp, Homo sapiens
cccagtgtcagcgcttgacaagtcttaccctttgtggttattatggctccccttgatggtaataataataattagaaaaacaaacgcatgcagccattgaatcacagtgtctgatttcccttacgtgtgcccctcatgtgaagcatgataaataactctgagaacatggcttttctttttgctgttgtacttcccactgatatggcttcttggctcctcaatgcttctattgcctccagatgcaggtcccttgtcaagcctttcccctccaggctgagtttgttatcttcttctctgggctccccctgccctccatccatccctctctaatggtacttgtcactgtwgattctgcctggcttccttatctgctctctctttctcacttgttcaggcttcgggaaggcagggttgcagttggagctactgatagagaagaaagccggtggactcaggagcccatggaggaggagagggacctagactcaaagtcaggtggaacctcatagcccagctctgtttttattcaacctcaaacctgggaaggcttctgccgtgagccccgtgagataggagatatcatttacttttttgttctttctccctgcctgcagc

SEQ ID NO: 313345 - DNA, 615 bp, Homo sapiens
cccagtgtcagcgcttgacaagtcttaccctttgtggttattatggctccccttgatggtaataataataattagaaaaacaaacgcatgcagccattgaatcacagtgtctgatttcccttacgtgtgcccctcatgtgaagcatgataaataactctgagaacatggcttttctttttgctgttgtacttcccactgatatggcttcttggctcctcaatgcttctattgcctccagatgcaggtcccttgtcaagcctttcccctccaggctgagtttgttatcttcttctctgggctccccctgccctccatccatccctctctaatggtacttgtcactgtagattctgcctggcytccttatctgctctctctttctcacttgttcaggcttcgggaaggcagggttgcagttggagctactgatagagaagaaagccggtggactcaggagcccatggaggaggagagggacctagactcaaagtcaggtggaacctcatagcccagctctgtttttattcaacctcaaacctgggaaggcttctgccgtgagccccgtgagataggagatatcatttacttttttgttctttctccctgcctgcagc

SEQ ID NO: 313346 - DNA, 615 bp, Homo sapiens
cccagtgtcagcgcttgacaagtcttaccctttgtggttattatggctccccttgatggtaataataataattagaaaaacaaacgcatgcagccattgaatcacagtgtctgatttcccttacgtgtgcccctcatgtgaagcatgataaataactctgagaacatggcttttctttttgctgttgtacttcccactgatatggcttcttggctcctcaatgcttctattgcctccagatgcaggtcccttgtcaagcctttcccctccaggctgagtttgttatcttcttctctgggctccccctgccctccatccatccctctctaatggtacttgtcactgtagattctgcctggcttccttatctgctctctctttctcacttgttcaggcttcgggarggcagggttgcagttggagctactgatagagaagaaagccggtggactcaggagcccatggaggaggagagggacctagactcaaagtcaggtggaacctcatagcccagctctgtttttattcaacctcaaacctgggaaggcttctgccgtgagccccgtgagataggagatatcatttacttttttgttctttctccctgcctgcagc

SEQ ID NO: 313347 - DNA, 577 bp, Homo sapiens
tagaggcatctggcagtgctaggacttctcagaaaatgctgcaggaaactctaattcagctcctcccacttcttcattctaaagtggaagaagctgaggccttgaagggagaagttttctggagtcatccattcatttactcagccacctttcactgaatatctcctttatggatggccctgaagttagattacaactttatccctgaccttaaagaagctccttttttgtgaggacaccaacacttacacaaattacaatgcaactcagtaagtatactcacaagggagcaaattccctggaagaaatgtttcagctgggctgtcgaggacgggatggagtttgatggatgggaatgaaactaaatggtgttccagacagagctctttgcgccagagcacaaaggcctttarggaaggacatgagtaaggaatggcaggtgactcattggagtgcaaggggaaggttctgattggaggaggagcagccataggttgagatggaccagtggagtgggggatcccatggagaagggttttagacttgtcttgtagtcctgtgggttttgagcaaggaa

SEQ ID NO: 313348 - DNA, 476 bp, Homo sapiens
ttaaagttaaaatgttctcataagtttgtgtgttttcaacttttgctcttccagttggtatattcttttcttcctccatctcctttttatamctccaaccacctttctctttttattttccaatgtttttctttcttctaagaacattgttaacgctggtaacactttacaatgttgcaaagctctgaacctatttcctgtcatctcttcatgctttcccattgagatatcaggagattttccttttactttgtttacactaggaacatttcagcgtggctagacctgttttccacctaatttttttcaacttcaagcttgagaaacccaaatatgctcctggtttttgttgttgttgttgttgttgttttttgagacggaatctctctctgttgcccaggctggagttcagtggcaagatctcagctcactgcaagctccacctcccaggttcacgccattctcctgcctcagcc

SEQ ID NO: 313349 - DNA, 476 bp, Homo sapiens
ttaaagttaaaatgttctcataagtttgtgtgttttcaacttttgctcttccagttggtatattcttttcttcctccatctcctttttatacctccaaccacctttctctttttattttccaatgtttttctttcttctaagaacattsttaacgctggtaacactttacaatgttgcaaagctctgaacctatttcctgtcatctcttcatgctttcccattgagatatcaggagattttccttttactttgtttacactaggaacatttcagcgtggctagacctgttttccacctaatttttttcaacttcaagcttgagaaacccaaatatgctcctggtttttgttgttgttgttgttgttgttttttgagacggaatctctctctgttgcccaggctggagttcagtggcaagatctcagctcactgcaagctccacctcccaggttcacgccattctcctgcctcagcc

SEQ ID NO: 313350 - DNA, 476 bp, Homo sapiens
ttaaagttaaaatgttctcataagtttgtgtgttttcaacttttgctcttccagttggtatattcttttcttcctccatctcctttttatacctccaaccacctttctctttttattttccaatgtttttctttcttctaagaacattgttaacgctggtaacactttacaatgttgcaaagctctgaacctatttcctgtcatctcttcatgctttcccwttgagatatcaggagattttccttttactttgtttacactaggaacatttcagcgtggctagacctgttttccacctaatttttttcaacttcaagcttgagaaacccaaatatgctcctggtttttgttgttgttgttgttgttgttttttgagacggaatctctctctgttgcccaggctggagttcagtggcaagatctcagctcactgcaagctccacctcccaggttcacgccattctcctgcctcagcc

SEQ ID NO: 313351 - DNA, 476 bp, Homo sapiens
ttaaagttaaaatgttctcataagtttgtgtgttttcaacttttgctcttccagttggtatattcttttcttcctccatctcctttttatacctccaaccacctttctctttttattttccaatgtttttctttcttctaagaacattgttaacgctggtaacactttacaatgttgcaaagctctgaacctatttcctgtcatctcttcatgctttcccattgagatatcaggagattttccttttactttgtttacactaggaacatttcagcgtggctagacctgttttcyacctaatttttttcaacttcaagcttgagaaacccaaatatgctcctggtttttgttgttgttgttgttgttgttttttgagacggaatctctctctgttgcccaggctggagttcagtggcaagatctcagctcactgcaagctccacctcccaggttcacgccattctcctgcctcagcc

SEQ ID NO: 313352 - DNA, 573 bp, Homo sapiens
aaaaaaaaacagagaggaaattagatgtgagtctgagagccccacccctgccaagaggcccccagccctgaccccaggctcccccactcactgggcatcctcgccctccagcaggcggtggtaggtggtgatctccagctccagccgcatcttcatgtccaggaggatcttgtactcctggttctgctgctccatctcgcagagaagctgggccagccgctcctccacactgccgatcagyccctggatctgggacagctgcatgcagtaacggttctctgtctccgccaggttgccctccagggatgctttctgcaggagggcaggaagaccaggggtcagtgagggttgtcagtgtcctcttctgggcccatccccatgcacaggactgttcctaccatgctgagctgggactgcagctcgatctccaaggcctgcatggtgcaccggagctccgaaatctcgctcttgccgctctggaccagctcactgttggtagccacctcgcggttcagctcctctgtctgcagacagaacacaggacagggtggtgtgagcctggatccctctcct

SEQ ID NO: 313353 - DNA, 561 bp, Homo sapiens
tgctctccagagctttaggcaagcactgcaggaagaaacaaatctggaagaatctcccacacacaccagaagtgagtgctagacctccttggagagggtgaggatgtagcctgctagasagcagagaattttgctgagtttctacactgacaaaacactggaaaactgctcccctaagtgctgcttgtgacctgctctgtccccagagaggtgatggccagggttggctgctgtcccccacaagagcaaggtaagaggagcactcagaactagaaagagccccaaccttctccagcgtccctttagcagatgctgcagatgaagtttcacaccgtgccacagaaaaggcaaagccggcaagcaaggtaaaggggggaggtttggaactgatggcaatcagctcaacagtgcaagaaaaatgagttttcttttgaaaagacgttcaacatcactgatcattagagaaatgcaaatcaaaaccacaacgagctaccacctcacactagtcagaatggctattactaaaaagtcaaaaaataacagatgctggcaaggttgtgg

SEQ ID NO: 313354 - DNA, 561 bp, Homo sapiens
tgctctccagagctttaggcaagcactgcaggaagaaacaaatctggaagaatctcccacacacaccagaagtgagtgctagacctccttggagagggtgaggatgtagcctgctagagagcagagaattttgctgagtttctacactgacaaaacactggaaaactgctcccctaagtgctgcttgtgacctgctctgtccccagagaggtgatggccagggttggctgctgtcccccacaagagcaaggtaagaggagcactcagaactagaaagagccccaaccttctccagcgtccctttagcagatgctgcagatgaagtttcacaccgtgccacagaaaaggcaaagccggcaagcaaggtaaaggggggaggtttggaactgatggyaatcagctcaacagtgcaagaaaaatgagttttcttttgaaaagacgttcaacatcactgatcattagagaaatgcaaatcaaaaccacaacgagctaccacctcacactagtcagaatggctattactaaaaagtcaaaaaataacagatgctggcaaggttgtgg

SEQ ID NO: 313355 - DNA, 527 bp, Homo sapiens
aaaataacaacagcaattaatagtatatatactcagtgtttataaagacatacacatacttttaattatagagcagaaattgctagtttgctttaaatataacaaaataaatcacctagggtcaaagaacaaaaagaaaccaagcacccataagataataaggtccatctggaggccacatggctacagttttctttggccttctctcatcacttatttcctgcagacagtaggtcaaagccatcatgtttaattctgattggacaattctcttctacttctgtatgtaatgcactgccccaagcttygggcatcacactgaccactcggcgcccagtgtgcatagcattttgaagtatttgtgaatgtttaggatatatcacataccaactccaaaagccaatggagtaaatggcacacagtgaaacagagaaatggaataaaacttcaaaacaactctggcttatgacctgtgagatctgagaggtgccacattgcaaaagaagagactgtcaagtgcagtggag

SEQ ID NO: 313356 - DNA, 540 bp, Homo sapiens
gagttccagtttcttcatattcttgccaacacttattttctgktttttttttccccctttattctagccatcctagtgggtatgaaattggtatgtcattgtggttttgatctgtatttttctaatggccaatgatattgaacttccctaaagatcttttcatgcatttattggccatttgtatatcttcttacgagaaatttttgttcaaatccttagcccttttcctagttgagttatttgacttcttgtcgttgaatgctaggagtcctttatatatgctggttactagacctttatcagacatatgatttgtaaatgtcttccctcattctatgggttgtcttttcattttgtggatagggctgattgaaacataaaagttttaaatatcgatgaggttcaattcatctattttttctttggtcacacatgctttcagtgtcctttccaaaaaacttttccttaactcaaagttgcacagatttatatctatgctttttttttctaggatttttagttatagcccttacatttagg

SEQ ID NO: 313357 - DNA, 478 bp, Homo sapiens
ttaagggaaaagctgagtctggcaattaagctttaaatgtccactactctttctttctcattcagaccattcttcagtgatcgcaacattctctcttaactcttttgagccatttcatgtagatgcagtaacagtgtttgtttctaaggaaggaggtgctccatcccaggctggagaccttcaggccaggggttgggaagagaccmctggttggagctgcaggtgaaatgtgttcttggaatcaggctcctagacccaggggctccaagacccagatttcatttgtatcttttatactttcagattgatttttcaaaactaatttaaaataatacaagatatttagaaaacaggatggaaaaagctggattaaatttgattcacctggttgagcaatctaatttccatctctaccgatgtgatgtgatatttatcatatggaagagttttcaaaagctcttgcatgtgaactgtatta

SEQ ID NO: 313358 - DNA, 478 bp, Homo sapiens
ttaagggaaaagctgagtctggcaattaagctttaaatgtccactactctttctttctcattcagaccattcttcagtgatcgcaacattctctcttaactcttttgagccatttcatgtagatgcagtaacagtgtttgtttctaaggaaggaggtgctccatcccaggctggagaccttcaggccaggggttgggaagagacccctggttggagctgcaggtgaaatgtgttcttggartcaggctcctagacccaggggctccaagacccagatttcatttgtatcttttatactttcagattgatttttcaaaactaatttaaaataatacaagatatttagaaaacaggatggaaaaagctggattaaatttgattcacctggttgagcaatctaatttccatctctaccgatgtgatgtgatatttatcatatggaagagttttcaaaagctcttgcatgtgaactgtatta

SEQ ID NO: 313359 - DNA, 534 bp, Homo sapiens
ttgttagtttgtggtttaattggaagtgagtgaagaatggagttaatggtgacttggaaaatcaacagatggtaactaagataatagtctatgaagttatttacagccagaaagtgtttaaggaaatcaagatattccaaagagattagaagagggcataaatagaaagtataaagttctatggaaaataatgaaggcagatgctcttattcaaaagaagaaaactttcaagayggaaaagaggacacaggagcttagaagaaattactagaatccacaggatgagctaggggcagtgtagtaattacatgatgtggtagtcgaaagtttgtaaaacaaaacagaaaaacattacattcccaggttgaggccttgcacagtggtatccactaaaaagaaaattaatctcagagcaattaaagttaaaaccataggggaaaatgtcggttagagagttcattcattctagtatctcatctccttgccagaacaggtaattaacagtttcctatagtgaggtgaatcatcaaatcc

SEQ ID NO: 313360 - DNA, 569 bp, Homo sapiens
ttctgactacaacagtggctctggaagtctgacagcacctctgacatattgaccaccctgctggtagtcttcctttaggagcaggtttgtgcttgattccagttgtaacttactaatccttctattcttatgatttgccattatggtgtctcagctactgcatttttatttttctgtcyatctaattcttcttttatttccttaacaatgaatgaactctctgttctcctttctatatcagggtatctgcttatttatggtttctactgccatgtggcttttaacatcctctctctcttagcttctgcttctgcctaacatacatatccgtttctgcatgtgtctcattaagttaccccaagaaaaatttggtttgtttggttcagagcagagattttctgctggaaaaatctctcatggcaatctatagatagttttctttggtacgtactcattatctaatctcttatgattggggtcatacgaaaccaaacattgtgacctatatgtaaagtacctctttagcaggagactctaaggtatctcagaagagagtagtacaacagaga

SEQ ID NO: 313361 - DNA, 519 bp, Homo sapiens
cctcttctgttgcttttgtgaagtgttaaaaaataggatcttgtactttattttataccccttttccttcctacctaaaccttttctcccttcytccctccctccctctcttgctctttctttctttcatttctagtttttggttcttgttgtctctgttctgcccattttagattctactctcagcctgttctttttttttttttttttttttttgacagtgtctcactctgtcgcccaggcttgaatgcagtggcatgatcacagctcactgcagccttgacctcctgggctcaagtgatcctcctgcatcagcctcccaaatagctgggattacaggtgtgtgccaccatgcccagttaatttttgtgttttctgtagagacaaggttttgccatgctggtctcgaactcctgagctcaagcaatctggccaccttggcctcccaaagttctggtattacaggcgtgagccaccataccctgcctactcttagccagttctcagtgtggaccctgc

SEQ ID NO: 313362 - DNA, 519 bp, Homo sapiens
cctcttctgttgcttttgtgaagtgttaaaaaataggatcttgtactttattttataccccttttccttcctacctaaaccttttctcccttcttccctccctccctctcttgctctttctttctttcatttctagtttttggttcttgttgtctctgttctgcccattttagattctactctcagcctgttctttttttttttttttttttttttgacagtgtctcactctgtcgcccaggcttgaatgcagtggcatgatcacagctcactgcagccttgacctcctgggctcaagtgatcctcctgcatcagcctcccaaatagctgggattacaggtgtgtgccaccatgcccagttaatttttgtgttttctgtagagacaaggttttgccatgctggtctcgaactcctgagctcaagcaatctggccaccttggcctcccaaagttctggkattacaggcgtgagccaccataccctgcctactcttagccagttctcagtgtggaccctgc

SEQ ID NO: 313363 - DNA, 594 bp, Homo sapiens
aagaggaccctcacagacatagacctgcacatcaccctgagctggaggcagtgctgggtgggacaggtttctttcccttagggaagaggggtgtgttctctgtataggaaaaatggagcaagagttatctggtgactgtaaggaaatattacagcagagacaaccagcactcgctacatatccatggtctccttcctttcccagcctccctgcctgttgagttgaggccacgtgactcatcctggcagatggcggaygcagcggggacctgcaccaaccgcagtggagacagttaagagttggggccttctcacatcctcctctcttgttggcagtaactgtggaagtcatattgagaggatggaaccgcaggatggatgctgcttggatgccagtgtcactgtgtggagcagagctgccttagacattatccaatttatcttagactgggacatgatgaggaaatgaaccttagtttgcttaagccatcaagattgaggggttttgttaccacagcttgtcttaatctgtcctaacacaggtgtatacttcttttttacacaaaattgagaccgaaccaatcatgttatttta

SEQ ID NO: 313364 - DNA, 589 bp, Homo sapiens
tcctccatgtaattcttaaacatagatgtaaatatctgcccaattttcaataataattcctacttaatagccttaattttatcattttaccatggatcatactatattacaatgattatttgatcatagctaatataaccaatctgaataaaatgtatatgccatcataatattttttaaaaatcagttaagagaaaaacgtaaagagcatctgtcacctttttattttgagatactgacttttcagtcactgagtatcctgctaagcatttaagctttaaatacatacaattgttaatttattattattatttacaataattagattttgctacccaatattttrtctatttttttctcacttaaattatcagggaaattttccaggtcaacaatatatcagttcagttaaagaaggcctttaatgtcccatttgttattgatacttcaatacctaacctgaaaacccttaagagagtagtagtacagcatactctcttgtcagagatctaaccttgaatttactatagctcaagccttagcaaaagctgtgctggaaaaaaaaaaaaatctatgtagaaaatacatc

SEQ ID NO: 313365 - DNA, 576 bp, Homo sapiens
aagtataaaagtagacatattatatgtatatataaaagatagattaataaatgtcaaaacaatttaaaatacaataaatcatcaagcgcaatcactttgctttgatctaaaattaagggtaaccaagattgattttcataagtggtttatggaagtcaggatagaatgttgtaattgccaaatgataccgagctagtttaccatgtttttacacatagacatgcaaataactaaatataaaataaaatgagaattaataggaatagaaactaagaaacagaatttaccatgtatatagacatttacacatacaaagatgttaaaaagaaaagagaaaaaaagtaaaaaccaaaataacaaaagatttgttttacaaaaatatgcttcataaatttctatgatgtttatcgaatgcaaactaaatatttggctataatagtattagcagtcaaaggaaagagaaattcatgattagatgtaatgttgaaagtgctgtcaaaacattaataccagttgttcataagaggcaaaacttttctgacactgaaartatgggttcccacaaaagcatcattg

SEQ ID NO: 313366 - DNA, 537 bp, Homo sapiens
tgttaaacagacataacatattgaaccatcacttgctaataaaggcaatattgtgttagttaacttaaaatgttctacttctaaattgtcactcttttaaaaaaccaataaaagaaaatgatcttcactgctttattttttcataacaaatataaaatggccatttargaatattaatcttttaaatatacattacatatatttttttgaaatttaataagaaataaatatataaatatgaagagtaataattggtgataattctataaatctatatgaaaatgtatttttggagttcagttcatttgcaaacaaaattagttttgtttaatataaaaattatttacaaggacagtgttgtcacaaattcttcacgtgttcacatgaaagaaaattatgtttctggaggatttcttttttttctctattatatatcttacacttgaaaaacttctttactgatactttaaattaatagctgaatatatgcttatcaggttgataaggattctacataaagtagtttcacacaatggg

SEQ ID NO: 313367 - DNA, 490 bp, Homo sapiens
gttttctttaaaataaatttgatagactactagctaaataataaagaaaaagagagaaaagatccaaataaataagtcaggcattataaagcagaccttatcacccaacccacagaaatacaaaaatcctcagagattaytatgaacacttctatgcacacaaactagaaaacctagaagaaatgaataaattcctagaaacaaataatctcccaacagtgaaagaggaagaaattaacagcctgaatagaccaataatgagtcccaaaattcaaccactaattaaattcctatcaaccagaaaaggccctggtccaagtggattcacagctgaaacttgctagacttacaaagaagagctagtatcaattgtattggaaacacttcaaaaaattaaggaggagggactcctacctaactcaatctatgagataagcaacattctgataccaatatctagtacagacacaacaacaaaaacgaaagcttc

SEQ ID NO: 313368 - DNA, 626 bp, Homo sapiens
ataagtgagttttctgtttgaggagatttaaaaagcctgtgacaaatggtgaaaggtttattttcttcattgatgaaattggtcagggtattgtaggcagcagaaaatagttgaaatgtttcacataaaagaagcacattttaaataaatytttgtggcaaacgcataaaggattgatttgaaaaagacaaaactagagtcaaggagatcaactggagggtttttagagtaaattaggaggaaaagactttgtctaaacttggagagatatgggttaagtaaaggttatggaagggatgaacatgagaaatgtaaaccttttggatttgtgagtaattgactaaattcaggtggaatgttgcttaagaaagatgaatcaaggattacttccaaagttctatcttgggtaagtggttgattacacatggtgagggtgggatttgggatagcagaatgatttctgttacgaacatactgaattgtgttgctcatggatagctaaataaaggacaaagcttaacaatagtttccttgaagctgtctcaaaatttctgtaagaataaaactgttctttcctattttccaaatagttttattttatgataaggaatgaaaggcaacgtgtt

SEQ ID NO: 313369 - DNA, 533 bp, Homo sapiens
gagggtgggatttgggatagcagaatgatttctgttacgaacatactgaattgtgttgctcatggatagctaaataaaggacaaagcttaacaatagtttccttgaagctgtctcaaaatttytgtaagaataaaactgttctttcctattttccaaatagttttattttatgataaggaatgaaaggcaacgtgttttgcaggttcatgttcctctgtccatacatagtatttatcagtggtactgtgccagccaatttgttttgaaaaaaaaaaaaaaaaaaacagtggcttttaccatgctttcatatacgtaattaatttcattgtaaaaataatgatatctcctgtcaagcctggcttcattcatcagttcgaaatgtatccttatgagttatcatctattcagaggataaagctgaaaattaacatccatgaggtttggagattctatatatgacacatgcacagagaagtgagttagaattatttgcaatagatttagatttacacaagtagttaagttagatttc

SEQ ID NO: 313370 - DNA, 602 bp, Homo sapiens
gaacatgagaaatgtaaaccttttggatttgtgagtaattgactaaattcaggtggaatgttgcttaagaaagatgaatcaaggattacttccaaagttctatcttgggtaagtggttgattacacatggtgagggtgggatttgggatagcagaatgatttctgttacgaacatactgaattgtgttgctcatggatagctaaataaaggacaaagcttaacaatagtttccttgaagctgtctcaaaatttctgtaagaataaaactgttytttcctattttccaaatagttttattttatgataaggaatgaaaggcaacgtgttttgcaggttcatgttcctctgtccatacatagtatttatcagtggtactgtgccagccaatttgttttgaaaaaaaaaaaaaaaaaaacagtggcttttaccatgctttcatatacgtaattaatttcattgtaaaaataatgatatctcctgtcaagcctggcttcattcatcagttcgaaatgtatccttatgagttatcatctattcagaggataaagctgaaaattaacatccatgaggtttggagattctatatatgacacatgcacag

SEQ ID NO: 313371 - DNA, 564 bp, Homo sapiens
gtaagtgtctaggtaagaaatttgtgtgggccgaattatgtatctattatctttgtactttcagaagctagcacagtgctattcacataatagacacttggcatatatgtaaagttaacttagctgaataaccacattattatatgtgcaaaatattgatactatagtgacaaaaaggagtgacacttttcctcatttatcataagggtcacagccaacacctctataacaaagcacamgttaacatgagaaaagcataacaaacatatgtaatcatagttttatgtaaaacaggaaccttcagaataaaggcccaaagatacagagaatgctctcaggctttattcttaggttcaatgaaacaggaactgccatgtagaaatgtgattggacaaaaagtgtataagctaatggaaacagattgagtgaggaaatctagtaaggcctgtccacattcttgttggcttattaattgtagcatttcttcctctcaggtatggggtaagacccctctggaaggaggttgttaacttcttcatggccagctgttacacagaaaagcag

SEQ ID NO: 313372 - DNA, 586 bp, Homo sapiens
cttgggcccaggaggttgaggctgcagtgagctgtgctcctaccactgcattccagcctgggcaacaaaacaagaacctgtctgaaaaaataaataaatatatagaaatcatctataattctgggtgccaatgtggtacttaccagccatatatggccatggaacaatgtgtctagtgtgactcargaatggaattttaaagttatttaattttaagtagtagtatacaataattaaatatgaaataatagataattagtggctaccatattagacactgcagttgtagatccctggcttttgactacatattataatcacttggagattttctttttagggtttagattttttttaagtgtcatgtgcacatagtaggtgggtatatatattgggcaagtgagataccaagcatgcaatacacagtaatcacctcatagaaaacagaaggatttttcccctcaagatttatcctttgtgttacaaacaatccaattacacttttagggttttttttaagtatacaattaaactattattgactatcatcctgttgtgctatcaaatagtatatattattcattct

SEQ ID NO: 313373 - DNA, 650 bp, Homo sapiens
gtgtttagaacccagtctctactaaaaatacaaaaattagccgggcatggtgtcaggtgcctgcaatcccagctactcagcaggctgaggctggagaatcgcttgaacccaggaggtggaggttgcagtgaactctgtctcaaaaaaaaaaaaaaaaaaaaaaaaaaggatgtgtttaggggaaggaaataatagcacagccactttggataggagtttgcaaatcttaaaaattaagtgttcacttgctatctgacctagctatctcatttccatgtatttatmcaacttaaacaaaagcatgtgttcacaggaaaaaatttatgtgtaaaatattttagtggctttattcctaattgccaaaacctaaaaaccacccaaatgtctctcaactaggtgatccataaataagccattatgtgccacattttctttatccagtctaacattgatggacatttgggttggttccaagtctttgctattgtaaatactgctgcaataaacatatgtgtgcatgtgtctttatagtagaatgatttacaatcctttgggtatatacgcagtaatgggattggtgggtcaaatggtatttctggttctagatccttgaggaatcgccacactgtcttccacaatggttgaactaa

SEQ ID NO: 313374 - DNA, 633 bp, Homo sapiens
tggagaatgtccaaatactgaagctggcagaaaagaggaggacagattcatacttagagaaaaaagaaccaaagaaaggtttctttctttgctttagaaatggataggaggaccttaattacatttatagaaaatgagaaaaagccattgaaaatgaaggagaaacaaaactaataggccaagatggctaaaaagaccttcatctgtatctgttccaatcagaagaagatcgagatatgtataaaaaagtaaaagtgacttaggaattgcctgtcaataattataaacaagaataactataatagctaatatttattatgcacttgctaaatgggttttttataataattagatatgttgtgatgggttttgtgatactaacatatatcttattgttagataggttgttatgaactgtgatcattattagactgtgtcatgaactgaatgcttatgtacccccaaaactcacatattgacaatgagactgtatttggaaacaggacctttaggagayaattaggggtaaatgatgtcctaatctaataggactggtagccttgtaagaagagaaatgtacctggctatcaatgggacaacaataattttaatagctaatatttattatgtgct

SEQ ID NO: 313375 - DNA, 647 bp, Homo sapiens
gaaaaacaaaactgtcttcttccccctatgttccagctgttctgtgtctttgccagcgttagtattattggtcttctaattttaatcactcttgcaggtgtgtawtgctatctcatggtggttttcacttgtattttcctaatgactaatgaaattaaacattcttatgagcttatgtgcaatctatttatgttctttggtgaagtgtattttaaacattttgtccatttttaaattagttttattttctaattgtattttgatagttatttttcattctggatacaagtactttattaataagttgtctgatatattttcttcttgtttgcgatgtgcctttttagcaatatatggcaatgttccttggtgtggctttctatatgtttcttctgctggttgtttaagtttctagggtctctgagttcataatttttaacaatttgtaaatgttcagggattatttcttcaaatattttttctgtcacctctccatttctttcctctccttctgaatctccagttacacgtatattaaactgttagatactgttccataattttctgaacatctgtttttttcttcttaatccttttacctatgatttttatcatattgtgtttttaagtttccacatcttcttcaa

SEQ ID NO: 313376 - DNA, 647 bp, Homo sapiens
gaaaaacaaaactgtcttcttccccctatgttccagctgttctgtgtctttgccagcgttagtattattggtcttctaattttaatcactcttgcaggtgtgtattgctatctcatggtggttttcacttgtattttcctaatgactaatgaaattaaacattcttatgagcttatgtgcaatctatttatgttctttggtgaagtgtattttaaacattttgtccatttttaaattagttttattttctaattgtattttgatagttatttttcattctggatacaagtactttattaataagttgtctgatatattttcttcttgtttgcgatgtgcctttttagcaatatatggcaatgttccttggtgtggctttctatatgtttcttctgctggktgtttaagtttctagggtctctgagttcataatttttaacaatttgtaaatgttcagggattatttcttcaaatattttttctgtcacctctccatttctttcctctccttctgaatctccagttacacgtatattaaactgttagatactgttccataattttctgaacatctgtttttttcttcttaatccttttacctatgatttttatcatattgtgtttttaagtttccacatcttcttcaa

SEQ ID NO: 313377 - DNA, 647 bp, Homo sapiens
gaaaaacaaaactgtcttcttccccctatgttccagctgttctgtgtctttgccagcgttagtattattggtcttctaattttaatcactcttgcaggtgtgtattgctatctcatggtggttttcacttgtattttcctaatgactaatgaaattaaacattcttatgagcttatgtgcaatctatttatgttctttggtgaagtgtattttaaacattttgtccatttttaaattagttttattttctaattgtattttgatagttatttttcattctggatacaagtactttattaataagttgtctgatatattttcttcttgtttgcgatgtgcctttttagcaatatatggcaatgttccttggtgtggctttctatatgtttcttctgctggttgtttaagtttctagggtctctgagttcataatttttaacaatttgtaaatgttcagggattatttcttcaaatattttttctgtcacctctccatttctttcctctccttctgaatctccagttacacrtatattaaactgttagatactgttccataattttctgaacatctgtttttttcttcttaatccttttacctatgatttttatcatattgtgtttttaagtttccacatcttcttcaa

SEQ ID NO: 313378 - DNA, 583 bp, Homo sapiens
tggaaaggaaaatgcaatgaatttcatacggaaaytaggtataaattttctttcatgaaagcatatgtaactatgcttcatattttatatttttaatctatttaactttaagaataaatgaactatatcactctaatcactatgtgtgttttttgttactttgtctactcaagataagaattacacatttagcagaggtgttctcaattgtttgctttataccaaacattcctttgatgttgtgtttagtttcgtgttggaaagctcaatggtggggacaaaaaaggcaaaaggagttctaattgaagaagtccatctcacaagaatcaatatcgagaaggaaaacaggtgtgttgctaagcaaagtatttttttctattgccctattcatgcccttttcaaacatctcatttatgagtccaaaccagctgtcactgcactattttgcaagccagagctcagctatttatgctgtctctgctgttagagatctatatgttttgatcttttttctacttagcacatgagaagcataatgctgatatgtaacacttgttaattggaacataaagatatttaattt

SEQ ID NO: 313379 - DNA, 583 bp, Homo sapiens
tggaaaggaaaatgcaatgaatttcatacggaaattaggtataaattttctttcatgaaagcatatgtaactatgcttcatattttatatttttaatctatttaactttaagaataaatgaactatatcactctaatcactatgtgtgttttttgttactttgtctactcaagataagaattacacatttagcagaggtgttctcaattgtttgctttataccaaacattcctttgatgttgtgtttagtttcgtgttggaaagctcaatggtggggacaaaaaaggcaaaaggagttctaattgaagaagtccatctcacaagaatcaatatcgagaagraaaacaggtgtgttgctaagcaaagtatttttttctattgccctattcatgcccttttcaaacatctcatttatgagtccaaaccagctgtcactgcactattttgcaagccagagctcagctatttatgctgtctctgctgttagagatctatatgttttgatcttttttctacttagcacatgagaagcataatgctgatatgtaacacttgttaattggaacataaagatatttaattt

SEQ ID NO: 313380 - DNA, 582 bp, Homo sapiens
agttgtaggagcatattaaaaggattctaaaccccaaggttcttgtcaattctggtgtttcaaaggcaatacttattagaactaccaaacaattttatgcaaaaataattttaaattcaaaataaacgatcatagctactgaaccgaaaattgacttgcttgtgttccgaattcaacatttcagtcaagtcgtactaaggcctgttaaagtaacacacgatcagctctgtcattttattatgccaaatacagcaaagatctataggtcagtcatgggactgtttgccttatattttctggagaggtgaaacctcttaactgaatcctacatttaatcatctccaaatcccaagctatatctcctgatccctgtttcgatttaaaataaaattcattttctggtgttctgtgtgagtttgattcacgcttgacttagagatttatgaatagcatttactgtttacttactgaccactttcacagttccgatccccatgggtgtcttccacaaggctgcggtatgktgggagatgggaaggaggtggattggtgaatgatttcatgcagtaaaacacagcaccc

SEQ ID NO: 313381 - DNA, 554 bp, Homo sapiens
agagtataaaatgaacgctgtcacttatttttaaaatgtgcattcaaaacctacaagtggccgggcgtggtggctcagggctataatcccagcactttgggaggctgaggcgggcagatcacgaggtcaagaaatcgagaccatcctggctaacatggtgaaaccccgtctctactacaaatacaaaaattagctgggcgtggtggcaggcgcctgtagtcccagctactagggaggctgaagcaggagaatagcttgaacccgggagatggagcttgcagtgaactgagatcgcaccactgcactccagcctagcaagagagagagactccgtcaaaaaaacaaaaaaaaatacgagtaataataaactatttaagctcacgatttgaaaaaataatacataaggtaaataatatattctcattcctatgtaatccacacagtactcatgtcagctctcatcatcaagaactcatctacctcacactgtragaacagtttttaaaaaggtcaactgtatccttatatgaggtataaactggattaataaaggc

SEQ ID NO: 313382 - DNA, 550 bp, Homo sapiens
gcaggaggtgaggagtttctgtgcagttaagtaatgtggtcatagtggaagatcactggattcctaggaagtgtggtcaaccaaggcctgaaagtgggggagggcacgtatatttggcttgattcatagyttgttcatcctaataccaattagcaaactacagaatcatggagttcaaataattttctaaacttattgatattttttgataaattgacttgtaaatccattacatggatagatttttctgagggacccctccaaacacatactttttcaataattcaacagatgatactatacattaatcttgtgactaaataatgaattttgcctcaatgataattggtttataatcaagaaaacaattttcccagtagaaaaagtgcagttgttattcttatttatgtgcatctctaaatctcttttaaaaattactgagcttgctgggtgctgtggctcatgtctgtaatcccagcactttggaaggccaaggtgggggaattgcttgagcccaggagtgtgagaccagcctgggcaatataacaag

SEQ ID NO: 313383 - DNA, 537 bp, Homo sapiens
gtcaaagggctgtctggtgttcccggcaacatattaaaaattcttaattttactatttgctctccttgggcagtctcttcagttctcatggattttaaaccattttcatggtaatgaagtctctagtccaggcctcttctgtgtgctttagacttgcctaccttttaagtgattcatctccacttggatttctcaaagatatctaaataaagtttatcaaacttcaaattactcttttctctgcaaagaaattatccttgattccttcccccttcataccccaacatttaattcatgaatagacctgccaattggatttccaaaatctaacttcatcctcttccgtctcyttcatcaaatggtggtaccacctccttcgtcaaatgccagttatctcctgcctagattgctcccagagcatatcatctatgactttttccatcctgtgtccctcctgcccaatctccacagtgccgcaactgtgacctcctcagcacctactttggattgcctcattcttttgttttatgttctgta

SEQ ID NO: 313384 - DNA, 537 bp, Homo sapiens
gtcaaagggctgtctggtgttcccggcaacatattaaaaattcttaattttactatttgctctccttgggcagtctcttcagttctcatggattttaaaccattttcatggtaatgaagtctctagtccaggcctcttctgtgtgctttagacttgcctaccttttaagtgattcatctccacttggatttctcaaagatatctaaataaagtttatcaaacttcaaattactcttttctctgcaaagaaattatccttgattccttcccccttcataccccaacatttaattcatgaatagacctgccaattggatttccaaaatctaacttcatcctcttccgtctccttcatcaaatggtggtaccacctccttcgtcaaatgccagttatctcctgcctagattgctcccagagcatatcatctatgactttttccatcctgtgtccctcctgcccaatctccacagtgccgcaactgtgacctcctcagcacytactttggattgcctcattcttttgttttatgttctgta

SEQ ID NO: 313385 - DNA, 461 bp, Homo sapiens
tgttattttttaatgttaaactactattttttaaaatttgttcaagaataaattttattcattcaagaatctcaaatgcctttttcaacatttttgctgctgtgctgttacaattgaaaaagcttagtaaggcagaagaaaatacagtagtatcaaattactttaaaaaaaaagtgaaaaaaaatccactcaaagaaaattcaagggaaaatcccaggaaaattgacctgaatgaaaactatgaaratagcaggattattaaaaaatgtaattagcctaaattacgttaaatcacacatttttctggattaccaaaagactcctaataattaatagatagttattaaccatctacttgtacaaagagctattgacctattaagaaataaggtgaaaaaaatgatggatgtagacaactaatttggaatagatttggagcaatgaaaggaaagtgagagaat

SEQ ID NO: 313386 - DNA, 461 bp, Homo sapiens
tgttattttttaatgttaaactactattttttaaaatttgttcaagaataaattttattcattcaagaatctcaaatgcctttttcaacatttttgctgctgtgctgttacaattgaaaaagcttagtaaggcagaagaaaatacagtagtatcaaattactttaaaaaaaaagtgaaaaaaaatccactcaaagaaaattcaagggaaaatcccaggaaaattgacctgaatgaaaactatgaaaatagcaggattattaaaaaatgtaattagcctaaattacgttaaatcacacatttttctggattaccaaaagactcctaataattaatagatagttattaaccatctacttgtacaaagagctattgacctattaagaaataaggtgaaaaaaatgatggatgtagacaaytaatttggaatagatttggagcaatgaaaggaaagtgagagaat

SEQ ID NO: 313387 - DNA, 523 bp, Homo sapiens
ccagtagagatttggagaactccatccaacaatgtgggcagacattatttatagacagaaagagaaagtaacatatagaaacagcttggttgtttacagctcagcattggccttatgttcacatggtctgatcagttggcagcctgtgattggctgcagcttggccgtggtgattggctatgactctcgttacggtagattctgattacagaaatatattctcgagttaggtttcagtttgtttacatactaagtttgcttgcggttcccttagtatggcagcygatttaggccaaatttaatttagtttaacacatgcgattaccatgtgacctattgattgtactcttggacatttagctcagagaaatgaagacatatgtctaaacaaaaacctgtccatgaatgtttacagcaattttattggtaatagccaaatgtctgttaatgagtgaatggttaaagtgtagtacatttgcactgtgggacactactcagcaattaagaagaaaaaactactgaa

SEQ ID NO: 313388 - DNA, 532 bp, Homo sapiens
agtgttgagtaaactggatatctgtatgcaaaagaatgaaattgaacccttatgtcttattcaaaaatgaactcaaaatttattaaagacttaaacataaatgttgaaaccataaaactcctaggagaaaatataggaaaaraaacttcttggtattggccttggtaattgtttcttgaatgtggcactaaaagcacaggggaaaacagaaataaacagtggagttacattaaactaacaggcttctgcacagcaaagaaagtaatcaataaaatgaaaaggcaacttatagactaggagaaaatattcacaaatcatacgtctgctgaaatgttaatgtccaaaacatataagcaaattctacagtttgatagtaaacacagcaaaaacaaaaacaaaatacaataaaaaacccccaaaccaaaccaaaccaaaaccacaaatagccccattaaaaaatgggcaaaggacctgaataaatgtttctttcaaagaaacttagaaatggccaagaggtatatgaaaaggtgtt

SEQ ID NO: 313389 - DNA, 532 bp, Homo sapiens
agtgttgagtaaactggatatctgtatgcaaaagaatgaaattgaacccttatgtcttattcaaaaatgaactcaaaatttattaaagacttaaacataaatgttgaaaccataaaactcctaggagaaaatataggaaaagaaacttcttgrtattggccttggtaattgtttcttgaatgtggcactaaaagcacaggggaaaacagaaataaacagtggagttacattaaactaacaggcttctgcacagcaaagaaagtaatcaataaaatgaaaaggcaacttatagactaggagaaaatattcacaaatcatacgtctgctgaaatgttaatgtccaaaacatataagcaaattctacagtttgatagtaaacacagcaaaaacaaaaacaaaatacaataaaaaacccccaaaccaaaccaaaccaaaaccacaaatagccccattaaaaaatgggcaaaggacctgaataaatgtttctttcaaagaaacttagaaatggccaagaggtatatgaaaaggtgtt

SEQ ID NO: 313390 - DNA, 503 bp, Homo sapiens
ttgtctgagttccccttaacaagccagctggcaagtttcaaacccctcgagaaatccacagagtacacatttctatttctatttattcttatgctgtacttgactgtggaatttcatcttcctgataactcttctacttgtacttggctaataactaatttaacaaaacctaaatctgagaagagatttaagggatcaggaaagctacttagccccttgagtttgctgcagtcctctgccctaagagctatattttcttgaaaatagactgttctgcgaggtgacaggttaaagcccaggagttcttaatgtgtgtgttttttttttaaataaggtaactttaaagagagttttggtgatgaaaaagcacacctttaaagtcaaaaatccyctctaacctgccaactttgtgttcattaattcattcattcattcatttttagagtatctattgtgtgccaggcatcctttaaagctctgggaatacagtactaaacaagagg

SEQ ID NO: 313391 - DNA, 457 bp, Homo sapiens
tatcctttacagatttttattttacaatgatttgaactcattcattttccaacctgcttattccagttcaaggttaccggtggctggagcctatcccatgggctcagggtggaaggtgggaacccgccctggacacaatgccatctcatcacagggtgcactcacacacacacccacattcactcattctgggccagttwacccaatgtgcacatctttgggccgtgggaggaaactggagcattcagagaaaacctacacagacatggtgaagatgtgcaaaccacacaggcagtggttcttctgacagggaagcaattattgtttttcatcaatgttataaacaacattgaaggaaatgttgttattagagaatctgctatatatctatctatatctatagtagtctatatctataatctttatccatatctagctatatctatatatctcaata

SEQ ID NO: 313392 - DNA, 522 bp, Homo sapiens
gaagtttataacaataaatgcctgcattaaaaaagaagaaatctcaaataaataccctaacattacacctcaaggaatgagaaaaataagaagaaactatgcccaagggtagcagaaggaagaatataataaasagtaaagcagaaataaatgaaatagagaatggaaaaacaacacaaggaacagcataattgtttgtcttttgaaaagacaaatataataaataaaaccttagctagactaagaaaaaggaagaaggctcaaataagtaagtccataatcaatgctaccaaaataaaaggatagtaagggattgttataatcaattatacaccaacaagcttatcaaccaagaagaaacaaatttctagaaacaacctaccaagaatgaatcaataagaaatagaaagcctgagcagaccaataaaaaaaaggaaaaataaaatataacaaaaaagatcagtattcaaaaatttctcaagaaagaaaagcctaggacaagaaagtttcactggtgaatcc

SEQ ID NO: 313393 - DNA, 561 bp, Homo sapiens
agttaagctgaatgacgacagagatagtatctgtctggatactgtctagtctaggacatgattctttatctagtaactagcacagttcctggcatgtagttgacagtgagcaaaaaatatatgttgagtgaatatatttaataacaagatgcattggaaagcagaatacacagagggccctattaatatcaagtgcttaataaatgttgcctataacagcaacttgagtttatgcctcaaatcctgtttgaggttgaaggawaagaaaatataaagtatcttcgtaaaacaacatagctgattctgatggcttttttgggactttccattttatagttctttggtaaagttaatttttccccttatatattttgctggcaagaacatttgaatgatgattacaaaatagttgtataatgacaggcatattagcggtcttcaaatatgtgagttggccatagccttttgatttagtagaccaattttgaactaattacaaaaataattgcctgggcacagtggctcacgcctgtaatcccagcactttgggaggccgaagtg

SEQ ID NO: 313394 - DNA, 572 bp, Homo sapiens
aataataataattatctagtttcactgtaattattagaagctttgtgtatgtatactcagaaagaaattcgagaaataaaagaatcgtggagaaatagtgttttacacccattttttttttcaactccaaataggaggtattttgtgatcccaaataatgatgactagataatctctggggagaggttgtggcttatgtgtcctaatggcagggttgggggtggcctgctgtttctgtctcawaggccaaattcactcagttgctgcttgtcatatagggattagcattcagttctgaggacagtgtaacttgtaatgttgtcactttctgtttgggtaaagctcaatcgcacctcaaccttggatctctttgactttttgctgttatttagattcattcaaagcctgagtgggcatagagttttctcttacgcaggtcttgctataacgcactctgtttttctaaatagattccttagctgcctcctcaagctgacacttacagagttcatccacatcaaagaggaatcaaagagctgtcacttgggttggtttagagcggtttgaaagaa

SEQ ID NO: 313395 - DNA, 547 bp, Homo sapiens
gcagcctcactggtttgagcgctgccagggggcgtgggactgggcatggggagggggatggggtagccaggcccctgtccgaggctgtgggtggtggggagggagggggcagtggggttgggggcgtcagcagcacctcggtggggcacttgagctcagagcccgagcgaaggaagaagttctccaagctcttacttcggaggatggtcttgagggagagggagcgcttgaatcgctggagctgggagaaaaagagggagctgtgagtgggagcctagagggggctggccagggcgggcttcccttcagggtgtctctggcggtaggggcggcagcagcagcagcagcagcagcgtgggggctgagggccagagcgaaatgaaacagcaacagagaggctccccaggtcccgacgacacttcgcaatctcaggtgccacaaaagccaggtggttgacctcmatggagaaaggagttctggccaggtgggcagcaatcaagagccgtggggactgtggcaaactggatggccagggagtagctgcagg

SEQ ID NO: 313396 - DNA, 601 bp, Homo sapiens
aggggtcaagtcagacctaaaaataccttcctccaccccaggcccctttgagcctgggaggcagctgactggggccttcctttcagctgtcccctgtccctctgagtgccactccctttgcccagcctggcagtggtgggggagggtggtgtctgggattcactgggtgatcctcctaggtttgtagggagcatcacaacttgagttggggtatatgtctggtttgagagaagggcggggaggggaggatcttggaaaggtccccaggggccctcctctcccattttccatcctctttcttgtaccctgatcccagcagccaaagcccccagtctggtcatggcccctccaggttctttggccaaagaaagtctaggatggagaccaagggcggggacttggaagtctgagccctcactcactctccccattctgaactgggctgaggccaartgtgtgtgggtacaagctggggagggccagaagcagctcttcttacaagaggactggaaatacctgacgcccttaacctgaacgtgtggcttcctgaatggtcaggcggtatttcctccacccggtctctgagactgagccagcttac

SEQ ID NO: 313397 - DNA, 611 bp, Homo sapiens
gcccccatctctcgctatctccaagccagctagaaatgcctttcctgcaagttccaggcaaatgcaatttcttttctctctttttttttttttttttttagacagagtctccctccatcgcccaggctgtagtgtagtggctccatctcagctcactgcaacctccccctcctgggttcaagcgattctcctgcctcagcctcccaagtagctggtattacaggcacccaccaccacgcctggctaatttttgtatttttagtagagatgrggtttcaccatgttggccaggctggttgcgaactcctgaccgcaagtgatccacccacctcgacctcccaaagtgctgggattacaggtatgagccaccgtgtccgggctgcaaatgcaatttcaggcagaaggcacatggggcacaaatacactcagacacctgcttcctccttctcaaacccccagcccccgcttgcagaagctgatgcatcctgggacaagggaattagcactgaacttgggggtcaaaggcaccacagaacttgacatctatatatctgagttcaaatccttgcctcatggctgtataactgtggtcaaatagtttaacctctctg

SEQ ID NO: 313398 - DNA, 550 bp, Homo sapiens
aattactggtgttcacataattcaccaataattagggataccactggctggaatttggggaatcctaagaataaatgttaacaaccataaccagggtccaaaagcaattaatttttaaatggtaatttttagttgtggagtacatgggcaggatgtgcaggtttgttatgtaggtaaatgtgtgccatggtggtttgctgcacctgtcaacccaccacctagatattaagcccagcatgcattggctattttctttttagctatgtttcctaatgctctctctttccccatcccaactcccaacaggccccccccsccccccgcccatgtccatgtgttctcattgttcagcttccacttgtgagaacatgcggtatttggttttctgctcctacattcgtttgctgagaataacagcttccagcttcatccatgtccctgcaaaggacatgatctcattcctttttatgactgcatagtattccatggtgtatacgtaccccatttgtcaaaagctattaaaaaaaaaaaacgtaattcataggacaag

SEQ ID NO: 313399 - DNA, 519 bp, Homo sapiens
agggtggtcattccctgatgccagcatcatgcttttggacttcccagcctccagaaccaaataaacttcttttgtttataatttacatagtctgtggtgttctgttacattggcagaaaacagactaaaacagactccaaatgcatttcagagctctttgaggctactcctcccattacaggctgagagctctagcagggcagaatgattttgagggatgatcctggggtacccttcatgggcttgctgcccagagccacgttgggcttctgttccccacattcaggtgyagagctcctcagccaccccaaccatggctcaagtaggcccagatgtggctgacccactacagaagttacaagctgtgaatcttggcagcattcacatggtgctgattttgcacatgtacagaatataagagctatgggggcatgactttctctacctagattttaaaggatgatgtggacagtcgagggctgcagccacagacttgtcaccaggggcagagccaccata

SEQ ID NO: 313400 - DNA, 613 bp, Homo sapiens
tggagcctgcccagaggcaggctgtgtgcagagggacagcgggcagcaagcctgtcatatgtgccctgggtgctacgtgcatgctggccttggtgtgatgtgtgtgcaggggatggggcacagtgtgtcacaggcaggcggagctgcccttggaagacatcacaaaatgaggccatgtccatgaatacagctgccctttatcgagtggtttctgtgtaccaggcattgtgctaaatccttgccttaaacccgctcagcaacactaaaaagtagatgtggtaggcagaatyatactcccttctcccaaaagataggcacatcctaattcctggagccctacatggcaaaaggggctttgaagatgtaattaagttaaggatttggggctggggggtttattattatcataacttgggtgtgtctttaaagcggaagaggggtcagagaaggagatgtgatgacaggatggtcagagagatgctgtgctgcaggcttggcagacagaggttaagggaccatgcgccaaggaatgtgagcagcctctagaagctggaaaaagcaggggaaatgattccccccgaagcctccagaaggaacgcagacctgctgacgc

SEQ ID NO: 313401 - DNA, 561 bp, Homo sapiens
atgtcacatgatcactctgtaaccaggagggatcactcaggccactgtgtttgaagctcatgtagtgcatgaggggtctcccaaaagagcccaaagaagggctagaaatttaagcagacaaaagtgctttcctaaatgctcaccatgtgccaggtatggtgttaaggcgctgctttgggccagctatcctgggcgacctttggaccatctattccaagtgacctctgaatcccggggctctcagggcatgtcacagtttataccctttacctgcaacaggtggtggcctccttgccatacacctgtagcyttcaaggggttccctcttggaaaaggtcagctatgctgctgtgagttctcctccactagataaggaaggggctgagactatttctaagtgccccccttcaatgagcatctcattgactccctgctttaatagatattctgttgcattttgacatggtctggtctgagagccttcccagggaactttaattctgggacaccttggtatgttgtgcccgcgcatgcatataagtgtgtctagtgggggtgggc

SEQ ID NO: 313402 - DNA, 263 bp, Homo sapiens
gatacaaaagcaccaggaactggcagcaaggctatccagcgtggcctaacttggagagacccctgttctaattgcagctctgtcactaagtcgcccagatgaccttgggcaaggagtagtttctttgccttcatcatcggcctcatcaycatcagcctttatgcagcacttgctatgtggaaggtacatgccaagcgttttatatggtctgagtcactgagtcctcacagcaatctgtgatgtgggtgctattaccaccccat

SEQ ID NO: 313403 - DNA, 573 bp, Homo sapiens
caccaccacccccaaaacaaatctgaccccaaagaaacagctttcttaccttagagaatgttcagaggatctgtctgggctgcttcttcaaggtaattccaagaggttgctgcagaaatgatttcagctacagcaggacaactgagcatgatagtggcattacagagtggtcactacaaaaaggaaagagattatactctcttgaaagagcacgcacacacatataaagttagggcacaccttcagagattggccccagtcatctgcctctattaaatcagtcatttattcagccttgtagataagcatgggcttatctcccctgcaatcggggctcagggaagggtgggaggcagaaggaagaaatagaatgactcattaatatcacttggcctaatawgctgggactgagaagttaaatgagagaactatgggattgaaaggtagactagacagttttctgcccactattatttaggagacactgcggcaagttgagagtgagctggttttcattcctggctaatgaacgcatacgatctaagaaaggggcggctggctggaaaaagggga

SEQ ID NO: 313404 - DNA, 570 bp, Homo sapiens
ttacttggtagctcagggctgcaaaggtgagtgtcccaacagacccaggcagatgttatctggtttttccgacctagcctcagaagccccatcgtgttacttccaccatgatctactggtaggagaagcagtcacaagtccaccagattgaaggggggtgaacagatgcaccttctcyacaacaagagcgccaaagaatctgtgggcttgttttacaaccactggaggtggagaaagtggaaggaacttgcggtgagggaggggctcacagtgagactgtggaggtagaaaatttctgatgacaacgaaggagcctggagaggttggcaggagtggagctgaaggtcagagaggttggaaatttgggaatcatgagccctgggtgcaaggaggacccggaggggctagagctgaagtcactggagatggtagtttgcagaggaaaccgctgtggaagagggaggagagacagcaccgagggtgtaggagccatcaggaaacatcagaagcgctcatgtgccatgcacagctcacactgcgctttatcaaaatcggcgtctgtcaccaaaa

SEQ ID NO: 313405 - DNA, 570 bp, Homo sapiens
ttacttggtagctcagggctgcaaaggtgagtgtcccaacagacccaggcagatgttatctggtttttccgacctagcctcagaagccccatcgtgttacttccaccatgatctactggtaggagaagcagtcacaagtccaccagattgaaggggggtgaacagatgcaccttctccacaacaagagcgccaaagaatctgtgggcttgttttacaaccactggaggtggagaaagtggaaggaacttgcggtgagggaggggctcacagtgagactgtggaggtagaaaatttctgatgacaacgaaggagcctggagaggttggcaggagtggagctgaaggtcagagaggttggaaatttgggaatcaygagccctgggtgcaaggaggacccggaggggctagagctgaagtcactggagatggtagtttgcagaggaaaccgctgtggaagagggaggagagacagcaccgagggtgtaggagccatcaggaaacatcagaagcgctcatgtgccatgcacagctcacactgcgctttatcaaaatcggcgtctgtcaccaaaa

SEQ ID NO: 313406 - DNA, 566 bp, Homo sapiens
caaactcccactagctaagtagcagggagaaagcagtgggggtggggaggaaagtacttgattgcaaccccatgcattaatctccatccaattcagtcacttgggtttgagtctcttggagcctgagtggatgaatggactgagggcagaccttgagatgtgtgccacatgggattgggtgtcagtggggaggagcatagctggctgtgttctccagccaggagggacagctgccccatacctcctgtgacttccacagtcctgtgtcttgcctgacaaagtccctaggtggtttgcctggccatcatttgtcatttgcccttgcagcaagtcacaacgtggtttctctgactgctcaagactcaaagccctcttccaccacactcaaggggtgctgaaggttaggagagcaggaccccaggctttttgcaggatgacctcaacattgcccaayctgttaaaaaaaaaaagacgactaaccacaatgactgtcctccccagtagccagcttctcagcaatccgtcagctactctaacaagtataaactgaggtcagcttggggatg

SEQ ID NO: 313407 - DNA, 492 bp, Homo sapiens
cacacccagatttgcacttctcttcttttcctggcacctcactgaccgtcccctccttcatcctgacgagggcagacgcagccatctccatgccaacatactctcaccacactgaaacgtctacatgtgcagttttttcccatgtcaattgcactctgggttggatgtgtccagtgacagctgcagaggtgctgagtgcacgggtaggtgacaggcagctcggcccaggaagrtctcctctcctctctgttcccatccatgttagccttagaaagcacatcctgtctgttgtccttctccctatgtttcgacacctatgctacctctgctgactgagttaccaataaccaggattaaacatcaccatccctgcaacaatgccagctccttttccttaagcagcttctctgtgcccaggtggaggctggatgctttccatatagttcttagaaatactcaggcgtactcttaggtgtataatgttactcccat

SEQ ID NO: 313408 - DNA, 586 bp, Homo sapiens
aacgtaagcacagggcacacagagacctcaataaatacttgatagccactgataattacgaaatggaagagtgtctctttgtaacaagaagccttcatcattgttcagactcccagttcactgtacaactaatgacaatttacctgtgtttacgtagcattattatgtatatatacagatgattattctacagactgcttgctgctaaccaaaatccatattctcttctgcttcctagggttacagccagattatatttcttagtctcccttacagtaaggagggccatgcaactgagttttagctagtgaaatgaatggatgcaatatgcatacttccaggtctggttcataaaagcttcctgtttgttccttttccatgtcttttccccttccagctcactggaatggcaataaccatcagggagactggaaatatcacttatccaactgtaatttccagcctattgtcacttctggcctattgtaaatatttgcrtttaaaaataaaactgctacgttactttttaaagtgcagtcaacagaatcaaatcaacataagtgatttgatgcccactattatttac

SEQ ID NO: 313409 - DNA, 468 bp, Homo sapiens
agtggcacattcctgtagtccctgctacttgggaggctgaggcaggaggatcgcttgaacccyggaggcggaggttgcagtgagccaagatggcaccactgcactccagtctgggcaacagagtgagactctgtctcaaaaaaaaaaaaaaagaaaaaacacatttattcatccaacattacacaaagtatgaccaggccttacattttaggagtatttacccaccataagacttttacgaatgggaaagaaagagctctctaggaacctaaccctaatttctttttttggatatagagtcttgctatgttgcccaggctggccttgaactcctggactcaagcaatcttcccaccccagccttccaagtagctggaactacaagtgtgtgccattacatctggcttaaccctcatttatttgacccaatcccacagaaccaaagcagacctttatattcccttgaat

SEQ ID NO: 313410 - DNA, 468 bp, Homo sapiens
agtggcacattcctgtagtccctgctacttgggaggctgaggcaggaggatcgcttgaaccctggaggcggaggttgcagtgagccaagatggcaccactgcactccagtctgggcaacagagtgagactctgtctcaaaaaaaaaaaaaaagaaaaaacacatttattcatccaacattacacaaagtatgaccaggccttacattttaggagtatttacccaccataagacytttacgaatgggaaagaaagagctctctaggaacctaaccctaatttctttttttggatatagagtcttgctatgttgcccaggctggccttgaactcctggactcaagcaatcttcccaccccagccttccaagtagctggaactacaagtgtgtgccattacatctggcttaaccctcatttatttgacccaatcccacagaaccaaagcagacctttatattcccttgaat

SEQ ID NO: 313411 - DNA, 546 bp, Homo sapiens
tgcaacagtaaatatatatattccaaactacatcctcttttatttttttccccttaaagccatgtgagcatgcctctaaaatacttgttgaaatatttcaaacagaaaaattacagaaatagtcaattcccaaatactctattcagattcaccaatttcactacactagttttattattctctttcattctgagtatgtttccaaaatgatgatgctaactattttttatctttatttttcaagacaaggtcttgctctgttgcccaggctggagtgcagtgctgtgatctcagctcactgcaacctcccaggctcaagcaatcctcctgcctcagcctcctgagtagctggaactctatgcacatgccaccatgctctcctaatttttaaatttttttgtagagatgcggtctcactatattgcccaggctaatctccacctcctgggctcaagtgatcctcctggctcagtctcccaragtgctgggattccaggcttaagccactgcacctgcccaactatttttaaaattatgtgaggtcct

SEQ ID NO: 313412 - DNA, 443 bp, Homo sapiens
tagcaccactgggtgagggtttccctgactgagctggtcttggcaagtggcgtccatcatgggggcttgaatccaggttgaagcatcaccagagtgatggtttgagaaggtggaactagctggaggacacccgagtactcttaaaacaatccccgtggtgagtaataaggggagctcagaagcatcagggtaacaatgggagaagtgtgaggtgtgtttcgttccaccttggaactttttcrtactgatggtgaggaggaaggagaatatagggaagtaacagaagaggttacagagcatgtttatttgccagctaaagctaaagtggcaaaggaaggagaggttcatccctatacttctgcacaccctcattattattatgaagaaaaagaccctccatatctttcttttctggaggacactgggcaaaaagtatttgccac

SEQ ID NO: 313413 - DNA, 443 bp, Homo sapiens
tagcaccactgggtgagggtttccctgactgagctggtcttggcaagtggcgtccatcatgggggcttgaatccaggttgaagcatcaccagagtgatggtttgagaaggtggaactagctggaggacacccgagtactcttaaaacaatccccgtggtgagtaataaggggagctcagaagcatcagggtaacaatgggagaagtgtgaggtgtgtttcgttccaccttggaactttttcatactgatgrtgaggaggaaggagaatatagggaagtaacagaagaggttacagagcatgtttatttgccagctaaagctaaagtggcaaaggaaggagaggttcatccctatacttctgcacaccctcattattattatgaagaaaaagaccctccatatctttcttttctggaggacactgggcaaaaagtatttgccac

SEQ ID NO: 313414 - DNA, 443 bp, Homo sapiens
tagcaccactgggtgagggtttccctgactgagctggtcttggcaagtggcgtccatcatgggggcttgaatccaggttgaagcatcaccagagtgatggtttgagaaggtggaactagctggaggacacccgagtactcttaaaacaatccccgtggtgagtaataaggggagctcagaagcatcagggtaacaatgggagaagtgtgaggtgtgtttcgttccaccttggaactttttcatactgatggtgaggaggaaggagaatatagggaagtaacagaagaggttacagagcatgtttatttgccagctaaagctaaagyggcaaaggaaggagaggttcatccctatacttctgcacaccctcattattattatgaagaaaaagaccctccatatctttcttttctggaggacactgggcaaaaagtatttgccac

SEQ ID NO: 313415 - DNA, 571 bp, Homo sapiens
ccagtcacaatgagtaatttaatggtagctatcatagcagttatcaccactgctgtgagtattccttcaacaaaggctgacacagagaacaattatgcttattgggcatatttatcaatcctgtctggtaataatgcctggatatagtcactctatgccacagttacacatgccttctgatctcagtattttacataataaatctgcccctataattgaggcatactgccctcaaaaacctatttgtaaaaaaatagaacctggacagaaataatgaatgtaattgtttaggaaaatttctttgcagaacaggcagaggtgctgcacaatgattcctatggaatcattattgattgatcccctaaggggatgtttctcttgaattgcacctctcagtctgcgtgccatggccacattatgttcagcttgcytgaacaaaatggtaggatggtagaaatgataagaagtatggcaagagttcctattttctggaaccatggtggtatagttacgcctcaacctcaaatgatatggcctgctgtaggagctaaacataaggatttgtggaaac

SEQ ID NO: 313416 - DNA, 516 bp, Homo sapiens
cacttctctaccatggactcaatctatacattgttgagatgaggtagaacagcatctctggggaacytttcatgacaatttaacagcagttttaagccaacttaaaactaacattttagaatcccttcacaccatagacctacacacacaacaaacagccacaaggaagggtgtgcaagatcatttctcctagttagaccccccactcctggggaccacactttgactggaaaagaatgctgctaattgtactcatgattgttttttattgtttgctaattctaagatgcaaagttagaataagagtaatgactgccaggacagccacacctgacagactggttgctgacatacctatgctctccaattaagaaacctgatgcagaaaacaaaaaagtggaagaggtagcagattgatcaagatggtagggacaattataagccacaaaccttcttggaaagcctaaagatttttgtaaaagtctcagtataaggttatgactgaaggcaacctaa

SEQ ID NO: 313417 - DNA, 516 bp, Homo sapiens
cacttctctaccatggactcaatctatacattgttgagatgaggtagaacagcatctctggggaacctttcatgacaatttaacagcagttttaagccaacttaaaactaacattttagaatcccttcacaccatagacctacacacacaacaaacagccacaaggaagggtgtgcaagatcatttctcctagttagaccccccactcctggggrccacactttgactggaaaagaatgctgctaattgtactcatgattgttttttattgtttgctaattctaagatgcaaagttagaataagagtaatgactgccaggacagccacacctgacagactggttgctgacatacctatgctctccaattaagaaacctgatgcagaaaacaaaaaagtggaagaggtagcagattgatcaagatggtagggacaattataagccacaaaccttcttggaaagcctaaagatttttgtaaaagtctcagtataaggttatgactgaaggcaacctaa

SEQ ID NO: 313418 - DNA, 516 bp, Homo sapiens
cacttctctaccatggactcaatctatacattgttgagatgaggtagaacagcatctctggggaacctttcatgacaatttaacagcagttttaagccaacttaaaactaacattttagaatcccttcacaccatagacctacacacacaacaaacagccacaaggaagggtgtgcaagatcatttctcctagttagaccccccactcctggggaycacactttgactggaaaagaatgctgctaattgtactcatgattgttttttattgtttgctaattctaagatgcaaagttagaataagagtaatgactgccaggacagccacacctgacagactggttgctgacatacctatgctctccaattaagaaacctgatgcagaaaacaaaaaagtggaagaggtagcagattgatcaagatggtagggacaattataagccacaaaccttcttggaaagcctaaagatttttgtaaaagtctcagtataaggttatgactgaaggcaacctaa

SEQ ID NO: 313419 - DNA, 549 bp, Homo sapiens
tggaggccaaggcgggtggatcactggagctcacgaattcaagaccagcttgggcaacatggcgaaagttcatctctacaaaaaatacaaaactagccaggcatgatggcgtgcacctgtagtcacagctactcaggaggctgaggtgggaggctggcttgggtctgggaggcagaggttgcagtgagccaagattgtgcctctgcactccagcctgggtgatagagccagactttgtatatatatgtgtgtgtacatatatatatatrtgtgtgtgtgtgtgtatatatgtaatacatatatattacatatctaatatatataatatatatgtaataaacatcatgtatatatgatgtttattagccctccaatgcttgaaatcaggggttggaatcaaggctaaccaactctggtctggtcaccatcactgaatgcttgcggtagccatgtgaacattgtttattgtcgtatactcctgggagagtcccagggatgagcttttataaagttgcagacgggaaagggactctcatctttggagagaat

SEQ ID NO: 313420 - DNA, 549 bp, Homo sapiens
tggaggccaaggcgggtggatcactggagctcacgaattcaagaccagcttgggcaacatggcgaaagttcatctctacaaaaaatacaaaactagccaggcatgatggcgtgcacctgtagtcacagctactcaggaggctgaggtgggaggctggcttgggtctgggaggcagaggttgcagtgagccaagattgtgcctctgcactccagcctgggtgatagagccagactttgtatatatatgtgtgtgtacatatatatatatgtgtgtgtgtgtgtgtatatatgtaatacatatatattacatayctaatatatataatatatatgtaataaacatcatgtatatatgatgtttattagccctccaatgcttgaaatcaggggttggaatcaaggctaaccaactctggtctggtcaccatcactgaatgcttgcggtagccatgtgaacattgtttattgtcgtatactcctgggagagtcccagggatgagcttttataaagttgcagacgggaaagggactctcatctttggagagaat

SEQ ID NO: 313421 - DNA, 615 bp, Homo sapiens
gagagatggggtgacagctggagcattcagaacacatatttatagattaagtgagctatcttatgtgggtgttgtytgtggagccccaaaacaattataatagtaacatcaaagatctctgatctcagtttaccataacagatataataataataataataataatagtaataataaagttggaaatattgcaagaattactaaaatgtgacacagagacatgaagtgagcacgtgctgttggaaaattgtgctgatagacttggttgatacaggtttgcaacaaacgttcaatttctgaaaaaatatatatttgtgaagtacaataaagcaaattataataaaactaggtaagcctgtatacgaattaaaatatctgtgtttactaacagagatatagacatatagttcaatggaagagaatagattgttgagagacagaaacatttctaggatcttggtatacgataaaaatggcaatgcaagtcattaggaaaaaggcagattaatcaatatatgacattgagccagatttacttcatgtcacatacataattagtatgtgtttgtattaaacactgaacatattaaagaaggaggaataatcagtaacata

SEQ ID NO: 313422 - DNA, 615 bp, Homo sapiens
gagagatggggtgacagctggagcattcagaacacatatttatagattaagtgagctatcttatgtgggtgttgtctgtggagccccaaaacaattataatagtaacatcaaagatctctgatctcagtttaccataacagatataataataataataataataatagtaataataaagttggaaatattgcaagaattactaaaatgtgacacagagacatgaagtgagcacgtgctgttggaaaattgtgctgatagacttggttgatacaggtttgcaacaaacgttcaatttctgaaaaaatatatatttgtgaagtacaataaagcaaattataataaaactaggtragcctgtatacgaattaaaatatctgtgtttactaacagagatatagacatatagttcaatggaagagaatagattgttgagagacagaaacatttctaggatcttggtatacgataaaaatggcaatgcaagtcattaggaaaaaggcagattaatcaatatatgacattgagccagatttacttcatgtcacatacataattagtatgtgtttgtattaaacactgaacatattaaagaaggaggaataatcagtaacata

SEQ ID NO: 313423 - DNA, 524 bp, Homo sapiens
ggaaaagacattagtcatcaggtttaatatctcgataaatgccaagttagagtgaaataaaatagcragtatgtctacacatgggtgtatcatagtgttttagaaaacaatgcataaagaagaaaggtaaccgaaaacaaaagaaaaatcagattcctagaaaaagtgattgtaaaattaacattggatttttaatcaggataaaagaatttagataaagaagaggtatatagtaactgtgctatgaaaaacacaatagctttgaggctgtaattttctaccaggcccaaatataattgaagagagaaagtcaaaaatattatcacaatggaaaacaaaagggatgtggaatctcacttgtcactctacacgtttgaaatataaaaagggaactcaccagtgagaagctgaagctatgccgctcagaaggtgactggtagctaatacgtgtcttacgtcctgagatgcaactcctgcatttaaaggaattgagcttactggtactgggcaaggcatgtgggtat

SEQ ID NO: 313424 - DNA, 523 bp, Homo sapiens
cgtataactgacctcatccacttccctgacctcatcwcttgctattcttcctatcattactttgtttcagtcaaattagtctccttgccttttctgaatgtaaaaaaagggactgccatatcaagagctttacacgaataatcttttcctcagatagccatagtgcacatagaaggttctcaatgaatatttgctaaaatgaagaataaaagaatatgacttttgcatattagttttctgtttagtttcatcccgaaacattataatctcccaggagttattctggctcaaacaccagctctggaagcactggctgcttgttcaacctaattagcattacttacaaaggaaatgtagagcagctcagtgcaagtgtaaagaaagcattaatcaacctgagtgcaaagcttaaaggcaagatagtaacagaatctacttctccactcctttaattattctggcagccacaaacaaagcagaatgatgagaaaggatggaggcactggagagagctctaccaaga

SEQ ID NO: 313425 - DNA, 523 bp, Homo sapiens
cgtataactgacctcatccacttccctgacctcatctcttgctattcttcctatcattactttgtttcagtcaaattagtctccttgccttttctgaatgtaaaaaaagggactgccatatcaagagctttacacgartaatcttttcctcagatagccatagtgcacatagaaggttctcaatgaatatttgctaaaatgaagaataaaagaatatgacttttgcatattagttttctgtttagtttcatcccgaaacattataatctcccaggagttattctggctcaaacaccagctctggaagcactggctgcttgttcaacctaattagcattacttacaaaggaaatgtagagcagctcagtgcaagtgtaaagaaagcattaatcaacctgagtgcaaagcttaaaggcaagatagtaacagaatctacttctccactcctttaattattctggcagccacaaacaaagcagaatgatgagaaaggatggaggcactggagagagctctaccaaga

SEQ ID NO: 313426 - DNA, 584 bp, Homo sapiens
tagaaacctcatgtaagtggaatcagataatatttgtcgctttgtgactgattgacttcacttagcataacatccttaaggttcatttatgttgtagcatgtgatacgcttttcttctttkttcaggtcaaataatattttattaagtatacatacatatacttaaatacacaaatttataggtatacctatttctcccacactagcccttgcttatcaccattctactttctatttttatgattttgactatattataaacctcatgtaagtggaatcagaaaatatacatatacatataaatgtgtatatatatatctcacacacatatctctcacacacacacacacacacatacacattcataccccattttgtttatccattcatttatcagtggacattttgggtgcttttacctcttggctattgtgaataccactgctattaagcttcaatatactgttttaaactattcagaagtaatattgcttgatcttatagaaatgctatttttcattttttgaggaattgtcataccaaatttcacagtggctgcacaagtttacaatcccttctacagt

SEQ ID NO: 313427 - DNA, 584 bp, Homo sapiens
tagaaacctcatgtaagtggaatcagataatatttgtcgctttgtgactgattgacttcacttagcataacatccttaaggttcatttatgttgtagcatgtgatacgcttttcttcttttttcaggtcaaataatattttattaartatacatacatatacttaaatacacaaatttataggtatacctatttctcccacactagcccttgcttatcaccattctactttctatttttatgattttgactatattataaacctcatgtaagtggaatcagaaaatatacatatacatataaatgtgtatatatatatctcacacacatatctctcacacacacacacacacacatacacattcataccccattttgtttatccattcatttatcagtggacattttgggtgcttttacctcttggctattgtgaataccactgctattaagcttcaatatactgttttaaactattcagaagtaatattgcttgatcttatagaaatgctatttttcattttttgaggaattgtcataccaaatttcacagtggctgcacaagtttacaatcccttctacagt

SEQ ID NO: 313428 - DNA, 518 bp, Homo sapiens
atgttataattatgcatttcacagtctaaagtatgcatttaattatacagaaaagttataccattttcaaacttggtaaacacagatggaaatggtaaacataattttttaggaaggagtgagggggatgtgaaaacatgggttctcaaacagttcatatttgaaaattaaacctccctcaccccaatcccttttatgtttatgatcattatacttytatctgaaagagcatatgtaatatatcaacaatatagactgttttggatgatgtccaaagtgataatattaaggatcataattttcatctattggaaatccaaattcattttctgttaagaggcatatattttaggcttgtgaaatttgaagtaaatactctgaaatgtgcctttcactgacttttgtattttgaagtttcctaaatgttcagttagtattattgccattactctatcaaaacctgatttctggaacgaacctagaatttggcatttacaaactagtgtaacctgaaattg

SEQ ID NO: 313429 - DNA, 537 bp, Homo sapiens
ttcatatctggtgaaactaaacttcataaataaaggaaaaataagatcattttaaagaagcaaatgctgaaggaatttgtaaccaccagacctgccatacaagagctcctacaggaagcactaaatgtggaaaggcaagactgttaacacccactacaaaaacaaactgaagcacatagataaatgacactataaagcaaccacattaacaagtctgcaaaataaccagctgacatcattatgactggatcaaatccacacatatcaatacyaaccttaaatgcatatgggctaaatgccccaattaaaggacagagtggcaatctgtataaagaaccgagacccactggtatgctgtcttgcaagagacccatctcatatgcattacacacattggctcaaaataaacggatgaagaaaaatctattaagcaaacagaaaacagaaaaaagcaggagttgcactcttagtatctgagaaaacagaagttaagccaaccaagatcaaaaagacaaagaaaagcattacataatagta

SEQ ID NO: 313430 - DNA, 564 bp, Homo sapiens
tctagtcaatgtttctaatacagtttacctaagtattcaatttccttcttataagactagatgttcagcattggaggtataattattgttaagtggttttagggacataagtcctgcctgacttttctgtcaattattttttactatcactgcatttctacaaaggaacatatttccagactcagatctcacaagtttctatagctaaaatgaactcaaagtgatggtcccacatcaagcatgaccaacaaatttagatgtcagagttacatgtcacctgaagaactatgctccttttacattgagcaccttctgatctgtatgtgttagtgaaatagacaaccagtgactggtgkctcaaaagtcagactaaataatggattaaatagtttatctcctctgctgtaataaacttttccattaacccttcaaaaaacaaaaacacatataggatccatggagaataggagaaaaaacattccagatgagaaaaacaactctatccaaccttgtacctccccaaatctttaaattgtatgcagattactgcttacagcaaattcc

SEQ ID NO: 313431 - DNA, 583 bp, Homo sapiens
tctctcccttctatagctaccacttttgtctctttgccttgcattatatcctaggttttcaaactctaaatattcatttatacataaaagagctatgattcyacccatccctgtttattattctttaagacggattcgattttctttctccatttcaataacttgtcaggatatttttgtttatcatcaactatatgtgtgcgtgtgtgtgtgtgtatagatgaaatctaagtactactttaatataaactataaactggttacaaatgtaaaaacaagcatttttgttaatgtattgcttctttgccaaaaagaaacctttttctctaagggactaaaatgaacaaatatgaacaatggagactaaatcactgagaatacaagttttgaagaaatatgcactctttccaatcgtctggatgtggatagacaaaattccagtgaactgtgtatttaaatatatttttgtttaagttttaattttctttacatgaaagcattaccatattcagaagggcaatcatggttacaaattgggattccatgtttagtaggaccaacctcaactgtttgccagtttgcc

SEQ ID NO: 313432 - DNA, 615 bp, Homo sapiens
acataactttggtatttgtattaattttttacgtctacatatattattttcttgataaaatgcatgcacaaacaaaagaaattatagaaagaagacggtgttgtaaattgtgcatgcattgtctcccaaatatttycctactttttaattctagaagatgaccagattctaaattaactgaatttcattcaacaaattgtttattaatgactgtactttaacggttgatccatggatttattttgtattctttatatgtgtacgctataaaagctgatcatatttctgaatcagtaaaggaagataagaacaacaaatgtagccaaattatacaaggaagaaagaaagaaagggtgtgaagaaagcagagaaaggggaaaatactaaaaaaattaaattaaaacttaatttaagtatatatgatcttgataaatggaaacttgttcaattctcccaggtaaaagagaacgtatagatcttaaatttaaaaacaaaaagaagttttattctgtttacaaaaatattttttaaatgaatcaaaatgttaaaaaaatccgacaacaataaagggattttaacatatgccaggtacattctaataaacataccaaaaat

SEQ ID NO: 313433 - DNA, 606 bp, Homo sapiens
ttcaacccagaaatatcattactgattatatacccaaaggaaaataaataattccacamaaaaaatctgcattcctatagtcatcatagcactgttcaaaatagcaacgacatggaattaatccacattgctcatcaaggatgtattggataaagaaaatgtatatatacaccatggaatactatacagccacaaaaagaacaaaattatgttctttgcagcaacatggatgcagctcaagctcattatcttaagcaaattaatgcacaaatagaaaaccaaatactgtatgttctcataagtgtgagctaaacattaggtacacatagatataaatggcaacaattgaaaaaaattaaaaagaaaaacctaaacccatctttaaattaaatcataaataaataaatattctctaaaatatgattttaatgatacatagtgttttaccatatgattataatactcttttcttaatatatccctgtgttcaagcttataattttgtaaattttacaattctaaacaatgctgcatagaacatccacatagcaaaatatttgccttctgacacataactatttttaaaataaatctctagaaatttaa

SEQ ID NO: 313434 - DNA, 522 bp, Homo sapiens
acacataactatttttaaaataaatctctagaaatttaattgctctaataaagagaataaagcaaatttaaataaatttttgatacatgttgacatagtgctctttaaaagacttgtgctaatttattcccatagcagcaagtggcactttaaatgactgctgaacgtttctctctcagctgtctccagagtaatagtgttgtggttcattaattaaacattcatgcatttgtgaattttagctgtgcactatataaagtttttaaattgctttaaacatatatctcctttcaaactgttactacttaggaatatcaagcagctaataaagtttagtatagtatttgtcttctaattgttttaaaaaagtagaattataatatgattgaaaaaactttcaacaataaaaaagaatacattttgaagaccatttatacattcamattgatatggaagactgaaaaggaccatccaagtagcctgaatggcaaaagcaaatatttagagagagcaataaatgtg

SEQ ID NO: 313435 - DNA, 610 bp, Homo sapiens
tgcttctttcacttgacattttgtttcaggctatgaatgtattaatacatatgattctagttcaatgctttcactgccatatggctgtcataggcaaatagcataatttatccatttatattgtttctaatatattattctaacaaaccatactgtaaaacacattattgtgagcatgtcattgcatatgagtagaagagtttttcttatgtacaggatacatttagaagtacaattttagagcttcaggttataaacattttttgctttaccaggtattgctacattactctttaaagtagtagtacaaatgtatgccatttttaccagtacatgactctgtttttgcattcttatcaaaactagttttttctaaggcatttttaagccagtctcttgggtagaaaataatatctaactttttttgtttacattattattattagttggtttaaacatttttcctgtgtattgtcagttgatctttttcttccgttaattgtctattcattttctttccattcactacattttaccctttttttaatgatctggcaattttgaatactttctttwtaaattctatgcattgaaaatattttcttgatcc

SEQ ID NO: 313436 - DNA, 509 bp, Homo sapiens
ttcctgcctagccatgctggataaatgttcctactcataactttaatgtggcagcttaaccatttaatcattgtacattaatacattatcaatattatgaacatgtaactacaaaattacttgtcaaagtaatcagatattacagattttgagcataaatgcaacacaaggatttttgggtggtggctgtacctttacaaagaagatacattatggatttttaaatatacacataatagagataagttctagaaaagtgtgcttttggaatttcaatgaaataattccatgttacatcttctatcaratatatgcatgagtggttttaacatggcttaattcaacctaaaagactgatacgtatgcaatttttaaagattcaatttattcaattatgccaatttacttgatattttatttgttttactggaaaacatttcaaaatataagaaatcataatttgaatatatatagcttccagtcatctattcattactcccagttaagtt

SEQ ID NO: 313437 - DNA, 617 bp, Homo sapiens
agcttcaccaaaagctgatacatttcaccaaggtgagattgcttctcatctcaccttgaccagccttcttccacgataggcttactgcccaatgctatgtctaagaaatcattattcacaaaacaataaaaaactggattaaattaaatctcaatggaaagggttatttccctgaaaagcagatctttatattgacatcatatactagaagcatttctatataaaattagtttgactcatatgaaattaacaatatttgactgtttttagcttagtaaatgtcaagttcatatgattcaacctgaggaggtagcaatatcttaaaagtatcaaagagtgccttaatgttcttgaaaggactaacggaaatgacagtcagacatcttgtagaacctgaggatgaccacaagatcaagatgtctcaaacgggattatcaatcatcygcttgttttctcctatgagtactaagtgtaagaaaacaccacagtgttagcagaggttctctttgttctaagctcacaatagatcaatcatgcaagtggccctaagaccaagaattgggggaaaccctgttgtagaaataacctatgtaaacacttcctgtgtcctatcatag

SEQ ID NO: 313438 - DNA, 617 bp, Homo sapiens
agcttcaccaaaagctgatacatttcaccaaggtgagattgcttctcatctcaccttgaccagccttcttccacgataggcttactgcccaatgctatgtctaagaaatcattattcacaaaacaataaaaaactggattaaattaaatctcaatggaaagggttatttccctgaaaagcagatctttatattgacatcatatactagaagcatttctatataaaattagtttgactcatatgaaattaacaatatttgactgtttttagcttagtaaatgtcaagttcatatgattcaacctgaggaggtagcaatatcttaaaagtatcaaagagtgccttaatgttcttgaaaggactaacggaaatgacagtcagacatcttgtagaacctgaggatgaccacaagatcaagatgtctcaaacgggattatcaatcatctgcttgttttctcctatgagtactaagtgtaagaaaacaccacagtgttagcagargttctctttgttctaagctcacaatagatcaatcatgcaagtggccctaagaccaagaattgggggaaaccctgttgtagaaataacctatgtaaacacttcctgtgtcctatcatag

SEQ ID NO: 313439 - DNA, 604 bp, Homo sapiens
atctagcaaattaaggaccaaggccagcaagcaggacagtaaggattaacttgtaaaatactcactggagtagctcgcctcatccttgtgtacctccctaattctccactcctctgccaacaaatgaaactggtcactccaacaccggtaccaggagacatttttaaagtctcaaaactgtctaaaatcccttagacacagctcaggttacaactatcttctccaaaatagctactctgggctcccatacgcaagtacccttcagttatcagaccccagcactcccctaaattctgggttttttaataacacagaaaaccaacttttatcattgacaagaatgttttcataaaratgaggataaaaacaaaacctgtaccaggaaaagcatatatcatcatgtttcctggaggcatccctgcatatctgctcactttgcactgaagtgtgtccatagcagatcttatctttgcaatgaaatacagaagaaaatatttgtttactcacaggaaattggacccaaagatatttgaaatgtgagcagtgccagaacgttaaaaaaaattggttaataaatgatcagaaaaaacctgggaaaggagag

SEQ ID NO: 313440 - DNA, 550 bp, Homo sapiens
cccaaggcaagcattacttctattctaaatctataagaaagaaaaacaatattttcctaagtgctccatcatttgaaaggcagcctctcagagtggagttcacactgagccctgtctggttcgatgcaaataagaataatgcacattgctgagacatagatcactttttttgttttgtttttttgtagagatgaggtctctctctgtcacccaggctggagtgcggtggaatgaacacagctaattgcagcctcaaaatcctgagctcaagtcattctttgacctcagcctcctaagtagctgggaccacaagcatgtgtcaccacacctggcttcttttgtttgtttgttttgtacagatgggggtctgtggctcaggytgatctcaaactcttggcttcctcctgccttggcctctcaaagtgctggaattataggcatgagccaccattcctggctgagggggggatattttaaattactatgtttcattcttaaataaaatatgttcatgataattaaaacaagaaacaagatttataatgaacag

SEQ ID NO: 313441 - DNA, 527 bp, Homo sapiens
aagtctccaataacacacagctcaagaaaaatggatactatcacactttgtgctacagcctttgactaatgaatccaataatacaaaatcttagctcaatcctttctctttctaagtccaacagtaaacatytgacagacttccactgagtatagtgaaacctcctcatgtagtatctactcatcacatatgaagagtttaagcacactaagttgttataataacattgcaccaacttaataatattgaaagtaatggcaaaaatcacaattacttttgcaccaacctacgagcacagcatgaacctgaatggcaatttagcagctgcatttcaaaaatcgagtccaactagagatacactcccaagagcctgcctctgaagtgctaacctgcaaagatttggaaacacatttcttcactactgtggaatgtgtacattgtgtcgtctgtggatacattagtaggtctctctcttaagtacctaaggggaagtttctaaacatcagcctcactcaccaatgtcctaa

SEQ ID NO: 313442 - DNA, 527 bp, Homo sapiens
aagtctccaataacacacagctcaagaaaaatggatactatcacactttgtgctacagcctttgactaatgaatccaataatacaaaatcttagctcaatcctttctctttctaagtccaacagtaaacatctgacagacttccactgagtatagtgaaacctcctcatgtagtatctactcatcacatatgaagagtttaagcacactaagttgttataataacattgcaccaacttaataayattgaaagtaatggcaaaaatcacaattacttttgcaccaacctacgagcacagcatgaacctgaatggcaatttagcagctgcatttcaaaaatcgagtccaactagagatacactcccaagagcctgcctctgaagtgctaacctgcaaagatttggaaacacatttcttcactactgtggaatgtgtacattgtgtcgtctgtggatacattagtaggtctctctcttaagtacctaaggggaagtttctaaacatcagcctcactcaccaatgtcctaa

SEQ ID NO: 313443 - DNA, 513 bp, Homo sapiens
gcatgacaaatgttctgggagggggatcacatgcctgctattaaaaagtcctagattcagaagatattctgatgggccacagagcaatctcaaggayggtaatagagtgtgttttctctgccattcttccttttgttcctcacttctggcctttcccctaacttgtaccaacaaagattctcttagtagctgctgcaccaaatcaggagcctctgagattctccttagctccatttctgatattaatgcagatggaatcattggtgctgttatcaaaatatgattatgataagcaagactgagaagcagctgtttaggcccacaggagaagtgtccaagaaagaggagccaaggaaaggagttgagattagccttgatagctgggtaatggattgactgattttttttctgattaatttctttataagaaataaaactaaaattcccacgtcattttgggcttcagaaactccacaaatccaacttctaaagaaggtaaaaaagtaaaaacaa

SEQ ID NO: 313444 - DNA, 513 bp, Homo sapiens
gcatgacaaatgttctgggagggggatcacatgcctgctattaaaaagtcctagattcagaagatattctgatgggccacagagcaatctcaaggatggtaatagagtgtgttttctctgccattcttccttttgttcctcacttctggcctttcccctaacttgtaccaacaaagattctcttagtagctgctgcaccaaatcaggagcctctgagattctccttagctccatttctgatattaatgcagatggartcattggtgctgttatcaaaatatgattatgataagcaagactgagaagcagctgtttaggcccacaggagaagtgtccaagaaagaggagccaaggaaaggagttgagattagccttgatagctgggtaatggattgactgattttttttctgattaatttctttataagaaataaaactaaaattcccacgtcattttgggcttcagaaactccacaaatccaacttctaaagaaggtaaaaaagtaaaaacaa

SEQ ID NO: 313445 - DNA, 599 bp, Homo sapiens
attttggaaatgcttattaaatttagtgcattgaaatatttacatatgaataaaaaccaraatcaatcaaattatggtttagatttccgactaaaatattaactcactctttttgaaatgcatatatctttggtatgcacgtgtgtgtgtgtgtgtgtgtgtgtgtgttcgtgtgtgtatgtgtgtgcatttatatacagccatccctcagtcattgttagggatttgccccaggagatttctcagataccaaactctgcagatgctcaatatggcatgtcgtttgcatataacctatgcacatcctcccatatactttaaataatctctatattacctacaatactgttagaggaaaaacctttacaaatcaaatttaacagacttgaaatgagcaaagaatgattttccaatcaggctgcccttgaaccagaataggttcagagagaacccagcactgccatgtggttgaagaagatttaggaagagaaaaaggaaagtggcaaacagaaaatggaagtgaggtccaggaacagctgggttggttctagctcagaatttgccttacttaaatagctaactgatttgaacaattagct

SEQ ID NO: 313446 - DNA, 529 bp, Homo sapiens
ttttctcttgaaaagattttgtgttctacatcctggtttgtccaagtcatccactgttatggacaaatagtagaatgatgaaaaagagaatgtggttattataaaataactatttccctggtgacttgagacacgtaggggtctgttgttccttctgctctccaagggatgagtatatgtctctgatggtgttggaaatacactgagatagggkgtcattctgcatggtattctagctgatcacctgcctgcctgcatggcacagagaacattcggtggaatagttgaagctgtgaaacttcactgacccactcagagatagaaaggtctgcagagcacagactttagatctcctaaagagagctcttagaagatcaaaacatgccctttgctttacccacttggagctgatttgaacaagcaacaggaaaacaacacagaacggtatccagtatacttggcagagtttattgccaattggaattaacagaacactatctgttatcctgttattcacgtcaccaccacc

SEQ ID NO: 313447 - DNA, 581 bp, Homo sapiens
aagaccaaaactaaatttttacaatccctttgcagtgggttttacagagaaggaagtgatttctgggagagtaccagatgtaagtctattcattatgaagtcagatgcagtatgcaaaaagagcaagaattaagaaggcattggtggccagtattattgagatggcacattgccaagcttgatgtttcgtacytaagacagagataatagatgtccttatatgtgcttcttatttgtctccagataagaggactttatctttgagataattgttcaggcaactagggcataaaaattatcaatcttacaatagccaggcagcagcatcttttcaactaaattttgagaaaattttctcaaaacttcagtttgaaagtaagttaccaaatctcatatcattttcagatgctttgagaaattctaagaatattatcatagtactgaatctacacatatactactataaaaatggaagctcaaataaagctatgtacacatttattttcaaaaaaattgtttaattatatatggctaaaaaatcatgttaattagaaatcatttcagtggatgcttattgaaca

SEQ ID NO: 313448 - DNA, 619 bp, Homo sapiens
aaacccttgctcttcacttgatgatggccccaacacagcatttgccccacatcagagagtgaattttcctcagcttttcagatgcaacaagctcttttgcccctcaaagacttgattctctttgcctcctccttcattcttggccccactacctcctatttccacttcatgtctaaggcttaaatggtccttcttctgaggaaacttccytaaatcattcccttattatgatttcagtagcaccttctggttttccttcttacaatttatgaaacatggaaagaaaattgacatgtatttgacaactatgtttaatatctatcttgttcttgcaggtagctctattagggaacgaccatgccagccaggtgcagtactttatcttgagcgcatagctcaggctggcctcaccaataccatgaggaattctgtgataaatgtatgaataaaaaaatggtcatattggctgttccactccaaagtctagttgcagggttcattcagtctcctggaaacacattcttgactcctttaccctccaggtgtcccaacatggcattattatgttgtgtggagtatgtttgcttgcattttgctatcaaatcaggcaaaatcagga

SEQ ID NO: 313449 - DNA, 587 bp, Homo sapiens
tacaattgaccaaactttagcatgattgacaatgatagaagagagaaaacacaaattaccaatattaagagtggaacaggaaatattatggcagatcctgcaaatattcaaaggataaggaaatattttccataattttacacacataactttgayaatttagtgaaatggaccagttactagaaaaacacaaacttccagaacgtactcaatatatcatagataatttgaatagttctataattattaagaaaattaactgcataattaattaactctcagaaaagaaatagttaggcgtggatcaatgaccaagtgaggtttattctaaggatgcagaatggttcaatattctgacatcaatccatgtaagccatcatattaacaatctaaagaaaaacatattgcaccactatatcagtctgtgcaggaaaaagcattttatgtatttgcaacaccctctcatgattaaaggaaacaaatagacaactctcagattagtaggaacagagggaaaatttctcaatttgagctatgaagaaaaatctacagctaacattgtacttgatgatcaataggacagggca

SEQ ID NO: 313450 - DNA, 587 bp, Homo sapiens
tacaattgaccaaactttagcatgattgacaatgatagaagagagaaaacacaaattaccaatattaagagtggaacaggaaatattatggcagatcctgcaaatattcaaaggataaggaaatattttccataattttacacacataactttgataatttagtgaaatggaccagttactagaaaaacacaaacttccagaacgtactcaatatatcatagataatttgaatagttctataattattaagaaaattaactgcataattaattaactctcagaaaagaaatagttaggcgtggatcaatgaccaagtgaggtttattctaaggatgcagaatggttcaatattctgacatcaatccatgtaagccrtcatattaacaatctaaagaaaaacatattgcaccactatatcagtctgtgcaggaaaaagcattttatgtatttgcaacaccctctcatgattaaaggaaacaaatagacaactctcagattagtaggaacagagggaaaatttctcaatttgagctatgaagaaaaatctacagctaacattgtacttgatgatcaataggacagggca

SEQ ID NO: 313451 - DNA, 672 bp, Homo sapiens
ctaaactggcaatacatagcctggcatacctggtgttaatgtgatgtgcttatgaacagctagttgaaaataagagtaaattcctttttacccaggaaatattcatatagattttgttaatagaaaatgattgttctcatcttacagattaaatagagactaatacaatttaagtaactaattctggcaaccttggttaccagaaaaaagtgttggaactgggatttgaggtggaattcaattgtcctcttagctgtcaaattttccttctcctttaaaaagctttgagggataaagtattaagtttaaggtcatagctaaacacattcgygtataattaaagagcatgatatagtcagaaaactgcaagtatgataaaaatgggatgtgtatgcgaggaaacaagtggaaagtagatgtgaaaatgtatagaaaaaaagaaaaaatgcatatattaaacatatataaatgattactgtgctttgatgagcatcaacacttgagaggaattgtgtaaggaatggcagaggcaagaaaaaacttggaaagaaacgattccactaaattctaagagcaaagagggattatcttctttcgaggaggcatagttcttcaactcccccaaaattccttcattataaacagagcaactggagggcaaaagcaaaaact

SEQ ID NO: 313452 - DNA, 672 bp, Homo sapiens
ctaaactggcaatacatagcctggcatacctggtgttaatgtgatgtgcttatgaacagctagttgaaaataagagtaaattcctttttacccaggaaatattcatatagattttgttaatagaaaatgattgttctcatcttacagattaaatagagactaatacaatttaagtaactaattctggcaaccttggttaccagaaaaaagtgttggaactgggatttgaggtggaattcaattgtcctcttagctgtcaaattttccttctcctttaaaaagctttgagggataaagtattaagtttaaggtcatagctaaacacattcgcgtataattaaagagcatgatatagtcagaaaactgcaagtatgataaaaatgggatgtgtatgcgaggaaacaagtggaaagtagatgtgaaaatgtatagaaaaaaagaaaaaatgcatatattaaacatatataaatgattactgtgctttgatgagcatcaacacttgagaggaattgtgtaaggaatggcagaggcaagaaaaawcttggaaagaaacgattccactaaattctaagagcaaagagggattatcttctttcgaggaggcatagttcttcaactcccccaaaattccttcattataaacagagcaactggagggcaaaagcaaaaact

SEQ ID NO: 313453 - DNA, 672 bp, Homo sapiens
ctaaactggcaatacatagcctggcatacctggtgttaatgtgatgtgcttatgaacagctagttgaaaataagagtaaattcctttttacccaggaaatattcatatagattttgttaatagaaaatgattgttctcatcttacagattaaatagagactaatacaatttaagtaactaattctggcaaccttggttaccagaaaaaagtgttggaactgggatttgaggtggaattcaattgtcctcttagctgtcaaattttccttctcctttaaaaagctttgagggataaagtattaagtttaaggtcatagctaaacacattcgcgtataattaaagagcatgatatagtcagaaaactgcaagtatgataaaaatgggatgtgtatgcgaggaaacaagtggaaagtagatgtgaaaatgtatagaaaaaaagaaaaaatgcatatattaaacatatataaatgattactgtgctttgatgagcatcaacacttgagaggaattgtgtaaggaatggcagaggcaagaaaaaacttggaaagaaacgattccactaaattctaagagcaaagagggattatcttctttygaggaggcatagttcttcaactcccccaaaattccttcattataaacagagcaactggagggcaaaagcaaaaact

SEQ ID NO: 313454 - DNA, 646 bp, Homo sapiens
tctacttctgactgaccagataaacaccacggttcccaaatcctctcctgcattcaactaattttctagaactgctattccatctgtctatctgcaacctttgtaatatcctttaaaacaaatgagtaaacccaactaaaacgtttctgagttctgtgagctactctggcaaattaataaatactgaagactgggtcatgggaatcctcaatttatatccagtagcttagaagttcaggttccaatctgggacttgtaaccgacatctgaagtggagaagtcttgtrgactgagcctttaatctgtgggatccgatgcttacaccaggtacagctgtcagaagtgaggtaaattatgggacaccgagttgatgtctgatagagaactgcttgttagtggggagaaatccccacacattcggtgaccacaagtgaagtattctgggttcagtgtttactaccgtgttgagtttcagaggaggaaagaataaatcaatcgtttttcctctggaagagcacattttccagcgggtgcaatttggaacggaaaaacactgagtgtcaaaagccaggccccgtcacctccctcaatgcggggtaaggaatgtgggttgtgaaggggaaacctggggaacacaagggcccag

SEQ ID NO: 313455 - DNA, 646 bp, Homo sapiens
tctacttctgactgaccagataaacaccacggttcccaaatcctctcctgcattcaactaattttctagaactgctattccatctgtctatctgcaacctttgtaatatcctttaaaacaaatgagtaaacccaactaaaacgtttctgagttctgtgagctactctggcaaattaataaatactgaagactgggtcatgggaatcctcaatttatatccagtagcttagaagttcaggttccaatctgggacttgtaaccgacatctgaagtggagaagtcttgtggactgagcctttaatctgtgggatccgatgcttacwccaggtacagctgtcagaagtgaggtaaattatgggacaccgagttgatgtctgatagagaactgcttgttagtggggagaaatccccacacattcggtgaccacaagtgaagtattctgggttcagtgtttactaccgtgttgagtttcagaggaggaaagaataaatcaatcgtttttcctctggaagagcacattttccagcgggtgcaatttggaacggaaaaacactgagtgtcaaaagccaggccccgtcacctccctcaatgcggggtaaggaatgtgggttgtgaaggggaaacctggggaacacaagggcccag

SEQ ID NO: 313456 - DNA, 646 bp, Homo sapiens
tctacttctgactgaccagataaacaccacggttcccaaatcctctcctgcattcaactaattttctagaactgctattccatctgtctatctgcaacctttgtaatatcctttaaaacaaatgagtaaacccaactaaaacgtttctgagttctgtgagctactctggcaaattaataaatactgaagactgggtcatgggaatcctcaatttatatccagtagcttagaagttcaggttccaatctgggacttgtaaccgacatctgaagtggagaagtcttgtggactgagcctttaatctgtgggatccgatgcttacaccaggtacagctgtcagaagtgaggtaaattatgggacaccgagttgatgtctgatagagaactgcttgttagtggggagaaatccccacacattcggtgaccacaagtgaagtattctgggttcagtgtttactaccgtgttgartttcagaggaggaaagaataaatcaatcgtttttcctctggaagagcacattttccagcgggtgcaatttggaacggaaaaacactgagtgtcaaaagccaggccccgtcacctccctcaatgcggggtaaggaatgtgggttgtgaaggggaaacctggggaacacaagggcccag

SEQ ID NO: 313457 - DNA, 649 bp, Homo sapiens
atgtgaaattaaccaaattgatatacaacattaatacatttcctatcaaggtgttttgtggatactaacaagattatccaaaaaattatgtagaaaggcaaaaaaagatagaatgcctaaaacatctgggaaaaaaaataaaaaggttggaatcatttcatgtgatttcaagtcttctaatatagtataagtatttccttctttttttcatatttacaataaacctagtttatacctgccgtgatcttatgtgcatactcatgcatattttttttctccaaataacagcttcatttatgtgccccctaaacttttcactayagtaacaaagggaagaaatgcatgaaacatagaatgtagactgcaacatatggaaaaggaaactttttaaaattgtgtacaaaaacaaaaaataattttattacaattaaagaaccagagaacattttgcttaataccataatcaaaaatgacatttccgtagcttttggaaaaatgctcttctagtagagtcctatttattatatataacaattagataatgataaattatattatgtaaataaacacttcacaataattttcactgaactgatatgaaaaatatcttaggcaattttactaaacagtatttcacaagcattttcaa

SEQ ID NO: 313458 - DNA, 539 bp, Homo sapiens
cctatttattatatataacaattagataatgataaattatattatgtaaataaacacttcacaataattttcactgaactgatatgaaaaatatcttaggcaattttactaaacagtatttcacaagcattttcaacagtcatattgtgcaatgggacctatgtgtccagccacaagaggaatgtaataagctattaccatgaagaaaattgaagtctctcctaaccaagtctggagtttcaagagtaaacattcagtgttatcctaaagagttagacttcattttgtgatgtctgagtaatgtgatggttaatattaggtgtcaacttgagtgagttgaaggatatctagatggctgataaagtattgtttctgggtgtgtctgtgagggtgttgccgaggagattgacatttgagtcagtggactaggagaggaagacccaccctcartgtgagtgggcaccatccgattggctgccagtgtggctagaacaaagcaggtggaagaaggtgggataaccttgcttgctgagtcttct

SEQ ID NO: 313459 - DNA, 539 bp, Homo sapiens
cctatttattatatataacaattagataatgataaattatattatgtaaataaacacttcacaataattttcactgaactgatatgaaaaatatcttaggcaattttactaaacagtatttcacaagcattttcaacagtcatattgtgcaatgggacctatgtgtccagccacaagaggaatgtaataagctattaccatgaagaaaattgaagtctctcctaaccaagtctggagtttcaagagtaaacattcagtgttatcctaaagagttagacttcattttgtgatgtctgagtaatgtgatggttaatattaggtgtcaacttgagtgagttgaaggatatctagatggctgataaagtattgtttctgggtgtgtctgtgagggtgttgccgaggagattgacatttgagtcagtggactaggagaggaagacccaccctcagtgtgagtgggcaccatccgaytggctgccagtgtggctagaacaaagcaggtggaagaaggtgggataaccttgcttgctgagtcttct

SEQ ID NO: 313460 - DNA, 671 bp, Homo sapiens
atataactgttctctcttccatttcaaaaataagactatagttcatcaatttttgctaaacaacagctattgctattcagttgaggaggtggccatcatttcccctggatgatttctatggcataatcagtccctaagaacccattactcttttccataaaaatcctattttcctaaggccatgrcatgctctattttgaggttatttggtagagcatagaagcactaagccattctgtaaggaaaaggatacattgaacacaataagtataatgactggcatcatagttttacattattctctgctcacctccatgccatgaaaagatttcaaagttcaggctaaagtcataaagagtaaagaagccttttcaaaaaacctcccaaataattttttaaaaaattataagctgaatataactgatcatttccacatgccgttgaacctttggtacacatcatgtcatgaggataaacatattttgttgtataatatttcttcagcatgcaatgtcatacattaatataagagaaccagagactgagttatttcttgcataagtcttctgatgtactctagtaatattccttgagttatagcctcagcatacaaaatctatctgtgaggtattttcaaagatatatcttttgatgtctagtgatgtggcagg

SEQ ID NO: 313461 - DNA, 671 bp, Homo sapiens
atataactgttctctcttccatttcaaaaataagactatagttcatcaatttttgctaaacaacagctattgctattcagttgaggaggtggccatcatttcccctggatgatttctatggcataatcagtccctaagaacccattactcttttccataaaaatcctattttcctaaggccatggcatgctctattttgaggttatttggtagagcatagaagcactaagccattctgtaaggaaaaggatacattgaacacaataagtataatgactggcatcatagttttacattattctctgctcacctccatgccatgaaaagatttcaaagttcaggctaaagtcataaagagtaaagaagccttttcaaaaaacctcccaaataattttttaaaaaattataagctgaatataactgatcatttccacatgccgttgaacctttggtacacatcatgtcatgaggataaacatattttgttgtataatrtttcttcagcatgcaatgtcatacattaatataagagaaccagagactgagttatttcttgcataagtcttctgatgtactctagtaatattccttgagttatagcctcagcatacaaaatctatctgtgaggtattttcaaagatatatcttttgatgtctagtgatgtggcagg

SEQ ID NO: 313462 - DNA, 671 bp, Homo sapiens
atataactgttctctcttccatttcaaaaataagactatagttcatcaatttttgctaaacaacagctattgctattcagttgaggaggtggccatcatttcccctggatgatttctatggcataatcagtccctaagaacccattactcttttccataaaaatcctattttcctaaggccatggcatgctctattttgaggttatttggtagagcatagaagcactaagccattctgtaaggaaaaggatacattgaacacaataagtataatgactggcatcatagttttacattattctctgctcacctccatgccatgaaaagatttcaaagttcaggctaaagtcataaagagtaaagaagccttttcaaaaaacctcccaaataattttttaaaaaattataagctgaatataactgatcatttccacatgccgttgaacctttggtacacatcatgtcatgaggataaacatattttgttgtataatatttcttcagcatgcaatrtcatacattaatataagagaaccagagactgagttatttcttgcataagtcttctgatgtactctagtaatattccttgagttatagcctcagcatacaaaatctatctgtgaggtattttcaaagatatatcttttgatgtctagtgatgtggcagg

SEQ ID NO: 313463 - DNA, 591 bp, Homo sapiens
actgatcatttccacatgccgttgaacctttggtacacatcatgtcatgaggataaacatattttgttgtataatatttcttcagcatgcaatgtcatacattaatataagagaaccagagactgagttatttcttgcataagtcttctgatgtactctagtaatattccttgagttatagcctcagcatacaaaatctatctgtgaggtattttcaaagatatatcttttgatgtctagtgatgtggcaggcctcracaaagcctgtgtcttgtacactacatttacatggtttctctttactatggactctgatgttgattaacgctcatgatgaaaagtttgccatactcggtttgtaatgactgtctcatgaattaattatctgatgcggtgtaagttgtgatttgtgactaaagaccttaccacatacatggcatttgtaatgtttctcttcagtatggattctgtgatgatatgcaagatgtgaaatctgagtgaagaccttaccacactcattatatttgtaaggtttctctccagaatggactctgtaataacttgtaaggtggaacttttgtctaaaaacct

SEQ ID NO: 313464 - DNA, 573 bp, Homo sapiens
atgtcatacattaatataagagaaccagagactgagttatttcttgcataagtcttctgatgtactctagtaatattccttgagttatagcctcagcatacaaaatctatctgtgaggtattttcaaagatatatcttttgatgtctagtgatgtggcaggcctcgacaaagcctgtgtcttgtacactacatttacatggtttctctttactatggactctgatgttgattaacgctcatgatgaaaagtttgccatactcggtttgtaatgactgtctcatgaattaattatctgatgcggtgtaagttgtgatttgtgactaaagaccttaccacatacatggcatttgtaatgtttctcttcagtatggattctgtgatgatwtgcaagatgtgaaatctgagtgaagaccttaccacactcattatatttgtaaggtttctctccagaatggactctgtaataacttgtaaggtggaacttttgtctaaaaacctagtctcactcactacatttttaaggtttctgtgcattatggattattttatgaaaggcaaggcttgaatgcac

SEQ ID NO: 313465 - DNA, 573 bp, Homo sapiens
atgtcatacattaatataagagaaccagagactgagttatttcttgcataagtcttctgatgtactctagtaatattccttgagttatagcctcagcatacaaaatctatctgtgaggtattttcaaagatatatcttttgatgtctagtgatgtggcaggcctcgacaaagcctgtgtcttgtacactacatttacatggtttctctttactatggactctgatgttgattaacgctcatgatgaaaagtttgccatactcggtttgtaatgactgtctcatgaattaattatctgatgcggtgtaagttgtgatttgtgactaaagaccttaccacatacatggcatttgtaatgtttctcttcagtatggattctgtgatgatatgcaagatgtgaaatctgagtgaagaccttaccacactcattatatttgtaaggtttctctccagaatggactctgtrataacttgtaaggtggaacttttgtctaaaaacctagtctcactcactacatttttaaggtttctgtgcattatggattattttatgaaaggcaaggcttgaatgcac

SEQ ID NO: 313466 - DNA, 570 bp, Homo sapiens
tcaattcactccaagttaacatagaaattcaacacaatcccaaaatacacttttttgtagaaattaataattttaaaattcatatgaaaacaatctgaaatagtaaaaagaaatttaaagaaaaagaaagaagttggggatcacacagtatcagatatcaaaatttacttaaaacacagatcaggacaatgtgatattgaagtaaagatagtcaaataggtcattgcaatagaatagtctagtcatatatatgtttaatgtattgtcagtaagagaaccaggacaatttaaygggggaaaaagaataggcttctcaataaattgtgctgaaacaaatgaatttaatataaagaaaaaaataatattaacattgatgcttacatagacaaaaagtgagacttaaaaataaaggtaatactctaaagcttctgaaaaaataaaatgtctccatcacatttgttgaaatgaagactgatttctttaagaggacacacaaaaaatcgatatcagaggccatcaaaattgaaattttcagctcatcaaaagaaattgttaagaaattaaaaggta

SEQ ID NO: 313467 - DNA, 510 bp, Homo sapiens
tctttggggttcacaactgcatgatctcagtgaggcagtagagtgcaatgagaacaggatgggagaagaaatagaagtatacacaacaattgtgaggcatgtaatataagacaaaataaaagtatggcctgaagctgcaggaaaatgtgaggtaaagaaatattttagtaagctaataaatattactgcatgcttatgtggcagtgaaaatggcccagtatagaggaacactggatgtaatagaggcaaaagataaatgtgggtgcaaaacaattaagtaaatgtgaagaatgaggatgaagaagcatggtaaaattacacactgaataaaccactaggctcaaaccacaggctataaaaagagaacattttagaartatataactggcctcacagacaagttagatattcctaagagatgaaacagaacagaaataaaaaatagcaccaggagcagaagttgtgagtttcctgtactccagaaaccaacagaggcacctggaatttaag

SEQ ID NO: 313468 - DNA, 560 bp, Homo sapiens
agtgatgttctatataggtgttggaaactgaatttttgaattctgagccattgctcctggtagaaatttataagtgtatatytatatctataggtatacatctatatctagatatatatatatatcacatataatgttaaatcttaaaaataacatcatagttgattctattttatttattttgcagaaaagaaaatgaggttcagagtgttaagtgacttgccatatcaaagttgtgtcagagttgggagtcagactcggtcccactaaccccagacctggagcttcttgcactacatcgaatgctcctaacatctccactctctggtcatctgtgcatgagatctgagcaagaaggcagagcatagtcttgttccacctcaactgtgaatgtgtgtctacttcaatttctcaccacctgagtatggattttagggttccaaataaatttcagtgaataggcaaatttacaaatatcacatctgggaacaatgagggtcaattacatacctatctgtattcatgatatcagtatagtttcctattacatgaaaaacaaa

SEQ ID NO: 313469 - DNA, 560 bp, Homo sapiens
agtgatgttctatataggtgttggaaactgaatttttgaattctgagccattgctcctggtagaaatttataagtgtatatctatatctataggtatacatctatatctagatatatatatatatcacatataatgttaaatcttaaaaataacatcatagttgattctattttatttattttgcagaaaagaaaatgaggttcagagtgttaagtgacttgccatatcaaagttgtgtcagagttgggagtcagactcggtcccactaaccccagacctggagcttcttgcactacatcgaatgctcctaacatctccactctctggtcatctgtgcatgagatctgagcaagaaggcagagcatagtcttgttccacctcaactgtgaatgtgtgtctacttcaatttctcaccacctgagtatggattttagggttccaaataaatttcagtgaatagrcaaatttacaaatatcacatctgggaacaatgagggtcaattacatacctatctgtattcatgatatcagtatagtttcctattacatgaaaaacaaa

SEQ ID NO: 313470 - DNA, 560 bp, Homo sapiens
ttggttttgtgaaaacttaagctacaaatttcagacagaaaaataagatagaggggsatcattcgtgaaataagtatataagattgacttctgtatctctctggggagtcatgtagacttatcaaattgtgcagaaaagtgttaacatgttaataggcctgatattgctatcctgagatactcccctagttagtgcttggttgacatttgggaactaacatttcaggagggttcttactattccgtaactgataaaggtggctcactggacataaagtattagtgcaaacagtgtagcttgccaaatacctggttttcttctgggagtctgggattttggtacatgctaggcaaagggcactcaatctaaaatccctgggcactgagtttttaatgagcctccctggcagacgatatctcactcatgttgccacaacacattgttagaggaattaagtgatccactaggagaggactcttgggagcacgtgccaggtttcttcaagactttgctccatgtgccttttccatgtgatgattttgctttgtatcttcatgct

SEQ ID NO: 313471 - DNA, 560 bp, Homo sapiens
ttggttttgtgaaaacttaagctacaaatttcagacagaaaaataagatagaggggcatcattcgtgaaataagtatataagattgacttctgtatctctctggggagtcatgtagacttatcaaattgtgcagaaaagtgttaacatgttaataggcctgatattgctatcctgagatactcccctagttagtgcttggttgacatttgggaactaacatttcaggagggttcttactattccgtaactgataaaggtggctcactggacataaagtattagtgcaaacagtgtagcttgccaaatacctrgttttcttctgggagtctgggattttggtacatgctaggcaaagggcactcaatctaaaatccctgggcactgagtttttaatgagcctccctggcagacgatatctcactcatgttgccacaacacattgttagaggaattaagtgatccactaggagaggactcttgggagcacgtgccaggtttcttcaagactttgctccatgtgccttttccatgtgatgattttgctttgtatcttcatgct

SEQ ID NO: 313472 - DNA, 560 bp, Homo sapiens
ttggttttgtgaaaacttaagctacaaatttcagacagaaaaataagatagaggggcatcattcgtgaaataagtatataagattgacttctgtatctctctggggagtcatgtagacttatcaaattgtgcagaaaagtgttaacatgttaataggcctgatattgctatcctgagatactcccctagttagtgcttggttgacatttgggaactaacatttcaggagggttcttactattccgtaactgataaaggtggctcactggacataaagtattagtgcaaacagtgtagcttgccaaatacctggttttcttctgggagtctgggattttggtacatgctaggcaaagggcactcaatctaaaatccctgggcactgagtttttaatgagcctccctggcagacgatatctcactcatgttgccacaacacattgttagaggaattaagtgatccactaggagaggactcttgggagcaygtgccaggtttcttcaagactttgctccatgtgccttttccatgtgatgattttgctttgtatcttcatgct

SEQ ID NO: 313473 - DNA, 570 bp, Homo sapiens
gggacttgatgggaggcgattggatcatggaggtggatcctttatgaatggattaraaccatgccttttgtgctattttcatgatagagttctcacaagatctgattgtttaaaagtaggtaattcctccccacccccctttttcctgctctggccatgtaaagtgctggctcccttttcgccttctgctatgactgtaagtttcctgaggcctccccagaagcagaagctgcagaaccatgagccaattaaaactcttttctttatacattacccagggtcaggcatttctttatggtgatgcgagaacagactaatgtgccagggaagagctagaaaaagtagagtgtgaaagcaagagagttaagaataagccctgatagacattggaagtcagtttccagataatgaaaatgcctacttttaatcaaaaattgtaaccatcatgggagagatgccagcagttaattagtgggaaagctaatacataaaatgtcccattcttgtattaaattttctacatgacgtcatggtctgacactaatgtttttgtctcatattttacaatgt

SEQ ID NO: 313474 - DNA, 468 bp, Homo sapiens
gtaagcgtgtttactctcaccaygcatgttcagaattgtcccataagtcctagccagtgcaataaagccagaaaaataaacaaaatttattaaatcaagaaatataacttcccttattcatagacaacatactctacatatacatataaaaatactacttgaatctataacaccaaaagtgaatttaacatcacagtgtacaagattgacattcaaatatcaattttatttctatacattgttagctaataatccaagaatcaaatttaaatactattttgaatagcatagaaaatatcaaaacttgggaataaatgtaacaaacatatcccagagtactacatcaaacattttaaaacatggctgacacaaattcaagaagtccctcaaaaatgaattcaactttatggatataccaattttgatattgtgaatgtctttctaaattagtacagaaattcaatgtca

SEQ ID NO: 313475 - DNA, 572 bp, Homo sapiens
aattattttcgttaaatttgtatttttaatagagtaacagtgttaattattcataatacataggtatttcatttgagctagcttgtcatgtcattaaattaatcatgaatatgtatttgtgaaacatattttcatcatatctcatgatttacaaatgtttctgaaaatgcctgtaatgcattctttcattaactttgctgagctaaatgcattttcaaaaaagaagtcttaaaaagaccatgagatgtaagcaaaataactaaactaaatcttaacatggaaatttgttcaataaagattatgagaaaaatattcatgaaacacaaaatgagaaggttattattcaaataaaacagaaagaacttctatttttgtacactgacaaatgccaaaaaacagaaaaaaagaaaagtgaaactccttcagggttttcctttcaatataagcaataaactgctagacrtgtaaaagagttattaccatttaatgcaagcaatagtcacatttgttaacagaatgaattaaggaattggatagttagaattcacacgcatacactcctataaatttca

SEQ ID NO: 313476 - DNA, 587 bp, Homo sapiens
tatgatctttacttatcacagaaaagatagtactggactgctaagattaggtttcaattatggctctagctctttgataaactgagtgttcttagataagtggctttatctctcccaagggctcagttttctattttggaaaatgttacagaatcatttaatgagatattaattcctaccttgtttttcttgtagtagtatggacagccagtctgatgtttacttggcttctctgctccagaaataatcaatttctttgggtttcaagatccatcctaagaaaaacctcaaatgagtctttgaaagaaccaaagtgctgtttgaaagaaaactgcaatttctgccaagttggatgaatggagggcagctggtgcattttgaggaagacagaagacatagttggagtcttgcatctgaagcaggtggaggagtactaggatcagcggagttttggtcatackccttagttcttagcaatcggcacaattttcatgagtctgcagctgagagcaatttctcatcttgaccctactgatgtattgtgccacataattcttttttgtgggagctgttctatgcgtcgtagg

SEQ ID NO: 313477 - DNA, 586 bp, Homo sapiens
gaaaattcgtccccacgttccaatcacctcccaccaggcccctcctccagctttgggggttacaattcaacatgagatttgggcagggacgcaaatccaaaccataacacctactgaaggatgtttggatattttctaggttttagctactattataaagctgctagaaacatttatgtacaagtttctgtacaaaaataagttttcatttctttgccctatttgcacaataatacaattgctaggtcatatgtaaagtccatgtttattcttaaaggaaaccaccagactattttccagagtgcccgtaacattttatattcacaccagtgayctataagagctctagttttccatgttttcactgacctttgttattatcactattttttatttgagcattctgatagttgtgtggtgatgtcccactgtggttttaattttcatttatctaatagctaacaatgttgaacatatttgcgtgtaattatttttcatctacgtatcctctttggtaaaatatcagttcaagttttttgtccaccatctactggtattgtttgttttttaatgttgaagtttgaga

SEQ ID NO: 313478 - DNA, 606 bp, Homo sapiens
atgaggcctaatttatctatttttaaattttattttatggctcatgctttttggtgtcaaatctaagaaccctgctggatgtcagcaagaatggctcagtaaagacctccaacaaacctctcatccataaaagcacttataatactggcaaaaatttgtcaaaatcaatgttttcagagcactggaaattaaccaaaggtattcaacaacctggtagtgtctattcaagaatactggctgaatcctggtaagaatcgagaggtttgtactattttaactttcstagttccatgacctttgtactagcctgttggtagccttgaaaagcaatcacttccaaatcacagtgaaaaccaacagcctaggagactgtaaagggcaaagaatagagttggatcttctcaaaattctaatttcaagaaaactatcattatttgacctttctggagctttctgaccaatcccactagcaaagcttgtctttatttgatctgacattgagctgacccagtgtaaatagctttttctctgaatccgtttgtcaaaaacaatcagccacaattatttaatatctcatgtggcaataactattaggacaaacaagca

SEQ ID NO: 313479 - DNA, 457 bp, Homo sapiens
tggttgctttagccaagttatattgatattcaagggatcggaagtgatctcaggtgatactgtggctagtgccttccattttgaaccgtacagatttaggatattttcatcatgaaagttctattggatgttgctgctgaagatgctaagattagagaagtgaataacacagattgtatattctaatggaaaaaagagaagtaaaggaaaagatcataaaagtgtaatgtaatgttaatgtgtcattagaagaaaatagaataattggccagagaggaaaggaaaatgggtaaagacaatcagattgtaaacaataatgaaatggtttccttagatcataayattggggaaaaaaagcatttctatttattgtaatggggtagaaaagaaaagaatgtgtggcttcatgcatgccaagagaaacaattattctaagaaaagagcacaaaacagattt

SEQ ID NO: 313480 - DNA, 510 bp, Homo sapiens
caagacagttttctccttgctgcattaactttaataaactgttttgctcaattataaaagaaaatagaggagtcactgatgtgtacatacattccaaagtttccagaatctgctcagatgcctactaaatcatttccatattttctgctagtcatcagccacaagaaatagttgccacaatcaccccagaaccttggcttaatcttagtttaggttaactgtggttctgttttgcctgctcttctaaaagtgggagcttttttgatcatcagagcaawgctcccttgaacctcctcccatagcaaagtacttggctctgtatctacacatcatcacaggaaccactcttaataatgaagacaatatagtgaatacagtcaaaaaaagaaagctttaatagtcaagccaacagatagtccagaatatgcacaaaatatgccttctcttcagttttgcattattttccaaaataaatggaatctatgagtgggggaagtatgtggaaggtct

SEQ ID NO: 313481 - DNA, 593 bp, Homo sapiens
gggttcacgccattctctcgtctcagcctcccaagtagctgggactacaggtccccgccaccaygcccggctaattttttgtatttttagtagagacagggtttcactctgttagccaggatggtctcgatctcctgacctcgtgatctgcctgcctcggcctcccaaagtgctgggattacaggcgtgagccaccgtgcccggcctgaccttgtctcttttattctactcctacatatccttaactttttgagtccctcattatatctatttaaagtcagttttcccatgaatataaacaaattagcttcacttcaggacatatagaagtcttaaaaatattatccgaaagtaagattatctaaacttgggacgattcttccactacgacatgagtaggataactgtgatcattttgtttttacttgcaatctataacagtttaatactttaagatttcagcatattttaattatgaagatatgtgtagctataaagacaattaaattttcattttcttcaaaaattttctttaggtgattttatttatattgtcaaagcatatcattaaaaagataaattagagctacttt

SEQ ID NO: 313482 - DNA, 580 bp, Homo sapiens
tctccaaatcttatgttcctttgcctccttttgtgattaatacaaattaatattcacggtacttataacacaagactttggagtcatatttgaacactcctaaaagactcagagtccaaaacacctggagtcacatttgaagaccgtgctgcaacatctcccaccctaccctgctcagcaaacaatgggttgccaaatcatgaagatcccattctgcactccaaaatcccgacagaataatgtcctcaaagcacagctttaaccacatcattttcctgctcccaaaccactcttcacctagtgcacattactttaattgaagaggagctatgaaaaataaatactctcatatactaaatttataatcttaaatatggtaaggacagyaatgttgcaagaaccctgaatcatcacagccctggaggttaaggaaagcattgtgtgttagtaagccactaataaagtacagtagacaaatctagttacaaaataaaatggcagttgcttaaataatggtagcctgtttagtatgtaaatagtaaattttgcccctggcagactttggtttctatttgtcaat

SEQ ID NO: 313483 - DNA, 593 bp, Homo sapiens
gggttcacgccattctctcgtctcagcctcccaagtagctgggactacaggtccccgccaccatgcccggctaattttttgtatttttagtagagacagggtttcactstgttagccaggatggtctcgatctcctgacctcgtgatctgcctgcctcggcctcccaaagtgctgggattacaggcgtgagccaccgtgcccggcctgaccttgtctcttttattctactcctacatatccttaactttttgagtccctcattatatctatttaaagtcagttttcccatgaatataaacaaattagcttcacttcaggacatatagaagtcttaaaaatattatccgaaagtaagattatctaaacttgggacgattcttccactacgacatgagtaggataactgtgatcattttgtttttacttgcaatctataacagtttaatactttaagatttcagcatattttaattatgaagatatgtgtagctataaagacaattaaattttcattttcttcaaaaattttctttaggtgattttatttatattgtcaaagcatatcattaaaaagataaattagagctacttt

SEQ ID NO: 313484 - DNA, 581 bp, Homo sapiens
ctctacttgaattttttatttttataaatcattttatttttattgaaaaataatatacatatgtctatataatttttaacactaagctacaaaaataatatcaaggaaaaacaaatcttcttacactaaatcttcggtgccccatccctaagaagttctttgaaagcttcaagaaatttaaaaacttttcatacaaatgaggacatactgtttaccctttatgttcctttttgatccaatatgatcagttctttttcctttcattttattattttttcttcacagcctcctttacttgacccttaaattttctacaggtcttctgtcattgcctttccttccaaactatgaactctcactgcactatatatagtatcttggttttaactctacyatctattgcttgacatttacaaacttctatctttaagcaaattaaagcctgcttaaaagtagcaaatccaggttatatgcatatttacaatatacctaaagtcttcaaacttttcctgttcaaaactgaacttacggttgggaaatgacaacttttaaaagtcacaggctgttaagctgcggctggt

SEQ ID NO: 313485 - DNA, 581 bp, Homo sapiens
ctctacttgaattttttatttttataaatcattttatttttattgaaaaataatatacatatgtctatataatttttaacactaagctacaaaaataatatcaaggaaaaacaaatcttcttacactaaatcttcggtgccccatccctaagaagttctttgaaagcttcaagaaatttaaaaacttttcatacaaatgaggacatactgtttaccctttatgttcctttttgatccaatatgatcagttctttttcctttcattttattattttttcttcacagcctcctttacttgacccttaaattttctacaggtcttctgtcattgcctttccttccaaactatgaactctcactgcactatatatagtatcttggttttaactctactatctattgcttgacatttacaaacttctatctttaagcaaattaaagcctgcttaaaagtagcaaatccaggttatatgcatatttacratatacctaaagtcttcaaacttttcctgttcaaaactgaacttacggttgggaaatgacaacttttaaaagtcacaggctgttaagctgcggctggt

SEQ ID NO: 313486 - DNA, 529 bp, Homo sapiens
attttatttgtgcctggtcatttttaagtatccagaaacatggatatagcctagtcacattcaataaacctaaaaaatcttgtcctttgcttgcaaaccattatttcaatctatcatcttcttttgcttagtgttcattaactaaatgttctttgaaagtctaggatttagtaggaagattataccataatcctaatttatgcygcataagaactccaatctaatatcctgctaaggccaggactttgctgcctctgctagtatcaatttcagcctgggataggaatgttggtttttttcagcacttaaggtttcaatttacaatttcaggaaacaaaaaagctgcatgttctgcccttcttgctttcagacaggctacctctagtctatctacttcttgtagggcactgatacatttcattaaaatgtaagtattacctgccaacattttagatttttccataattaaacttatgaggcataataatgttcacctaacaccaacttcacttgcctttaaaaatgataa

SEQ ID NO: 313487 - DNA, 603 bp, Homo sapiens
tatctttcaaacactctggctacccactctgggtgtccatctaactctcctcagtgatgttagactttcatgaacaacattttatcaatgttttgtcatcctctggcttcttgatttatccttgcaaatgtccttgagcgtaggaaatatagagtacaattttgccttcttaataggagaagtggtagaaacggtcaaaataggcccaaattagtattttaatgttattttatgatacgcagaagaggaaaaccaaaaaggatatgacttgtgtatatgtctttcaaattttctyttttgattaagatcaaatttgattaaggtcaaatttaagccacctgaaaggctacagggcttatgcctgtaatcccaatactttggatcacttgagctcaggagtttgagactagtctgggcaacatggcaaaactctgtctctacaaaaaaaaaaaaacacaaaaattggttgggcatgttggcatgtgcctgtggtgccagctactgtggaggctgaggcaggaggattacttgagctcgggaggttaaggctgcagtgagctgagatcgcactactatactccaacctgagtgacagagtgagat

SEQ ID NO: 313488 - DNA, 529 bp, Homo sapiens
attttatttgtgcctggtcatttttaagtatccagaaacatggatatagcctagtcacattcaataaacctaaaaaatcttgtcctttgcttgcaaaccattatttcaatctatcatcttcttttgcttagtgttcattaactaaatgttctttgaaagtctaggatttagtaggaagattataccataatcctaatttatgctgcataagaactccaatctaatatcctgctaaggccaggactttgctgcctctgctagtatcaatttcagcctgggataggaatgttggtttttttcarcacttaaggtttcaatttacaatttcaggaaacaaaaaagctgcatgttctgcccttcttgctttcagacaggctacctctagtctatctacttcttgtagggcactgatacatttcattaaaatgtaagtattacctgccaacattttagatttttccataattaaacttatgaggcataataatgttcacctaacaccaacttcacttgcctttaaaaatgataa

SEQ ID NO: 313489 - DNA, 603 bp, Homo sapiens
tatctttcaaacactctggctacccactctgggtgtccatctaactctcctcagtgatgttagactttcatgaacaacattttatcaatgttttgtcatcctctggcttcttgatttatccttgcaaatgtccttgagcgtaggaaatatagagtacaattttgccttcttaataggagaagtggtagaaacggtcaaaataggcccaaattagtattttaatgttattttatgatacgcagaagaggaaaaccaaaaaggatatgacttgtgtatatgtctttcaaattttctcttttgattaagatcaaatttgattaaggtcaaatttaagccacctgaaaggcyacagggcttatgcctgtaatcccaatactttggatcacttgagctcaggagtttgagactagtctgggcaacatggcaaaactctgtctctacaaaaaaaaaaaaacacaaaaattggttgggcatgttggcatgtgcctgtggtgccagctactgtggaggctgaggcaggaggattacttgagctcgggaggttaaggctgcagtgagctgagatcgcactactatactccaacctgagtgacagagtgagat

SEQ ID NO: 313490 - DNA, 598 bp, Homo sapiens
ttctttattctgtttgcttttactgtactttttggattttctaccatgaataaataataccattgaaacatatctcttaaaggaattgtataaaattttatacatttgtggaaatgtcaaagtcattatatagagatagatatatagatatagatatattttttaaaagactctttgtaaatctatatacagcacatacatgtatatgtatatatacagatcatatatgtatgtacacatatatatggggaaatattttacaattaaatatacataaatacatatgtataaatatatctgtttccctcaattttctcaacataatcacaacccttgatatgatttttttttaattttagaattcctatcttgcattgaaaccaaaatcaattctcattctccaaattttatttttatagttaccagtaattatgacctcayagttatttttatactcacattaagaatctattacctttgttttccaatctggtttaatattcactactatttccttttgttttccctattccattgaatttatcacatgagctgctcttattaagtagctaatggcatttgcaactggctcacaagt

SEQ ID NO: 313491 - DNA, 596 bp, Homo sapiens
tatcttgcattgaaaccaaaatcaattctcattctccaaattttatttttatagttaccagtaattatgacctcatagttatttttatactcacattaagaatctattacctttgttttccaatctggtttaatattcactactatttccttttgttttccctattccattgaatttatcacatgagctgctcttattaagtagctaatggcattygcaactggctcacaagtatgtttttctttcagtttggaatagaaaaatgacactgtcacttccttaagtgagctaagatttgatatggaaaatagagacatataccagaaattagaatggagaggaataacgtatgataaatgggagaggtatgtacacctaactataaaactgggtaggtagtgtttttaggagagggtctattacaataagtggaactttcaatatggttttatgttaaatggctctaatgtataatattttaaaattccattttagagtgagagatgcttcttgtatagcccctctagcttctgtcaacataggtactgaacctaggtatttaatttagtataaactaattggtcataaattagtca

SEQ ID NO: 313492 - DNA, 596 bp, Homo sapiens
tatcttgcattgaaaccaaaatcaattctcattctccaaattttatttttatagttaccagtaattatgacctcatagttatttttatactcacattaagaatctattacctttgttttccaatctggtttaatattcactactatttccttttgttttccctattccattgaatttatcacatgagctgctcttattaagtagctaatggcatttgcaactggctcacaagtatgtttttctttcagtttggaatagaaaaatgacactgtcacttccttaagtgagctaagatttgatatggaaaatagagacatataccagaaattagaatggagaggaataacgtatgataaatgggagaggtatgtacacctaactataaaactgggtaggtagtgtttttaggagagggtctattacaataagtggaactttcaatatggttttatgttaaatggctctaatgtataatattttaaaattccattttagagtgagagatgcttcttgtatagcccctctagcytctgtcaacataggtactgaacctaggtatttaatttagtataaactaattggtcataaattagtca

SEQ ID NO: 313493 - DNA, 538 bp, Homo sapiens
tcatatttataggttttttaataaaaaaggaaaatggaaaaaaggatacttccctattatttaatatgtagagtgatgctggtatatatacayggagacaatgtgaagtaacctggggaagagaagaaaagaagttatacaacatgaaagccctgatagtcctctaactcattgattcaagttattgagtgtactggcttcatggaatatactgttttaaatggtagaatccttgtaacactttgtaaagatatcagaagtaacattgaaaaccttttgtaccacacagcagtttgaagatccaatagtgaagtactttaaaaagtcattgagcttaaagatgagttatatgcttctttttttttttaataaaaatacatttgtttcaattttataggtcttttatatggtaacactgtcagcagtatgttgtctacagacatttgaagaaataaaaatatatgtacctagttacttatttaactaaatgggatagataccattttaacaataattgagaaaaataacttctttttca

SEQ ID NO: 313494 - DNA, 538 bp, Homo sapiens
tcatatttataggttttttaataaaaaaggaaaatggaaaaaaggatacttccctattatttaatatgtagagtgatgctggtatatatacatggagacaatgtgargtaacctggggaagagaagaaaagaagttatacaacatgaaagccctgatagtcctctaactcattgattcaagttattgagtgtactggcttcatggaatatactgttttaaatggtagaatccttgtaacactttgtaaagatatcagaagtaacattgaaaaccttttgtaccacacagcagtttgaagatccaatagtgaagtactttaaaaagtcattgagcttaaagatgagttatatgcttctttttttttttaataaaaatacatttgtttcaattttataggtcttttatatggtaacactgtcagcagtatgttgtctacagacatttgaagaaataaaaatatatgtacctagttacttatttaactaaatgggatagataccattttaacaataattgagaaaaataacttctttttca

SEQ ID NO: 313495 - DNA, 538 bp, Homo sapiens
tcatatttataggttttttaataaaaaaggaaaatggaaaaaaggatacttccctattatttaatatgtagagtgatgctggtatatatacatggagacaatgtgaagtaacctggggaagagaagaaaagaagttatacaacrtgaaagccctgatagtcctctaactcattgattcaagttattgagtgtactggcttcatggaatatactgttttaaatggtagaatccttgtaacactttgtaaagatatcagaagtaacattgaaaaccttttgtaccacacagcagtttgaagatccaatagtgaagtactttaaaaagtcattgagcttaaagatgagttatatgcttctttttttttttaataaaaatacatttgtttcaattttataggtcttttatatggtaacactgtcagcagtatgttgtctacagacatttgaagaaataaaaatatatgtacctagttacttatttaactaaatgggatagataccattttaacaataattgagaaaaataacttctttttca

SEQ ID NO: 313496 - DNA, 593 bp, Homo sapiens
gggttcacgccattctctcgtctcagcctcccaagtagctgggactacaggtccccgccaccatgcccggctaattttttgtatttttagtagagacagggtttcactctgttagccaggatggtctcgatctcctgacctcgtgatctgcctgcctcggcctcccaaagtgctgggattacaggcgtgagccaccgtgcccggcctgaccttgtctcttttattctactcctacatatccttaactttttgagtccctcattatatctatttaaagtcagttttcccatgaatataaacaaattagcttcacttcaggacatatagaagtcttaaaaatattatccgaaagtaagattatctaaacttgggaygattcttccactacgacatgagtaggataactgtgatcattttgtttttacttgcaatctataacagtttaatactttaagatttcagcatattttaattatgaagatatgtgtagctataaagacaattaaattttcattttcttcaaaaattttctttaggtgattttatttatattgtcaaagcatatcattaaaaagataaattagagctacttt

SEQ ID NO: 313497 - DNA, 607 bp, Homo sapiens
aagccttaaaaaagaaaaacatcacagcaaataatcaatgaaattgaaaagataaaatcaatagaattaatgaaaccaaaagctggctttttgaaaagataaaacatatatataaacctctaattagactatctaaagaaaaagtggtgggagtgggaggagaaagagagagtgagagtgaaaccatgaacaaaatttctacaaaagaaattctactggcagaatgaaaatgatgccaaatagttactttgaaatggaggaagcaataaagaccaatgagtaaataggcaggtatttataaaattatattgtgcattctacagtttcagttgactagcctgaaatagaaaaagtatattgtatatgcaaaataataactgtaacgtgttgtggaatttaaaatcctacagaattaacatgcatgacaatagtaaggcaaatgatgatagaattcatagaattataatgytccaggatctggcactatcaagaaagtgataaagaccaataattttatgagatacattaaatcatacatccactgtctagaaatctctaaggtcaccacaaaaagaatagtgaaagaatgtaaatatgtaagaataaa

SEQ ID NO: 313498 - DNA, 458 bp, Homo sapiens
aacctcataaaaataaatatagcactttaaaaattcatagctagatcacttcttactagaatgctagattggcctgaagatatttcaatattttaagtaatttaatttaaattttaaaatatttaggtattagtagattcaatttttcaatgtcgattaattacattgattgttttcagtacctcatgcataatgattctgcttctgcaaatagaaatcaaggtttttattttttaggttaaaaacacatatcacatctttttcttctttgaaactacaactttagctgccagcagaagttccttgggggttttaaaaacatcaatcagtttcacagctggagagagtacttttttagagaacaattttagctaaaagaaaagtaggctttgtcatttatgaaagcacrtaacgagttaaattcaagaaattgcaagaaacagcttttcactcacaac

SEQ ID NO: 313499 - DNA, 614 bp, Homo sapiens
aaaagtgcaacaacatctacttaagcttccccataattaaatacttaggtataaatctagcaaagtatatacaagaactatgtgaggaaaactataaaactttgatgaaacaaataaaaaaatttaamtaaatggagagatattatatgtctgtggataagaatattcaaaactgtaaagatgaaagttcattatgacttgatccttgttgtagatatcaacaaactattctaatatttatgtggaaaagcaagagactcagaatggccaacaaaatactgaagaagaaataagccatatgactgacgccacctgactttaagactaactacaaagctacagtaatcaagaccgtggtattagtgaaagaacagacaaacagagcaatggaacagaagacagactccagagaaatatcaaaacaaatagtcagcaggtctttgacaaagaaccaaaggcaattcaactgagaaaggacagtctcttcaagaaatggtcccagaacaattggacatctcatgcaacaacaacaaaaaaatgaatttagacaaagttaactaaaaatgaatcatagactttaatgtaaaacacaggctacctcaaaatagattata

SEQ ID NO: 313500 - DNA, 614 bp, Homo sapiens
aaaagtgcaacaacatctacttaagcttccccataattaaatacttaggtataaatctagcaaagtatatacaagaactatgtgaggaaaactataaaactttgatgaaacaaataaaaaaatttaaataaatggagagatattatatgtctgtggataagaatattcaaaactgtaaagatgaaagttcattatgacttgatccttgttgtagatatcaacaaactattctaatatttatgtggaaaagcaagagactcagaatggccaacaaaatactgaagaagaaataagccatatgactgacgccacctgactttaagactaactamaaagctacagtaatcaagaccgtggtattagtgaaagaacagacaaacagagcaatggaacagaagacagactccagagaaatatcaaaacaaatagtcagcaggtctttgacaaagaaccaaaggcaattcaactgagaaaggacagtctcttcaagaaatggtcccagaacaattggacatctcatgcaacaacaacaaaaaaatgaatttagacaaagttaactaaaaatgaatcatagactttaatgtaaaacacaggctacctcaaaatagattata

SEQ ID NO: 313501 - DNA, 614 bp, Homo sapiens
aaaagtgcaacaacatctacttaagcttccccataattaaatacttaggtataaatctagcaaagtatatacaagaactatgtgaggaaaactataaaactttgatgaaacaaataaaaaaatttaaataaatggagagatattatatgtctgtggataagaatattcaaaactgtaaagatgaaagttcattatgacttgatccttgttgtagatatcaacaaactattctaatatttatgtggaaaagcaagagactcagaatggccaacaaaatactgaagaagaaataagccatatgactgacgccacctgactttaagactaactacaaagctacagtaatcaagaccgtggtattagtgaaagaacagacaaacagagcaatggaacagaagasagactccagagaaatatcaaaacaaatagtcagcaggtctttgacaaagaaccaaaggcaattcaactgagaaaggacagtctcttcaagaaatggtcccagaacaattggacatctcatgcaacaacaacaaaaaaatgaatttagacaaagttaactaaaaatgaatcatagactttaatgtaaaacacaggctacctcaaaatagattata

SEQ ID NO: 313502 - DNA, 432 bp, Homo sapiens
tcctagaaagagtggtctatgcatgtctttcatcatcctcattcttgctgtcctggacatcttgttacctaaactctgctcctatcatttatgggaaatgtttgtgttaaggtcattcatgaccttctgctagatgaaatggacatgtttgtattttttctagtctttgtcttaatgtactttttggaaacttgactccargttgcaactcctttctcttgttttctatgatcccattcatttttatccttcaatttctctagaaattgttaatgttaattattcttgactttaatgtcaaaattccttttctttattgctgttgttatgtgatctgatccaactatagttctataataataattcccaaaactatgtatccatcaaaccttctcatgaatattggacacacatataccatcgtcattaaaa

SEQ ID NO: 313503 - DNA, 549 bp, Homo sapiens
ggacaaacctgtcattactggagtgagaaattagaattcttccttggggcctggcagggtagctcaagcctgtaatcccagcacttggggtggtcaaggttggcaaattgcttgagcccaggagttcgagaccagcctgggcaaaatggcaaaacccagtctctagtaaaaatacaaaaatcagcttggcatggtggtgcacacctgtagtcccagctcctgaagaggctaaggtgggaggattacttgaactctagaggcagrggttgcagtgagctgagatcatgccactacactccagtctgggtgacagagtgagactctgtctcaaaaaaaaaaaaagaatcctttctagaaagtgtaagcaaatactggtaaactgttgttctaccttccacatccacgctttcaactgcccaacattttatttcctctcgctttgacatgtagcactcactcagtaatccttcaagagagacaagcccaaaagtcctaaccattctctgctctaaccacaaatccagaatcagtgactggtgttgggtctct

SEQ ID NO: 313504 - DNA, 536 bp, Homo sapiens
gatatatttgaggatatttattgttctagttatatttggattactcaaaaattctttttaagatagaaattgaatttaaaggtgagtggttgattgttaacatctttacatgtaaaattatcctatccataaatatattattcagatgttcttttgtgccctgtaatagagtttaaattattatctgcastaaaggtgatatgtatcttagttggggcaattctcaattttttattcatttagtaatcgatacctttttcttattttatttcattattattgattttcagaaacgtcactaaatttttggtatgttgaccttatattcaacaactttccaaactctattattggttgttacagactattattaattctactaagttttgtagggaaattatctcatctgcaaataataacaattatggttatcttgtctatttttcttgcacaattatatgttatgcttatgtcagatctttctgcactttaatggacagtacaattgacaaagaatcactgtcttaatgccagct

SEQ ID NO: 313505 - DNA, 598 bp, Homo sapiens
tatcttttcattggggagataaatgatgatgaaaatgaacaattatagaatggcaggtttgggcaagctaaatgaatttgtataatcatactaacaccagatttaaatatttccaacttttgataaagcaaaagatacactgtatttcatttatttactcaacaaatgactgtattcttttacaaattacttactctgagatgggcactacgttgggctctgagattacagagatgagtaaaccgtaatcattgtactcgtggagctcattgtccaataaaagaaacatttgggggaaaataacacagaacaccttgccttaatttgaccagtgggtttcctccaaaataaaatcttataaaaatatggtcacattattgcaagattgctgaaggcaagactgcataaagctagccttctttatattccrggattccacctatatttttccatcaacgttgcaatttgatgctttcgtatttttttatacagtttatttcattttcttttttttattgtactttaagttctagggtacatgtgcagaccgtgcagttttgttacataggtatacatgtgccgtggtggtttgctgcac

SEQ ID NO: 313506 - DNA, 568 bp, Homo sapiens
accatcagggccattttactagaaagttcaaattatttattcatgataatcaaccccaatctaaagaggtccaatttcttgtatcttacctaatttttcccaatcaatgaatcagagaaaactgaccagcaaagaaaacattaaggatcgaaactatttagaatctacatcatttggggaaactcagatgaactttgcatatctcagcaaaggctagtatctattgacatttgagttacttgtttcaaaatgacccactaggtatctggactctttcccaacttcgtatagcctgagtggaatctgaaaaattgactattagttaacatttaatttaggcatcaaaggaactgcagcttcagtctttgaaaaaaatctgctttggacataaagtgaggtctaaattgawgtgatgcattatgatggaaagagcacattgtcacatggcacactgcagggagagccatgggggtatagatataaagcatgtccaggtttgactccctcacaactggaaaaaacaaaataattaaatttgaagagactagcaaaagaaaaattgggttgc

SEQ ID NO: 313507 - DNA, 582 bp, Homo sapiens
tataagtttgtagtcatatgctgcttaatgacctcatcttcatagaattgtcattatttaatttgtcttgcagctccctggaaaagctcaattcacaatgcttatctttatatgatcaaactcaaggcttactcagtgataaaagccatatctccagtattcttattgccaacaatcattttctattgtttaatattatagctgcctaaggtagcaatacaaattcagggaaacaagaggttgacccaacaatttaaaaagaaaatttgggaaataagatttccataggtatgtgaaaagttcagaaatatttttaaggacttggaagggagcatgcaggtgcagtattgggggtattcccagcaaagacctgataaggtcttggtgtttaacctctggctcacattgagcctttgtgcaagcagaatatgaaggttaaaatagagtcataggctgggcacagtggctcaaacctgtaatcycagcactttgggaggccaagccaggcagatcacctgaggtcaggggttcaggaccagcctggccaacatagtaaaatgctgtctctactaaaaatacaaa

SEQ ID NO: 313508 - DNA, 303 bp, Homo sapiens
tttccacacgatctccctgatatttatttcttgatcctttggctaggaagaggaggctttgttttggggcatatacacacacgttggtgtttctgggttgctggcccctttagctccaggtctgagatacataagacaaaaagagcacccagggatctcaccaccctgttgctcctccagtcctgaagtctctagtcgctttccttcttcttttyacttttcagaggtgtattttcatttcatctgtagtatccagtgatatggtttggctgtgtccccactcaaatccccaggtgttgtggg

SEQ ID NO: 313509 - DNA, 539 bp, Homo sapiens
ttttgcagttaatgcatttgttctcattcagcaagtcaatggcctcctctaggatcctgttacctcatccataaaagaaaaaggatttgggaattctaagtaccctgcagttcagacacactaagatccttcatctcatccattggcttatagaggtgacaagttaggtctcctgarcagtttccaaaggcataaaaaagtcgatagaatgattctttccaacataagaaaaatagtaaaactgtacataggacactataaaatgacatcgaaggagacagaggcaatttgctcatttggagaaaatagcaagataagatatgaagtgcagtgtagcaggggaatgacactggatcataacactgagtaaaaagattttgaataagaggtaggcaacacattctggaacaaattacattgtggagggaaattgtgtaaatatataagctttagagatggtaaactaaagctcttgaaccagtggactaaatataaaaaaagaagttctagaagagggcatttctacatttatcaaagca

SEQ ID NO: 313510 - DNA, 539 bp, Homo sapiens
ttttgcagttaatgcatttgttctcattcagcaagtcaatggcctcctctaggatcctgttacctcatccataaaagaaaaaggatttgggaattctaagtaccctgcagttcagacacactaagatccttcatctcatccattggcttatagaggtgacaagttaggtctcctgaacagtttccaaaggcataaaaaagtcgataraatgattctttccaacataagaaaaatagtaaaactgtacataggacactataaaatgacatcgaaggagacagaggcaatttgctcatttggagaaaatagcaagataagatatgaagtgcagtgtagcaggggaatgacactggatcataacactgagtaaaaagattttgaataagaggtaggcaacacattctggaacaaattacattgtggagggaaattgtgtaaatatataagctttagagatggtaaactaaagctcttgaaccagtggactaaatataaaaaaagaagttctagaagagggcatttctacatttatcaaagca

SEQ ID NO: 313511 - DNA, 492 bp, Homo sapiens
aatcatccccctgccactacaaggacaccaatttaacaattatctacacacacamaaaaaaagcacctccataagaacgaaaaatcgagtgaccactcacagtacctgattttaacctcatattgctgaaagagacactgaagaggtaacaaaaacagtcctgaattgccaatggcacctctcctccatcccccagcagtggtggcatggtgtggagagtgtttctgtgcactggggagaggggaagcacagaaaatatgtggcattgtactcagtgctgccctattataacaaaaaacaaaacaggaccaaactaagctgacagtcacccacgggtttaaaccagccctagctaggggagtcaaccatgccagtggtcagaacttaagttcttgcaagccttgcccctgaagtctagagtgttctgtggttctgcataaacctgaagggtagtctaggccacaggagctgcagttctgtggcaagtcccaa

SEQ ID NO: 313512 - DNA, 492 bp, Homo sapiens
aatcatccccctgccactacaaggacaccaatttaacaattatctacacacacacaaaaaaagcacctccataagaacgaaaaatcgagtgaccactcacagtacctgattttaacctcatattgctgaaagagacactgaagaggtaacaaaaacagtcctgaattgccaatggcacctctcctccatcccccagcastggtggcatggtgtggagagtgtttctgtgcactggggagaggggaagcacagaaaatatgtggcattgtactcagtgctgccctattataacaaaaaacaaaacaggaccaaactaagctgacagtcacccacgggtttaaaccagccctagctaggggagtcaaccatgccagtggtcagaacttaagttcttgcaagccttgcccctgaagtctagagtgttctgtggttctgcataaacctgaagggtagtctaggccacaggagctgcagttctgtggcaagtcccaa

SEQ ID NO: 313513 - DNA, 492 bp, Homo sapiens
aatcatccccctgccactacaaggacaccaatttaacaattatctacacacacacaaaaaaagcacctccataagaacgaaaaatcgagtgaccactcacagtacctgattttaacctcatattgctgaaagagacactgaagaggtaacaaaaacagtcctgaattgccaatggcacctctcctccatcccccagcagtggtgkcatggtgtggagagtgtttctgtgcactggggagaggggaagcacagaaaatatgtggcattgtactcagtgctgccctattataacaaaaaacaaaacaggaccaaactaagctgacagtcacccacgggtttaaaccagccctagctaggggagtcaaccatgccagtggtcagaacttaagttcttgcaagccttgcccctgaagtctagagtgttctgtggttctgcataaacctgaagggtagtctaggccacaggagctgcagttctgtggcaagtcccaa

SEQ ID NO: 313514 - DNA, 575 bp, Homo sapiens
cctcctgtggcctgtggaagtggtggccatggagtgaagctcctctgcctttggaaaggggaaggaagagtgggaaggatggcatcttttggtttgaatgccagctcaaattcagtacaatagaatactaggtggacttctaaggtttttgactatagtttatggctcacagctgccacctctggacctgcctagagcctagcagacctcatcaccctgaagggaaggacacaggcctggatggctttgccacctgctgattatagagccccaagtcctgaagtaaacataggtcatagacaagcaatggttacagtaagcactgggcaagacccagggttatgctggctttacatctcayccagtacagtcctagtggttgtggccatgggggtgcttgtgtcaccccaccctctgctccaggtggctcagaacagagagaggggctttgtttgggagaaaataagggaagagaacaagaatctctacctggtaatccagagaagtcttccagatcttgcccaagatcgtcaaggcaatacatgtagaagtttgcaagaaccacagtgtagtga

SEQ ID NO: 313515 - DNA, 505 bp, Homo sapiens
agacaaagaaagtcactatataataataaaraggtcaatgcagcaagaggatataatcatttaaaatttataggtacataacattggaggaccaagatatataaagaaaatattattagagctaaagagagaaataggccctaatacaatgatatctggagacctcaacacccaactttcaacaatgcaaagatctttcagacagaaaactagcaaagagaatagtggacttaatctacactatataacaaattgacctaaaagatatttacagaacatttcgtctaacagctatatatgagaatagactgtatattaagtcacaaaacgagtctcaaaacattttttaagtggaaataacattaagctccttctctgattataatggaataaaactataaatcaataacaagaagaattttggaaaaatataaatacatggaaattaaacaatatgctcctgaatgaccagtggatcagtgaagaaattaagaaggaaactgaa

SEQ ID NO: 313516 - DNA, 505 bp, Homo sapiens
agacaaagaaagtcactatataataataaagaggtcaatgcagcaagaggatataatcatttaaaatttataggtacataacattggaggaccaagatatataaagaaaatattattagagctaaagagagaaataggccstaatacaatgatatctggagacctcaacacccaactttcaacaatgcaaagatctttcagacagaaaactagcaaagagaatagtggacttaatctacactatataacaaattgacctaaaagatatttacagaacatttcgtctaacagctatatatgagaatagactgtatattaagtcacaaaacgagtctcaaaacattttttaagtggaaataacattaagctccttctctgattataatggaataaaactataaatcaataacaagaagaattttggaaaaatataaatacatggaaattaaacaatatgctcctgaatgaccagtggatcagtgaagaaattaagaaggaaactgaa

SEQ ID NO: 313517 - DNA, 628 bp, Homo sapiens
attaggcaagagaaagaaatgtggggcattcacattggaaaggaaagacatgaaattgaccatgtttgcagatgacatgatctccaaaaacactctaccaaaaaaacagttaaaactaataaacaatttcagtaaagctgcaggagacaatatcaatataaaaaaattgtgttgttaatataaatgaacagtgaactatctgagaaagaaattaagaacacattaacatttgcaaaagatttcttaaaagataatattcttaggaatgaatttaagcaagaaagtgaaagatctctacattaaaaactataaaatactaataaaagaaattaaagaagtcacaagcaaatggaaagatattctatgtttacagaytggaaaaattaatattgttaaaatgccaagaatagccaaagagatttacagatttaatgtaatttctattaaaatacaagagatatgcttcacagaaattgaaaaacaatcttaaaatttgtatggaaccacaaaagactcagaatagccaaagcagtattaagcaaaaagaataaagctggaggaatagcagtacctgccttcaaaataaattagaaagatatggtaatgcaaagaatatggtactggcata

SEQ ID NO: 313518 - DNA, 628 bp, Homo sapiens
attaggcaagagaaagaaatgtggggcattcacattggaaaggaaagacatgaaattgaccatgtttgcagatgacatgatctccaaaaacactctaccaaaaaaacagttaaaactaataaacaatttcagtaaagctgcaggagacaatatcaatataaaaaaattgtgttgttaatataaatgaacagtgaactatctgagaaagaaattaagaacacattaacatttgcaaaagatttcttaaaagataatattcttaggaatgaatttaagcaagaaagtgaaagatctctacattaaaaactataaaatactaataaaagaaattaaagaagtcacaagcaaatggaaagatattctatgtttacagactggaaaaattaatattgttaaaatgccaagaatagccaaagagatttacagatttaatgtaatttctattaaaatacaagagatatgcttcacagaaattgaaaaacaatcttaaaatttgtatggaaccacaaaagactcagaatagccaaagcartattaagcaaaaagaataaagctggaggaatagcagtacctgccttcaaaataaattagaaagatatggtaatgcaaagaatatggtactggcata

SEQ ID NO: 313519 - DNA, 465 bp, Homo sapiens
tttaggtttctagtgtacctatcacccaaataatgaacattgtacccaataggtaattattcaaccctcaccctccatacacttcccccactggattctccagtgtctattatttccatctttatgtccatgtgttcccattgtttaactcccacttaatagtgacagtatataatatttgattttctatttctgagttattttattttggacaatgacttccagctccatccttgttgctccaaaagacagtatttcattctttttatggctgtgtagtatttcatgatgtatatataccacattttcttaatcagtcatgtgttgatgggcacttaggttaatttcatggctttgctactgtgactagtgctgtgataaacatatragggctggtgtctttttatataatgattcctttcctttgggtagatgcccagtagtgagatttctaggttaaatggt

SEQ ID NO: 313520 - DNA, 559 bp, Homo sapiens
atatgtattctctgttgcttctaaagcaaattttatgcatcatttaaatttcatggctggcccaatactgaagggtttgactgacatcagtgcactacggctgacttgttacaaacgaccttcctaaaaggacttttcacatctatatacctctgaccatcagtgaaaatgattttattatggccctttgcaacccaggtcttcacaccttccttaaacaaaacttttggcaaaataaccacatgtggcctcagaataaggagttcttgattctgcacctcaaaaaaaattgttccatagcagcaccatyactacaaatgttctcatttattctagcattattttatcaggggctaaatttgtttttggaaagaaggtgatcttattgaagaaagtgagcatgcaaaacaaacgttgtcaaaaagtttctagcatggtcattctgatcgtgtctcttatgtccttattttatgttaagatgggctacatcgatcccctttttcttaaggaaaattgagaagtgaagcatcaagatttagctaatataatacactaggaa

SEQ ID NO: 313521 - DNA, 559 bp, Homo sapiens
atatgtattctctgttgcttctaaagcaaattttatgcatcatttaaatttcatggctggcccaatactgaagggtttgactgacatcagtgcactacggctgacttgttacaaacgaccttcctaaaaggacttttcacatctatatacctctgaccatcagtgaaaatgattttattatggccctttgcaacccaggtcttcacaccttccttaaacaaaacttttggcaaaataaccacatgtggcctcagaataaggagttcttgattctgcacctcaaaaaaaattgttccatagcagcaccatcactacaaatgttctcatttattctagcattattttatcaggggctaaatttgtttttggaaagaaggtgatcttattgaagaaagtgagcatgcaaaacaaacgttgtcaaaaagtttctagcatggtcattctgatcgtgtctcttatgtccttattktatgttaagatgggctacatcgatcccctttttcttaaggaaaattgagaagtgaagcatcaagatttagctaatataatacactaggaa

SEQ ID NO: 313522 - DNA, 593 bp, Homo sapiens
aaatccatatggaatttatgtcccttcattttataaggcccaaaccatctttgttactcaatgtgtgtgtgtgtgtgtgtgtgtgtgtgtgygcgcgcgcgtgcgcgtgcgtgtgtgcatgtaggtgggtgcttagtgggtgctttctgttgtccttaataagaattaaattccatcttttttcttaagaaaataagtgaccaaagtcatctagtgccttaggccctaaatcctagccagagtaacagattcatttcttttcttttttttttttttttcattctaactttactaactagccttcagtcactgcaattcttaaccaataattaaccttacttcaacaataattaaccatgacagaaaaagcgtagcaggaatagttagagtgagggggtggagagtagtacacgttttctttcatgaaaacagagtcggttttacaaaagttaaattcaactgaagagatgtgacaagaaagatataacaaaaatggtaaaaatggtaaccaggaggaagaagatgaacctctgctgtattttcatagcacgtttccaaacctctattcctatccttagtatattgaattgtaa

SEQ ID NO: 313523 - DNA, 620 bp, Homo sapiens
cattctgatgtcaccagagtctcgcttacagcccactccaaaccagtagtttgatgtgtttgtttatttaccaagaaaagagtgaarttgaaattgctcaacagaaattgagagcctattttaatcatccatgtgattaaatttgaatcactgtacaataactcatgtagagcataaataagatcctcaattttattattgttttttgaatcacttgtgaacaagtctcagaggtctagaagctggaacagtggagaagctaccataatgcaataaacatgatgattttcttaattaagatgatagttaagatttgatgtagaccaaactctagcagaactgccacaaaatttcagttgaaatagtgaggacaaacatttaaggtaactatattctagttgacttccatttcagtccatacaaaaggaatgcgctacatatgatgccaatttcctcatgtttttccaggtctgattcactctttaccatatgtacacacatagatacatgtatctatgtgtatgccatatatatttatatatacacatatataccacatgtatatatgtatatgtatatgttgccatgtatctgtatatatggtaaaaagtgagtcacat

SEQ ID NO: 313524 - DNA, 620 bp, Homo sapiens
cattctgatgtcaccagagtctcgcttacagcccactccaaaccagtagtttgatgtgtttgtttatttaccaagaaaagagtgaagttgaaattgctcaacagaaattgagagcctattttaatcatccatgtgattaaatttgaatcactgtayaataactcatgtagagcataaataagatcctcaattttattattgttttttgaatcacttgtgaacaagtctcagaggtctagaagctggaacagtggagaagctaccataatgcaataaacatgatgattttcttaattaagatgatagttaagatttgatgtagaccaaactctagcagaactgccacaaaatttcagttgaaatagtgaggacaaacatttaaggtaactatattctagttgacttccatttcagtccatacaaaaggaatgcgctacatatgatgccaatttcctcatgtttttccaggtctgattcactctttaccatatgtacacacatagatacatgtatctatgtgtatgccatatatatttatatatacacatatataccacatgtatatatgtatatgtatatgttgccatgtatctgtatatatggtaaaaagtgagtcacat

SEQ ID NO: 313525 - DNA, 629 bp, Homo sapiens
tcttcagggaagacagagtaggaaattccaaattgatacttttagtgaatttgctggctgccccctcagtttgccacagtgtctcccaagactcctgttatttaattcaccagytgaacatgattctgaaagcaatggcacatgatggtacctttagatttctgaatatgatttgtcattgtttaaaaagtgtttcaacatttccaaattttttggaagtttcttatttaaaaaatcacttacatcttggctgtgggccatgactagaactagtgcccatgtaaagcattcctaagccattcttctctgactagggtggaatgccagtaaatgggaaaagggaaatccttgcagtctttatgcacaagtctagggtaaaggagtagattcgtttatttcctttgctgaaaatatgaatgaaggataaggtgggatagagcatagagtacagagtcttctccaatcttctgttccacaattagttggcaaattaattgggcactataaatgaatgtcatattggtttagtttgaattcacttgagaagttaggttgacccaatctctctaccttcagttttctcatctgttaaatggaagtagtaataggaccctcttcaaaaccctgag

SEQ ID NO: 313526 - DNA, 557 bp, Homo sapiens
actgcataaaataatattccacttcttctgagaggcaaatatattctagcaagaaatgacaatcagtatttattaagtatattttgtagcatttaatataagggttaggacttttaaatattatttcatttaatctcccccacagtcctgagaggtgggtactgttttctgaattttcttaccgaaggaactgagctttaaacaccttaagcaaaggcccaagatcccaaacttaagattctaaattctctgatctttaaaccaaattatgttgcctcttcattgctacaagtatctttgaggtttcctcttggactatttagtcagctaactaatatttactgagcatctactaagggctggctaatgtaacttagttatatatgytgactactctctttgagagcttttttgcttggataaaaataaaaagtcaagtactcatttaaaatgtattttaatgtgtctctcagtgaagaactagacctgtacttaagcaaggatggctggtatccgccaatgacagttggtgttacggacacttagcaccaaaacat

SEQ ID NO: 313527 - DNA, 534 bp, Homo sapiens
aaaataagattacagagtagactggacataagcaacacacttggggtgtcactgtctcccatcacccccatttgggacaatctagttgcagggaaaaaaattccagggttcccactgattctatgttacrgtgagttgtgtaactattttattatgtattaccatgtgataataatagaaataaaatgcacaatacatgtaatgtgcttgaatattcctgaacccaccacccccaaacccagccgttggaaaaattgtcttccatgaaatcagtacttggtgccaaaaaggttagggaccgccgcattacagaatgtcataattgctgccttttatgacgaaaatgctgtgtctcagtagctaagacaggcacattgatcaacaactacaaaatctaagtgtatttaatattaaggtcttttagataacttaataggcttttgaaacaacagagaagccctcactttgcagatgtgtaagtaacttttccataaagttaaatgaaaccattaaaatattttcaattattggtaa

SEQ ID NO: 313528 - DNA, 534 bp, Homo sapiens
aaaataagattacagagtagactggacataagcaacacacttggggtgtcactgtctcccatcacccccatttgggacaatctagttgcagggaaaaaaattccagggttcccactgattctatgttacggtgagttgtgtaactattttattatgtattaccatgtgataataatagaaataaaatgcacaatacatgtaatgtgcttgaatattcctgaacccaccacccccaaacccagccgttggaaaaattgtcttccatgaaatcagtacttggtgccaaaaaggttagggaccgccgcattacagaatgtcataattgctgccttttatgacgaaaatgctgtgtctcagtarctaagacaggcacattgatcaacaactacaaaatctaagtgtatttaatattaaggtcttttagataacttaataggcttttgaaacaacagagaagccctcactttgcagatgtgtaagtaacttttccataaagttaaatgaaaccattaaaatattttcaattattggtaa

SEQ ID NO: 313529 - DNA, 534 bp, Homo sapiens
aaaataagattacagagtagactggacataagcaacacacttggggtgtcactgtctcccatcacccccatttgggacaatctagttgcagggaaaaaaattccagggttcccactgattctatgttacggtgagttgtgtaactattttattatgtattaccatgtgataataatagaaataaaatgcacaatacatgtaatgtgcttgaatattcctgaacccaccacccccaaacccagccgttggaaaaattgtcttccatgaaatcagtacttggtgccaaaaaggttagggaccgccgcattacagaatgtcataattgctgccttttatgacgaaaatgctgtgtctcagtagmtaagacaggcacattgatcaacaactacaaaatctaagtgtatttaatattaaggtcttttagataacttaataggcttttgaaacaacagagaagccctcactttgcagatgtgtaagtaacttttccataaagttaaatgaaaccattaaaatattttcaattattggtaa

SEQ ID NO: 313530 - DNA, 534 bp, Homo sapiens
aaaataagattacagagtagactggacataagcaacacacttggggtgtcactgtctcccatcacccccatttgggacaatctagttgcagggaaaaaaattccagggttcccactgattctatgttacggtgagttgtgtaactattttattatgtattaccatgtgataataatagaaataaaatgcacaatacatgtaatgtgcttgaatattcctgaacccaccacccccaaacccagccgttggaaaaattgtcttccatgaaatcagtacttggtgccaaaaaggttagggaccgccgcattacagaatgtcataattgctgccttttatgacgaaaatgctgtgtctcagtagctaagacaggcacattgatcaacaactacaaaatctaagtgtatttaatattaaggtcttttagataacttaataggcttttgaaacaacagagaagccctcactttgcagatgtrtaagtaacttttccataaagttaaatgaaaccattaaaatattttcaattattggtaa

SEQ ID NO: 313531 - DNA, 420 bp, Homo sapiens
gggtagggcctggagatcacagaagttctgcctcctgttacctgtaagatccctgctggcatagtactgtgaaggactcaatgaaacatccctgaaatcctcatgatcatcagggctggcattcctgtagygcttaccatgtatggggtcttgtctcagggccttacccgcattaacatgtttttctttctaacttaaaaaaataataattatagactcacaggaggttgccaagatagcagagttctgcactccctcacccagcttcccccaatggtgacatcttatgtaactgcagtgcaatattaaaaccaggcaattcacatcagtacaatactgttaacgggactgcagattttgtttttgttttcacccattttcaacatactcatgtgtgtatccgtgattctatttactgtt

SEQ ID NO: 313532 - DNA, 575 bp, Homo sapiens
tggggctgtgtctgaagagcagacccagcaagacgtggctgcacaatggctgacaccatcaaagaaacccttttcctctcctctcctttcctcttcttgtcgccccttcatttagacaactcctccattgcgacgattaggttggtgcaaaagtaattgcagaaaaaaaaaagtcattgtggtaatactaacaagccaagcacatccacttaacttccccagtgcactcagcattttatatgcattgtctcatttcagccaaccacgctataaagacagaagatgagtttttgtgtccattttactgtgcagactgagtcactgagcggttagggttatgtcatgagtaacggcagagccaggaattaaaccccattgcccaagctgtccttgactttcaatctgacctggttcrttgccctgaaacactaggggttccagttgaatgaccagagaccctagggtgtgtggctcaaaacaaatttctcggaggccatcactgggggtgatgcagcagagtcccttccccacacctcactgcatctccctctgcacggttgccagtggacagccag

SEQ ID NO: 313533 - DNA, 540 bp, Homo sapiens
taaatcttgcaatttaatcaagcagggttagttatgaagttactaaagagtatcttgttaaaatcaccctctggaagggcgttttaatactgctctgtaaggaggcagtttccctctacagattttgagcatagggcaaatgaaattagtatgaaaagaactttctggtgggatgtgggtggctcatgcctgtaatcccagcactacgggaggccaaggtgggaggattatttgagcccaggagtaccttgtctctacaaaaaaaatacaaatattagccaggcatggtggtgcacacttgtggtcccagctacttgggaggctgaggcagaaggatcatttgagcccaggaggtgaaggcttcagtgatccgtgttcacgccagtgtatgccagcctgggcgacagccttgtctcaaaaaaagaaaaatgaactttgtatgttaagatttacactgatgatttaaagtaataaatggataaaatggataamaatttacatgaggaaactttctgggtaaggaaaattctttattttgat

SEQ ID NO: 313534 - DNA, 540 bp, Homo sapiens
taaatcttgcaatttaatcaagcagggttagttatgaagttactaaagagtatcttgttaaaatcaccctctggaagggcgttttaatactgctctgtaaggaggcagtttccctctacagattttgagcatagggcaaatgaaattagtatgaaaagaactttctggtgggatgtgggtggctcatgcctgtaatcccagcactacgggaggccaaggtgggaggattatttgagcccaggagtaccttgtctctacaaaaaaaatacaaatattagccaggcatggtggtgcacacttgtggtcccagctacttgggaggctgaggcagaaggatcatttgagcccaggaggtgaaggcttcagtgatccgtgttcacgccagtgtatgccagcctgggcgacagccttgtctcaaaaaaagaaaaatgaactttgtatgttaagatttacactgatgatttaaagtaataaatggataaaatggataacaatttacatgagkaaactttctgggtaaggaaaattctttattttgat

SEQ ID NO: 313535 - DNA, 326 bp, Homo sapiens
tgtctgttcctacattatcttgcttaggataayggcctccagtcccaaacatgttgctgaaaggacattattttgttcttttacatgactacatagtattccatagtgaatatgtaccatattttctttatccagtctacaattgatgggcatctaagttaattccatgtctttgctattgaaaatagtgctgcaatgaacatatgtgtgcatgtatcttcatggtagaatgatttatatttctttgggtatagatcccaaaaatgggattgctgggtcaaatgatggttctgttttaagttctttgaaaaattgccaaactgctt

SEQ ID NO: 313536 - DNA, 444 bp, Homo sapiens
ggcatgaaaaacaacccagtcaggaaactggagatgaaaatgaaaggctgctacattttttaatcctgaattatgtgattagcctctacaaaggaaaaagaaaaatttataaacataatgatcacctggtattacagtgatactaaaataatataaaacttcattttgggtaaacaatttaggtctgtaaagtatttcataggtcactgatttatcctctagtattggtagcacttttttcttgaaaaaaatgtgtgtctaatgtcaagtataatattatacaaaaaatggtacctaactttaaaactaaagtaattcaatcaaatgttcttagtatgaccaatctggggggtggragaacctcataacaacactctaggtacaatgacaacatctataatctaaaattatcaattcaaatatcaatattaaagctaactgcaa

SEQ ID NO: 313537 - DNA, 558 bp, Homo sapiens
agtgggagctacatgagaccaaatagacacaaggggagagacaacacacactggggccagtcagagggtggggaataggaagatggagaggatagggaagaatagataggggatgytgggcttaatacctgggtgatgggatgacctgtgctgcaaaccaccatggcacacacttacctatgtaacaaacgtgcacatcctacacgtgtacccctgaacttaaaataaaagttagaagtgaaaaagtaagatgaagaagtataatgcgtactcatgaaagggaataacacttgcctgtaatgacaaagataacaaaggaggaaatccacaaaatttaatagtatatcctcctctttcttacaaatatttgcatgacctaatatctcatttttaaaaatgctaggacatcatactccctacataagtcctgcttcatgatatcagcactattaatgcaatatatatgtcaagctttattaaaactccttttgatgtgtaaaaataaggtagaaggaagaattaatgaaaggaaaatgataaacaatatatacaattata

SEQ ID NO: 313538 - DNA, 592 bp, Homo sapiens
ggttgcttttaaaatagatgttaattagcttgaaagacccattgtttctaaatttctgttaagttggggtctccattgctgctgccatggagtctccatttctgcttcttagtgaggtcttctttctagtgggttccttcagtaatgtaaatttccaatgtaagtttacaaggtaaactccactcaagtttgctcttaaggacagcctaataacagtcgccaaacaatgagatactgtggtgtgtgaacctgataataaccagagagtcttcttcattgaggtcctgacgctacaattgactttctgttatcacttagagttcttttaacgtattaggcttctttgggttccagatagttggaaacaatgtgtaatgctctagaccttcttcttctaaaatctatgactgccaggtagtcctctacctgtgctttccctaactcagaggcacaagagccataggactctgctcagcctctggggagcaactgaacatctamttcattctcacattccaccatctctgttgaccgtgcacccatgtcaccacatcctggcagtagagttgggactcatcaacttcctagaatc

SEQ ID NO: 313539 - DNA, 584 bp, Homo sapiens
acaaataacaaacaatggtactccgatatacctgtcagcaaactgttcagtggaaaccttacaggccaggagagagtggcatgacatatttgaagtgctgaagtagaaaaacttttaccctagaatagcatatctagcaaaaatatccttcaaacatgcaggagaaataaagattttcccagacaaacaaaagctgagagatttcctcaacaccagacctgtcctacaagaaatgataaaaagagtacttcaatcagaaagaaaaggatcttcctgagcaatacaacatcatctgaagatccaaaactcactggcaatagaaagtacacagaaaaacacagaatgttataacactgttaactgtgttgtgtaaactgctcttcrgtggaaagactaaaagatgaaccaatcaaaaatagtaactgcaacaacttttcaagacatagagagtaaaataagatataaatagaaacaataaaaagttaaaaagagggaggaaggagttaaagttcagaggtgttttctttttgcttattagtttgttacatgtaagaacatgtaagcagtgttgttatcagcttaaa

SEQ ID NO: 313540 - DNA, 618 bp, Homo sapiens
tcaaaagaatgaaggacaaaaaccatatcatcatctcaattgatgctaaaaatgaatttgataaaattcagcatccctttatgataaaaacctcacaaaactgggtatagaaggaacatacctcaatataataaaaaccacagacacacagctggtatgtatcatactgaatggggaaaaactgaaagccgtttctttaaaatacggaacatgacaaggatgcccattgttattcaacatagtgccagctagcacaattagagaagagaaggaaataaagggcatccaaattggaaaggaagaagtcaaattatccttgtttgcaggtgrtatcatcttatatttagagaaacctaaagacttcaccaaaaagctgttagaactaataatcaaatgcaggaaagttgtaggatactaatcaacatacaaacatcagtgggatatttatatgccaatagtggacaatgtgaaaaataaataaaacagtaataccatttatattagctgcatataaaataaaatacctaggaattatctcaaccaaaaaagtgaaaattttttacaatgaaaactgtaaaacattgatgcaagaaattggaggacagaaaaaaatggaga

SEQ ID NO: 313541 - DNA, 598 bp, Homo sapiens
tgcatttctgaatgttttagattttctagtttccaacttgtggttggtcttacttatatagcttcattttaacttttctttattaccctaggcatgttttttagtacctaccattttcaaaggagaaaagaaattaacttacagaagttttagtaaatctgacaaaaatactagttgtcactttttaatgctctttctatatcatcacatttgattctcatatagccctatcaggtacatagaacaagttctattattattgccaatgaacagagagctaatttgagctttataaatgaggaacctaaacttttaagttaatatattcccttatgtctcttcatatctgtttccgtgccgtttctctgtaattcactttrcatttacatattgtaattaaaaatataatttgtacaaataactattttccattgtattggtaattgtaattacagtttacaaattgcaagccattttccagaattcttccctaggcagtctgaaaacagtgctatatagaacttacggtatcaattagtaaatactgaatgtcccgcaaataaatgattatgtagcttaagactcttgtgtttgttaa

SEQ ID NO: 313542 - DNA, 598 bp, Homo sapiens
tgcatttctgaatgttttagattttctagtttccaacttgtggttggtcttacttatatagcttcattttaacttttctttattaccctaggcatgttttttagtacctaccattttcaaaggagaaaagaaattaacttacagaagttttagtaaatctgacaaaaatactagttgtcactttttaatgctctttctatatcatcacatttgattctcatatagccctatcaggtacatagaacaagttctattattattgccaatgaacagagagctaatttgagctttataaatgaggaacctaaacttttaagttaatatattcccttatgtctcttcatatctgtttccgtgccgtttctctgtaattcactttgcatttacatattgtaattaaaaatataatttgtacaaataactattttccattgtattggtaattgtaatyacagtttacaaattgcaagccattttccagaattcttccctaggcagtctgaaaacagtgctatatagaacttacggtatcaattagtaaatactgaatgtcccgcaaataaatgattatgtagcttaagactcttgtgtttgttaa

SEQ ID NO: 313543 - DNA, 476 bp, Homo sapiens
aatctcttcccttaagaagagatgctgcttttggaggcttgaatcaaagtcctttagatcctaaagggtatgggaccaattatccttgacattttcataactgatatttaaccacaaattatatggccaggatatacacatctcgaccttcttctgcactgcccacgctcccttggctgcctcatgctacagttgcagaatggaattcattagagaatatgctgccagaataatgatgcttccatgccccattcattccattcctttgtctctaaactgtcatattctggatatgcttgwtctgaatacaattgagtcactttgcctgtttattttttatctatgtggaactatggatcaataatgatttaaacccaaatgtaatttatgcagatgtgtatcagttatttgtgcagatgcacacacatattccaaatgagcaggtttgacaaacttttgacagtgtgcaacatagg

SEQ ID NO: 313544 - DNA, 645 bp, Homo sapiens
atttgaatatattttatttgtttactaagcactcgtgctttttattctaatgagcttgatctatcatttccccattttctgttgggtactttatattttccttattaatgtagatatctttatgcatatactactttactctatgcttgcaggggttttttttaaatgaaagaattaatccttatatcttatataagttgcaaatatatattattctatttcttatatggaatattttattgtttggatatattttatgttgtcaaaaatttctccctcttttccttgatggtttctggatgttataactgagcctktgaaagccttcctcactccacatttataaaaggaagatcttctttattttcttttaatacatttttatttttacatttaattcttcattctggaatttattttgtacacataatgtgaggtggaagccatttgctttctcaggtatccagttgtaccaaaactgtttattttatagaccgtcttttctgcactcatttaaaatgcttattataaactaaagtctcggaatttctctggagtctatgagttcagaaatataggaagtttaatttttctttttctttcttttagttctctacatggaaatgacatttctgttgtgcctga

SEQ ID NO: 313545 - DNA, 598 bp, Homo sapiens
gagcagcctttaattgtcattgaaagaataattgaagagaaagaattatactattgaaagaatagtagaaaaattatcttcaaaaggcttcatatatccactatgtgcagagaaaccattttcatgaagactttgtgttcatgataagaaaattcttcatttatattytttttttgcaacttatttctttcttgtacctaatttcccaagaagttatttaggtaacatacatgttatacatacatatactcacacacacacaaatgttgtacatgtgtttttgttaaatcgtgtgataacttaagcagaaaactatataatgcctttctcaaaagaaaaatgtagaagatagaatcaaacttttgtaatattagttgagaagtaaaactgaatataataacattataaataaattggagaaaaagaaatattaaaataagcacagagattaaaatggtaaggacagacagaaactccaactggtttctcttcaaaagtccaaggaatctagtgagtactattgcaacacaagaagcacatgcagaaaagtggcgttttaaaaaagtacttctacatactcaacaaagatttctgagtg

SEQ ID NO: 313546 - DNA, 598 bp, Homo sapiens
gagcagcctttaattgtcattgaaagaataattgaagagaaagaattatactattgaaagaatagtagaaaaattatcttcaaaaggcttcatatatccactatgtgcagagaaaccattttcatgaagactttgtgttcatgataagaaaattcttcatttatatttwttttttgcaacttatttctttcttgtacctaatttcccaagaagttatttaggtaacatacatgttatacatacatatactcacacacacacaaatgttgtacatgtgtttttgttaaatcgtgtgataacttaagcagaaaactatataatgcctttctcaaaagaaaaatgtagaagatagaatcaaacttttgtaatattagttgagaagtaaaactgaatataataacattataaataaattggagaaaaagaaatattaaaataagcacagagattaaaatggtaaggacagacagaaactccaactggtttctcttcaaaagtccaaggaatctagtgagtactattgcaacacaagaagcacatgcagaaaagtggcgttttaaaaaagtacttctacatactcaacaaagatttctgagtg

SEQ ID NO: 313547 - DNA, 615 bp, Homo sapiens
gtatcataagtggtttatttcagaccttcagctgacctaacttagcacatacttttgtgtcttctcccttatttgctgactccaatcttccctttggcttctgttcaaattccaaattacctctctatgtgatcctttgctgtccaagtaaatttgtgttttgaagaactgctttaatctcacggaaatgatggggtcaagaataacattcatgacctcggcyaggcgtggtggctcatgcctgtaatcccagcaccttgggaggccgaggcaggtggatgacccgaggtcaggggtttgagaccagcctggccaacatggtgaaaccccatctctactaaaaatacaaaaattagccaggcgtggcggtgggcacctgtaatcccagctacatgggaggaggcaggataattgcttgaacccaggaggtggaggttgcagcgcgccaaaatcgcaactcatgacattgcactcccacctgggcaacaagagcaaaactccatgtcttaaaaaaaaaaaaaatcatgatctctcggtattaacattctttttttttttttttatggtaggaggtatatcttctgatgccctagaataactctagatagttcattt

SEQ ID NO: 313548 - DNA, 393 bp, Homo sapiens
ctccctctcaatacatagtgactcaggaaaaagactcaggaactttttgttctccaaatggaggtttcagctaaatcaatgattactatggaagagaccagcagatgaaaagcactatagaatgtcagaaaagacagagattactctaggctgatgtagtcatgaaagaaaggaaaaaaaaaaaaaaaccaaaacctcagatcctcaaaaaatggatagaatctaattagacagaaaataaagtgggtatttcctatggaggtaatgggtctatcaaagaagagttgtgagcagaggcactacaatgttcacagtgaatatctgcaayagagaggccattctggcttgagcaaagagcttctgtacagattgaagggaagaaggagctaggag

SEQ ID NO: 313549 - DNA, 476 bp, Homo sapiens
ataaagaaaatgtggtatatatacaccatggaatactactcatccataaaaaggaatgaaataatgtcttttgcagcaatttggatggagctggagccattatwctaagtgaggcaactcaggaatggaaaaccaaatgttatatgttctcatttataagtgcgagttaagatatgaggatgcaaaggcataataataataatataatggactttgggaacagggcagagaggaaggttggggtggaggtgaaggattaaacactgcatattgggtacaatgtatactgcttgggtgatgatccaccaagatgtcagaaagcaccactaaagaacttatccatgtaaccaaaaactacctgtttccccaaaactattgaaataaaaatatttttttttctgaaatacttctggaaatgatagatatgaagttcatgtttgctgtattaattttccactctttcataaaggcactgg

SEQ ID NO: 313550 - DNA, 476 bp, Homo sapiens
ataaagaaaatgtggtatatatacaccatggaatactactcatccataaaaaggaatgaaataatgtcttttgcagcaatttggatggagctggagccattattctaagtgaggcaactcaggaatggaaaaccaaatgttatatgttctcatttataagtgcgagttaagatatgaggatgcaaaggcataataataataatataatggactttgggaacagggcagagaggaaggttggggtggaggtgaaggattaaacactgcatattgggtacaatgtatactgcttgggtgatgatccaccaagatgtcagaaagcmccactaaagaacttatccatgtaaccaaaaactacctgtttccccaaaactattgaaataaaaatatttttttttctgaaatacttctggaaatgatagatatgaagttcatgtttgctgtattaattttccactctttcataaaggcactgg

SEQ ID NO: 313551 - DNA, 406 bp, Homo sapiens
tggagccattattctaagtgaggcaactcaggaatggaaaaccaaatgttatatgttctcatttataagtgcgagttaagatatgaggatgcaaaggcataataataataatataatggactttgggaacagggcagagaggaaggttggggtggaggtgaaggattaaacactgcatattgggtacaatgtatactgcttgggtgatgatccaccaagatgtcagaaagcaccactaaagaacttatccatgtaaccaaaaacyacctgtttccccaaaactattgaaataaaaatatttttttttctgaaatacttctggaaatgatagatatgaagttcatgtttgctgtattaattttccactctttcataaaggcactggatgtattctgcaactccttca

SEQ ID NO: 313552 - DNA, 612 bp, Homo sapiens
aattcagctggccacttattgacacaatgacaaagctaattcccaatgccgatggtgatgcctctgctcagctgaatttaatatctctggacaaagcccttgaaatgctgtatcccctttgtgaggggaagaggaggaaggcaatggagaactccatttggtaaagaattcttgcatatacattgctctcttcactctgagtgattttgtgacttcttactctcaggcatcctgtttcctcaacctcactgtatctggcttctgctttttacatccactgatcaacaagcttatgtaagggatgacttaggttggtcttgctcttccagcctrgttctcaggatggtccccagagtatacctcaagtgcttgccccacttctttacaagctgttactataggtgataaaccaatacttattgattcattgaatgacaaccctgtgacctcaccaacttttccagctgccattccctcttcttcttttgttatcagacttattaagagaacagtctattattccttacccacgactagccagtgactacctcattgctttctttctttcttcccctttctttctctctattctgggactgcttcattccagaa

SEQ ID NO: 313553 - DNA, 612 bp, Homo sapiens
aattcagctggccacttattgacacaatgacaaagctaattcccaatgccgatggtgatgcctctgctcagctgaatttaatatctctggacaaagcccttgaaatgctgtatcccctttgtgaggggaagaggaggaaggcaatggagaactccatttggtaaagaattcttgcatatacattgctctcttcactctgagtgattttgtgacttcttactctcaggcatcctgtttcctcaacctcactgtatctggcttctgctttttacatccactgatcaacaagcttatgtaagggatgacttaggttggtcttgctcttccagcctggttctcaggatggtccccagagtatacctcaagtgcttgccccacttcttyacaagctgttactataggtgataaaccaatacttattgattcattgaatgacaaccctgtgacctcaccaacttttccagctgccattccctcttcttcttttgttatcagacttattaagagaacagtctattattccttacccacgactagccagtgactacctcattgctttctttctttcttcccctttctttctctctattctgggactgcttcattccagaa

SEQ ID NO: 313554 - DNA, 554 bp, Homo sapiens
gcttgaggtctttaaggactgaatcaatttcaacagtcttttgatcatttctccagaaagaattgctgctgacaaagcaaatcacccaaaaaagaaaactctcagagcaatttaaaaataggggttcatctatatkgcttagaaataatttcagaaaatctgtagtgaaaacaaattccaaagatgactgagatggttgttattcaatgaacacattttaaatcaaacacatgtcagacccctatggcatttcctgatggtgcctcattcatgtgagaatttaaattaaaatacattagagatgtttagccactttatcatttcatattacaatgcacattattccatgtatagctttgattctaaaatgcatgattttttttttgtttttaatgcatagagttctgttggatatgctctggaatagtttcctatttaaagtaatcctattggcaagaccttctaagtaaggaaccttttataatatgaataattaccctaaatttatcttgtttgttagtaattacttggctattggatttatttttaaaggg

SEQ ID NO: 313555 - DNA, 529 bp, Homo sapiens
catagtttttggagcaaaaaaatgacacaattttctggggtattgaaaataggaattcaaggagaaaatacagtttaagaaaaaaacaatgcaatatattamgggggatcttgtttttttccttttataaaattagctctgatatttagattccaccagatacatttaaaaaaaatctcagatgagttttgttttaaaatgtcaatatttacaatgtggtgcaaattaccttttgcaaacatttaccaccatgaaatagattagaggccaaattaaaaacgttgagggtatgtataggatttgaaaattacttttttattaataaaccatgaagtgtcctacatcacctttttttggtgttttgaaatgttataacaatacaatcagcagctaacatattgaatgtttctgtgtttgaggcagtcttttatctatattatctaatcttaacaaaatcctttcagactgtaaccatcaccacctttgcttacaatgaggaaaccgaggcacagactagtaaagtaattaa

SEQ ID NO: 313556 - DNA, 587 bp, Homo sapiens
ggctgaaaaaataatcatttactgggcatttcaaccatacctttggattgacaattggttgtctttttcttttttacttaatatagtaattcttaaaagaaatacaaatgattaaaaaccataccttgacaggtaaattttttggagggagttgtgagtaaaagtttatctgccatttctccaggaccagcacaacgagcaattccaggctccttatattccgacttcacccagtcggataaccactgcatgttacaatcacagtaaagagggttggctccaattgctctggaaaaacaacaccacagaagcacacacacatacacacacacacatacacacacacacacacacacaagtatggaagtattgttatttcctaagggcaaaagaattcaaagtgatgctcagcagaaaatccccatagatttattgaggataacaatttagcaaaaaaatagagacactggggattccccattttcctgaatgatgtgcaytgggatttagtgagttgtcactggtgtcaacactcatgttgctttagaaggtctcctaatattttcagagacgtgtttatattgagt

SEQ ID NO: 313557 - DNA, 633 bp, Homo sapiens
tgtggtaaaatatacataatataaaatttaacattttaactattttaagtgtgtaatccagtggcattaaatatatttagattgttgtacaaccatcacttccatccatctccagaactttttcatcttccccagtgagtctatgtatccattacataactccccatttctgccttctaccagctcctggtaaccactactctattttttgtctctatgaatttgactcttctgggtacctcatataagtagaattatacaatacttgatcttttgggtctgrattattcatgtagcatagtgtcttcaaagttcatctatgttaaagcaggtatgagaaattctttcctttttgaggctgatagtattccattgtatgttgtatatacatctcgcttttctattcatctgtatatggacttgggttccttccaccttttggctattcctgttttctgatataagttaaataaatattgtagtatattttatttttatggatatacttatttttaaattgattttatgtatgttgactaggaaaatacatacatttgggaaccaagtaaaaacacaaaagtatgaaataaaaataaatattgctgaaagttgtaaatattgtctccccttttt

SEQ ID NO: 313558 - DNA, 606 bp, Homo sapiens
gtaaatattgagtgtcaacttgattggattgaaggatgcwaaacgttgttcctgggtgtgtctgtgagggtgttggcaaaggagattaacatttgagtcagtggacaagggagaggcagacccaccctcaatctgggtgggcaccatctaatcagccttcagcataaaagtaggaatggaaagagcagactgggtgagtcttctggccatctcacagctggatgcttcctgcctttgaacattggactccaagttctaaagcctttggatgcttggtcctacaccagagattttccaggagcactcaggccttctgccacagaacgaagactgcactgtcggttttcctacttttgaagttttgggactcagactggcttgctcctcatcttgcagactgtctattgtaggacttcacgtggtgatcctgtgagtcagtactccttaataaattccccttcatttatacatctgatctattagtcctgtctctcttaagaaccctaatacaccttgcaactaagttatgggcatttggatgtcagaagaattgacgtgtgcaactttactaccgtattatttaaaggttctctacccccaccccaa

SEQ ID NO: 313559 - DNA, 606 bp, Homo sapiens
gtaaatattgagtgtcaacttgattggattgaaggatgctaaacgttgttcctgggtgtgtctgtgagggtgttggcaaaggagattaacatttgagtcagtggacaagggagaggcagacccaccctcartctgggtgggcaccatctaatcagccttcagcataaaagtaggaatggaaagagcagactgggtgagtcttctggccatctcacagctggatgcttcctgcctttgaacattggactccaagttctaaagcctttggatgcttggtcctacaccagagattttccaggagcactcaggccttctgccacagaacgaagactgcactgtcggttttcctacttttgaagttttgggactcagactggcttgctcctcatcttgcagactgtctattgtaggacttcacgtggtgatcctgtgagtcagtactccttaataaattccccttcatttatacatctgatctattagtcctgtctctcttaagaaccctaatacaccttgcaactaagttatgggcatttggatgtcagaagaattgacgtgtgcaactttactaccgtattatttaaaggttctctacccccaccccaa

SEQ ID NO: 313560 - DNA, 606 bp, Homo sapiens
gtaaatattgagtgtcaacttgattggattgaaggatgctaaacgttgttcctgggtgtgtctgtgagggtgttggcaaaggagattaacatttgagtcagtggacaagggagaggcagacccaccctcaatctgggtgggcaccatctaatcagccttcagcataaaagyaggaatggaaagagcagactgggtgagtcttctggccatctcacagctggatgcttcctgcctttgaacattggactccaagttctaaagcctttggatgcttggtcctacaccagagattttccaggagcactcaggccttctgccacagaacgaagactgcactgtcggttttcctacttttgaagttttgggactcagactggcttgctcctcatcttgcagactgtctattgtaggacttcacgtggtgatcctgtgagtcagtactccttaataaattccccttcatttatacatctgatctattagtcctgtctctcttaagaaccctaatacaccttgcaactaagttatgggcatttggatgtcagaagaattgacgtgtgcaactttactaccgtattatttaaaggttctctacccccaccccaa

SEQ ID NO: 313561 - DNA, 606 bp, Homo sapiens
gtaaatattgagtgtcaacttgattggattgaaggatgctaaacgttgttcctgggtgtgtctgtgagggtgttggcaaaggagattaacatttgagtcagtggacaagggagaggcagacccaccctcaatctgggtgggcaccatctaatcagccttcagcataaaagtaggaatggaaagagcagactgggtgagtcttctggccatctcacagctggatgcttcctgcctttgaacattggactccaagttctaaagcctttggatgcttggtcctacaccagagattttccaggagcactcaggccttctgccacagaacgaagactgcactgtcggttttcctacttttgaagttttgggactcagactggcttgctcctcatcttgcagactgtctattgtaggacttcacgtggtgatcctgtgagtcagtactccttaataaattccccttcatttatacatctgatctattagtcctgtctctcttaagaaccctaatacaccttgcaactaagttatgggcatttggatgtcagaagaattgacgtgtgcaactttamtaccgtattatttaaaggttctctacccccaccccaa

SEQ ID NO: 313562 - DNA, 616 bp, Homo sapiens
atgtgtctccccaaaattcatatgtcgaaatcctaatgtacaatgtaatagtaatttgagatgggcctttgggaggaatttgatcatgagaggagattccttatgatgagataagtgcccttatttttttaaaaaggacagaaaacagcttgcttcttcttctctgcctctctctctctgtttctctctctctctctgtttctctctctctgtttctctctctctctctgtctctctctctctctctgtttctctctctctctcactctctctcattctctctctgtcccacatgagaagacagtgggaagatagccayctatggagtggaggagtaccctcaccaaaactgatctcagatgagactggaaccctgatctcaaactgccatcatccagagctatgagaaatgtttgctgtcgaagtcacctcgtctagggtaatgtgttataacaacccaagctgatgaagaaagccactgtctgattagatgggtctctcctaaggaattggtttcttgttaggtaatgtaccctggtatcaagatttggaaaacagtgtaaatattaattcaaagtaattatttgagctgtgctggtaactagacctactagag

SEQ ID NO: 313563 - DNA, 576 bp, Homo sapiens
agaaatgttgaggatttcagaccattagggtatattcggccactgagagtcaggagaaattgaggagccaacaaattatgtcttcacrtttactcactctctcccccacaggatcactgtggagaaggtgttttcattggcctctgcacaggcaccctgcatcactcattagtcagtcgagcttcctggggccagctcagtagcatgccaacttgtatgtgattttcttcccctcaaccttaatgacctggtactgcacccattcctaaagtattagcacacaagctttcctttaggctctgttggttaggggctctttgactcattaccccttctaccccagctcacatacactgttgccctgccaaataacatgtttatttcagtgatgtcagcaggaacagacattcatgtccaactgtgttgattccttcttttagtctatcttggaagtagcgaagaatttctgctctggggcctctctttcaactgaggacacacatcaagacacagctgttgcaccagaagctgtaattctgcaggcctgccaactggcacattccatcatataacaag

SEQ ID NO: 313564 - DNA, 576 bp, Homo sapiens
agaaatgttgaggatttcagaccattagggtatattcggccactgagagtcaggagaaattgaggagccaacaaattatgtcttcacatttactcactctctcccccacaggatcactgtggagaaggtgttttcattggcctctgcacaggcaccctgcatcactcattagtcagtcgagcttcctggggccagctcagtagcatgccaacttgtatgtgattttcttcccctcaaccttaatgacctggtactgcacccattcctaaagtattagcacacaagctttcctttaggctctgttggttaggggctctttgactcattaccccttctaccccagctcacatacactgttgccctgccaaatarcatgtttatttcagtgatgtcagcaggaacagacattcatgtccaactgtgttgattccttcttttagtctatcttggaagtagcgaagaatttctgctctggggcctctctttcaactgaggacacacatcaagacacagctgttgcaccagaagctgtaattctgcaggcctgccaactggcacattccatcatataacaag

SEQ ID NO: 313565 - DNA, 638 bp, Homo sapiens
attttgtcttgaagaatgttcaaaaataaaaggctgcaatgatatacttgcacctatttatccattcattcattagtactactataggaggacataggaaaaaatattcgatcaaaaataagtaaatgataaaaaatgtcagctggtgacagtttctatggaaaaaaattgagatggagtaacatgacattgaataggtgaatgtatactttatattaggtagacaaatagaattcctagatgatgacgaccaaactgaatctgaagaacatcagggagttagtcaatgacaatcatggaaagcaccctccataaggaggaaaccatgtccaagggttagaataagctcggtttattcaagaagcaacaaggacagtctggraggaggagaactggaaggcagcacagtggaagtgctttttcaaaacattcctgaaaaattggaagtatctgcagatttctcaccataatgcagttaaaaatcaaccaaccaaccaaccaccatcaacaacagtaacaaaaacaagatatgtccaagattcaaactaatcagctggattcaaaactataaagcacagaagcaaaaaagaaaaaaataaagaaattatttggtgaaaaagatttggaatccatacaat

SEQ ID NO: 313566 - DNA, 617 bp, Homo sapiens
aacttaattttacatccaatagggaaacatacaatttaaacttttttacagtaattttaaagataaatatataaacgggctttggcactaattatttaaatgaaatagctgttctctgaatctaactgcattgaacattttcaaagccacagtatatattttaatttactgcatgtaaaattcacccagtcaaaaaataaaatcctcagttctcttactcaggcagctcatgctataggagagtcacagaagttaaaataagtataacggtttcacaaaagatgtagggtatagaataaaagaaaagccttacagatgggaactgaaatatgaaaaggagtttctaggtggaaaaggaaataaatgaaggtcaaaacaaaagaataaaatatgcaaaggcctggaatcataaaacagtatagatcattctggaaaggcaagaaagagagaggtggagacagcgatagaatagagacagagatggagatgaagatggagatgggagtasaggtggaggtagaaggagagggagtggtagagctagagatagagatataaatggaaatgaagatggggtagatagaggaagaggtagaggtagggatagagatggagat

SEQ ID NO: 313567 - DNA, 546 bp, Homo sapiens
atagaggaagaggtagaggtagggatagagatggagatggagacagagatagaaatagagraataggtagagacagagttagatagaggaaaagtagaggtagattgagaaagaggtagaggtagagaaagaaatagcattagcaatagagatggagatagaaacagacatgcagatggagagagagatagaggtagaggttgaggtacaggtagaggtagaaaaaggaagaggaacagatagagatagagacgacagagattgaggtagaggtagagacaagtagaggtagagtagagacagatagaggtagaggtagggatagggatagggatagagatggagatagacgtagagactgaagtagaatagagataggtagaggtagagtaggggcagaggaagaggtagaggtagggatagagatagagataagagataaaaatatatagagatagagatagaagtcgagattgaggtagaggtagacagaaatagagacagagttagagataaaggtaaggatagacagtaagagaaaaaaag

SEQ ID NO: 313568 - DNA, 546 bp, Homo sapiens
atagaggaagaggtagaggtagggatagagatggagatggagacagagatagaaatagagaaataggtagagacagagttagatagaggaaaagtagaggtagattgagaaagaggtagaggtagagaaagaaatagcattagcaatagagatggagatagaaacagacatgcagatggagagagagatagaggtagaggttgaggtacaggtagaggtagaaaaaggaagaggaacagatagagatagagacgacagagattgaggtagaggtagagacaagtagaggtagagtagagacagatagaggtagaggtagggatagggatagggatagagatggagatagacgtagagactgaagtagaatagagataggtagaggtagagtaggggcagaggaagasgtagaggtagggatagagatagagataagagataaaaatatatagagatagagatagaagtcgagattgaggtagaggtagacagaaatagagacagagttagagataaaggtaaggatagacagtaagagaaaaaaag

SEQ ID NO: 313569 - DNA, 546 bp, Homo sapiens
atagaggaagaggtagaggtagggatagagatggagatggagacagagatagaaatagagaaataggtagagacagagttagatagaggaaaagtagaggtagattgagaaagaggtagaggtagagaaagaaatagcattagcaatagagatggagatagaaacagacatgcagatggagagagagatagaggtagaggttgaggtacaggtagaggtagaaaaaggaagaggaacagatagagatagagacgacagagattgaggtagaggtagagacaagtagaggtagagtagagacagatagaggtagaggtagggatagggatagggatagagatggagatagacgtagagactgaagtagaatagagataggtagaggtagagtaggggcagaggaagaggtagaggtagggatagagatagagataagagataaaaatatatagagatagagatagaagtcgagattgaggtagargtagacagaaatagagacagagttagagataaaggtaaggatagacagtaagagaaaaaaag

SEQ ID NO: 313570 - DNA, 501 bp, Homo sapiens
ctgtgatgattaattgtaggtgtcaacttgactgtgttgagggatcccaaatgactggtaaataattatttctggttgtgtctgtgagggtgtttctagaggggatttgcatttgagtttgtggacttaatggggaagattcaccctcaatgtaggtggcaccatccaattggtaaggggcatggatgttaaaaaacaaaaaatgcaggggaaggagaaattatttctctccagagcctgaacactcttctgcctttagaaatcagaacttcaagttctctgacttttggaccccaggcctggcaccagtggtccccggggctcttgggccattgstttcaaactaagagttctcaagccttccatcttggactaagccatactaacggcttccctggtactacagcttgcagactgcctattatggaatttcttagcttccataattatatgagtaaattctcagtctctgtaattgtgtgattcaatttctccctaata

SEQ ID NO: 313571 - DNA, 582 bp, Homo sapiens
tgtgatgaatgtgagtgcttgtgtcttttaggtagaacaatttgttttcttttggacatatatccagtaatgagattgctgrgtcaaatggtagttctactttaagctctttgagaaatctctaaactgcttttcacagtggctgagctaatttacattctcaccaacagcatatgcctctcctgttctctgcagacttgccagcatctgtcggttttttatgttaataacagccattctgactggagcgaaatggtatcacattgtggttttgattggattttccatgatgattagtgatgtggagcattttttaaagtttattggccatttgtatatcttcttttgagaagtgtcttttcatgttctttgcccgtttttaatggagtagtttgatttttgcttcttcaattgtttaagttctttataaattttggatattagactgttgttggatgaagagtttttgaatattttctcccattctgtaggttgcctgtttattctgttgatagtttttttttgctgtgcagaagcttttttgtttgattacatctcacttgttgatttttgtttttattg

SEQ ID NO: 313572 - DNA, 582 bp, Homo sapiens
tgtgatgaatgtgagtgcttgtgtcttttaggtagaacaatttgttttcttttggacatatatccagtaatgagattgctgagtcaaatggtagttctactttaagctctttgagaaatctctaaactgcttttcacastggctgagctaatttacattctcaccaacagcatatgcctctcctgttctctgcagacttgccagcatctgtcggttttttatgttaataacagccattctgactggagcgaaatggtatcacattgtggttttgattggattttccatgatgattagtgatgtggagcattttttaaagtttattggccatttgtatatcttcttttgagaagtgtcttttcatgttctttgcccgtttttaatggagtagtttgatttttgcttcttcaattgtttaagttctttataaattttggatattagactgttgttggatgaagagtttttgaatattttctcccattctgtaggttgcctgtttattctgttgatagtttttttttgctgtgcagaagcttttttgtttgattacatctcacttgttgatttttgtttttattg

SEQ ID NO: 313573 - DNA, 582 bp, Homo sapiens
tgtgatgaatgtgagtgcttgtgtcttttaggtagaacaatttgttttcttttggacatatatccagtaatgagattgctgagtcaaatggtagttctactttaagctctttgagaaatctctaaactgcttttcacagtggctgagctaatttacattctcaccaacagcatatgcctctcctgttctctgcagacttgccagcatctgtcggttttttatgttaataacagccattctgactggagcgaaatggtatcacattgtggttttgattggattttccatgatgattagtgatgtggagcattttttaaagtttattggccatttgtatatcttcttttgagaagtgtcttttcatgttctttgcccgtttttaatggagtagtttgatttttgcttcttcaattgtttaagttctttataaattttggatattagactgttgttggatgmagagtttttgaatattttctcccattctgtaggttgcctgtttattctgttgatagtttttttttgctgtgcagaagcttttttgtttgattacatctcacttgttgatttttgtttttattg

SEQ ID NO: 313574 - DNA, 540 bp, Homo sapiens
attcagatcagacaggtacctcttttcatctgtcggaatgaactttagatacataaagatgtccttacctcagataaatactaaccaacatttgcttttaatccaaacaattccttgctattttattttgaattgttattcttacaatttacttgctacagaggaaaactctaacattctcgcctacctgatcaattttactgcatcatttgctaataaaaaattcttcttatttgaagtttttatgtaagcaagaatcaatttaacggctatttactctgtttcaatgatcagtctatgattcagtgacacagttttcattgttgtaactttaaaatatgctttcatatttaattttgccattcaaataacatttattatacaaaaccatagcatarcaactattaagtttcactcttacttaaaaaaattatcaacttattcactttttaattatttcatatgagcttcatattttaaaagtctgaatttaattttgaattatattaagtctattttggacagtgtttttttatatta

SEQ ID NO: 313575 - DNA, 513 bp, Homo sapiens
taaatttcttaggaaatgtatcactccctacttcctaaatttccaatgacttcgttaaagcaaattggagataataaagaattgcactcaattttgtttcttgtagaaagaggtgccaaaaggcagatgattcccttggaactggctattttcacatggaatgtaacaactgtgaacaratatgttcacatatcaaccttaacttttccaagttcaaaaaagttactgaacttcctgatgatttgatccagaaaaatctttctgtacagttcagctacagcctgaaagtgtccacagcaaagaaatttggaagaaatgagcatggttgctattttaactgccatttaacattggcagtatttaacattaaagacactaaatatgattaagaattatcagtccagaatacagagtataaatgtctgtaaaatgtttttagatattttcaacagattatatacttatttacatattcagcattatacagatcatttagttttactgtaaatgtgg

SEQ ID NO: 313576 - DNA, 545 bp, Homo sapiens
tggtataattaaaaatgtaaaacagaccagcaaaatttttggcaattctttcagccatgtaatctaaaaatctctaagagattaaccttttaaggtaaaattcatggcttctaaagtagtcctaagaacatggttattggccatagccatttgcaaacaggcttttgaaattccttcacgactgtacattgctttcagtgaccttaaccaataatggccatcatgactatagaatgcaaggttcataggcttacattttctcctggcattattctgatctttggcttactactccattgcaagatattggggatataaaataaagcatgttacaatttcctttaggtacatttatagttgtgtttttaagctttgcatgtgtatcttggaggagaaaaagagaactagtccactcacaccgttgttgaaaatgaaattcctttcagtctagagtgtttctccagatgataattaacttrcaggtgtgcaccaccacaaaattcacaaacacttggttaaataaatatatagtgatattaaagctt

SEQ ID NO: 313577 - DNA, 498 bp, Homo sapiens
gcttatacaaaaaaataataaaataccagggacacagctagccagtgaggtgaaaaatctctacaatgagaatcacaaaacattgctcaaaaaaatcagagaaggcacaaataaaaaaaaaaatcccatgctcatggataggaagaatcaatatcactaaaatktctgtactttccaaagtaatttagagatttatgttattgctatcaaactaccaagaacattcttcacagaactaggaaaaactattttaaaatatatatgagaccaaaagccaattgcctgaatagccaaggcaatgctaagcaaaaagaacaaagctggaggcatcatgttacctgacttcaaacaatactacaaggctacagaatggtatggtactggtacaaaaatggacacatggaccaatggaactgaatagagagtgcataaataaggctgcatatctctgaccgttcgatcttcaacaaagctgaaaaaaacaagaaatgaggaaaa

SEQ ID NO: 313578 - DNA, 574 bp, Homo sapiens
cattttagtgatgactgtcaattattaaaatgcaatttgtagattacacatgaaggaatactaagaaggaaaaatatgtttttgagtatttctcagttagaaccattacatagatagattttctgttttctctccactagaatgtcaactccctggtcgaaaggaagatatttcattcatatttactattctattctcaaacactaggacctgatctattctaggtgctaaatamatcattgctgaataaataataatgtgaataataaataaaatgtgactgcgtctgttttctactttgcttttgacagttgctcagggtgaggtcttatttgtatccacttccatgaaacacaatgacatttgtagaaaactccacataactgttgcttggtttattatacctaacagcactacagttagtatccttgtgatactcctcttttcagtgaatgtgaacagaaaaaagaagaaagaggaatagcagataattgtgatatttaaaacagatgcttttgtagtgaaattgtttaaggattcatgtgtggttctcattgaggaacagagtcccaaa

SEQ ID NO: 313579 - DNA, 574 bp, Homo sapiens
cattttagtgatgactgtcaattattaaaatgcaatttgtagattacacatgaaggaatactaagaaggaaaaatatgtttttgagtatttctcagttagaaccattacatagatagattttctgttttctctccactagaatgtcaactccctggtcgaaaggaagatatttcattcatatttactattctattctcaaacactaggacctgatctattctaggtgctaaataaatcattgctgaataaataataatgtgaataataaataaaatgtgactgcgtctgttttctactttgcttttgacagttgctcagggtgaggtcttatttgtatccacttccatgaaacacaatgacatttgtagaaaactccacataactgttgcttggtttattatacctaacagcactacagttagtatccttgtgatactcctcttttcagtgaatgtgaacagaaaaaagaagaaagaggaatagcagatawttgtgatatttaaaacagatgcttttgtagtgaaattgtttaaggattcatgtgtggttctcattgaggaacagagtcccaaa

SEQ ID NO: 313580 - DNA, 521 bp, Homo sapiens
accacaaacttactttgacctgagggtaagacttcttgttcttttcactagaggcaccaggtagtccaccatgggatgggccttcacatacataacggaaacgaaatcctctctgcaaaggtgaacgttaagccaattaagtttgagaaatacttattaaaaattacggcaacaaaggtacatacaaatttttaaatcttatgtctactaaatgagagaagaaaaacatgaaactgaaagagggctcygtaaacaagaatcacttttcccgtaatcttactacgaaaaatggtattaatcgatatttgtacactaagatatggctaaaaagccaggtacctaagcccatggaacctctcatgctatgcatgtgtggagagtaatctgctgaagagtttaggctttagacttaacatgttacggcttgttctagtcagagcttccttgtcttaaattgctgctgccaagctctgaactgtaccatattaataaaagttatgcttccttgactcttacttaaa

SEQ ID NO: 313581 - DNA, 521 bp, Homo sapiens
accacaaacttactttgacctgagggtaagacttcttgttcttttcactagaggcaccaggtagtccaccatgggatgggccttcacatacataacggaaacgaaatcctctctgcaaaggtgaacgttaagccaattaagtttgagaaatacttattaaaaattacggcaacaaaggtacatacaaatttttaaatcttatgtctactaaatgagagaagaaaaacatgaaactgaaagagggctctgtaaacaagaatcacttttcccgtaatcttactacgaaaaatggtattaatygatatttgtacactaagatatggctaaaaagccaggtacctaagcccatggaacctctcatgctatgcatgtgtggagagtaatctgctgaagagtttaggctttagacttaacatgttacggcttgttctagtcagagcttccttgtcttaaattgctgctgccaagctctgaactgtaccatattaataaaagttatgcttccttgactcttacttaaa

SEQ ID NO: 313582 - DNA, 557 bp, Homo sapiens
ttctttttatcgccctctgaacttcaacgatttacagtcttagttccttaagtgtattgttttctaacccttcataaaccttgtgatggtcccagaactgtctcaaagttttatacaaggttgagaagctcaaaagggactgatcagtactctgcataacacaaggggaggactgctatagtgtaccaggctctgtcctctagtgcaggcgtccccaaaccctgggcyatggataacgcagcacaaaaagaggtgagcagtaggcaagccagccaagcttcatctgtatatacagctgctccccatcgcttgcattactgcctgagctccgtgtcctgtcagatcagcagtggcattagattctcataggagcataaaccctattgtgaactgtgcatgcaagggatctagattgcccgctccttatgagaatctaacgcctgatgatcactgtcactgtctccagatgggtcactgtctcccgtcactcccagatgggactgtctagttgtgggaaaagcagctcaggtctcctactgattctacattatggtgag

SEQ ID NO: 313583 - DNA, 554 bp, Homo sapiens
aaaaccttaatgaaaatctgtcaattgcaggcacccaactgccaaattaaacatgatcttccccttcaatatcctccccatgatttatacaccaattcttgccaaaggatcacagtttyaaaagcctaacagcagtccaaggctcacgtgggtgatagttaaaatttgaacttttatagcctttgcaatacagttcactgtaaagagctgaggtaacagtaacgctatggtgatgtcaatgttaattcacaatttaaaaatgaaatgtcaaaagaaaccaagaatcatttggaaaggatgaatcactaagtaatatttgcattaattataaaagcaggttttatttctaaaatgttgaaataccaactaagcgtctggaactaaaggattagaaaagaccagggaaaaccccttctacctccctgttcccccagcccttcccctcactttcccttgttcaattctttgcttttgaggaaggaccttgaagccaaaagggcgatagtaaatttccaggggagaagatgggactaatctctgcatctcttttccca

SEQ ID NO: 313584 - DNA, 585 bp, Homo sapiens
acttcagacaaacagcagtagggcaccagctgagtagctacaaacagtaccagtcaagtagccaaaagacctcagagattagccaaagcaggccaggccagatgaactaggcagcccacagaattggaagaagtaatcagtatcttttaatttgctttgtggtgattctccttttttttaatgcaacaaaagcaaactaattcaacagtttaggaagtaggaaggcaaataggcaaaaacaatgcaatataatatgtgtcatgggaaatggagtatatgtggggtatgggttaattatcttggtaattcagtgatcacactttgttagagttctagtcaaagcccactttgtactcatttttttactctattagtttactcaattcccaactgaacaaaagaggcaagtatagtagccaaaacactgtggtgtatacataaaattaaaactgttaaaactttcagagtgcaaatattaataaatcactgttagctttaarcagtgatacctttaaaacaagttaatgttttaaatcccttcacctctctatctaaaagcaatttcatcattcctgctgcaatgag

SEQ ID NO: 313585 - DNA, 614 bp, Homo sapiens
gaattttataagcatgatatttacaactagaagacatttgaaatagacaaatgaaataataaagcttcgtagtacattagcatagcattgtattttgattttacagtagcaatttcataaaaatgtatcggtatagaattctgagtttggaactttctccaggacacggtgttttttagtacactgtgtctaaacattgggtataaagaaaagcataaggaatgtgtttaatgagtagcattactgcaaaaaaaaaaaaaatgtagtcctacaccaacatgtggttcttcgtatcctgcagtttgccattgtcttcaaaactccaaagtataaagatattaatattacaaaaccagcctctgtgtttgtccagcttcggaggaaatctgacttggaaactagtgaaccaaaacctttcctctactatcctgaaatcaaaggtaagtcagttgtttaaaatcttatgctcatattttattttattttatttttggtttttgttttgttttgttttgttttgagacagagtctgactctgttgcccaggctggagtgcartggtgcaatcatagctcactgcaacttcgaactcctggcctcaaacagttctcctg

SEQ ID NO: 313586 - DNA, 633 bp, Homo sapiens
agttagtcacctcctttgaacagctttctagtaacaggtccctggatccatggygcttatttttagaagagacagtagtatattattttgaggtcatggaattagtctagctttttaaaataatgttatttccaccaagcttatatgagatttagacattgagaatttgtctttgaatttgagaatctaacatttattgactaactcagagttcaagcagctgagatgaaaaaatcaggcttgctgtttaggagaatcagccagttagtcaaccagcctcaggcggtggaacagaaaacttggccaacatgcactgtgaaactatgaaaatgagtaaggcatcattctttctctcacaaaagatgctttaagaaagggcactcataggtttcttaaatagttataatgtaaattatgattttaataagtaccgaaagtgaagcatccataaaaatataagagaatgttgaagagagagcccttggtccctttattctaaagcagcctccaaaaagaaggcttcgtcaaggagatatcatttggccctcagcatttggggtatatttcagcagttgggtgttaaacagagaaggagagggttctctaggtttaagttacttgaggagcttaaag

SEQ ID NO: 313587 - DNA, 603 bp, Homo sapiens
tcatatgtctgcagtgaacagtaatgagtatagctgtaaattagttatgatataacygatggggaaattataaatctgaatctaaaacatatttgataagtaagtcaaagtttctccacttaaaggtcatccccttctagtggaagcatatttttctcaaaatttggcaaccttggttttttttttttcctgggaagtctggagatgctcagcttttaaacaactattaaagtgtactttgttaccctgctttcccctgcttcatctttcaactgcagttagatgatcatgagataatcagtaaacagagaccttctatctagccctaagatgactgaaacaaccacagaattagaaataatcgaagttctttctgaacataagcatgacaaaactgacattgaagaatcagaaatagaataattgttaagggttcagcactaatcaaaaaaaagaatacctcattgactgtatttaatttgaaaaaacgaaataaaacctccttaactgctccagcccaaaaaaagagaagaaaggtatatgatagaaaaagaagagaaagaaaaggaaacagaaaggagaaacaagaacacagtaacacca

SEQ ID NO: 313588 - DNA, 585 bp, Homo sapiens
atatatttgttccatcccaatagcccccagaattttaacttgttccagtaccaactcaaaagtctaaaactcggtctcatcttaatatcaactaaatcggatatggctgagactcaaggtatgatttatcctgaggcaagttactctccagctgtgaaatcaaacatgttatatacttccaaaatacaatgatgggacaggcataggatagacatttccatttcaaaaggaaggattttttttaaaaaggggatagcaggttccaaccaaatccaaaacccaatagggcaaacgttaagccttaagactccagaataatcttctttgacttgatatctcatcttccagacacacaggggtagaggctgggcctcacaggtctgaacagccctgccctcatggctttgccgggtgcagcccatgctgtagttgtcattgtttggagttgcttgctggtggctctatttttggggggtctcagaagagactctgcctctrtggctcctctagacattgctctagtgaggactctctgcagtggctctgaggctctctgggtaatcctttgaaatctaggtggaggta

SEQ ID NO: 313589 - DNA, 473 bp, Homo sapiens
acctttgcagcagttctagccaagtgcatgcatacaggccttgaggtggagctgcacagttgactgtaggggagtctgtcctttgttgacgagtgaaacttctctccctgcaaaccctctggggaataatgccaactctgatcagcttttcgactcttggatgaaatattgggttgggaaaaagtccctactaagaaaattgtaccaaaaccctgcttcaataaaatatgaatccatttaatgaagtttatmgtagaagtaggctagtcgaaaaggattctgtctctttccaagtattattggcaggtttagggtcttcctcaagtttatatcattaggacttccatcaaagagttatctttaggtgtgattcccatcctccctccctctctccctccctccctccgtcccatcgttccttcctccctttcctccttccttttctacctttctttttctctctgtctctcttt

SEQ ID NO: 313590 - DNA, 580 bp, Homo sapiens
ttgcccgggctggccttgaactcatggcctcaagggagcttcccacctaagcctcctaaagtgctaggattactggcatgagcactgtgcctggcctcttttctgtatttcttaccatctttactacactacatgcattttcaaattcttctttaaagtataatatatataatattttttcatatcttcaaaaaaatatcctctatctgatcacttctcaccaccttcactgctactcccttggtttccagccaccatcatctgtctcctaagcttttgctcctgtgtttcctctgcttgtcctgtctccccatggcttattttcctgagtgatcctgttcaagccatgtcatgccatgccatgtcttatcactccttcactcaaaatcctcccaaagtgaaagctgttaaagctgagtgattagtgcaagggggctcattatactattctgtgtttgtataygattacatttttctatgttaaaaagttaaaacaaaaacctttaatatttctctatattaaaagacaaaatcgttataatggcttacaaggccctaggctatctgaccatctcatgtc

SEQ ID NO: 313591 - DNA, 559 bp, Homo sapiens
aacattttatctagtattcgtttgtcaaaacttaatagaatgcaatcaacactgttaaaactgtcacaattcttaaataggaataaaacacctattacactataataggratactatgagagtagatgctttagcacttacactgttcacttgtttctcagtgattactaaatgaaactgatatacatatgtttaatttttatatagttgaagacacaaaccaaataatattacttctctcccctaaaaaatcaattttttatggtttaagccaggcccaaattataggatctttattttatcccctaacttacaggatctttcttttgtcgtcagctcaaattaaaaaacaaagtaaaaaaaactcacatatgttggagtataccttctacaaaaaaagagaaaaaagcaataattctggcttctaggcctataatttaatgcactgttagcatttaagaaagaagacaattgctggctacatctgaaaatatccagagttttaattcaagttacacagactttgaaaaaacatactcttcccctccacccaaaaacc

SEQ ID NO: 313592 - DNA, 559 bp, Homo sapiens
aacattttatctagtattcgtttgtcaaaacttaatagaatgcaatcaacactgttaaaactgtcacaattcttaaataggaataaaacacctattacactataataggaatactatgagagtagatgctttagcacttacactgttcacttgtttctcagtgattactaaatgaaactgatatacatatgtttaatttttatatagttgaagacacaaaccaaataatrttacttctctcccctaaaaaatcaattttttatggtttaagccaggcccaaattataggatctttattttatcccctaacttacaggatctttcttttgtcgtcagctcaaattaaaaaacaaagtaaaaaaaactcacatatgttggagtataccttctacaaaaaaagagaaaaaagcaataattctggcttctaggcctataatttaatgcactgttagcatttaagaaagaagacaattgctggctacatctgaaaatatccagagttttaattcaagttacacagactttgaaaaaacatactcttcccctccacccaaaaacc

SEQ ID NO: 313593 - DNA, 576 bp, Homo sapiens
gccaagttaagtaacactgcaagtcgcaaaactaggaaccaacatcatgcccagccctgaaccaaatgacttcagagccaatgctttaaaacctaaaagtgtggtccacaaccacctaaacctcaccccagacctagaaactgtaaatgtagagccagaaatctgcagttgtaatacytctttctaggacttcaactagacacctcttactccttcttttgtacctgccagctcatcctttctttcaaattatccatgttaactatgttgaatcattttcagtgtcgcacatttaattttaaaaattcgacttggttttattttcattctgcctggtctgttttctattccaaacttattttgtatttatatatcaaacaattggtaattcaattatctgaagattctgaggatttaattctgcttttcattgttctgccagttcttaaacagagtggcttatttgcatacatattttctaatttttgatcaggagctcatgattctttgagccacatacatttttatgcttttctgcaaggctctgagggtatccccaatgtggaacaacttcat

SEQ ID NO: 313594 - DNA, 606 bp, Homo sapiens
acaggcgtgagccactgtgcccggccaacaatttattaattttataagccaacatcttgactagtctctcagcaggtatagattttgcagttcctcaaacttcctatttagatctcccttttcccactatttaattttcatcaagataaatttttatagttattatcttataatggtaaaattaagaaagccraggtgaaagtggtcaaatgaaggtgattcccaaatttaccttgagctggacatagaaatgaagtcaaataacaattttctttaatgtataaaaatacaaaaagtcacagacaagagttgtctcgttagccttgcttaaaaccatcctttttctactgaaaatgctcccatatccaaatttctgtcttaaggatctacttcacattaggactagaatcattataccttaaaacaaagatttgatatggttcattcttcattaaattaagctaaagaaaaaaaatccagattaatttgtttacttcactttatcaaacaataaaatttttattgctcaagggtttttttccccgctactgtcttgaaagtatagtactaaattttctgctactgtcagaaaacatagtacattta

SEQ ID NO: 313595 - DNA, 606 bp, Homo sapiens
acaggcgtgagccactgtgcccggccaacaatttattaattttataagccaacatcttgactagtctctcagcaggtatagattttgcagttcctcaaacttcctatttagatctcccttttcccactatttaattttcatcaagataaatttttatagttattatcttataatggtaaaattaagaaagccgaggtgaaagtggtcaaatgaaggtgattcccaaatttaccttgagctggacatagaaatgaagtcaaataacaattttctttaatgtataaaaatacaaaaagtcacagacaagagttgtctcgttagccttgcttaaaaccatcctttttctactgaaaatgctcccatatccaaatttctgtcttaaggatctacttcacattaggactagaatcattataccttaaaacaaagatttgatayggttcattcttcattaaattaagctaaagaaaaaaaatccagattaatttgtttacttcactttatcaaacaataaaatttttattgctcaagggtttttttccccgctactgtcttgaaagtatagtactaaattttctgctactgtcagaaaacatagtacattta

SEQ ID NO: 313596 - DNA, 611 bp, Homo sapiens
atcttgcaggtttgtactatttgatcaaattattgctgtatttaattctctctacctttacagttgtgccatttctttcctgatgggcttcctaatcaataaagtaatttttaccagaagcagcctgagggaggaaacagccatcaaaatggaattctggggtttggytgcacatgtcttcaatgatcacattgaggttatactggtagtctgtggcacagcctcgtatcatggttgttcagtttatgggctgcagcatatggtcactgtggtgacaatggtgattatgattgtagggtgagttggttgctctgattgcccttgagaaagcaggctaagaaaagtttctattgaaagtaataaattcaaaattaaaggcacaaatggaaaatcaggaaaaccatgtcagctttaaaggaacatattattgtctgtaacggcaaattacttgtgaatgacaatcaggttcacatattaattaattaaaagagttacagagtattggcatcaatttaattttcaatgactcttatgctaaagaaagaaacatccttgctaatgaaagcagtacctcctgcccttaaaaaatttttttaaaaagatacactgat

SEQ ID NO: 313597 - DNA, 611 bp, Homo sapiens
atcttgcaggtttgtactatttgatcaaattattgctgtatttaattctctctacctttacagttgtgccatttctttcctgatgggcttcctaatcaataaagtaatttttaccagaagcagcctgagggaggaaacagccatcaaaatggaattctggggtttggttgcacatgtcttcaatgatcacattgaggttatactggtagtctgtggcacagcctcgtatcatggttgttcagtttatgggctgcagcatatggtcactgtggtgacaatggtgattatgattgtagggtgagttggttgctctgattgcccttgagaaagcaggctaagaaaagtttctattgaaagtaataaattcaaaattaaaggcacaaatggaaaatcaggaaaaccatgtcagctttaaaggaacatattattgtctgtaacggcaaattacttgtgaatgacaatcaggttcacatattaattaattaaaagagttacagagtattggcatcaatttaattttcaatgactcttatgctaaagaaagaaacatccttgctaatgaaagcagtacctcctgcccttaaaaawtttttttaaaaagatacactgat

SEQ ID NO: 313598 - DNA, 453 bp, Homo sapiens
tcaacgagtagttaaagaaactgtggtgtgtgcatatatatatatawatatatatatataccatcatatatatatatatatatatatgatggaatactactcagccataacaagaatgaattaaaggcatttgcagcaacctggatgggattggagacttattctaagtgaagttactcaggaatggaaaaccaaacgttgtatgttctcactcataagtgggagctaagctatgaggatgcaaagtcataaagcaacataatggactttggggactcaaggggaaagtgtgggaagaggatgaaggataaaagactacaaattggattcagtgtatactgctctggtgatgggtgcaccaaaatctcacaaatcatcactaaaaagttattcatgtaactaaatgccacctgtttcccaaaaaatctatggaaatataaaataaataataat

SEQ ID NO: 313599 - DNA, 535 bp, Homo sapiens
taattgtgatattttagcacaaatataccctgataattctttgccatatttgtactaaattcaaaatgtttcctaatgactataatgctgtttctgtgaaatagggttatatattttcttctaatattcctcaaagacagtatgtcagtcaaccaccttagaacattcacacttctatctatgagattctcagccttcttttccccaaatttacagtaacagtgtaactgctagctacagtttctatatgagtgtgtgtcttcacaagcactctggacatgaaatgcttttgtacatgtataactgacagcacataagacagaaaaaagactttacttgaactttttaaaaagtagatattgttgactctggacaccagaatcttaatttcaaattgctyaatcgttggttgagtctcaagttcaatcaagttgagctttgggaaggaatgacttattaagaagtaagaagttcagcataatacgactattttttctgaaactaattttcagaaaaatatgattgaaaaaggcaa

SEQ ID NO: 313600 - DNA, 574 bp, Homo sapiens
ttgctttactgtgaagaatacaaatttctaayagaaattttaggtattctttgttttgcttctcttcaagggttaaagataaaatgtcctcatctccttcttccgcacttgggattctaagcattgctgttactagtttctttatattattttcttttcctgttgagaagtttggtcattttttttttttctgtttccatgttctgatttcatcttcactcaactcttttattcattttctatgtctactatgtggattgtctaaatgattggtaagagcgcatcgtgtggatgttgcattatctcaaagaactgccctataaatacaaggtctacagatcatagagttctcaaagtgttcggcatataatttataatgtttatttagttgattaggtgttttattttctaagtctctgctctgctacaattctccaccctctcctggcatctggccacaacccccagaacctgaagaaggccaggtcagactccttgctcttccccttgcagttgggggcagtgctgaagttcagccttgtcactgcctgcctgctgacccagaccctcatcc

SEQ ID NO: 313601 - DNA, 574 bp, Homo sapiens
ttgctttactgtgaagaatacaaatttctaatagaaattttaggtattctttgttttgcttctcttcaagggttaaagataaaatgtcctcatctccttcttccgcacttgggattctaagcattgctgttactagtttctttatattattttcttttcctgttgagaagtttggtcattttttttttttctgtttccatgttctgatttcatcttcactcaactcttttattcattttctatgtctactatgtggattgtctaaatgattggtaagagcgcatcgtgtggatgttgcattatctcaaagaactgccctataaatacaaggtctayagatcatagagttctcaaagtgttcggcatataatttataatgtttatttagttgattaggtgttttattttctaagtctctgctctgctacaattctccaccctctcctggcatctggccacaacccccagaacctgaagaaggccaggtcagactccttgctcttccccttgcagttgggggcagtgctgaagttcagccttgtcactgcctgcctgctgacccagaccctcatcc

SEQ ID NO: 313602 - DNA, 599 bp, Homo sapiens
tgaaattcagctatttctttttggtttgtatgtttgtttgcgtggtcattttggttttaatttttttatttttaattaatttttaattgacraaaattgcatgtatagtgtacaatgtgatgttttgatatatatatacagtaaaatggctaaatcaaactaatgaacatatctgtccattactttacatacttgcctttttttgtggtgagaacatttaaatctactatcttagcaatttttcagtatacaatacattgtttttaaccatagtcaccatgttttacagtagctctactgaactttttattttgtctaaccgaaaatttgtatcctttgaacatcttctctattccacactgcagcctctagtaactaccatcatacattctacttctataaatttgacgtttaaaaattccacatataaatgagattatgcagtacttgtctttctgtgcctggattatttaacttagcacaatttcctctagttttatccttgttatttcaaatgatagaatttcattcttttttaagactgaatattattcaatcttaaaaattgtgtatatttcccacattttcctaatccatcc

SEQ ID NO: 313603 - DNA, 566 bp, Homo sapiens
actgggaggtggaggttgccgtgagccgagatggtgccactgcactcagccctggcaacagtgcgagactccgaattgaaaaaaaaaaaaaagctattgtttaatttctagttctttccatcactcactattttctgctttattggatagtagggtgtttctggctttgtagaccttaattttttccattgcccctactcaactaaatttattcaatcaaaataatttatcttaaatctcacccactccttggatttaaaaggcccctaaactaatccattcacatgggtacactagcagtatytctacctccaaccataaggctgaatcatggtggttttctattacgctgttgagctgtgtctatgatgtgtttagagaattatgagaaaattcttttttcaagttctccaagttattaatgagaaaaaaagatgagctatttcttaaattaaatatttaattgttgcacaattctagcaaatgaattagtcatactcatgtatagaatgccttttttttaaaaaaaaaaaagccctgagagttagtatgacataagccagagc

SEQ ID NO: 313604 - DNA, 574 bp, Homo sapiens
actagcagtatttctacctccaaccataaggctgaatcatggtggttttctattacgctgttgagctgtgtctatgatgtgtttagagaattatgagaaaattcttttttcaagttctccaagttattaatgagaaaaaaagatgagctatttcttaaattaaatatttaattgttgcacarttctagcaaatgaattagtcatactcatgtatagaatgccttttttttaaaaaaaaaaaagccctgagagttagtatgacataagccagagcaggaaaaatacttttttaaaaagttcttcttcttattattatttatttatttatttatttatttatttatttattttaaattctaattgacagaaaataattgtatataattctgggtccatgtgatgttttgatatatgtatacattgtaaaattattaaaccaagtgaatacacatatgctttcaaaatggatgaagcaaaatgaagcagttaaaaatcctggtactagaagtttatgtagatgagtttagtttttccacggttgttcaatctcagaaaaagaaaatagctcatattg

SEQ ID NO: 313605 - DNA, 630 bp, Homo sapiens
ttatgtagatgagtttagtttttccacggttgttcaatctcagaaaaagaaaatagctcatattggtgctaagagtacatgacctgaagtatgccagctggaaaaaccttcctttagaggttattgacctaaatttcaaaattggagttccattttgagacaacttacagacatttgatcccctattaaaataaaatccrtcctatttccatcttcatcccatgggtattatcatcttttgttctagtaatactttctggataatcagtttaaaatttaattttaaaatatgacatctgagatagcagatgaatatattaaggaggatatcatagtgttgctgaggattggacctgtaatgtgagtgatttattagttgtgaaaacaccaatatttctgttttgctatagtgatcagaagctcttgcttggaatacaaaaatgaatttttaaaatataatttacatattcaacgaatcaagctgttacagttattatcctacaaagaaaattttatggtcctatttcttcagtttatttgagaaagtaatgttgaaagaaaagtcgtaagaccaacagaatcactcatttgctgttcatacttttgctttcctataacagttctacagtc

SEQ ID NO: 313606 - DNA, 574 bp, Homo sapiens
gtaagaccaacagaatcactcatttgctgttcatacttttgctttcctataacagttctacagtccctctaaagatttatctgcagcctatgaagagcatcagccataataaaatcatagtaataaaaactctcagctcaaaactaaatgtttaattattagaaagtcaaaattmagttaaattataccaaatcaattgttctctctcatgtaaagagaatgaaatgtgaaggacaagaaagcactaaacacatttgtgattttatttttaccagcaggaagcaaaagaagaatgttccctagtgaagaactgagacagattattaattttataatgacagtcccaagattaagcagtaatcattctctttggttgtataattgctaattcaaaactatccaaaaaagaaaaacctcttaacatcaacataatggacctgggatggctgaatggaacatcttgcctagatttgagaagtccattgtacaccacattaaaaaataaagctatggcttgaagattaacacaggaagaaaacttatgtttgaagaaatattctagttgtttcaccac

SEQ ID NO: 313607 - DNA, 574 bp, Homo sapiens
gtaagaccaacagaatcactcatttgctgttcatacttttgctttcctataacagttctacagtccctctaaagatttatctgcagcctatgaagagcatcagccataataaaatcatagtaataaaaactctcagctcaaaactaaatgtttaattattagaaagtcaaaattaagttaaattataccaaatcaattgttctctctcatgtaaagagaatgaaatgtgaaggacaagaaagcactaaacacatttgtgattttatttttaccagcaggaagcaaaagaagaatgttccctagtgaagaactgagacakattattaattttataatgacagtcccaagattaagcagtaatcattctctttggttgtataattgctaattcaaaactatccaaaaaagaaaaacctcttaacatcaacataatggacctgggatggctgaatggaacatcttgcctagatttgagaagtccattgtacaccacattaaaaaataaagctatggcttgaagattaacacaggaagaaaacttatgtttgaagaaatattctagttgtttcaccac

SEQ ID NO: 313608 - DNA, 574 bp, Homo sapiens
gtaagaccaacagaatcactcatttgctgttcatacttttgctttcctataacagttctacagtccctctaaagatttatctgcagcctatgaagagcatcagccataataaaatcatagtaataaaaactctcagctcaaaactaaatgtttaattattagaaagtcaaaattaagttaaattataccaaatcaattgttctctctcatgtaaagagaatgaaatgtgaaggacaagaaagcactaaacacatttgtgattttatttttaccagcaggaagcaaaagaagaatgttccctagtgaagaactgagacagattattaattttataatgacagtcccaagattaagcagtaatcattctctttggttgtataattgctaattcaaaactatccaaaaaagaaaaacctcttaacatcaacataatggacctgggatggctgaatggaacatcttgccwagatttgagaagtccattgtacaccacattaaaaaataaagctatggcttgaagattaacacaggaagaaaacttatgtttgaagaaatattctagttgtttcaccac

SEQ ID NO: 313609 - DNA, 574 bp, Homo sapiens
gtaagaccaacagaatcactcatttgctgttcatacttttgctttcctataacagttctacagtccctctaaagatttatctgcagcctatgaagagcatcagccataataaaatcatagtaataaaaactctcagctcaaaactaaatgtttaattattagaaagtcaaaattaagttaaattataccaaatcaattgttctctctcatgtaaagagaatgaaatgtgaaggacaagaaagcactaaacacatttgtgattttatttttaccagcaggaagcaaaagaagaatgttccctagtgaagaactgagacagattattaattttataatgacagtcccaagattaagcagtaatcattctctttggttgtataattgctaattcaaaactatccaaaaaagaaaaacctcttaacatcaacataatggacctgggatggctgaatggaacatcttgcctagatttgagaagtccattgtacaccacattaaaaaataaagctatggcttgaagattaacacaggaagaaaacttatgtttraagaaatattctagttgtttcaccac

SEQ ID NO: 313610 - DNA, 563 bp, Homo sapiens
ttatcattaaaactgtgtttcattggccccaataaatatagatgtggcaaaggcaccggacatagaaatatgtctacatatgtacaatgtatggtatttgataagtaygataaatgtcagtagagaaaagacagattactcaacaagtgataattaagttaatgggcaacaatttaagaaagaaaattttatgtccctatctcataccatattgtaatgtcatcctaaaaaagcaaaagaaaaaaaaatgagacactttcaataacagacatagtaccaagataatcctagatattgtttataagagtggggtgattgcatttgtaatccatgtccaaaaaccatttaaaatgttctgtgaataagccaaattaggactccctcagagaagacatctttcagaaccatctcagtctcaatagcccatgaaaaacaagttatttcaaatcagttatttgcaggcagctaaacagaaacttctgttgattatgctgcaaagtatcttccttactaaaaattcgcagttgttctttgttttcagcttgaactatccagcagtatta

SEQ ID NO: 313611 - DNA, 502 bp, Homo sapiens
ggaatcaaggaatgaggcattcctataaaggtgcctgaaaatgtgacagcaacttttgaagtgggtaayaggcatatgttgaaagagtgtggaggactcagaagaagacaggaagatgaggaaaaatttgaaacttcctagagacttgttaagttgttgtgaccaaaatgctgatagtgatatggacagtgaaagccaagctgagaaggtatcagatgaaaatagagaagttattgagaaccagagcaaaggtcacttttgttattcattagccaagaacttggcagcattgtgctcctactctatggatatgtggaactttgaacttgagagtgataatttagggtatctggtggaagaagtttctaagcaggcaagcattcaagatgtttccttgttgcttctagcaacctattctcatacgcatgaacaaagaaaggacctgaaacttatatttaaaagggaagcagagtataaaaggatagaatatttgtagcctggc

SEQ ID NO: 313612 - DNA, 502 bp, Homo sapiens
ggaatcaaggaatgaggcattcctataaaggtgcctgaaaatgtgacagcaacttttgaagtgggtaacaggcatatgttgaaagagtgtggaggactcagaagaagacaggaagatgaggaaaaatttgaaacttcctagagacttgttaagttgttgtgaccaaaatgctgatagtgatatggacagtgaaagccaagctgagaaggtatcagatgaaaatagagaagttattgagaaccagagcaaaggtcacttttgttattcattagccaagaacttggcagcattgtgctcctactctatggatatgtggaactttgaacttgagagtgataatttagggtatctggtggaagaagtttctaagcaggcaagcattcaagatgtttccttgttgcttctagcaacctattctcrtacgcatgaacaaagaaaggacctgaaacttatatttaaaagggaagcagagtataaaaggatagaatatttgtagcctggc

SEQ ID NO: 313613 - DNA, 480 bp, Homo sapiens
caatttttagatcaagaatttttagtctttaaaagtaatttttatagagacaaggtcttgctatgttgcccaggttggtcttgaacctctgagctcaagcaatcctctgccttggcctcccaaagtgttgagattacaggtgtgacccactgcacctggccattttactcctayaaaaagagaaactttcttagcacccttatatcaactgatgtatatccaaagttttagcacatcactgatgaaaaattaattttacttcccaaatgctcacagattacctatccctgtgctaggaccccatgcattctaggcactatgcatacagcagaatgaaatagacaagatagctatatttggaaaacctacattctagtggagagatataaacaaaataacaacaacaataggagaagaaagaagagaaaaaaggggaaggaagaggagatgaataagagggaggagaagaaggcagcagcc

SEQ ID NO: 313614 - DNA, 480 bp, Homo sapiens
caatttttagatcaagaatttttagtctttaaaagtaatttttatagagacaaggtcttgctatgttgcccaggttggtcttgaacctctgagctcaagcaatcctctgccttggcctcccaaagtgttgagattacaggtgtgacccactgcacctggccattttactcctataaaaagagaaactttcttagcacccttatatcaactgatgtatatccaaagttttagcacatcactgatgaaaaattaattttacttcccaaatgctcacagattacctatccctgtgctaggaccccatgyattctaggcactatgcatacagcagaatgaaatagacaagatagctatatttggaaaacctacattctagtggagagatataaacaaaataacaacaacaataggagaagaaagaagagaaaaaaggggaaggaagaggagatgaataagagggaggagaagaaggcagcagcc

SEQ ID NO: 313615 - DNA, 571 bp, Homo sapiens
cacgtaactcatcaggcaaatctttgaaagacatctggcttccagggaaaagtggagtaaagccaaggctgtaccagagtagttcctccctaactcaagacgttgcattcccatcacaatctacagctgttcctgagaactccaagcaagaaaagggagagaactaggtcactccaaggccacccagacaactgacctgcagcaccaaatgtctatacaatgttggtttcacttctctgtggtaccctttttccagggccttggcctagctgacttttttattccttgattataatttttcccaggagacttttaaaaytgttcagtctctactttctgcttggcttctctgacacactcaggaaacacacagaggggaaagcacagtagacaaggtcagcctatgctctctctgtagccttgacttttcaggtcctggttttctttctttgttcttcaatctaggctttcttgttgtctcagtgtgatagttgatttgataaaagctactatgatgtagcaagaaatggacgtcttaataatttatggttttagaagttattaattttta

SEQ ID NO: 313616 - DNA, 553 bp, Homo sapiens
aatttaaaacaccaaaccttctcagtgaagcagaaccccatggaaagcaggtttagagaattgctccaattctatgagacctctcaaaatatagagctaagaaccaacaaaagataagacagcagctccttagatagcataaacatcagtgacattcacagtttacatctcatacatgtagaataaagataaaaccatcagttttaactattcaataatgcagwgttaaagtctcagatactcatagagtattatctaatagtgacctccttatctatatgaatccaacttcttccagtttatgttaagcttttatttattttttatgcattttttcttgtatgcatttatctcagcagtgtatagtgatgtcttgtatacaaacatttggaaaagataactataaaaaatcaaaatgagtttgtgactgcaattttctacttggcaatttttaatatacattagggcacatgtatgaagatatgtttgatgaaagaaatgaaatgtctgggggaatttgaagtagcttcttccttcatttactgacagaaat

SEQ ID NO: 313617 - DNA, 553 bp, Homo sapiens
aatttaaaacaccaaaccttctcagtgaagcagaaccccatggaaagcaggtttagagaattgctccaattctatgagacctctcaaaatatagagctaagaaccaacaaaagataagacagcagctccttagatagcataaacatcagtgacattcacagtttacatctcatacatgtagaataaagataaaaccatcagttttaactattcaataatgcagtgttaaagtctcagatactcatagagtattatctaatagtgacctccttatctatatgaatccaacttcttccagtttatgttaagcttttatttattttttatgcattttttcttgtrtgcatttatctcagcagtgtatagtgatgtcttgtatacaaacatttggaaaagataactataaaaaatcaaaatgagtttgtgactgcaattttctacttggcaatttttaatatacattagggcacatgtatgaagatatgtttgatgaaagaaatgaaatgtctgggggaatttgaagtagcttcttccttcatttactgacagaaat

SEQ ID NO: 313618 - DNA, 552 bp, Homo sapiens
tcatcttaatcactttttggtgaagaagttgagagccatcagccgactttcttccatcctcatagaaggaacttatctgagataaagtagttgctatgaatagagtttgacaagcaagatggaaaaagagaggcttgacagagttggagtcattggtgtggttttcctgaggtgagcctgcctccctcaagtgttaattaggtaagtaaataaattaactgtcttgcctagactgatcaagctggatttcyctcatctgaaaacaacaaaaagtcctgactagtctgccctgtaatacatattttattgcctccatttctaataattttcatattgacacattagatatcccagatctcacctttgtttctttcccctaggatttttgccttgaagattttcttaaattttatctttaatattttttgtattcttagctcttcatatttagatatttctttcattatataattaagaaaagttagctagtggttcaattattaacagacactcatttatttaataacttattaacaactgtattttatatcc

SEQ ID NO: 313619 - DNA, 629 bp, Homo sapiens
gtttgacaagcaagatggaaaaagagaggcttgacagagttggagtcattggtgtggttttcctgaggtgagcctgcctccctcaagtgttaattaggtaagtaaataaattaactgtcttgcctagactgatcaagctggatttccctcatctgaaaacaacaaaaagtcctgactagtctgccctgtaatacatattttattgcctccatttctaataattttcatattgacacattagatatcccagatctcacctttgtttctttcccctaggatttttgccttgaagattttcttaaattttatctttaatattttttgtattcttagctcttcatatttagatatttctttcattatataattaagaaaarttagctagtggttcaattattaacagacactcatttatttaataacttattaacaactgtattttatatcccaaatgtgtccactatttataacatttagattccttttatcaatgtaactattccacaaagtcataaaaagaaagtctcattttagaatgagtcaggtactagcttttgaaattttcatagctgtcataatgattgacttactgtcacattttaaaaacaatacaaatatatctgtgataa

SEQ ID NO: 313620 - DNA, 571 bp, Homo sapiens
ttaggtaattaaaaatgtgaacatattgctgcaagcaatctacagggkttttttttttgcaatccaatctgtactatcttttaaatatatagacaattatacacatataattatatttttatgtgcacagtatatgtaattatatttttatataaataattttaaatattggtgctttagctctaattaaacttattttgctcatcgaaaatttgcagataaggctctggagttccttcttttttgaataatataaaacgtcctcaaaatgtaaaataattacacttgcttaaaatattcgagtgcttttactctagccatttacaatatgtttcacacgtatatttgactaagactttgctagtaacctaaatgtagtataaaactggaccctagcatatattcaaagtcacctcattaggggataatattctgacacttttctagagagtgtgacatgaaagaccttcaagaattagagctcaagaggggaacatctcagagatgaatttatctatcaactttttaaatatttgcaataatatatccacattttaaagtttaaaagaca

SEQ ID NO: 313621 - DNA, 461 bp, Homo sapiens
atgtttcaatctgggtttattatttttatcatccaatactttataaatgtttatccaaatgtttattttcacacaaaaattgagaggttttcctctttatatattaaagaatagcacttctttaattgctattaaaggaggtctgccccatgatctaatcmcctcccaccaggtccctcccttgacatgtggggattacaatttgagatgggatttgggtggagatacaaagtcaaaccgtatcacagaccaaacccaatttaacacaaaatctctaagctgcatttggtattagctaggatagctggtgtaacagcagagcacggcaatagcttatgacaatagcagttagtttttctttatttaacaggacaatgcagacgttattagctggcagatggcttttccacatataatttcttctgtctgataacttcatcattcccttgggtttgtgacct

SEQ ID NO: 313622 - DNA, 461 bp, Homo sapiens
atgtttcaatctgggtttattatttttatcatccaatactttataaatgtttatccaaatgtttattttcacacaaaaattgagaggttttcctctttatatattaaagaatagcacttctttaattgctattaaaggaggtctgccccatgatctaatcccctcccaccaggtccctcccttgacatgtggggattacaatttgagatgggatttgggtggagatacraagtcaaaccgtatcacagaccaaacccaatttaacacaaaatctctaagctgcatttggtattagctaggatagctggtgtaacagcagagcacggcaatagcttatgacaatagcagttagtttttctttatttaacaggacaatgcagacgttattagctggcagatggcttttccacatataatttcttctgtctgataacttcatcattcccttgggtttgtgacct

SEQ ID NO: 313623 - DNA, 461 bp, Homo sapiens
atgtttcaatctgggtttattatttttatcatccaatactttataaatgtttatccaaatgtttattttcacacaaaaattgagaggttttcctctttatatattaaagaatagcacttctttaattgctattaaaggaggtctgccccatgatctaatcccctcccaccaggtccctcccttgacatgtggggattacaatttgagatgggatttgggtggagatacaaagtcaaaccgtatcacagaccaaacccaatttaacacaaaatctctaagctgcatttggtattagctaggatagctggtgtaacagcagagcacggcaatagcttatgacaatagcagttmgtttttctttatttaacaggacaatgcagacgttattagctggcagatggcttttccacatataatttcttctgtctgataacttcatcattcccttgggtttgtgacct

SEQ ID NO: 313624 - DNA, 618 bp, Homo sapiens
tgtttgcttcccttctgccatgattgtaattttcctgaggcctacccagcactgcagaactgtaagtcaattaaacttctctctttatataaattacccagtcacrggtatatgtccttatagcagtgggagaatggactaatacattctgataataatgttaaccttcaacctctctttactgctttctttaattggaatttctatttcctagttctatttcagtctctttcctgtttaatctgcttgtgttgctgaagcatacgctctaaatcttcctacaaagcatgaaaaggaaaaattttctgtctttcatactttacattttttattctatttttgctgtggtgtgaatgtgtccttctctgataatgtaaaatatttatttggcctttatttcatttcttgtcttagacctcctaaaaatccctgaaatctctaaagtaataaatgtctttgtgtatgccaatgagttgactgatgcctggcagcccccaagtagttttaggatggagcctggtcaccaaaaagaccaggcatgattgcagagttgttattttcagctccaccccaacctccaaggagaagacaggtactgaaggttgagttgatcaccag

SEQ ID NO: 313625 - DNA, 618 bp, Homo sapiens
tgtttgcttcccttctgccatgattgtaattttcctgaggcctacccagcactgcagaactgtaagtcaattaaacttctctctttatataaattacccagtcacaggtatatgtccttatagcagtgggagaatggactaatacattctgataataatgttaaccttcaacctctctttactgctttctttaattggaatttctatttcctwgttctatttcagtctctttcctgtttaatctgcttgtgttgctgaagcatacgctctaaatcttcctacaaagcatgaaaaggaaaaattttctgtctttcatactttacattttttattctatttttgctgtggtgtgaatgtgtccttctctgataatgtaaaatatttatttggcctttatttcatttcttgtcttagacctcctaaaaatccctgaaatctctaaagtaataaatgtctttgtgtatgccaatgagttgactgatgcctggcagcccccaagtagttttaggatggagcctggtcaccaaaaagaccaggcatgattgcagagttgttattttcagctccaccccaacctccaaggagaagacaggtactgaaggttgagttgatcaccag

SEQ ID NO: 313626 - DNA, 657 bp, Homo sapiens
ttcatttcttcctttgtattttttgtgtatctagggaaggtttttttatttcagattaccatttggcttgaaaataatatcttctaaccgattttaaactgatgatgacagtgattccaaaagaaacacactaacaaacaagcaaatagaaaactaataaaaagtcttcactttaacttcatctcctcctgccttgtaactttttgttgtctctatttatatcttactatactgtttatgtcttgaaaagtcgtcataggtattatttttgataggttcatctttagtctttttactaaagcyatgtatatttcacaccacacaattacagttattattctgtgtttgtctgtgtactttctactacaagtgagttttgtaccttcagatgatttcttattactcatgaacctccttttctttcacattgaagaacccctttagcatttttataggacacatctggtgttgatgaaattcctcagcttttatttgtctgggaaagtctttatttctccttcatgtttgaagggtatttttgctggatatactattctaggatataagtacttttttttccttcagtactttaaatatgtcatgcccctctctcctaacctgtaaggtttccactgacaggttggctgctggatgtat

SEQ ID NO: 313627 - DNA, 580 bp, Homo sapiens
cccctttagcatttttataggacacatctggtgttgatgaaattcctcagcttttatttgtctgggaaagtctttatttctccttcatgtttgaagggtatttttgctggatatactattctaggatataagtayttttttttccttcagtactttaaatatgtcatgcccctctctcctaacctgtaaggtttccactgacaggttggctgctggatgtattggagttccttgtatgttatttatttcttctctatttctgcttttaggattctttctttatcctggatctttaggagtttgattattaagtgtcatgaggtagtcttctttgggttaaatctacttggtaatccacaactttcttgcccttgaatatggatatctttctctaggtttggaaagttctcggttattatgcctttaaattaattttctaatctgatctctttctctacctcccctttaaggccaatgactcttagtcttgccctttcggaggccattttctagatcttgtaggaatgttttattttattcattttatttatttatttatttatttacttatttatgagac

SEQ ID NO: 313628 - DNA, 580 bp, Homo sapiens
cccctttagcatttttataggacacatctggtgttgatgaaattcctcagcttttatttgtctgggaaagtctttatttctccttcatgtttgaagggtatttttgctggatatactattctaggatataagtacttttttttccttcagtactttaaatatgtcatgcccctctctcctaacctgtaaggtttccactgacaggttggctgctggatgtattggagttccttgtatgttatttatttcttctctatttctgcttttaggattctttctttatcctggatctttaggagtttgattattaagtgtcatgaggtagtcttctttgggttaaatctacttggtaatccacaactttcttgcccttgaatatggatatctttctctaggtttggaaagttctcggttattatgcctttaaattaattttctaatctgatctctttctctacctcccctttaaggccaatgactcttagtcttgccctttcggaggccattttctagatcttgtaggaatgttttaytttattcattttatttatttatttatttatttacttatttatgagac

SEQ ID NO: 313629 - DNA, 574 bp, Homo sapiens
aagaactacacagaggttaaaagtacagtctagccagagggaggagctcaagcagaggaaaagacttatgggaaggtctggcatacttaagcaatggattgmgaattccagtgaggtttatcagatttgcctagggagtttattgaaaatatggatccagagactccatatcagtgttcccaaaatgttttacattaatgcccacccattttgatttcaatgtccacctgagtttgtgaatcactgctttagggcttatgcctggaacccagtacagataagaagtgggagagacaagcagaggctagataatgaaaagctttgtgggttgtccctagagaggctgaattttatcctgaaagtttttggccaagatttgtcattaatttccacctaggctgggcattaaaagcctgaggatatgagaggaagaaagaaagtaaaagaaacgagtcaggattgagaagtgaatgttaatttaggctctcctccttccccaccagccaggggcaagctgtttctgctactttaaccgttttctgtcctgtcagggacaaagcacaatttattagaa

SEQ ID NO: 313630 - DNA, 529 bp, Homo sapiens
accagacatactggggtgggcatgcttcacatttctccatagctaatgcatgacctccaatcatattcaacccatgctcaattcatcatttgcttatgctgtctgccaacctaaaaaatcttctagtatttgtgtattctctcaccacataatactaatactctgaaattaattgtgttttccactacttttgcataccatccaaaatcttgcacactaagcaaggattgacttttaaaatgcatatttatttttacacattagcactttggagaaagaaagaaatcccttctcctttttataattgagtgctcagcagtcgtgggctcatagttgacatctaaccaaaaagcttaacatctactgctagtttcagcccaaacaccaataagctggatacatttgtgtcagttccttactttctctatcagtttttttcacttgaatgggctgaacacaataartgattacttagcaactaaacttcatattaaacaagcaattattgtgtgtcaaggactgtgctaag

SEQ ID NO: 313631 - DNA, 469 bp, Homo sapiens
aatacttactacagtgtaacatgggcattgagaatcatcagaaattcaaagtaacarccacaatgagtaatataatgtgtttacatgagaagacaatgaatacaaaacacagtaacaagtctacagaagtctgctggaattcttgctgtaaagatacacatggacctgtggattcatttatttattcatttagcatttaattaatattcattctttgagtgcccacagtgtgctaggtaccagaaataaagctgtccctaatttaacacatttaattcattcctgaaaacactgctgacaagtgaaaaattattaaatgaaaaatacatttccattaattttagggggaacaattataatgcattctattccaactggagatgctcgaataattttcacagataaacatatcagtttagcagtgtaaacaagtttaagtaggcaataaacaataattgaaaagtaaaaa

SEQ ID NO: 313632 - DNA, 559 bp, Homo sapiens
cctggtctctgtcactgtcttgtatttcattttctgtccctaactatatatcaattccattgcttgaccctactgcttcctttcttctctgacatcacagaacaagttatctacaggttttgttgtcagggaagttttcatggaaaatatgatacttaagctgtaaatcattctcttgccaatttttggacatcctaaagtgtacctattgtttagtgtgtgttttcaaaatcagtaattttttaacatcaaaatcattttttaaaaagtaatcaatgtattacactcttgttatgattggtattaaaaatatttgccaggcacagaggttcrttcctacaatcccaggactttaggaggccaaagtgggaggactgcttgagccagcagttctagaccagcctgagcaacatagtgcaaccctgtctctacaaaaagtttaaaaaaattagccaggtatggtggcacacatctgtggtcccaacgactcaggaggctaaggcaggaggatctcttgagccaaagaggtcgaggctgcagtcagccatgtttgtgccac

SEQ ID NO: 313633 - DNA, 569 bp, Homo sapiens
tctgtcacccaggctggagtgtggtggcatgatctcagctcactgcaacctcccaggctggagttcagtggcgtgatctcggctcactgtaacttccacctcaagggttcaagagattctcctgcctcagcttcccaagtagctgggactacaggtgcgcacctgtcatggaacttctcatctttcataattatgtgagataattcccctaataaatcctcttacatctatctatatgtgtatatcctattggttccgtgtctctggagaatcttgattaatacagtagttaactaacaataacatgaaaataagatgactctattagacagaaaactaatttttctaaaggaaawgctactttttggaaaataatactatgtcttatttttgtgacaagaatcacacaaaagattgaaagtacacatactaaatgtccctcaaaacattttcagtcatagcattaaacaatatatatagttattgaacaaaataaaattcaaagtaaaaacattttcatatattcagttacatttttgaaaaaaaatttgaaaagcagttcattgtgg

SEQ ID NO: 313634 - DNA, 569 bp, Homo sapiens
tctgtcacccaggctggagtgtggtggcatgatctcagctcactgcaacctcccaggctggagttcagtggcgtgatctcggctcactgtaacttccacctcaagggttcaagagattctcctgcctcagcttcccaagtagctgggactacaggtgcgcacctgtcatggaacttctcatctttcataattatgtgagataattcccctaataaatcctcttacatctatctatatgtgtatatcctattggttccgtgtctctggagaatcttgattaatacagtagttaactaacaataacatgaaaataagatgactctattagacagaaaactaatttttctaaaggaaaagctactttttggaaaataatactatgtcttatttttgtgacaagaatcacacaaaagattgaragtacacatactaaatgtccctcaaaacattttcagtcatagcattaaacaatatatatagttattgaacaaaataaaattcaaagtaaaaacattttcatatattcagttacatttttgaaaaaaaatttgaaaagcagttcattgtgg

SEQ ID NO: 313635 - DNA, 534 bp, Homo sapiens
caaagggacagtgagcctggatacccaaaggaaatgaagaaggcacatccacagggagataaatggatttggagggtgggtgtcagaagtcaaacttggaaggcaggcycaaaaataaagaatatgtgactttataggctgctataagggacttggggttggatggctttttaaaatattgtgtatatttaaggtatacaacatggttttttagatatacatagatagtgaaatgtttactacaatcaaggaagtgaacatatctataaactcacatagtttaattttgaaagaattattccaggtgctctgtggaaaaatttcaaaaggaagtggaatccagaatatctgtgagaaggctcttgctgagatctagcctacagaaaatagttgcttaggctcaggtgatggttgaaagataagaaatgttccatccaattcacaactacatttgtaagacagagctgatgacacttgctcagagtatattggatatgtggtgtgatggaaatagaagaatcaaaaataatgcct

SEQ ID NO: 313636 - DNA, 534 bp, Homo sapiens
caaagggacagtgagcctggatacccaaaggaaatgaagaaggcacatccacagggagataaatggatttggagggtgggtgtcagaagtcaaacttggaaggcaggctcaaaaataaagaatatgtgactttataggctgctataagggacttggggttggatggctttttaaaatattgtgtatatttaaggtatacaacatggttttttagatatacatagatagtgaaatgtttactacaatcaaggaagtgaacatatctataaactcacatagtttaattttgaaagaattattccaggtgctctgtggaaaaatttcaaaaggaagtggaatccagaatatctgtgagaaggctcttgctgagatctagcctacagaaaatagttgcttaggctcaggtgatggttgaaagataagaaatgttccatccaattcacaactrcatttgtaagacagagctgatgacacttgctcagagtatattggatatgtggtgtgatggaaatagaagaatcaaaaataatgcct

SEQ ID NO: 313637 - DNA, 619 bp, Homo sapiens
tggtcctgggcttgtgattactcagtaaatcttaatgtgggcaaatatgctctctttctgtggtgctccgctctggcctgggattgttgggctctgggctgcagctgctaccctgctgtgtctggtaaacgtggtcacctgggaactgtgctacctgccaggcagcttggtgcatcctgcagatgcctcaggtttgctctgccattggtattacagacaagaacatccacattcctacttccccaccttggctgatacaggacttttcttcctccatctcccttccatgtgctttttctcacttcttatttaaggagctgccaraatccttgagaaagtatcttgtctttctctacctcagattctgaaagtcaaatgttcatcttgtggtcgtggtgttcagtacgagagtgaatagtcataagttaattccctttgacacacttgaagaaagcatttgttttagcaggcttaggccacacttatttctctgatttcacctccctaattcatcgtattttggggtgaaaatatagtacctgaccaggctcaggatgcttctccttagaaacttgtatacaaatccaaaatacccaattctcccctttttttgagacct

SEQ ID NO: 313638 - DNA, 619 bp, Homo sapiens
tggtcctgggcttgtgattactcagtaaatcttaatgtgggcaaatatgctctctttctgtggtgctccgctctggcctgggattgttgggctctgggctgcagctgctaccctgctgtgtctggtaaacgtggtcacctgggaactgtgctacctgccaggcagcttggtgcatcctgcagatgcctcaggtttgctctgccattggtattacagacaagaacatccacattcctacttccccaccttggctgatacaggacttttcttcctccatctcccttccatgtgctttttctcacttcttatttaaggagctgccagaatccttgagaaagtatcttgtctttctctacctcagattctgaaagtcaaatgttcatcttgtggtcgtggtgttcagtacgagagtgaatagtcataagttaattccctttgacacacttgaagaaagcatttgttttagcaggcttaggccacacttatttctctgatttcacckccctaattcatcgtattttggggtgaaaatatagtacctgaccaggctcaggatgcttctccttagaaacttgtatacaaatccaaaatacccaattctcccctttttttgagacct

SEQ ID NO: 313639 - DNA, 619 bp, Homo sapiens
tggtcctgggcttgtgattactcagtaaatcttaatgtgggcaaatatgctctctttctgtggtgctccgctctggcctgggattgttgggctctgggctgcagctgctaccctgctgtgtctggtaaacgtggtcacctgggaactgtgctacctgccaggcagcttggtgcatcctgcagatgcctcaggtttgctctgccattggtattacagacaagaacatccacattcctacttccccaccttggctgatacaggacttttcttcctccatctcccttccatgtgctttttctcacttcttatttaaggagctgccagaatccttgagaaagtatcttgtctttctctacctcagattctgaaagtcaaatgttcatcttgtggtcgtggtgttcagtacgagagtgaatagtcataagttaattccctttgacacacttgaagaaagcatttgttttagcaggcttaggccacacttatttctctgatttcacctccctaattcatcrtattttggggtgaaaatatagtacctgaccaggctcaggatgcttctccttagaaacttgtatacaaatccaaaatacccaattctcccctttttttgagacct

SEQ ID NO: 313640 - DNA, 516 bp, Homo sapiens
actctccctcctggcgcctgaaaccagataatagaggctaatatattgggagaacaatagaggttaagtaaggatattgaaatgattaaacccacagggaaaagctggaccaaagtattgcatttccatacatctcctcactgctttaaaataccatttagcctttttttttttttgagacctgatagctgcttatcacttgttaattgactctgagtgcctagtgggtttagtttccattcaaattgagcctgcagagagaaagcaatgaaagaaaaatgacagcactgaagcaaaggatggaggcagacagtgtctcctgcccagtagcattacaatgatctgagagaataggggaagatgaactctctgacatctcataactgtggcatgaaaaatgsggatcaggcaaatagtaatgtaggtaagaaattttcctattaccattgtattccacttcaaccaggcaaaatgacaagaaagtttcagttggcatttgtaaccatgtaccaaatt

SEQ ID NO: 313641 - DNA, 551 bp, Homo sapiens
gtgggctgctttcaagctttaacttcagatcctcctgctagtttttacttttcagagtgtttaagtgcttgtttttgtttgtttgtttgtttgttttttgtagtttgttcagttttagtggtgaacagtgcattagatagattctagttggcttatttcatcttagcaatcatcgaaaacttagatattttatctttaaaattacaaaccaatatggactactacaaacatctattagagcgtcgctrcctttaaatatgattccctaggttgggtgtgatacttctgtattttagaaagttcccctgccccaataaatctaaaatgtaaggttaaaaaccctcatttcttctttatttgcctagttcagccaatttgactctcagttggattttgagaatctcagtgatgtttcagtttggaggtcagttcagaatagctttttattctaattttaatacctctattatcctgataaaagtgttgttgatgaaataattttgaatatctcaataaaaatctcaagtgcctaccaaatattctttaagctt

SEQ ID NO: 313642 - DNA, 417 bp, Homo sapiens
ctcggtctgtcgcccaggctggagtrcaacggcaaaatatcagctcactgcaacttctgcctcttgggttcaagtgattctcatgtctcagcctcctgagtagctgggattacaggtgtgtgccaccacacctggataatttttatatttttagtagagccagtgtttcaccatgttggccaggctggtctcaaacccgtgacctcaagtgatcccgcaagcctcagcctcccaaagtgctgggattacaggattacaggtgtgagccactgcgcccagcctagagtacaaactttgtaaagagcacaaagcaaagactagagatatataagatatactctatgaagggattttgtctaattagaaatagaggcacaatagtgaaaaaaggactttttagattataatgaagaaagc

SEQ ID NO: 313643 - DNA, 417 bp, Homo sapiens
ctcggtctgtcgcccaggctggagtgcaacggcaaaatatcagctcactgcaacttctgcctcttgggttcaagtgattctcatgtctcagcctcctgagtagctgggattacaggtgtgtgccaccacacctggataatttttatatttttagtagagccagtgtttcaccatgttggccaggctggtctcaaacccstgacctcaagtgatcccgcaagcctcagcctcccaaagtgctgggattacaggattacaggtgtgagccactgcgcccagcctagagtacaaactttgtaaagagcacaaagcaaagactagagatatataagatatactctatgaagggattttgtctaattagaaatagaggcacaatagtgaaaaaaggactttttagattataatgaagaaagc

SEQ ID NO: 313644 - DNA, 645 bp, Homo sapiens
tgagaagtaagtaaacttattctaagaatttttattaatattccaaaatctgaatggaaactgatttttcaccctcactcatatctcaaaactcaaagaaaaactgagtaagccatgcaatttttaactctatctcactccccaacaatgagtcaaataatcctaacaaatctcactaatagcctaaaatcagaagagaaaytgacagaaggaaataagcaattgttactaaagaaagttaagtataatggggaaactaaacaactggagttaaatatttaaagcatcagatatttccccatggcaaacagctccaataatgtgatgtaaactttactgtagtaaatttaacaaacatctaatgagggccagtttttcaatggactgcacagtttcccctgagttcttggttcccttatgagatagactgcaacataccaacacttgaaactactaggaaaaaaaaatgtgtttggatagggatgatcctgttaatttaagtacatgactgagacaagtggcagagcaaccatccaataaaacaacaggcaaaatataatagaaaagaaagaaaagttgtgtgctataaacaacaaactcagaccagaagaaagcataatcaaaggaaacaaaataaaagattgt

SEQ ID NO: 313645 - DNA, 584 bp, Homo sapiens
ggaaataagcaattgttactaaagaaagttaagtataatggggaaactaaacaactggagttaaatatttaaagcatcagatatttccccatggcaaacagctccaataatgtgatgtaaactttactgtagtaaatttaacaaacatctaatgagggccagtttttcaatggactgcacagtttcccctgagttcttggttcccttatgagatagaytgcaacataccaacacttgaaactactaggaaaaaaaaatgtgtttggatagggatgatcctgttaatttaagtacatgactgagacaagtggcagagcaaccatccaataaaacaacaggcaaaatataatagaaaagaaagaaaagttgtgtgctataaacaacaaactcagaccagaagaaagcataatcaaaggaaacaaaataaaagattgtgattgcaaaaaataagaacaccagtaaaatgacataacaatatcactagcagactaagttagatttgcaagctgcatctgaaaatcaaattaattttttatttctctgaagaatgtcattggtatttgataaaaatttcattgactttg

SEQ ID NO: 313646 - DNA, 584 bp, Homo sapiens
ggaaataagcaattgttactaaagaaagttaagtataatggggaaactaaacaactggagttaaatatttaaagcatcagatatttccccatggcaaacagctccaataatgtgatgtaaactttactgtagtaaatttaacaaacatctaatgagggccagtttttcaatggactgcacagtttcccctgagttcttggttcccttatgagatagactgcaacataccaacacttgaaactactaggaaaaaaaaatgtgtttggatagggatgatcctgttaatttaagtacatgactgagacaagtggcagagcaaccatccaataaaacaacaggcaaaatataatagaaaagaaagaaaagttgtgtgctataaacaacaaactcagaccagaagaaagcataatcaaaggaaacaaaataaaagattgtgattgcaaaaaataagaacaccagtaaaatgacrtaacaatatcactagcagactaagttagatttgcaagctgcatctgaaaatcaaattaattttttatttctctgaagaatgtcattggtatttgataaaaatttcattgactttg

SEQ ID NO: 313647 - DNA, 603 bp, Homo sapiens
ttaacaaacatctaatgagggccagtttttcaatggactgcacagtttcccctgagttcttggttcccttatgagatagactgcaacataccaacacttgaaactactaggaaaaaaaaatgtgtttggatagggatgatcctgttaatttaagtacatgactgagacaagtggcagagcaaccatccaataaaacaacaggcaaaatataatagaaaagaaagaaaagttgtgtgctataaacaacaaactcagaccagaagaaagcataatcaaaggaaacaaaataaaagattgtgattgcaaaaaataagaacaccagtaaaatgacataacaatatcactagcagactaagttagatttgcaagctgcatctgaaaatcaaattaattttttatttctytgaagaatgtcattggtatttgataaaaatttcattgactttgtaaattgttttgtttagtattgttgttttaacactattaatacttccaatccatgagtatagaatatctgtctagatttggtgtgtcctctttaatttcttccatcagagttttaaagttttccttatatagacttttcacttctttggttagatt

SEQ ID NO: 313648 - DNA, 516 bp, Homo sapiens
gcaaaagtgttcttcaattataagtattacatgtaggtgttgtattagtttcttattgctgctgtaacaaattactacaaacctgatgattgaaaacaatacaaaattattcttgtacagtcctggaggctggaattgcaaaatgagtcttgtgggcctaaaatcaaagtatcagcagggctggtttgtcttggagtttttgggggagaatccattcctcatgtcttctaatttctaaaggttgcatgacttggcttctggccatatcacttcaacctctgcttgtttcatcacatttcttctctctcactctaattctgcctccctcttagaaggtcatgtataattacattggacccacttagagmtatacaggctaatctccaaatcttaaaatctttaccttaaccacatgtgtgaattctctcttgccatataaagcaatttattcaccgtttctggggattaagatgtggatctctttaaaaggccattattcagcatgtcatagatatt

SEQ ID NO: 313649 - DNA, 516 bp, Homo sapiens
gcaaaagtgttcttcaattataagtattacatgtaggtgttgtattagtttcttattgctgctgtaacaaattactacaaacctgatgattgaaaacaatacaaaattattcttgtacagtcctggaggctggaattgcaaaatgagtcttgtgggcctaaaatcaaagtatcagcagggctggtttgtcttggagtttttgggggagaatccattcctcatgtcttctaatttctaaaggttgcatgacttggcttctggccatatcacttcaacctctgcttgtttcatcacatttcttctctctcactctaattctgcctccctcttagaaggtcatgtataattacattggacccacttagagctatacaggctaatctccaaatcttaaaatctttaccttaaccacatgtgtgaattctctcttgccatataaagcaatttattcacmgtttctggggattaagatgtggatctctttaaaaggccattattcagcatgtcatagatatt

SEQ ID NO: 313650 - DNA, 524 bp, Homo sapiens
agaagttatgtataccactcattctaatagaaccatacagacactttctagaatctaggcttaggtagatacattcctgaggctctttcaattctaaaactttgggctcaggaggtaagtgtcataaactcaaatgcattcacagttgacattgtgacatgtagtgtgaagtggtcctacagtaagacaacgggtctacacttgtaccattgctatcaccaaaggcacacttcctgcctagttacagtattttaaaacactcttcagaccaaatgaaatgaccagaaacattctatgatcacatgaattttatggcctgaagagtgagattctactctaggattacccgtttagaagaatgattgagagatgacattttatagtctatctctctaaaataaaatttaaaacaatatagttttttgtgccaagcagttaggaaatctgatatacaaatatgtattaaatgtatcctgcatrtggtcactgtctagttattgggaataaagatttgaataggttct

SEQ ID NO: 313651 - DNA, 424 bp, Homo sapiens
gtgcacaggatggagagctaggcacagtacatggcaataatgcatgattttcctctttagtcttaaataatttcttttacagattcttgttcatatatgcactgtatccaaaagaccctttatgttgattatattgtgaatgtattatatatattactcttccaagaggatactgttgccttaaaatgcagaagaaccattgtttcrtttttaaaatatagtcaggcaataagattctctatgaaataaacagcttgtacatttaaaatgtatacaattattttgtatatgtgattttccatttcttggtttctttatttggggtaagtagtagaactgctttggaagttattttctgggctttattgctcagatacataatttttagcaccccttctgtatgaaatgctttctaaatgattat

SEQ ID NO: 313652 - DNA, 586 bp, Homo sapiens
cataatttttagcaccccttctgtatgaaatgctttctaaatgattataaagaactcccaatattttacattccttgaatgtaacttctcttccatttccgtgttccagctattgccaataatgattaaaaaaaagtgaaagaagacactacaaaatgaagagaaaggcagagaagggtaaaaataaatgcagaaaccaaaaagaggtaaatgaaaaacagtagtttaaaggaggccragaacaagttatagtaatataggaaaagaaacaggaaattgaagcatgccatttatacacacaatcatagcaccccaaggatgccttatgtctgtgttctgggttttgcttaatgaggtaatatgagtagaaattactttctaaccatagtctagacagatattctttaatagtctaagtccatgagttagcccttgaatcaaatctttaagttagatttgtaaaaacttgggagagatgaggaacagagttgttagataatttagataaacacaagcttggttaaggtatatgcataagtcttttactaagataaatgttattcttgagccggaaaccctatcacac

SEQ ID NO: 313653 - DNA, 544 bp, Homo sapiens
acgtcccaatccaaacacttgctctcccctctactcctgaacctaactctgcttcagtgcacttttttccctttaaatgtcagttttatccatttaaagagtggatgcccaggttacccaggtaaaaagaaaaaaaaaaamgcttagagtccttcttgatttcttcctctctttcacatcccacaaccattctgtcggcaagtcatttttgcctctacattctaaatatacccagaatatgactacttattaccacctacgttgctgaaatcctggtacaagccaccatattctcttgccccagtatcctcctaagtgatttttgtctctgctcttgctttctgtctattcttagccaagcaaggaaagtatttcttgaaatcatcgatgaaaccacatctttccttaacatttcactcagagtaaaagccgatatctactaaatggctcacaaggctctcatctcttattctccacacatttttacccacccccataagttcccaccggctccttgctcttcctagtcatacctcaagcctca

SEQ ID NO: 313654 - DNA, 590 bp, Homo sapiens
atatgggcatggtttctggagttctaaaacaattacgacaacatcaaagatcactaatcatagaccacttgtaacaaatataataataatgaaaagttgaaatattgcacaaattaccaaaatcgatgcacagacataaartgagcacaagctgttggaaaaatggtgccgatagacttgcttgatgcagtgtccacaaaccttcactttgtaaaaaatgtagtatctgtgaggtgcaacaaagtgaagtgtaatgaaatgaggtctacctgtactttaaaactttatcctaacactggaccccattatcattgtacactataagttattgctttttgtatattttatagtagaattttcttacattgttattaatattctaaaagtattatttgtatttcctaacttttgaaattatgtttcatcattagaaatatgtagatgactgggaatcaccaaaagagaaataaaatgtgtctctcagagagaccctaaccccaatcctttggtaatttcatccccatgggtatttctgtgcaaccctagggtaatttatccccctggatgtctctgtgcatccctgttctgca

SEQ ID NO: 313655 - DNA, 627 bp, Homo sapiens
tttggtccatagcatttaatttacctaacttgttgatacacagttgtcatggyatagtattatcttatatatatttccataaggtcagtagcatcccctttaggtcttgattttatattccttattttttatttctgtatattttctttgaccttctaactaaagatttgtcaattttgttggccttttccaaaaaccaaatttgggttccactactcttttctgttgtttttctattctctatttcatttatttccagcctaatctttattgttttcttatttctttttgctttgtatttagattttttttctagtttcttgaggtaatgtttaagatctttctacctttctaatatacacatttacagctataaatttccctctgaccatcaatttagctgcactttctaagttttgatatattatcagcttttttcatctaaaagtattttctatttcctttttccatttctcctttgacctattgattatttagaaatgtattgtttaatttccacatatttgtgaatttcccaaatttacttgtttttaatttctaattgcattttattgtggttatacaatacacttttgtgtcattttgatcattttaaatttattatgg

SEQ ID NO: 313656 - DNA, 596 bp, Homo sapiens
aaatctcaagatcttcagggtgagttgagttaccaagttggaagctcaggagagctaaagacctgaacaccagggccaatggtgtagttcctatctgaaggccagaagtcttgagactcaggaagagacaaagtttcagtttgagtactaaggcaggaaaaaacccaatgtcccattttgaaggccataaggcaggaaaagttctctcctactttgaggatggttggcttttttattatatwcagccctttattggatgaaggccacccacattatgtagggcaaactcttctactcagtctactgatttaaatgttaatcttatccaaaaatacctttacagaaacatccacaataatgtgtgaccaaatgtctcagcacctcatggcccagacaagttgacatgtaaaattaatcatcatagtaggaaaatcttagagtgtatcctacttggaatttgttgaacttcttcaatgtgtagattaaagtttttcatcaaatttgcaaggttttcagccattatttattcaaatatgctttctgttccttcttctctgtccttctgtgaatttgattattggtacacataatggtgt

SEQ ID NO: 313657 - DNA, 596 bp, Homo sapiens
aaatctcaagatcttcagggtgagttgagttaccaagttggaagctcaggagagctaaagacctgaacaccagggccaatggtgtagttcctatctgaaggccagaagtcttgagactcaggaagagacaaagtttcagtttgagtactaaggcaggaaaaaacccaatgtcccattttgaaggccataaggcaggaaaagttctctcctactttgaggatggttggcttttttattatattcagccctttattggatgaaggccacccacattatgtagggcaaactcttctactcagtctactgatttaaatgttaatcttatccaaaaatacctttacagaaacatccacaataatgtgtgaccaaatgtctcagcacctcatggcccagacaagttgacatgtaaaattaatcatcatagtaggaaaatcttagagtgtatcctacttggaatttgttgaacttcttcaatgtgtagatyaaagtttttcatcaaatttgcaaggttttcagccattatttattcaaatatgctttctgttccttcttctctgtccttctgtgaatttgattattggtacacataatggtgt

SEQ ID NO: 313658 - DNA, 623 bp, Homo sapiens
gcatgttagggcatatcttcaattctccagcagtttataattctgctttagacttcatgagttgctttgaaatccctcagsgttaaccagaagataagatcttccctaggcatgcacacatccctgcacatgtgtgtagcctaggggtataattggagctctccaaagcctcctatggacatctcattttccagattttcattttaaaatttttggtcagcctcttgtctgccccaactgttacagctactttaggcaactgatgtgttaaataattgccactaatggatttttccaaatgtcttggaagtaggggtttgctcattatgtgagctctgaatcaggtcaaataaacacaaactctgcaaataaagacaagtccaggaatctgccaaatacgtcaaatagcaacagttctctggggatgggagctttttcaggcactccatacctgttcttctccctgcaatgattgctatactgctaattttcatgtttcttgtgtttctgagctgttatttctcaaggctattattgaagattttacttccaccattcttcttttctggataaacttttgctaacattcattcaagtaactatccaaagatatttacccttac

SEQ ID NO: 313659 - DNA, 623 bp, Homo sapiens
gcatgttagggcatatcttcaattctccagcagtttataattctgctttagacttcatgagttgctttgaaatccctcagcgttaaccagaagataagatcttccctaggcatgcacacatccctgcacatgtgtgtagcctaggggtataattggagctctccaaagcctcctatggacatctcattttccagattttcattttaaaatttttggtcagcctcttgtctgccccaactgttacagctactttaggcaactgatgtgwtaaataattgccactaatggatttttccaaatgtcttggaagtaggggtttgctcattatgtgagctctgaatcaggtcaaataaacacaaactctgcaaataaagacaagtccaggaatctgccaaatacgtcaaatagcaacagttctctggggatgggagctttttcaggcactccatacctgttcttctccctgcaatgattgctatactgctaattttcatgtttcttgtgtttctgagctgttatttctcaaggctattattgaagattttacttccaccattcttcttttctggataaacttttgctaacattcattcaagtaactatccaaagatatttacccttac

SEQ ID NO: 313660 - DNA, 598 bp, Homo sapiens
tctagtgattaaaggtgaggaaataacaccgtatccttggaaatggtatattttatgctcttttttttgaaaataaataactatcatttactctatatgtaattgtggttcttagtacatctatactttcttccaatacattgttaagtgaccttttactacctgaagttaaaaactttgggaaatggtatttttaaacagtattttaaaatatcactgatgttaaaatatctcagcttttctcaaagtgaacaaatttaaaacttaaaggaaatatatgagtacttacttctagttgattcctatccaaagtacataactttcataatgttcagtaatataatctaaaacttctagtaraatacatggcccatcttaaatattactacattttccagccttcttgcagatagatgtgaccatgtgactaaggtctgatgggtgatatataaataaaagtgatattggcaacttcggggtagtaatcttgctggggtgtaagggtatggttagcataagaatccttactccttccctctgggtggaatatagatgtaaatcctggaattgcaacagacaattagatcatgagctctcc

SEQ ID NO: 313661 - DNA, 562 bp, Homo sapiens
taacaccgtatccttggaaatggtatattttatgctcttttttttgaaaataaataactatcatttactctatatgtaattgtggttcttagtacatctatactttcttccaatacattgttaagtgaccttttactacctgaagttaaaaactttgggaaatggtatttttaaacagtattttaaaatatcactgatgttaaaatatctcagcttttctcaaagtgaacaaatttaaaacttaaaggaaatatatgagtacttacttctagttgattcctatccaaagtacataactttcataatgttcagtaatataatctaaaacttctagtagaatacatggcccatcttaaatattactacattttccagccttcttgcagatagatgtgaccatgtgactaaggtctgatgggtgatatataaataaaagtgatattggcaacttcggggtagtaatcttgctggggtgtaagggtatggttagyataagaatccttactccttccctctgggtggaatatagatgtaaatcctggaattgcaacagacaattaga

SEQ ID NO: 313662 - DNA, 586 bp, Homo sapiens
agtaatcttgctggggtgtaagggtatggttagcataaraatccttactccttccctctgggtggaatatagatgtaaatcctggaattgcaacagacaattagatcatgagctctccatgggaatacaaactatatgtgcttcagagccacaaaagcccaggtccctgacgtagtggagccaccataatcactcccatccaagtgcaaatctcaatacctttacaagacagagaagaaaacgccatcttgttaaagccactgtcattgggggtttgcaggcactaccagatgaatctaatcttagctgatacagcaatttgcaaagcttaaacttacttttctgagctagtgaagctattaaatacattgcagaaattcaattaagttactcattgatgatcagtgttgctcagtcagaataagctggaggaagtctctctgccacataataaaataaatattctaagatagaactatttcttcaaacactaaggtacattcacccttataccagttaatttcctataaaattgaagttggccttctttgtaccttcaatcagtttgtagagttgtgaatattca

SEQ ID NO: 313663 - DNA, 586 bp, Homo sapiens
agtaatcttgctggggtgtaagggtatggttagcataagaatccttactccttccctctgggtggaatatagatgtaaatcctggaattgcaacagacaattagatcatgagctctccatgggaatacaaactatatgtgcttcagagccacaaaagcccaggtccctgacgtagtggagccaccataatcactcccatccaagtgcaaatctcaatacctttacaagacagagaagaaaacgccatcttgttaaagccactgtcattgggggtttgcaggcactaccagatgaatctaatcttasctgatacagcaatttgcaaagcttaaacttacttttctgagctagtgaagctattaaatacattgcagaaattcaattaagttactcattgatgatcagtgttgctcagtcagaataagctggaggaagtctctctgccacataataaaataaatattctaagatagaactatttcttcaaacactaaggtacattcacccttataccagttaatttcctataaaattgaagttggccttctttgtaccttcaatcagtttgtagagttgtgaatattca

SEQ ID NO: 313664 - DNA, 588 bp, Homo sapiens
tacattataattatatttggtgtttatgcatctgtcttgttcactatgctgtaaacatctcaaaagaagtgatagtgttctattcatctcgtgtttcaacacttcacacagagtttatgcatggtatattctattggttttctattgctgaataacaaatggccacatatttagctgcttaaacaacacccgtttattatcatacactttccatgggtcagaagtccaggtgcatttgactaggttctctgcttatggtatcacaggccaaaaggaagttgtcagccaggctgagctctgggatctggggatgaatctgcttccaagccaattcggactgttgtcataattcagttctttgaatctgtaggatgcacaggtcatcatttccttgctggttgtcagcagggggrcactctgaccttctagaggctgtcatgtggcccttcctatccagaagccagctatggcacctcaaatccttctcatgctttgactctctctaccttccatcttttaagatggaagagcttgaacaaaaagctcttccatcttaaaaaggctcacatgatagattagacgagtgca

SEQ ID NO: 313665 - DNA, 610 bp, Homo sapiens
ttattgttataagctatcacataatatgtgcttcaccatttataaagttacctttcagtgttcagagctgtgtgtcagaacaaaagcacttatgcctaattaagtaataaccacataattgacaattacaggtcacatataatataaacattttctaagtaagtatttgtaattgtattagcagaaaatagtgattgtytattagatgtaatatatgccttaattagaatagtgagcacgaagcatattcttggaaaattggtaaggataatgtaatcaaactatcatttaagtagtaaaactacaataaacttcaaatcattcaattgttagattcctaatttataagataaaaaatttagtcagctgaatggtgctacaaagattgtgtctacttcctaatccctggaacctgtgaatagtactttatgtggcaaagagtaaatatcttatttggcaaaagatgtgattaaagttcttgagaggaagcacttatcctggattatctttgatggccctaaatgcaaccaatgttttcttatataagataggcagagaaagttttgagatagacacaaagggaaggttacgtgaagacagagccacaaac

SEQ ID NO: 313666 - DNA, 610 bp, Homo sapiens
ttattgttataagctatcacataatatgtgcttcaccatttataaagttacctttcagtgttcagagctgtgtgtcagaacaaaagcacttatgcctaattaagtaataaccacataattgacaattacaggtcacatataatataaacattttctaagtaagtatttgtaattgtattagcagaaaatagtgattgtctattagatgtaatatatgccttaattagaatagtgagcacgaagcatattcttggaaaattggtaaggataatgtaatcaaactatcatttaagtagtaaaactacaataaacttcaaatcattcaattgttagattcctaatttataagataaaaaatttagtcagctgaatggtgctacaaagattgtgtctacttcctaatccctggaacctgtgaatartactttatgtggcaaagagtaaatatcttatttggcaaaagatgtgattaaagttcttgagaggaagcacttatcctggattatctttgatggccctaaatgcaaccaatgttttcttatataagataggcagagaaagttttgagatagacacaaagggaaggttacgtgaagacagagccacaaac

SEQ ID NO: 313667 - DNA, 510 bp, Homo sapiens
ctcttaaaactgcatttatttatcaacaaaatgatacagtcttgagaaacatctacaatcatagactattataaactttgctatttcaaatcatatcagaaagcatggaacatgtcattcttgtctagaatatctgagcttcttgggtcacttcgatacagagaagcagctttgatttttcagaccagcttcagtgtctcagatacaggatttttgcactcacaattctgtgttcttctaacttgtagmttttaagaaaatggaacctgagtcttatttctcaacttgagcctgatacttaccttttacaaacagggctactttgctttgtgccaaacaaaacactgcttcatttaaattttacctaaacccaacccttggtcaaaattctgtaataacccttacgtcttcctttgttaggtgaggtacttttttttccctcaagtattcttccttattctggcaaattaataatcctaacttgtttggaccctaggttggtcttgttgt

SEQ ID NO: 313668 - DNA, 591 bp, Homo sapiens
aggcattgttatcatgggagatgacagctccatgtgtgttattgtccctgaagaccttctagtgcygcaagatgtggaggtgaaagacagagataccaatgattgtggccttgtgtaggcctaggctaatgtttgtgtcttattttttaacaaaaatgtttaaatagtaaaaagatttaaaaattttaaaaatagaagaaagcttatagaataagaatataaaggtgtctttgtacagctgtacaatgtgttttaagctaagtgttactacaagagtcaaaatgttaacatggttataaagttacagaaatctaaggttagtttattgaagaaaaaaattttaaataaatatagtgtagacgaagttcacagtgtttataaggcctacaaaagtgtacagttatatcctaggtcttcacattgactcactactcactcactgactcacccagagcaacttccagtcctataaccctcattcgtggtgtcgataaaaagagtcaaactctgtaaaatatttaaagagatttattccgagtcaaatatgagtgtcaatggcctgtgacacagccccaggaaatcctgagaaca

SEQ ID NO: 313669 - DNA, 591 bp, Homo sapiens
aggcattgttatcatgggagatgacagctccatgtgtgttattgtccctgaagaccttctagtgccgyaagatgtggaggtgaaagacagagataccaatgattgtggccttgtgtaggcctaggctaatgtttgtgtcttattttttaacaaaaatgtttaaatagtaaaaagatttaaaaattttaaaaatagaagaaagcttatagaataagaatataaaggtgtctttgtacagctgtacaatgtgttttaagctaagtgttactacaagagtcaaaatgttaacatggttataaagttacagaaatctaaggttagtttattgaagaaaaaaattttaaataaatatagtgtagacgaagttcacagtgtttataaggcctacaaaagtgtacagttatatcctaggtcttcacattgactcactactcactcactgactcacccagagcaacttccagtcctataaccctcattcgtggtgtcgataaaaagagtcaaactctgtaaaatatttaaagagatttattccgagtcaaatatgagtgtcaatggcctgtgacacagccccaggaaatcctgagaaca

SEQ ID NO: 313670 - DNA, 576 bp, Homo sapiens
gtatcaatagaaggggatgtctcttatctgtcttaaagagtcttttctattggtcttaaggtctctattttaatgttaatactggtcagctctgcctggattccaaagggaggagtatataatgaggcatgtctgactcctacttcccatcatggcctgaactagtttttcagattaactttggaatgcccttggccaagggaagagtccatcaatctgttgtggggcttaaaatttatttttggttttcaatggtaagggcccttatataggtgtaccattttaaaatcttttatactgtattttactgtaccttttctatgtttagatacacaaatacctatcattgtgttacaattgcctktaatattcagtatagtaacatgctgtataaatttgcagtctaggagcaatagcctatggcatatagcctaggtgtgtagtaggctacaccacctaagtttgtgtaagtataccctatgatgttcccacaaagacaaaatcacataagaatgtatttctcacaatgaaccttcatcattaaatgaggtatgactgtatatattattaggaatg

SEQ ID NO: 313671 - DNA, 650 bp, Homo sapiens
tttaacagttggcattttatcacaaggaatgacaayacactcattgatacatttacttatatcattattggcacatgtaattttatttttttctatgtttgtaatctgttatcattattttgatactcatattgttctatatttgtccaatgggttctccttctagttggctgctgtgtccttttgataagtttctctcatttttctaatgtttgttttgagatatactttatatgccatacaaatcactcatttaaaatatataatttgataagtatagtataatcacagagtaatcaaaaatcaacccaatctaagtttagaaatatttttatcactcctcagaaagagaatccccactaagcaatagcagtaattgcttttactaagccctcagtaattaccttctgtctctatagatttccccactccagatatttcatataaatagaatcacaaaatcatacaatatgtgttcttttgtgactagactccttcatttagtgcaatgttttcatggtgtgaacatgaagtggcataaatcgtacttctatctttctattgccaaataatattcccttatgtagattttttttgtttttttttaacccatcaattaacagatgtattattcagggttcaatcagaac

SEQ ID NO: 313672 - DNA, 650 bp, Homo sapiens
tttaacagttggcattttatcacaaggaatgacaatacactcattgatacatttacttatatcattattggcacatgtaattttatttttttctatgtttgtaatctgttatcattattttgatactcatattgttctatatttgtccaatgggttctccttctagttggctgctgtgtccttttgataagtttctctcatttttctaatgtttgttttgagatatactttatatgccatacaaatcactcatttaaaatatataatttgataagtatagtataatcacagagtaatcaaaaatcaacccaatctaagtttagaaatatttttatcactcctcagaaagagaatccccactaagcaatagcagtaattgcttttactaagccctcagtaattaccttctgtctctatagatttccccactccagatatttcatataaatagaatcacaaaatcatacaatatgtgttcttttgtgactagactccttcatttagtgcaatgttttcatggtgtgaacatgaagtggcataaatcgtacttctayctttctattgccaaataatattcccttatgtagattttttttgtttttttttaacccatcaattaacagatgtattattcagggttcaatcagaac

SEQ ID NO: 313673 - DNA, 524 bp, Homo sapiens
aaataaaataataattttttaaactgtgtatatttttaactatcttcttagtgattattctagagcttactatgtacatgtagacatagatatgtatgtgtgtatatatgaacrtacttcagatttatacttaaattctagtgaaatatagaaaatttacttatatagtttcactcccttctcccagttggactattgtggttacacatattgcacccgtgtacatggctattattattactttacataatcttatgtcttgaagctcagagaagaaaattaagtatatatttattaattttttaatgcttttattctttctggttctattctttcttcctgttagttcaggttaccatttgatatctttttctctactcttgttaaagttttgtcctatcccctcctatgtgtggttactatcaaatatattacatttttatacatgatacaagttttaaaagtctgtttatataattttacatagatattaaataataaaaaaatacatattatttattact

SEQ ID NO: 313674 - DNA, 524 bp, Homo sapiens
aaataaaataataattttttaaactgtgtatatttttaactatcttcttagtgattattctagagcttactatgtacatgtagacatagatatgtatgtgtgtatatatgaacatacttcagatttatacttaaattctagtgaaatatagaaaatttacttatatagtttcactcccttctcccagttggactattgtggttacacatattgcacccgtgtacatggctattattattactttacataatcttatgtcttgaagctcagagaagaaaattaagtatatatttattaattttttaatgcttttattctttctggttctaktctttcttcctgttagttcaggttaccatttgatatctttttctctactcttgttaaagttttgtcctatcccctcctatgtgtggttactatcaaatatattacatttttatacatgatacaagttttaaaagtctgtttatataattttacatagatattaaataataaaaaaatacatattatttattact

SEQ ID NO: 313675 - DNA, 577 bp, Homo sapiens
tggtaactatcttaactatctttctactgtctatctctgagttcaattgttttaatgtttagctcctgccagtaagtgaaaacagatgacatttgtctttctgtgcctggcttattttacttaacataatgacctccagttccattcatattgttgcaaatgataggatattatttttctttatagctgaatagtactccattgtgtatacataccacattttctttatccatttgtctgctgatggacacttagattgcttccaaatcttagctaatgtgaacaatgctgcaacaaacacggaaatgcagatacccctttgatatattgatttctttcatttgagtatatatccagcagtgggattgttgaattgtatgattgttctattttcagtattttaaggaacctccaaactgtttttcatagtgattstactaatttacatgcccaccaacagtgtgagttcccctttctccacatcctttctagcatttgtaattgcctgtcttttgaagtgagatatctcattgtagttttgatttgcatttctctgattatcaatgatgttgcacac

SEQ ID NO: 313676 - DNA, 581 bp, Homo sapiens
aatgataggatattatttttctttatagctgaatagtactccattgtgtatacataccacattttctttatccatttgtctgctgatggacacttagattgcttccaaatcttagctaatgtgaacaatgctgcaacaaacacggaaatgcagatacccctttgatatattgatttctttcatttgagtatatatccagcagtgggattgttgaattgtatgattgttctattttcagtattttaaggaacctccaaactgtttttcatagtgattgtactaatttacatgcccaccaacagtgtgagttcccctttctccacatcctttctagcatttgtaattgcctgtcttttgaagtgagatatctcattgtagttttgatttgcayttctctgattatcaatgatgttgcacacttttcgtatacctgtttttcatttgtatgtctgcttttaaaaattgtctattcagatcttttaccaatgttttaatcagattactagaattttttcctatggagttgtgtgaactccttatatattctgcttactaatcctttttcagataggtagtttgaa

SEQ ID NO: 313677 - DNA, 587 bp, Homo sapiens
atgacatgacattgactggtttgtacatattgaacaatccttgcatccctgggataaatcccatttggtcatgatgagtgatctttttaatgtattgttttattggtttgctaatattttgttgaggatttttgcaacaatatttttcagagatattggcctgtggttttcttcttttgataggtctttgattttggtatcagggtaatactggccttatagaaagagtttggaagtgttcctccttttctatttttccaaatagtttgagtaggattggtattagttcttctttaaatggttggtagaattcagcagtgaagccatcagtcctgggcttttctttactgggagactttgtattacagctgtgatctcatgacttgttatttgtctgttccagttttttatttttttctagttcattctyggtaggttgtatgtgtctaggagtttatctgtttcctgtaaatttccactttgttgccatacagtttctcatagtagccactaatgatttttttcagtttctgcagtatcagttgtaatttttcatttttcatctctgactttatgtgtttggacct

SEQ ID NO: 313678 - DNA, 529 bp, Homo sapiens
agctattattctattgagatctagtttcctctttagctctaataatatttgctttatatatttsggtactccagaattgagggcatatgcgtttacagtctttatgtccccttgcttacttgactgttttatgattatataattaccttctctgtctcttcttgcagttttgtcttgaaatctatcttgtctgatataaacacagtgattgctgctcttttttgttttccattgttatggaatatgtttttccatccctttttttcagtctaactatatatatctttgtaagtgacctgtgtttccttttggcaacagatattgggtcttctattttttctgtattcactcagtcactctgtgttttttgattgaagagtttagtcaatgtacattcaatattattgttgataaatgagaactcacctctgccattttgttatttgttttctgcttgctttgtggtcttatcttccttctttcctttctgtcttccctttagtgaaagtgattttctctggtggtatga

SEQ ID NO: 313679 - DNA, 578 bp, Homo sapiens
tcatttacatggttgtttgctggggaaatggtctgctgcactcttcacatctctattccaagattcaatcttctacaacgtgtttttaatacagtgtcttctctcaggccctagttataaagtytatatgctgatatttcaagtagataactttttgtatttccatggcaacatgttaaatagtgatcccacagaatgtttagaatataatatactgtaaagttgtttttaatatcactctgtgaagtattttttaatatcactctgtaaagtaaaaattaatgctttgggatttgatgaactctaggaaagtattttctgcatcctgctggttgtggaagcattttccctgcaaaaagttgttgagatatttgaagaagtggtagtcagttggtgagaggtgaggcgagtatggcagatcaaacaaaacttcataacccaattcattcaacttttaagtgttggttgtgcaatgtgcagtggggtgttgtcatggagaagaactggaccctttctgttgaccaatggtggtggcagatgatgcagtttttggtacatctccttgatttgctgaacat

SEQ ID NO: 313680 - DNA, 623 bp, Homo sapiens
tttctaaattttataattcattcatgcaattgccttgggggatttgcatagaaacttactaagtaactacccttaacacttttatttctccaatggaaaaattaattctaacacccattatgctactaataaacaacctagcttgtgtaaatttccatatcagagtgctaagttaccacctctaaaggtgttgatttctaattggggtgcttccaatgatatgctgcttagccacttgtgaagtgtgtattcctgaatagggtgctatatggaaacttacactaggatataaattcgagttaacttgtatacacaaacatgtatcacactgttaataccaaaatagtcttaaaataaattctacacggacaacaaaatggcaatgttaggaaaaacaacacagaaactcaaagcaactatcatcatatgtttttcttttcattgtccgttaggtgtgctttgttttmtttatttatttcataaataatcattaatcaaaaatgtgttgagcatccattatacataaatagtattgtcaggtaattgagtgatcttaaaatgattaagtcttagttcttcaaacagaatagaaagaaaataaaatattatcaaatgtcccacca

SEQ ID NO: 313681 - DNA, 584 bp, Homo sapiens
gcaactttctttgcattcctctttatttgcttttccctaccacatgtatacaactccctaacattctatatttatgtttctgtgaggtgtcaaatggggtggcatcctgaatcctcccctttctcctattcttcaatttcctctcagcaatcaggagagttgaatgccaagagcagtgatcattcattttcccttatttgttgtgaaagatttatgcaattgtggagtttcccttagtaaggatgtatgcacctgaataactgtatggatatatggacccatctgagatattttcaactggtggtggtttaatgtgctttagggacccaggactttattasaagagattcttaaacacaaatacttctataattgaagttaaaattgaaacttatttttctctctgtcttgataattggctactttataaaaaagtgtttggattattttggttgcaggaggaggagttttataagaggacaccatgagatggtgaaatatgaggaccaaaacctgtttcagaggtcaaaagcggaaccaaagggctgcctccaacacacaaacatgttctgttttccccacat

SEQ ID NO: 313682 - DNA, 546 bp, Homo sapiens
taatgcttaggggtttttctgtactatatgactaggtcatggtaacaaaggtgggtggatgtagtgaatagctgaagatgctaaaggaaatagtttagcctaaggggaaaaacaggggatggacatttggattgttgaaataaaaatgaacctcatctgtgaaggtgcaagtgagaagtaatttgtctattttactcagcaggatcttggttggacatttctactgctccagtaaatcacttatggaaactgcctctttggacaatgtattagtttcctattgctgctgaaacaaattgccgcaagtcatagtgacttaaaacaacacaaatgtgttatcttatagwcctggatgtcacagtacaggacgagttttcctggggataaaattcaggtgtggctatgctgtgttccctctggagggtctaggggaaaatctgtacccttgtctttttaagcttctaaagactgcctgcgtttcttggctcatgctccttctgccatcttcaaagtcaacaaagaccggtgttatctcacatcaaatcc

SEQ ID NO: 313683 - DNA, 588 bp, Homo sapiens
gacacagctgtgttggcctgcttttgtagttttcatatttatagtatttttgtttgtttgtttgtttgtttgttttggtatataagtttatttcatcatttcttttaaggaatttgtgcttgtgccaggatgactaatgtatttaaaatatatttttagtataaattcttctttatatgacttttagttcactgaatggattaaaaatattttttcaagtatactatatatctataggttgtacttcaggattttggatgagttattaagttatacatttacttaatttggtctgatggcttgagaactcactaaggacctgatagtacaaggctcaggctactttccttatactatcctgtccttagtgaattgggggccaggtctaggagctyctcatgaagtaattaaaagccgtgtgtcagtgacatcctgatgaatattgcctgctcagactggttagtgcctactattcttttagcctcaggaagggcgacccaccaggtttgccttctgattgttgcccaactaatggtactgaccccaacatctgtgaatatgaaaaacttgatgaaaaaagtgttataa

SEQ ID NO: 313684 - DNA, 588 bp, Homo sapiens
gacacagctgtgttggcctgcttttgtagttttcatatttatagtatttttgtttgtttgtttgtttgtttgttttggtatataagtttatttcatcatttcttttaaggaatttgtgcttgtgccaggatgactaatgtatttaaaatatatttttagtataaattcttctttatatgacttttagttcactgaatggattaaaaatattttttcaagtatactatatatctataggttgtacttcaggattttggatgagttattaagttatacatttacttaatttggtctgatggcttgagaactcactaaggacctgatagtacaaggctcaggctactttccttatactatcctgtccttagtgaattgggggccaggtctaggagcttctcatgaagtaattaaaagccgtgtgtcagtgacatcctgatgaatattgcctgctcagactggttagtgcctactattcttttagcctcaggaagggcgacccaccaggtttgccttctgrttgttgcccaactaatggtactgaccccaacatctgtgaatatgaaaaacttgatgaaaaaagtgttataa

SEQ ID NO: 313685 - DNA, 627 bp, Homo sapiens
ctgggattacaggtgtgagccaccatgcctggtagggattagcattttaattggtagcctgagtaaagcagatcactctctccagtgtgggtgggtatctagtctgttgaaggcctgaatagaagaaaaggcrgaaggtgagagaatccacccctttggcttgaatgcttgagttggacatgggtcttttgccctcagacggagacatccttggctcccctggttgtcaggcttgaactggtttgcaacacaggcgttcctgggtctccagcttgcagatggcacatcatggaacttctcagcctccacaattgcatgagctaattcctgataataaacctcattctggataaatatgtgtataatcatgtgctaccttatgacatttcagcccatgattgactgcatatatggtagtagtcctctattattctgtttttgcacttctataaagaaatacttgagacggggtaatttataaaagaaaaatttaattgactcatagttctgcatggctggggaagcctcaggaaacttacaatcatggtggaaggtgaaggggaagcaaggaccttcttcaccaggccgcaagagagacaagaagcaagagcagggaaaactgcctta

SEQ ID NO: 313686 - DNA, 594 bp, Homo sapiens
ttgttctcctttttctagtgtcttaaggttggttagtgctttctgattctgattaagaatttttgacaatgattagtaaatgttatatcatatattagatgtcacatattgtatgttaaatattaaatatatacaatcttctgggagatgcattattttgacttccacatgtagatctgcatctacttggaagtgactttgtataagatgtgaagtaaacatccacttttatttttttacatgtggatatccagttatcctataataattttttaaaataaattaaatctgttttttatcaactgttctgcagtgtcatctttttcttaaatatcaatatatacatggtatgtgttgatttttttatttcattggtctatttctctgttgctgcactgataccacactatcataactactatgttttataatacatctgtaataaggttttgtttgagatgcaaggcraagaatcagttgcagttttctcatgtggataaccagttgttataggactatttattggatagtccaaaatttctacattatctgaaatatcaaatttctcatgtaaatgtttaaaaatacatgtct

SEQ ID NO: 313687 - DNA, 649 bp, Homo sapiens
aaatttagagaggtaagttcatgaatatcatttaagcaaatattattttcactcgactttgaggtgcagttgggatttggggcacattcttttacacaaatcatcaaacttagatctgtgccctctgtttcaagattgagggcattctcaacactcttttatcttgagctctatgtgaattgccacttcttgtatctgttcccaaaagataactcataaatgaaaaacctacagtgacattaatgagtcatacaattggcaaacttaaaaatcaaaattccttgatcagggcaaaaattatgatgcctaatacctttagcacttgttactacattgttctaagtactttgtrtatagtaatttctttaaactttactaccataccacagataggtgttctatattttggatgaggttaattaattttccttaggtcacacaagttattaatttgcatccatataatatgacttcagaaccgattctcttaactgtcacactcaacttcctcaaagttagtaataggggaattcaattaaagttctggttttcggttccaaagacggttatctgatgctttgtccaagaatagacaggctggtagatatttacagtaactggtatgtatgtatgcattgttttataagat

SEQ ID NO: 313688 - DNA, 649 bp, Homo sapiens
aaatttagagaggtaagttcatgaatatcatttaagcaaatattattttcactcgactttgaggtgcagttgggatttggggcacattcttttacacaaatcatcaaacttagatctgtgccctctgtttcaagattgagggcattctcaacactcttttatcttgagctctatgtgaattgccacttcttgtatctgttcccaaaagataactcataaatgaaaaacctacagtgacattaatgagtcatacaattggcaaacttaaaaatcaaaattccttgatcagggcaaaaattatgatgcctaatacctttagcacttgttactacattgttctaagtactttgtatatagtaatttctttaaactttactaccataccacagataggtgttctatattttggatgaggttaattaattttccttaggtcacacaagttattaatttgcatccatataatatgacttcagaaccgattctcttaactgtcacactcaacttcctcaaagttagtaataggggaattcaattaaagttctggttttcggttccaaagacrgttatctgatgctttgtccaagaatagacaggctggtagatatttacagtaactggtatgtatgtatgcattgttttataagat

SEQ ID NO: 313689 - DNA, 569 bp, Homo sapiens
gcagaactagtatagtcattaattggcagtgggtttaatatatgaaataggatattagttaatagcaaactattaagctatagttacctgggttcaagtcccagcactcttttagatacacaaccttaagtaatttacaaaaaaaactttctgtgcctctgatttctcatttataaatgtaaagatgatgacactgattttaaatatatcctagacttcttataataattaaatgaattaacatgtataaaatgaattctgccttttacagggtatgtgtcatataattactaatgtgttattaatagtctgtcttttttgagttagaaaaatttaactttaattgaaaaaaatatatatatacacacatacacaaatacatgtatagttacaaacagtaacaaygaatataaataaaagtcattatgttgtagaggaatgatatggtttgtctgtgttcccacccaaaatgtcattttgaattgttatcctcataatccctatgtgtcaagggcagaaccagttggaggtaatcaaatcatgggggtagtttcccccatgttgttctc

SEQ ID NO: 313690 - DNA, 621 bp, Homo sapiens
acaaacagtaacaatgaatataaataaaagtcattatgttgtagaggaatgatatggtttgtctgtgttcccacccaaaatgtcattttgaattgttatcctcataatcyctatgtgtcaagggcagaaccagttggaggtaatcaaatcatgggggtagtttcccccatgttgttctcgtgataatgagttctcatgacatctgatggttttataagtgtctggcacttcccctgcttacactcactctgtcctgccaccctgtgaagaaggtgcctgcttcttatttgccttccaccatgattttaagtttcctgaggccccccccaccaatgtagaagtgtgagtcaattaaacctctttcttttataaattacccagtgttgggtatttcttcatagcagtgtgaggatgaactaatacagtaagttggtactgagagttgggtgctgctataaggcctggaaatgtgaaagtgactttggaactgggtagcaggcagaggttagaacagattggagggatgagaagaagacaggaaaatctgggaaagtttggaacttcctagagacttgttgaatggctttgacaaaatgctgatagttatatggacaatgaagt

SEQ ID NO: 313691 - DNA, 575 bp, Homo sapiens
catccagtctgtagtatttttatggcaaccctaccaaacaaatatacccccctctctttttgtcttttctatttttaaatattaaatctgcacccctgtcagtggaaattatcatgataaaccatttgatattgaaaagattgtgagttattattttggggctcctctaacatgctattttccaaaggttattgattatagctaaaataaattcagtttggcaaacaaacattaatgtggtatcatgtcctgtgactttgattttagcaaagctcctattgaagccctggaattcaagcctgagtactagttcaccattcacagccttgtagttggagcacttggatagttctaataattccttgcatgactctcaataattaatgctttggttgttttraatgtttcaataccaaaaaaaaaaaccttacaccaagtgtcagatgttcaaattataataccaaatagatgttctgcagtaatttacatgaaattaattctatccagagttctggtaaaaattagaaaccatttacatgctgggctgtggtagtttatgtgtcactagacccctg

SEQ ID NO: 313692 - DNA, 477 bp, Homo sapiens
ctgatgtccaattaagcaagtgatgctcctatgctacctatgtatgtataaatgaaagcaagtgattctacctatgtagaatgagacaaatcccaagcaatatcttcttaatgtaacatttttcaaatttaacattttagtagctcaggtacacatttcttttggagtactaaatctcaaaagcccattgaaagctgtcttgggtaagagaaacatgtatctgattaagactaaaaatgttattaaagaaggtagagagaggtactggccaaccaaygtaattatagtttcttgccttttttaaacaactggaaggatttgaccatgcatgtgcttctattggagagtagagtaggtaagcatcagttaagattcattctatggcttcacagaagacagtaaatagcagcagggcactcaaagtaaccccagagtagggctcgtgtctatggacttgggttatatgggtattagtct

SEQ ID NO: 313693 - DNA, 566 bp, Homo sapiens
ttgcagattgaaattgcccataaattcaaygcatttacatgaaatctgtctgcaaatgttatgggcattatttatataattttttctgttacttaaaactattaatataattcaatgataagagtgcttgtcttgatttcaggtattctgagaaaagctagaagagaaaatagaatgagacacatcccaagcagtatcctcttaagtagattttccagggggattaatgtgcaaacagccacatgttttatgtacttatggataagtagatgaatgctctctgtgggtggtacagcgtgtttggccagaataagggtcagcagactacagtgtgtgggttatatttggccagctgcctgtttttataaatggggttttattggaacacagcaacactcatttgtttacagatcagctatggctgcttttgtgataaaattgcagtgctgagtagttgcaacagagactgtttggcttgcaaagcctaaaatatttattctggctttttacaagcttgacaatcctttgactaaatcaaaccaagtcaagtttcagaagtgagtata

SEQ ID NO: 313694 - DNA, 573 bp, Homo sapiens
tcaccatcttggccgggctcgtctcaagctcctgacctcaaaagatctgcctgccttggcctctcaaagtgctgggattacaggtgtgagccactgtgcccagccaagattacgcatctttcttaagattgtgtgtgtgtatacatatgtgtatttccttctggggaaagtcaaggtgagagaattccaaagaggaaatataagctcatcaagttgtttcaaactatgaagaagggttaataaaaagaagggggcctggaaatgctctctataccatttagagaaacttgactatgtagcaccatgcttttgcaacacactttaagctggggaaatgccttcacagttttctttgggtcctttgctccctagaataagccagtgaaaatgctgatcacagcctttgtgttgggatgatgattttttttcttcactcaaggctsagaccccctagattggcagacaggacagggggtgatatgtgtaaatgtcagtatgtgctccctcttccccatatcaacataagccagtaatatatcacattaacaaccagcttagagataaatgagagga

SEQ ID NO: 313695 - DNA, 321 bp, Homo sapiens
aagttatttcattcagtatttaacaaatatttgccaagaattgactccctgccagtaatgagactggtggccttwcttctaaaatggaaggttgagctgaatgatcctttttagtttgagccacccactacataatctaatgctgcgggaaattttggtaggtgggaggaacaggagaaaggggtggtaggcagaatcatggcccgcaaaggtttccatgtgctaatttctcaaacccatgagtatattatcatacatggcaaaaggaactttgcaggtgtgattacattaagaaccttgagataagattatcatggatta

SEQ ID NO: 313696 - DNA, 609 bp, Homo sapiens
cttttttcttgaaaaataaaccaaatactatccccttaaccattactcaaaagatttgcatttttaataagtgcgttccaaatgaggtttagttcaaccagcctttgcaaattagcaatggttcatatgcccaaagaacaaattatttagataacacaggagttctgttcagcagtatcagatggatcattcctgagtgttgaaaagggccatgtgcgttttgttggtgtgaacggcttgcattaacctgttcagacttagggatctgttttccaaagcactgtcttcaacaaagttaaaggcmagttttgaaaacacagatttctgagtgttaaggaagtgtatatgtacaatgtggagaccccttataacttattttttgttgttgttcttatctccaaaatctttttttatcttaattacaaatattgtaggacaataatgcatgaaaaataaaacatcatgtgttaagccactctcataatctcaagcattatctttactgctttctttccccaatttccttgtctctgaccctatgacaccttctgtacctcagccttaaataaccagtgccctcatacataattaaggattgctctgagaatg

SEQ ID NO: 313697 - DNA, 525 bp, Homo sapiens
tgactcattacctacagggaaacaatgattcacaaagccactgacttctaattagaaaccatagacacccgaagattttggaataatgtctttaaagtgctaacataagtcatggaacgaggtaagatcactaagggaggagatagagaagaactgagtaattacatagatgtgatcagacagaaaagaaagcccaagaatgggaggtgtcctggaaaatgtatctaaaaggagagaatgatcaaatgtgtcaaatgctgctattggaccaagggcagaacactgaccattggattgagcaatgcagaagtaaataataattgtggcaggaacagttttggtggaatggcttaaagcttggttgcagtgagtttaggagaaaatgagaaaaaaaattggaaataataagtaaaggcaactcaaagaattttactttgcatagggagaaatgaaatgkagtactagtcaatgtagaggtaggatcaagagaagattttgttttgttagcatgctaattagcataat

SEQ ID NO: 313698 - DNA, 498 bp, Homo sapiens
tcctttgcttcctagcctttactatttacaacttggtcatttttcaatgtaatatttgaaaagtatgtctattgaaaattatgtaaaattttatgattttggagagtagtaactgatttgttcttttgtgattttaatttgtgaacattctttaaacagtgaataggatctatttcaaaaactatytttttagttttaaaaagctcagaatgcatttttctgataatatttttattatatgaagtagtttattctggttagttcataaaattgtataaagtagctaaattgtattactgattatctgggaagtttcaggtcttcagatttttatttctatggtgaaacttattctaatttccaacccaagattctggaacacatctcccattatgaagtgggcctcaggatgggagcggaaacagagcctcttgttcacactccacaccctcattttccagcagtgagggtagactattaaggctctcatgtcatcaa

SEQ ID NO: 313699 - DNA, 598 bp, Homo sapiens
  misc_feature (1)...(598): n = A,T,C or G
nnnnnnnnnnnnnnnnnnnnnnnnnnnnnattataaagctgttggacagataatacaaacaggcttttaactcagttataggacattataacacaggcaatatttctacatcataaaaataatagtaaagaacaatkattaaaatccagaatatttaaatccttatttatatttttaaataaaattaaaacacatttagggaaagtacatacatacttttaaggatataatatcgatatcatttatccacctggattttgtgaaattcttactcttcattgtcatattaagccttaaaaattagctttctttatttcagggggattaagtagaaatctgtcttcactgtttcattcgctctagtggtagacattaaatctccttcttggaattaaatgtcttacgaatatgtaaaaacagaaaaaaatatttttggtgaacattttcttgaataactttgtgtttctaatgtaataatctgtatgttatctttaaaccacttgaaagtatctttgggctgaaaaaggaagatggacaaagatctgtttcagttctgaaatgctatgatatcacacttcaagtctttttcttaaatagc

SEQ ID NO: 313700 - DNA, 598 bp, Homo sapiens
  misc_feature (1)...(598): n = A,T,C or G
nnnnnnnnnnnnnnnnnnnnnnnnnnnnnattataaagctgttggacagataatacaaacaggcttttaactcagttataggacattataacacaggcaatatttctacatcataaaaataatagtaaagaacaattattaaaatccagaatatttaaatccttatttatatttttaaataaaattaaaacacatttagggaaagtacatacatacttttaaggatataatatcgatatcatttatccacctggattttgtgaaattcttactcttcattgtcatattaagccttaaaaattagctttctttatttcagggggattaagtagaaatctgtcttcactgtttcattcgctctagtggtagacattaaatctccttcttgraattaaatgtcttacgaatatgtaaaaacagaaaaaaatatttttggtgaacattttcttgaataactttgtgtttctaatgtaataatctgtatgttatctttaaaccacttgaaagtatctttgggctgaaaaaggaagatggacaaagatctgtttcagttctgaaatgctatgatatcacacttcaagtctttttcttaaatagc

SEQ ID NO: 313701 - DNA, 559 bp, Homo sapiens
tggtacacttttggttacctttgtcctctaaatcttacctgtaggtgtaaaaacaaaggtcttatacattttctcagaagtctgtatccacgtgttctctgcctgaatgtattttctcagtctggccctagatcctcacctctcattctgtctcttgactagctggatggtagaatagattcagctttgtgtgaagcgccatgaacagcctaaccctaaacaccccgctcacataagctcctccaattatgtggaccagggcaatttctaaataatctctgggcttacacatcaccaccacatcagtgaccaatcaaggctatgccacatttcccagacaacacattctgtagttctctattacsttgtcttgcctgattatctgtaacatccacattggcttggaagctctgttccctttgctttctatgtctctttctgctgaatgtgattttattattttgtgcatttaagcaactctgacccttcttgattctctgtggggtgcagaagcaccaccaatgcctcccttcactaccaagagcatagacctcgcacc

SEQ ID NO: 313702 - DNA, 531 bp, Homo sapiens
tccctctccagcatggccggctctctgtcgacttccatcacgcactgcaagggtgtcttgtcactagggggcatctctcgagtcagatggtagatgtcgatgtgctcagggatgggcactccatgtttcccaacagcagagagcagcatggaattttcagttccatttaagccaatgaggccataatgacggactgagttcaattccagtttggtgtcactgggcagctcttgaccgtgaaaggtgagtgagaggttgataatgtgaacgtcagtactgcagggatgggaggccaggatgccagtgacagctcgagcagtagctttcttcatttcaaagtcctctagctccttggtcagcaaatccacttctgcggtgtctttgccattggcctcatttctgccayctgtggttctgtgacagcgtctccattttcttcatgtccttttctgggctgctgtagagctttggcagactccttctttttggcagccttcttcttggccaggtcagagggcatgataatgaccc

SEQ ID NO: 313703 - DNA, 531 bp, Homo sapiens
tccctctccagcatggccggctctctgtcgacttccatcacgcactgcaagggtgtcttgtcactagggggcatctctcgagtcagatggtagatgtcgatgtgctcagggatgggcactccatgtttcccaacagcagagagcagcatggaattttcagttccatttaagccaatgaggccataatgacggactgagttcaattccagtttggtgtcactgggcagctcttgaccgtgaaaggtgagtgagaggttgataatgtgaacgtcagtactgcagggatgggaggccaggatgccagtgacagctcgagcagtagctttcttcatttcaaagtcctctagctccttggtcagcaaatccacttctgcggtgtctttgccattggcctcatttctgccacctgtggttctgtgacagcgtctccattttcttcatgtccttttctgggctgctgtagagctttggcagactccttctttttggcagccttcttcttggccaggtcagagggcatgatratgaccc

SEQ ID NO: 313704 - DNA, 609 bp, Homo sapiens
tccctttctttttattttttcccaataaacctataaatatgttctagtagtatctatttaaaaataaacatttttgaacctacattatcttccaggtactatctcatttcaaatcatttagaaaagaagaaaaacaaaaaaaaagttatttcatagttgtttactactgtcatcttcagtttcacttactccaactactcttctacttcttccaatctggtttccacctgcccagcataacttacattcctcatttcaaggtcacaaaagacctaaatgtttgcaaaattcaattgaatctctttgttttattcttacataatgactcagcagcattagctcaccacacctccttcctgaaaccctctcctctctcaccttccatatcactacacacgcccagttttcctcccgcctcaccrctctttcattttcagtctcctttgctaactattcggcctgcgaccaatgtgaagttactggattgcatcaggattctaccttgagtcactttttctctttgtcttatactctctcccaaggtgatttaatgctatggaatatctttatgctatttccaaatcttcatctccatctaacatctttccc

SEQ ID NO: 313705 - DNA, 639 bp, Homo sapiens
ttgctcattcagaagtaccataatattctcagtgcttgaggtctccacaggtcttaattaagccccatctattggcagcttctgcctagccctccccattctgttagggaggaggcagtgtcactcttctgactgtatcacagactcatgtcacagatttrttgggactatctgcccttcatttcctcaatactgatgtcctgactatagaggattgtaccaaggatcactttctatctcaaaggtagccattctttgtaaaaaggcaactctgagatggcttagtctaagaatcatattcggaagaaatatcctacaccaagtagtggctaactgaacaagttagattgaaaaggatatagagaaactcttcatgctgcaggaaaattgggtgaagaatcagattgggagagagcaaagaatacgcctacagtaaaagtggttgcctgtggtcactttccttggaatgagtagaactcatagttgatctcctggtcagaacaagttatcttctaagttcttttttagaaaaacagtttattgatgtatgattgacacatgaaaaggtgtggatatttaatgtctataacttgatacatttttagatcagcatatacccatgaaaccatcatgacaatt

SEQ ID NO: 313706 - DNA, 505 bp, Homo sapiens
tgtacagatagaatagagaaattgatcgtctatattaaggagcagaagaaaaggagactgctgggtacacttttttttkctcccttctgtttttctagtcttttagaagttgtgatgaaggaagtgtcaagattacaaggagttagaagtctcctctgtctcaatgcacagactttggaagctatgggacagatcagggagctatgtctgggagagaggagtagatgaaagggactccagaagcagaacaggtccttgtagcatggaaaaagcccatttcatagatgaggaatttgaggcactaatatgtgaagaaaacctgatcaagtttccatgcctagggagcagaacacgagtctgatccttcagtccccactcttaccttgcactcgttgtttcctctcctccaaagaaaatgatgtttcaagtgccgatttaaaaaaggtggcagtttagatagaaggtggattttgttcttccagaatgtagaagagtagcatcacaa

SEQ ID NO: 313707 - DNA, 587 bp, Homo sapiens
aagtcacacaaatagaatgtggcaaagacagaagttggccccaagccaagtctgcctaattcccaaacctatgctcaatccctcacccacagagagtggcgagatgaccagtacacttgaaggagcagcccaccagcttagtcttgtgccccagcaaaattacaggaatgtgttgaaactcactgttctcatctataagattactctacacaatcttcaggaacccagaaaaataaattcccagaatgagtggggattctgggatctgtacttttytttaaatgtggtttgtttttgcaaagtcagttacctaattaaatcctttgccattctcagattattctcatgaaaaaattgacgtcaacacagagaaaaaatgtccttagatctacaaaagcacgagaaagctgtctaggctacataaactctgtttgctctttaattctgtccattatgtgctttaaacatttccccaagaaagtgaaattacatgctataacaaagactgcaatgtatttttatgtatttgagttatctgtttatggtacttttaaagaatactttatttgctattttaataacaagga

SEQ ID NO: 313708 - DNA, 587 bp, Homo sapiens
aagtcacacaaatagaatgtggcaaagacagaagttggccccaagccaagtctgcctaattcccaaacctatgctcaatccctcacccacagagagtggcgagatgaccagtacacttgaaggagcagcccaccagcttagtcttgtgccccagcaaaattacaggaatgtgttgaaactcactgttctcatctataagattactctacacaatcttcaggaacccagaaaaataaattcccagaatgagtggggattctgggatctgtacttttctttaaatgtggtttgtttttgcaaagtcagttacctaattaaatcctttgccattctcagattattctcatgaaaaaattgacgtcaacacagagaaaaaatgtccttagatctacaaaagcacgagaaagctgtctaggctacataaactctgtttgctctttmattctgtccattatgtgctttaaacatttccccaagaaagtgaaattacatgctataacaaagactgcaatgtatttttatgtatttgagttatctgtttatggtacttttaaagaatactttatttgctattttaataacaagga

SEQ ID NO: 313709 - DNA, 628 bp, Homo sapiens
aacgtttgtaaagtattgtacttttatcagcagtttaagagatagtctgtttccctagactgtaatattatttataattgtaaaatattgtactaaagaaaatgcaaatttctaccttggcattgtatataagttcctgcctgtgattatcagtgttaaatattttaatatctttatttacttaatttgtctttattctttcttgataacctactcatgttatttggctattcttctattaaggaaattatctttttcttattgctcttaagattttctaacaaactggtttgattaaccatttttcatgtaggttgcaagtatttgtcacttatatgttggggttttgcattattaattaatcacacttctcatccccatgccacatatacataaaaatacctatgcatgtttttttattttgaaaaatattaaaaacactgaaagtctgaaagggcagtacagaaaaacctatatgatttgttaacagctctgcaatacctattgcctatctacatatgtaagcatgcacacacacacatacacacayacatactcaacttttgtcaaaccttccaaaagtaggcgtgaatgtacttctaaaagtatatgtcactcctaaatactt

SEQ ID NO: 313710 - DNA, 570 bp, Homo sapiens
tggctattcttctattaaggaaattatctttttcttattgctcttaagattttctaacaaactggtttgattaaccatttttcatgtaggttgcaagtatttgtcacttatatgttggggttttgcattattaattaatcacacttctcatccccatgccacatatacataaaaatacctatgcatgtttttttattttgaaaaatattaaaaacactgaaagtctgaaagggcagtacagaaaaacctatatgatttgttaacagctctgcaatacctattgcctatctacatatgtaagcatgcacacacacacatacacacacacatactcaacttttgtcaaaccttccaaaagtaggcgtgaatgtacttctaaaagtatatgtcactcctaaatacttcagcatgcatctcccaagaaggaaaatattatttccaatgaaaccacatcattaccacacccaagaatattaacaatcakagtattatttaatacacagttcatatacaaattctcccaatcatcctcaaaatgttttttcaagattcaagattcaattatgtata

SEQ ID NO: 313711 - DNA, 607 bp, Homo sapiens
ggcattaatatactaattcaactttcactggaaaaaataaaaaacttagcaataaaaaatttagcttctgaaagccaaaatagggatacctacttctatccattaaaacttaccattaacccttgcaccatatcatgtgtgtggctgaaaaatgacaattcatatatagccacgtgctgcataacattttaggcaacaatggactgcatatataactgtggttccaaaaaattataattctgtatttttactgtatcttttctatatttagatacagaaataccggtgtggtactatctccttacactattaaaaacagtaacatgctgtacagatttgtagcctaggagtaataggctacaccttatgctctaggtatgtaatgtgctctgccatctaggtgtgtgttagtacactcaacgaagtrctcctgacaatgaaagctcctaactacacatttctcaaaatgtatctctatcacattttgtctagtggcacaagactgtgctcctattcccactaaccacaaaaatttcacaaatgtgtagtttaaaaagtacatgtgagtacccaagcatacttaaatcactcccaataactgaaactt

SEQ ID NO: 313712 - DNA, 617 bp, Homo sapiens
tgaactgattatggccaggaaaatatgagaagaagttcactggtgggcttctgagaaaaatttaattattcttaagaaagaggcacaagaagaaaatggtctcttggccgtctctgaaagtttccatgtgtgtctatatgatcttctaagaayttctatagttatctatcaaccaaactgaggttgaagccaaggtgaagagagaggcagagccaataccgaggtttatggagaagggaattcagaggttaccttcacttaaaccatcttcctggattgaaagctatatgaaatatttcctcttttctattacttgcggcctttaaaaatatactaactgaacattctaatggcacgtagagtacaacatgaacacagcttaaagtcaaacagaatcattgttacatggtgaggatttgtagtaacttagtatgagttttctcttagctaaataagaagatctgtctcttaaagattatagatctgaatcagcagaatatttttaaacttatgattaatgaaagatgttttgagataaattttaatgtgcattatatatataatgcacattatgtgtgcattatatatataatgcacattatgtgtgcattatatat

SEQ ID NO: 313713 - DNA, 617 bp, Homo sapiens
tgaactgattatggccaggaaaatatgagaagaagttcactggtgggcttctgagaaaaatttaattattcttaagaaagaggcacaagaagaaaatggtctcttggccgtctctgaaagtttccatgtgtgtctatatgatcttctaagaacttctatagttatctatcaaccaaactgaggttgaagccaaggtgaagagagaggcagagccaataccgaggtttatggagaagggaattcagaggttaccttcacttaaaccatcttcctggattgaaagctatatgaaatatytcctcttttctattacttgcggcctttaaaaatatactaactgaacattctaatggcacgtagagtacaacatgaacacagcttaaagtcaaacagaatcattgttacatggtgaggatttgtagtaacttagtatgagttttctcttagctaaataagaagatctgtctcttaaagattatagatctgaatcagcagaatatttttaaacttatgattaatgaaagatgttttgagataaattttaatgtgcattatatatataatgcacattatgtgtgcattatatatataatgcacattatgtgtgcattatatat

SEQ ID NO: 313714 - DNA, 635 bp, Homo sapiens
ccgaggtttatggagaagggaattcagaggttaccttcacttaaaccatcttcctggattgaaagctatatgaaatatttcctcttttctattacttgcggcctttaaaaatatactaactgaacattctaatggcacgtagagtacaacatgaacacagcttaaagtcaaacagaatcattgttacatggtgaggatttgtagtaacttagtatgagttttctcttagctaaataagaagatctgtctcttaaagattatagatctgaatcagcagaatatttttaaacttatgattaatgaaagatgttttgagataaattttaatgtgcattatatatataatgcacattatgtrtgcattatatatataatgcacattatgtgtgcattatatatataatgcacattatgtgtgcattatatatatttcaggaaaagggtaaagagaaagacaggaagaaaacaaattgcagagaagagaagggaagagaatgcaagagaaaggagaagggacagtcataatgcaagagaaggaagaaaagacagtcatatttactgtatgatgttctttacctgaattactttattcaaattaacaaggtgaaatacattatattttaaacattataaac

SEQ ID NO: 313715 - DNA, 635 bp, Homo sapiens
ccgaggtttatggagaagggaattcagaggttaccttcacttaaaccatcttcctggattgaaagctatatgaaatatttcctcttttctattacttgcggcctttaaaaatatactaactgaacattctaatggcacgtagagtacaacatgaacacagcttaaagtcaaacagaatcattgttacatggtgaggatttgtagtaacttagtatgagttttctcttagctaaataagaagatctgtctcttaaagattatagatctgaatcagcagaatatttttaaacttatgattaatgaaagatgttttgagataaattttaatgtgcattatatatataatgcacattatgtgtgcattatatatataatgcacattatgtgtgcattatatatataatgcacattatgtgtgcattatatatatttcaggaaaagggtaaagagaaagacaggaagaaaacaaattgcagagaagagaagggaagagaatgcaagagaarggagaagggacagtcataatgcaagagaaggaagaaaagacagtcatatttactgtatgatgttctttacctgaattactttattcaaattaacaaggtgaaatacattatattttaaacattataaac

SEQ ID NO: 313716 - DNA, 635 bp, Homo sapiens
ccgaggtttatggagaagggaattcagaggttaccttcacttaaaccatcttcctggattgaaagctatatgaaatatttcctcttttctattacttgcggcctttaaaaatatactaactgaacattctaatggcacgtagagtacaacatgaacacagcttaaagtcaaacagaatcattgttacatggtgaggatttgtagtaacttagtatgagttttctcttagctaaataagaagatctgtctcttaaagattatagatctgaatcagcagaatatttttaaacttatgattaatgaaagatgttttgagataaattttaatgtgcattatatatataatgcacattatgtgtgcattatatatataatgcacattatgtgtgcattatatatataatgcacattatgtgtgcattatatatatttcaggaaaagggtaaagagaaagacaggaagaaaacaaattgcagagaagagaagggaagagaatgcaagagaaaggagaagrgacagtcataatgcaagagaaggaagaaaagacagtcatatttactgtatgatgttctttacctgaattactttattcaaattaacaaggtgaaatacattatattttaaacattataaac

SEQ ID NO: 313717 - DNA, 405 bp, Homo sapiens
cagtatcactctgatactaaaaccaggcaaatgcattacaagaaaagaaagctacaaatcaatatcccacatgaacacaaatacaaaatttctacacaaaatgctagcaaatagattgcaacaatacataaaaaggataatacgttatatccaagtggggtttatcccaggaatgcaaggcagttttaatatttgaaaactaatsaacttaattcaccatgttaacaaacttaaaaaagaaaatccatatgatcaactctataacacaaaaatagcattttatataatccaatatccattcttaactaaaagtgaaaagacaactcttggcaaactcataataaaagagaatttcttcagtttgataaaagacatccatgttaagccgtaagctaacatcatact

SEQ ID NO: 313718 - DNA, 405 bp, Homo sapiens
cagtatcactctgatactaaaaccaggcaaatgcattacaagaaaagaaagctacaaatcaatatcccacatgaacacaaatacaaaatttctacacaaaatgctagcaaatagattgcaacaatacataaaaaggataatacgttatatccaagtggggtttatcccaggaatgcaaggcagttttaatatttgaaaactaatcaacttaattcaccatgttaacaaacttaaaaaagaaaatccatatgatcaactctataacacaaaaatagcattttatataatscaatatccattcttaactaaaagtgaaaagacaactcttggcaaactcataataaaagagaatttcttcagtttgataaaagacatccatgttaagccgtaagctaacatcatact

SEQ ID NO: 313719 - DNA, 578 bp, Homo sapiens
catccacctcggcctcccaaagtgctgggattacaggggtgagccaccatacccagtcgattttttaaaaagcaactatgcatcaatatttcttataaatatagataaaaaaaaaggtaagccaaattttagccagtcaaatccaacaatatgtaaaaggtaaaatacacttcccccaaattcataaacccagtcttttcataggaaaacaccagacaagaccaaatttgacaaaatattttaacagtactctttaaaagtgtcaaagtcagtaaaaattaaggaaacagaatattcacagattggagaaatttaaacctaatgactaaatgcaaaatggtattctatattgaatcctcrctcagtaaaaagcccttcatagaaaaagaatgggtaaatgctattaaagtctgttaaggatattgtacccctgttatttattttttttataaacataccctggtacgttagatgtttagatgttaatataagaaaaatctgggtgaagggttggaatgcaaaaaagtttgaatatctattcaagaaaactttctttgtaaaggaaaaaagctgaaaga

SEQ ID NO: 313720 - DNA, 611 bp, Homo sapiens
aggataagaattcagaaaagtcattgggtttaataactaggaattgctggtaaccttagaataaaaagtttggtaaatgccagaatcactgcttgagcttaacataaaggtcaaatgttgaggctctttcaataagtgtagccaccaaaagaatgagggaaactatgatagcatgagaaaatggcaggaacaagggaaagatcttgtttgttttttatttgaatatatttgtaggctgaaaaaaaatagtgaatgtaaacagtaactgaaactaagatagaatataattcaaagagctatatcttgaagctaatgaaataagaatacatggaggaaataygagaagaactcagccttggagtgggaggggaatttttctcttagaagaaaagaatgatgaagataggtgaagatctgtagcaagttaaagactgaaattagccattttaaggaactaagatcaaaagtcctcagtattcattcacctcactcaaaaaaaaaatatatttgctgagtgcctacaatgtaccagatatgcactattctagagctgactatacggaaataaataagaaaggcaggaaattgatttgaataattaatatgtttta

SEQ ID NO: 313721 - DNA, 577 bp, Homo sapiens
gctgtgattaatatacattttaaaatatttttcaaagcagatttcttttaggtcccaagtacagttaactagctagatcttgctctaccagaaatgattttatggtttatattctaatacacatatgtacatacagaattgtcacaggcaattcaagtcaaaatatcacatagtctaacattaacctctatggatcatagaaaatatcaaataggcaggagagctacagtgtagaaaaaagaaagagctgatttatgttgcttcaggaagaagaaccaggacctacagttgacagtaaatagaagcaaatttgcaatcaatataaaacaaaatgagcaatcaggtcttactaaaaaatgtgggccaccttgtttagattgcctgtcatactcatagttggttcttagtgggtccaacctgggaactcaccatctttgaaaataataaagctacaaaacagtaggttacagaaaactgattagttctcagcctgcttcacaatccatgaagggagtgtcaaacattcattctccagacacactgaaccacyagcccaaacacaagcacccttgcccct

SEQ ID NO: 313722 - DNA, 434 bp, Homo sapiens
catatcctagccaaataacggaagagttcagatcttgaaaccagaggaaaataaaagaaatattaagagcatttgattattttatcacaagattaggaaaaccatctgcattcaaaccttattctgaatttaggggcttcataatgaccacagagttactgatattacagtctcgtgtgggttcataacacygaaataaataggagattgaaggaaaaggaaatgcaaatggacaatatgcaaacatttggaagatattctgccttattagtatttaaagacatgtaaaataacgttaccgtaggattgacaaaaattgagagaatgccaaaacttagggatgataaaggtgcaaggaaataggccctctcacagactttcttcaactgaaatgaatcgaagccttctgtttagtgatataaacaaaaaagcaa

SEQ ID NO: 313723 - DNA, 503 bp, Homo sapiens
agcaaggccacatcaggccttctcaactttactaaaaaggctgattttattttaagttcaacaggaagacattgaaagtctttaatatggggaatgatatgagcccaatctacatttgggaaggtcagtcatgggacgaagtgagcaagagattgtggaacagcaagagcagaactgagtagacctatgaagactgtattctatagacttggtaaaacatggcagtggtcttgtctctggtggtaacagtaaagatagagaagaaagaatgactccagatgcaaagtgtattaattagtccattctgaaaaaaaaaaaaaaccaccagagacaagataatttmtaaagaaaagagctttaattgactcatagttctgcatggctggggcggtctcaggaaacttacaatcatggtggaaggcaaagcagaagcaggcaccttcttcacaaggtggcaggagagagtgagcatgagtaggggaaatgccagatgcttataaaac

SEQ ID NO: 313724 - DNA, 585 bp, Homo sapiens
tactttcaacaagagtcctgctaggttggtttagctagaatccacctttaccttgatgtttcctcttagtaattttccatccatgacccccacccagttctttcactataaattccacttgcccatgctgtatttggagtcragtccaatctctttcccgcaatgcaaaatctcattgcagtggtctctatacctatcaccatgttcccccaactctttgaataaagttggtcttatcatctttaatatgtcctgaataattttttctttaacaggatctatgctttgcccttcaccctgctacttattcagggagactgatctgtgtatcaagaggttcttttaacctccggtgagcttaggcaggatgtttgctacaggagatcagaggaaggggaaaaaggtcattgagttcattcccctgcctccttccctgtaggatcacctcatgttaactctgcgtcttgatcaaaagtcagaaagcttgtcaaagtagagttctctacagagccctctctttggctttcagaaaccctattatcttctttgggttaggcctaggaataataatagcttagtgatttc

SEQ ID NO: 313725 - DNA, 657 bp, Homo sapiens
taattcaccagtacttaattcacttattaagggcaaattgcccagagaaaagaaatagaagtaagacaggaagaaatgctcagtgttcaatgtcatgtctacttaggcagttttcataaaggtgacagagtaaaggagatgaaggcaatagaggcaataaatgaggtttgtttatttttattgttaccgcaagtctgacaaccctcatttagtttctaatggtttgttttcctgaactcaaaaatgaagttcagtctccttgtctattagactagctgttttgttgatagactttttgttatggagataatatttatctctcaatactttgtggggtggaaccaaaaaggagagtagagatgtttctattaaagtagctgattaaccttagtataataaaaaagaaaacttgaagtaggcttgacaattcagaataaagccagtgcctgaccaggctctcaaaactgttactaacagaaagtaaagcattccatttactttattaacataaagtactctattaactgtcycatatagcgtggagcagtataaattcccatctttctaaatgtatatgttcaagattgcccattgaaaggggggccactgtgatctgggagctgcttctatgccatactgaaaacctctattccatta

SEQ ID NO: 313726 - DNA, 594 bp, Homo sapiens
aaactcttaatagacatttctccaaagaagacataaaaatggccaataggtatattaaaaggcaatcaacatcgttaatcatcaagaaaatgcaaattaaaaccactataatttcacatataactgagatcatgcaatatttgtctttcttgcctagcttatttcacttagcataatgttctccaggttcactctatactgtcaaatatgacataatttcccccttttttaggactgaatacatcaaaacatcacactgcacactataaatatatacaattatttgtcaattaaaataaacttcaataartaataaatatttttcaaaaaccttctttgatataacacccttacatttgttaagatggatattatcaaaaagtcaaaagattgaacaaatgttggcaaagctgggaaataaaggaaatttttttgcactattggaaatgtagattgacacagtcagtataaaaaacaatacggagatttctaaagaaattaaaaatagaactacaatataactgagcaattcctcttctggatgtaaacccagaggaaatgaaatcactatctcataaagatacctacctgctt

SEQ ID NO: 313727 - DNA, 594 bp, Homo sapiens
aaactcttaatagacatttctccaaagaagacataaaaatggccaataggtatattaaaaggcaatcaacatcgttaatcatcaagaaaatgcaaattaaaaccactataatttcacatataactgagatcatgcaatatttgtctttcttgcctagcttatttcacttagcataatgttctccaggttcactctatactgtcaaatatgacataatttcccccttttttaggactgaatacatcaaaacatcacactgcacactataaatatatacaattatttgtcaattaaaataaacttcaataaatartaaatatttttcaaaaaccttctttgatataacacccttacatttgttaagatggatattatcaaaaagtcaaaagattgaacaaatgttggcaaagctgggaaataaaggaaatttttttgcactattggaaatgtagattgacacagtcagtataaaaaacaatacggagatttctaaagaaattaaaaatagaactacaatataactgagcaattcctcttctggatgtaaacccagaggaaatgaaatcactatctcataaagatacctacctgctt

SEQ ID NO: 313728 - DNA, 594 bp, Homo sapiens
aaactcttaatagacatttctccaaagaagacataaaaatggccaataggtatattaaaaggcaatcaacatcgttaatcatcaagaaaatgcaaattaaaaccactataatttcacatataactgagatcatgcaatatttgtctttcttgcctagcttatttcacttagcataatgttctccaggttcactctatactgtcaaatatgacataatttcccccttttttaggactgaatacatcaaaacatcacactgcacactataaatatatacaattatttgtcaattaaaataaacttcaataaataataaatatttttcaaaaaccttctttgatataacacccttacatttgttaagatggatattatcaaaaagtcaaaagattgaacaaatgttggcaaagctgggaaataaaggaaatttttttgcactattggaaatgtagattgacacagtcagtataaaaaacaatacggagatttctaaagaaattaaaaatagaactacaatataactgagcaattcctcttctggatgtaaacccagaggaaatgaaatcactatctcrtaaagatacctacctgctt

SEQ ID NO: 313729 - DNA, 494 bp, Homo sapiens
ctgtctttacaaatgctatttaagaaaaacacacacacaaaaaccagttaattcatctcataaatatttattgggcagggactgcatgcctagcaatgtgtgaagcagagaggttgtgacaagaactaacagttgtggtccctctttcaaggaactaatgggtgacaaggatggacaaactggaaatcataacacagtgtgacaaattccagggarcagaggactcccagaaaggtaatctcacctggacttcccagaggaggtgatgcctgaggtgatctagaaagatgactgggcaagggggaagaagaatgaaagtgttcagggaggacaactaatctgtgcagggccaggaagagcaaaaagaaggttttcaaattgtccaaagaaagttgggaaggacaattacagctgaagctgaagagggaatgagaaatacatcacaaagggctctgagggtcatgtgttacaggttttggaccttatccaaagga

SEQ ID NO: 313730 - DNA, 583 bp, Homo sapiens
ggtcatgtgttacaggttttggaccttatccaaaggataacgagaggctgaaatcaggggagagaaaataactcatttgtattgcagaaagctcaatctggatggaggatagattgagaggaagggggacaccagaaggaaagaaaagaggccacttaggatgctactgaaggattacaggcaagcagtgatggcatgaaccagagtagggcagtgagagtgtagaatagtacacagcttccagagatagtgaggaagtggaactgacaaaacgtggtcagtagttagccacactcagagagaggtgggggaaaaaagttaaasatcatgcccaggtcacgaggtatatggaagctgctatgtactgaaacactgaacacaagatgaaggacaggttgggagacaggactgggacaaagaacataagttcagtgttggagatggtgaccttgaaggaatgaggagagaaggggtctcaggagggaaccaactgtgaagaacactagtatttaagcaaaaggaagaaaagaagaccacatgagactgaaaagccacagctacagaggtaggaaggaaaccagaa

SEQ ID NO: 313731 - DNA, 541 bp, Homo sapiens
ttttgagctcagtcagcactgtgaaattagaaaaagggcataagaaagcctctgaccttgaagagcatgcactgtggtcagagagaaaagatccataaggaaaatggaaattaaattgaatggaaaaggtgaagccagattatggacaggtcagcttgccaggctgtgaagtgaaagcctgagaacaaaagctagtkcttttgttttcctagtggcagacttcaatttatacccttactacctcattttataaggcaccttggattatacagaggggatacatttgccccaatattttcacaataagtgtttctattctcttactgcatcatacatagttttgtaagtgaccttaaatcctttccaaacaaggaaggtagaaataaccacacagggtatttataatgtaagagtaaagccatattacttacaatgatatgaatgcttttgaagagaggattaagctccttaataaaattcctaaggggacattgttcaatttgatatcaaaatgtgctcactataataaaacaacaatcta

SEQ ID NO: 313732 - DNA, 541 bp, Homo sapiens
ttttgagctcagtcagcactgtgaaattagaaaaagggcataagaaagcctctgaccttgaagagcatgcactgtggtcagagagaaaagatccataaggaaaatggaaattaaattgaatggaaaaggtgaagccagattatggacaggtcagcttgccaggctgtgaagtgaaagcctgagaacaaaagctagtgcttttgttttcctagtggcagacttcaatttatacccttactacctcattttataaggcaccttggattatacagaggggatacatttgccccaatattttcacaataagtgtttctattctcttactgcatcatacatagttttgtaagtgaccttaaatcctttccaaacaaggaaggtagaaataaccacrcagggtatttataatgtaagagtaaagccatattacttacaatgatatgaatgcttttgaagagaggattaagctccttaataaaattcctaaggggacattgttcaatttgatatcaaaatgtgctcactataataaaacaacaatcta

SEQ ID NO: 313733 - DNA, 546 bp, Homo sapiens
ggacaattgttattccatgtgcaactgctgaaaattgtttttaaaaaagtaaggacaatgttaattttgcataactcataaaaaccagtacaactttcccttatcaatattttaaaatgtatatttcttatattgttctttcattatatttacaacagcttgtccttatggttgtaaaccataagggrttgacccttaacaaactttttaaaataatattcataagcttatcagagtaaggaaatgacaaaaacaaagcaaaggatgaaactggcttcagtagcacaagagaaaggccatcccctcaagatatgtgaagctatcccctcaagcacttaataattctttcaccaaatccaaatgtaacaagtcatatcttaggctggaaatgttttgccttttgcagaatatcagaagccagaaagcttcgaaaactattaaagaattcataacacaagtatcttttttaagagaagttaccttgcttgtttgtttttcaggaagaaataatagctggtacaaacacttgatgaaaacaacatttat

SEQ ID NO: 313734 - DNA, 586 bp, Homo sapiens
  misc_feature (1)...(586): n = A,T,C or G
gccgggtacacggttttgatctggccaacattgcrctcctcaaaacgcctatgggaggatgggggcggctcaggaggcaggcccgggcccacccccaactccaggacagccacagcccacccccggccactcacctacgcatcatgtcctggacgccccgctggaccttggcaaaggtgggcgtctcggagcggttgtggagcatgcccacgatggtgtccatgctgcggaacatctccgccagcacctggtacttgtagggcagcacgagtcccggcaggccgccntgggcagggcatggaagcgctggtaggcgggcgccttctcgccactgtcagggagggaggagcctcatgagaagcagtaggcccctacccctccaacgccacagcaggcccctcggcaggggagaccctccgatggggcctgccatgccacacacgatggctttcgcggcccttgcacacccaccagcactggcaccgttaggggtagcagtggtgacgggaaagcccggctccacaccccagctctgctgtgtccacgcagctcccccagggaagctctgccctctccccagcgcagt

SEQ ID NO: 313735 - DNA, 587 bp, Homo sapiens
tcttttaagaaggaataagcttcatcttaaagaaaatgtaaataaattttatattatcaaatttgaaaatgtttagagaatttatgtgctcaaaagtatacataaatgtctccagtcccacttcccacttagtactcgttgaggatgaayagataatgacacggaaataaagatggtaaaccattacacactgtaaaatttagtgttcagttacaatctaagaaatgcaaaactatgtaactctaaagaagcaattaggtagtatatactaaaaagcaaacattaaaaatgctaaaatccaatggtagaagaatattgttttaactacattattttagtttgtcaataaaaaataacatgcattgtttttgcttgtttacatgtctgaatctgccattccgctaccatacattttcttgtatttttgtgcttggaggctcccttttccttctttataacgaattcaccatctctcatttaatcaaatggcaaatcctatgttttatttcctagatcactctcaaaccttatgcttttgccacaaccctagcacagatcatggtgatctctcatctagattcctatga

SEQ ID NO: 313736 - DNA, 499 bp, Homo sapiens
aagaaccctgtctaggaagcaattaatctttctcaagaaatgcagtaagtctgggcacccattttcaaaattatcaaggccacttttcatttaaacattaacatttattattttcatttaaaatgttcaatgtgaaattgttaatatgttaatatgtgttttaatacattagtttayaagtaataataaggtctgaaaaacaatttataaaaatgactatatgctgttatgctcaaaataaatcataaacatttttcccagctcacaccaggccctttatctgagggattattacaaagcaactaaaaactcaatcacaatataacgaaaataatgttagctggcataggagagtgttttgaagtgctttctgaatacctcagtctcacactcaaatcaggagcatctgtccaccaactgtcaagataacgtctagcctaggagttttcctgaattcatcactattcatagatgcctgtcactattcagaaaaagaaga

SEQ ID NO: 313737 - DNA, 563 bp, Homo sapiens
tcacaccaggccctttatctgagggattattacaaagcaactaaaaactcaatcacaatataacgaaaataatgttagctggcataggagagtgttttgaagtgctttctgaatacctcagtctcacactcaaatcaggagcatctgtccaccaactgtcaagataacgtctagcctaggagttttcctgaattcatcactattcatagatgcctgtcactattcagaaaaagaagaaagaaagagccatactttcaaagctattttctttttctatatgtcctagtagaggygaatatagaatttatcactttgaagccaatgtagtctgaatcaaccggtcctccatctccagatctaagaatgcaagttaaatgttctctagaaattatagataattcactatgtcatattaatacttctcacttatattactactgattgaaggatctgatccctagactcaaagccattacctcaccattactttcacaactagaaagtacaatccagccaccaacccctatggaaaatggcacaatcaagagtaaagtgtttccact

SEQ ID NO: 313738 - DNA, 573 bp, Homo sapiens
tttttttaaacaacaaaaatttcaactcttaataaatactattttacttgtgataagaaggcaggtatgcttctggaaccacagaaatcaaacttgagagaaaaaatacaaacaattatagagagacagtctctgattaacatgaacataaaataaccatcaggtgacaaaccttttcacaagaaaaatgatctgtgcccaagatcaattttatagacattaactcaaagctgtgattttatacacaaagcagtattgtagcaatggtataaacacaggaaaaattcttgtgaaaggagtggagcctgcaaatgtggaactatgtggaaaagggaaaagtttgtagtatgtagaactatggcaggtgtttatatttcacagtgtaaaaaataaacttaaattgatatactggtttactaatgaatttatgaattttcaatgaatttatgtagagsttattctgttagatgggactaatagtaagaaatactacaaagtaggaaaagtttgtctctaggacccttttgtgaccttttttttcttgctctttcacactcctcatgtaatggtcac

SEQ ID NO: 313739 - DNA, 480 bp, Homo sapiens
catgaaccaaatgacatatatgaaatgtcagttatgggccaagcactatgcaaaatgctgggcacacaaaaatgagtaggaaactcyatgagctcatggtacacaccatactactgatcattctacccatgtaattataaagtagtatttcatttatgctataaagggtttaatcaggtcctgtgaaccctctagtccaacaaaaataatgttacgtgtaattacaaataaacagtataatagaaataaacctatattttttaggtctcagtatgaaatactctacaaacacatttcatctctacaccaagatgttcaagtggtagttggatcactaccaagagaatatcacaatgtcttatggtttgttgctgtacaaaacaaatgtaatttaaaaagctgaatccaaattcaaaaaagttaaaactctaaattaccatgttaaaaccagtgatcgagtaaatagaaaaacttttgagt

SEQ ID NO: 313740 - DNA, 554 bp, Homo sapiens
ctacatcattatatttaatagtggcataaaactccattgtactcatacaccagaataagcagtttatttatagtcataatgcatgaaacagaagtaaattactcagatgtacacaggatatttaaccattcattacataacatggtaaaatctgaaaaataattatgagattttttttttttttttttttttagacagagtcttgctctttcaccaggctggagtgcagtggcgcgatctcggctcactgcaacctccgcctcccgggtttcaagcaattctcctgcctcagcctccggagtagckaggactacaggcgtgcgccactaggcccagctaagttttgtatttttagtagggatggggtttcatcatgttggtcaggatggtctcggtctcttgacctcgtgatccacccacctcagcctaccaaagtgctgggattacaggcgtgagccactgtgcccggtctatttttaagaaaagctatttatatttgaaacatgatgaaactgggatttgataacaaaatttttaaacaattcaacaagaat

SEQ ID NO: 313741 - DNA, 584 bp, Homo sapiens
gtagagaacataccattattcagagcaattatattgagaagcaaattagatatggccctctggccagaaactcatgaaggacagaagagtcgctgaaaaaaaagctagagctttatatagtcacaaatgatccatttgaggaagagaaagtttaggtattttagacaaactttctattcagtgaactttcttaagatctctgacttttttaaaaaactagtaaaataggagaaaaagcacagaaacaatgacaaaygtaaatgagtggcagaaagcagtttctggaagatgaagagcagaatggatcaagaaatggaaaagacagctacttttgaggtgacactaattaatttctaactttctttttttaatttatttttttattttttgagacagggtcttgctctgccacccaggctggagtgtagtagcttgtctgtaggtcctgcaggccttgaactcctgggctcaagttatcctcctgcctcagcctctcaagtagctggaactataaatgtgagacaccacaccagctaattaatttttttaatacgtagaaacaggttctcattatgttgttgggg

SEQ ID NO: 313742 - DNA, 576 bp, Homo sapiens
ggctgtgatctaggacagacacctgtttctctctgctttgccaattggtatattaaagaacagaagatggcatctttacaccaacctagtgtatttggtgttatattgggcgtttgggttcatgaacttccacctcacactaattgattctgaaagtactttaattacagagacgcattacaggtagttgtgcagacatattcctgattcaagtttatcgagttgatgatcacaactaactttgatagtaaaaatatacacacaaaaaaggagcgaaactggacctaatgggttgctttcctctgcccaacagccaatcccctccccagctacccccgctgcagggtggtgggggacagagtggagttcttgtcctgtgccacgggagaacccggacgcgcaggaattaacaagtcatcagtgctaggaagctgggaggcggacgatggctcctaaagtcccagtatattcctagccaaacttcccggataggcccactgaatggacactcacctggaragtcggccgtgctctccacaggacccagaaatgccttatccctatttaggccagaga

SEQ ID NO: 313743 - DNA, 527 bp, Homo sapiens
agctaataaaaatgattattcagatattgagagtcctgatggcttaaggagtgaccactgcccttctttgcccctctagactgtcttgggaagtagaacaaaaacaggtacagtggagtcagaaagaccgtggcactccctgtaccattcagtggttgtgctctgttggaatgagtgctgttgacaagtcgccttacttatctgaatctcagttttcttcccggtaaactggaatattgacaactatatatggttgtggtaaagattagagataaaatatggaagtccaagtcaaatgataggctgataggcactagatatattgaatatattattttcataatcctcctctgtaggtctttgtgaatcttccrttgccttgcggtttctaaactttagggctataaacccttttgtttgttttgtgaataaaaagagaggtgtttcctgtgttctttctgtgcagtaaagaagatgttgggaaactatgaaaggagatgtcctgggatacagcttgttcattttca

SEQ ID NO: 313744 - DNA, 559 bp, Homo sapiens
tggctgtgtatatccttgtatacatgatcaagcatttctctacagtacatattgtgatataattgctagattataaagaagaggcatttattttattgattctgtcaaatagctctctcaagtggctgcacctaacagtgcttgtagaatactrgacaacctacacccttaccagcattcagtataaagctttaaattttttattttcatgctatctcacatttgaaattgcattttcctagttattagtactagttaagtttatcttcttttcttatgtttattgaatatatgtatttcttctgtgaattgcttattcatgtttttgcacatttttttctattgcaacatttgctttttcttactaatccctaattttaaaagattttgaatatcgaagacatttgttatattcatgcaaatatttttccaatccatctcttgagctttaattttgtttatgacttctctgcccgaaagaagtttttattttgataatgccagatatataaattctttctcctttaatttcagttttgacatcttgctaaagaaggct

SEQ ID NO: 313745 - DNA, 559 bp, Homo sapiens
tggctgtgtatatccttgtatacatgatcaagcatttctctacagtacatattgtgatataattgctagattataaagaagaggcatttattttattgattctgtcaaatagctctctcaagtggctgcacctaacagtgcttgtagaatactagacaacctacacccttaccagcattcagtataaagctttaaattttttattttcatgctatctcacatttgaaattgcattttcctagttattagtactagttaagtttatcttcttttcktatgtttattgaatatatgtatttcttctgtgaattgcttattcatgtttttgcacatttttttctattgcaacatttgctttttcttactaatccctaattttaaaagattttgaatatcgaagacatttgttatattcatgcaaatatttttccaatccatctcttgagctttaattttgtttatgacttctctgcccgaaagaagtttttattttgataatgccagatatataaattctttctcctttaatttcagttttgacatcttgctaaagaaggct

SEQ ID NO: 313746 - DNA, 559 bp, Homo sapiens
tggctgtgtatatccttgtatacatgatcaagcatttctctacagtacatattgtgatataattgctagattataaagaagaggcatttattttattgattctgtcaaatagctctctcaagtggctgcacctaacagtgcttgtagaatactagacaacctacacccttaccagcattcagtataaagctttaaattttttattttcatgctatctcacatttgaaattgcattttcctagttattagtactagttaagtttatcttcttttcttatgtttattgaatatatgtatttcttctgtgaattgcttattcatgtttttgcacatttttttctattgcaacatttgctttttcttactaatccctaattttaaaagattttgaatatcraagacatttgttatattcatgcaaatatttttccaatccatctcttgagctttaattttgtttatgacttctctgcccgaaagaagtttttattttgataatgccagatatataaattctttctcctttaatttcagttttgacatcttgctaaagaaggct

SEQ ID NO: 313747 - DNA, 578 bp, Homo sapiens
tattacgtatactttatgagctggttgtgagaaattagaagaataacatgaacagtgtccagtactcagcaggtgtttaatacacagtagtgctttctatcctccatttacttcttccttaaacttttacttgaggattttaattgtagaactggtcctgtgaaaaagtgaaacaattcatctcctccagccccaattcttttccctttcagatatcaagagtctttttctctaataatctcaaaatctgtaaagagttctaaaatctagccatttttatgtgcttaatacagatttagtttcagattccattgagcttgcaggggacttacaggtagataatttagcccattttacagtggaggcagtgaagggctaggaaatgtaaataactttcccaaatacacatggtgacagtgctagaacttaatcactcttttaaatatyaagtccactgctatttgtattacatctcttttagcattttgagcttcttggtaattgttgaatgataagctttgtgttttcttaacagaatttgaggtccctgtaagtgaaagggtatttcgggttacagc

SEQ ID NO: 313748 - DNA, 656 bp, Homo sapiens
tgcaggaactgaattttctttcttcagctgtattttatcatttaacattcttgtttagttgaagtatcagtaatgaacaactgcaatgactcatttcaggagaaatatgaataataatarcgtttaaatttctttagtgctttatagttaccaaaacatttcacatatatttcaaaatttgatcttcatggcaaccctggaactgatctacaaatattttttagtcttaaaattaataaataatacattaaatagcatattaacatgttcatttcttccatcttaaggtttaaacatttattagaacttctttggaaattataccttagtttcccctctaaaagcctctaacggggaatatcaaaccttcatggtaaagaaataaaatagtcattttggagtcattacagccagttgagttggtagctgactgcagctagtcacaatctataatcacaactaactttaaaataaatgattctttattacaatatatttttaatttgccctgtgttctatactaggttaatgtagagcataggaaaaaaggaggctgagtaattaggtccagttcttttgtagaggcctctggtgctaagcagacttagcattttgatgttataaaacacaaaaccaaaaatatcacaaaaccaaac

SEQ ID NO: 313749 - DNA, 577 bp, Homo sapiens
cccaaagtttaaaatataattttgtaattatagatacacttataaacaacgaagttttataaaattaatcatttgatatttttaaaaaggctacccaaaggaatttaaaatcagagaatgttgttgaaactgaacaccaactgtatctacatttatttctaatagacttctcagagtccactgatacccataacaaagcacttagtgcctcaaggaaactatagaaagtagtcagaagaaaccacaggccagctatagtctgagagtgttttctattgcgattggccattctggcataaaaatcttgatgagtggctcattatcatcatttctgctcccaaccaytctcccagcatcacaccactgtagcgactatgccccatctcctcagaatgcaacacattgtcataaagaacataaagtctcaagtaatctgtgaattcatagctgaaatatactgaatatgtatatacttcccagctcttacctattacactagcttttattcccacctgtcttcttcattttctttttccaaacttttcaaggatttgacatgaacagaccacaggttgct

SEQ ID NO: 313750 - DNA, 511 bp, Homo sapiens
aacactacgaaacttttagcaagtctgtttctgtccaaaatccatgtattatccacatatggttgtatttgttagaattatgtttctgaggcaccaattcaatagttcagctgataggttagtgttttaccacagaggggactgagtttggsgacaacctcttgatcccaggctgtgacctccagaactcaggacatgttacaaggagtatgaccttgaagtttttccacaaaagtattgtctcttttaagaggtttaatacatcaggagacagaaacactgacaaagaaagagactgagagattaaaagagacaaagacgctacacttacagtattgttaaactctttcaccagaaggagaagattaatctgtaatacagcgtcagctctgttcttagatattttgcattatgtgcttctataaaggaaatatatgtactcacaaggaagcttgaagcaattagtctcctagcctggcaggttgtatttcatatttttagcaattaccta

SEQ ID NO: 313751 - DNA, 550 bp, Homo sapiens
tgttgattttaatctcaatgaagcactgaagcaaccatattagtaaagaggaaggaaaatcaatctagacttgatcccagagccttaggtattcaccaggatgatgtagatttaaatcttgtatctgcccttctgtggctatatcatactgggaaaattacaaaatctctcctaagcctgttctcttatttataaactgggagtaatagatgtacctagcttatcaggtgttttagagagttaaatgagaaaatgcacatagaaaaatttatcacagtacttggaacatagtaagttctcaaatggactttgaattttgctcctgtccttagcctacttacctaaaaatatacactaataatttacatgtattatacacattaattttaattataattgagacctaataggaatatactataaattcctcatttataacattcatttataatgcttactattratattaatgaaatactttagatttagtgtataaaatatacacacatatttgtgtatatacgatttttaaacttctctaccttagcat

SEQ ID NO: 313752 - DNA, 595 bp, Homo sapiens
ttcttactaagccctcaacaggagtttttgttccttagtttttggtttggttgtttagttttcataaaaggactgcagctgcctctgtttgtgagtagttccactaccttcattcatccacttaggatatttcttcattaccaattttctgttatagattgtcctctagaaaagtggtcctcctatatgaatataaaatgtcaatatattatatatataatacatgttatatatagcatgtgtgtaataaatacacatgagatggaaactgaaaaagatggggtaaaatkcaatttccatactttaaataattgctacttatcaatagttgatataattttgctctctaatgctattaatattttattgagaccaatatgattggatgttttatttttttaaaagatttggtctaacaatttgtagtataactattgaaagctgtttctaaattcagtatgtttcaatatattgttttaaatggctgttataaccaaaaacgattccttacaaactacatagatccaaataagagaggtataatgtaggctctacttactgaattaaaataccattttaagtcccatttgctaat

SEQ ID NO: 313753 - DNA, 628 bp, Homo sapiens
gaattggagggttcttggtctcactgacttcaagaatgaagccgcggaccctcgcagtgagtgttacagttcttaaaagcggcgtgtccagagtttgttccttctgacgttgggatgtgctcagagtttctttctcctggtgggttcgtagtctcgttggatcaggagtgaaaaagcagaccttcgtggtgagtgtgtcagctcataaatgcaaagtcgacccaaagactgagcagcaggaggatttattgyaaataccaaaagaacaaagctcccacactgtggaatgggacccaagtgggttgtcactgctggctcgggcaacctgcttttattcccttatctggcccccacccacatcctgctgattggtccattttacagagagccgattggtctgttttacagagagctgattggtccattttgacagggtgctgattggtgcgtttaaatccctgagctagacacagaagttctccacgtccccactacagtagctagatacagagtgtcgacttggtgcattcacaaaccctgagctagacacagggtgctgattggtgtgtttacaaaccttgagctagatacagagtgctgattggtgtacttacaatcccttagctag

SEQ ID NO: 313754 - DNA, 628 bp, Homo sapiens
gaattggagggttcttggtctcactgacttcaagaatgaagccgcggaccctcgcagtgagtgttacagttcttaaaagcggcgtgtccagagtttgttccttctgacgttgggatgtgctcagagtttctttctcctggtgggttcgtagtctcgttggatcaggagtgaaaaagcagaccttcgtggtgagtgtgtcagctcataaatgcaaagtcgacccaaagactgagcagcaggaggatttattgtaaataccaaaagaacaaagctcccacactgtggaakgggacccaagtgggttgtcactgctggctcgggcaacctgcttttattcccttatctggcccccacccacatcctgctgattggtccattttacagagagccgattggtctgttttacagagagctgattggtccattttgacagggtgctgattggtgcgtttaaatccctgagctagacacagaagttctccacgtccccactacagtagctagatacagagtgtcgacttggtgcattcacaaaccctgagctagacacagggtgctgattggtgtgtttacaaaccttgagctagatacagagtgctgattggtgtacttacaatcccttagctag

SEQ ID NO: 313755 - DNA, 564 bp, Homo sapiens
aaagtttaagaaatatacaaatactataataaatagagcatcttacctttaaaggggtctgaagtttkcttgtacttaagtttctagtgtgttctgtgtaaaagaagaagagaagaaataaactgagaaaaaaagcttctaccataaaggaaagataaagagaaaaagaaaagagaacagagaggaaaaattcaaaaaagcttaaaaagagggacaaaaataggaggatgcatgctgcgctgcatgagtagggtagcaatagaaagggttgtggcttgtgaggtattgtcaagtggtttgtattagccttcccaggctgccataacaaaataccacagactaggtgggttaaacaacaaatttattttttcagttctggaagctggaagtcccagatcaaagtgccagcagattcagttcctattgagggctcttttgccggcttacagagggttgccttgttgctttctcctcacttactgtttttctgtgcatgaggggaaagagagctccagtgtctcttcctttgtttttaaggaccagtcctaatggattagggactca

SEQ ID NO: 313756 - DNA, 654 bp, Homo sapiens
gcaacaggtcaagccaaagatgagatatggagtagagacagagaaagaactcagaatttgtttaaaggtttagccaaaaggagttgctggcgtactggatgagggttatgagagaaaggaaagacacaagaatgattccaaatttttggctcgagtcactgaataaatcatcatgctgtttattaaactgtagaagtctggaagcttaactggtttgggaacaagagttgagttttgaacatgtcagccttcagatgcctgttagatatcctgtagcaatatagaattgctgcaacaggcagttggctacgtgaatgtgaaattctgggagaggttgaggctggagatttaaatgtggaagtcgtcagcatacatctggtatgtaaggcggaggtgaaatcacgtaggaagtgagtttacagaaagaacacaaaggaggcaaaaactgagccctggggtcccacaaggtttacaggtcaggtaaaagaggagctagccaaagagacaggaagaaatagctgctgaggtagcagaaaggccaggtgyatgtggcactttgtaaaacatgtaaaaatgtgttttatgaagaaaggctgaccaactttttgagagactttcagaaatgtcattaataagtcccaaattgatcacatg

SEQ ID NO: 313757 - DNA, 618 bp, Homo sapiens
ccgtgacacaccacttgactattgtgttcctagagcctagtcagtagttacaactgagaccatccctcaggctggatacttgcctggatgagcttgtaagatcatcagtttttcactttgggtcaccttatcttattgggaaatgaattcacccctcttaaaactggttctgagataatgaccttattttgctagagcatggtatctgaaatgcagatgatcggaataagtggtagccctgatggattctgtcattgtactggttagctattgccatcttcttggaagactattagatragtctttgggaattactgtaaggattcacttgataggagtctcagatgctgtatatacatggatccctatgatctttttgtacttgatgaagaggatttctatggtgatttagagtagggctcttgtaccctttattctcaagtatatctggaataaaatgtaaaaactggataaatctccagcctttcttatgctattcaatctagttaatttagcatctgttaaattcttttttctgctataatgtatagttatctccttcaatttgtttttaactatagaaggtagaaatgtctgttaacttataaaatactttta

SEQ ID NO: 313758 - DNA, 518 bp, Homo sapiens
agaccccagaatttgatggtaaaatatcttggcaacaataagagtatacaccatctcaaggacagatgacttgatatttcccagatgtcactgtttagtgtgtcactgtccagcagcagccactgattagaaaaagtcctttctcctcctgaaggcgcatggccggcattgaaggcagtaggggagatgttggcaaggtaccggagcaggtggcagcagcaggtgtgatgggctagagatgacaagggcacagagtgtgctgttggcaagctgtcagtaaccagagttcaggaactagtgatagcagagaaattgcagagacggtgacatggggataaagaagcaggacaggacagactgtcatagcaggatgataggtaccccrcaaacaagcacaaacagggaacgtgatgagagtggaagtggtggcctgcagccccaaattggcttgggaggatcataccatgatgacagggaagcctgcagtactccagcagacatgagagtcacccagagct

SEQ ID NO: 313759 - DNA, 597 bp, Homo sapiens
ggctcactgcaacctccgctccccaggttcaagtgattctcttgcctcagcctcccaagtttctgggattacaggtctgcaccaccatacccagctaatttttgtatttttagcagagrcagggtttcaccatgttggccaggctggtctcgaactcctgacctcaagtgatccaccggcctcagcctcccaaagtgctggaattacaggtgtgagccaccacacccagcccatcaatcagaattcattaaaggtttccaaaatggaaggtggtaattatatttggggaaatgacaaagaaatttacttttatatttggcattgattaagcttatttttgttgtactttcataaaaagtaagatgaagatttagttgaataatgataattagacaggtatatatatgtttacatatatatgtatatatttggattgattagtgacaacttttaaagtgctattatttctagagatctacattctcaaatactttctgtggatgtaagttcattgtgcacttaggtcacacagaaacaagtagactcctcagcattctttcagtagtatggcaagcatgtttcacaaatcatggatca

SEQ ID NO: 313760 - DNA, 587 bp, Homo sapiens
ttgcctacactgctaagagtttaagtaagaatctattctagacttgacctcagaaacctaagtatataatgcttacagtccggtctaagttttatttattcagcaagcattttacaaacatttactatcttccaggtactcttgtattgtgtagtatattctgctcccaaaagttttcagttaatctgcataaaaagttagtaccaatgattgacatacaaataatcatataatctgtgccagatccattctgtgcccctggacaatgaccttcacagtcattaatcaggagcttttggctttgggttggtttcagccaataggaggtaccaactggagtkcagggggctggaaggaagtggttagataatttattccctgccatcttcctactgtctgtggtttagaagcagctaccttccttaggtttggccatcttctcattccattagctatagcactctctccagggtctggcagcactccctgctctaggaattgcttcctcccttatcttcttttatgccaaatggtgttaatggcttcccactgttgctaacccaaggatgcttcacgatcccatgttg

SEQ ID NO: 313761 - DNA, 464 bp, Homo sapiens
ttctaagagaagcattaaaggaagtggtgccaattccattaagagctaattcaactcatgctcagctctacttctctaggatatcaaatattctttggctacagattcattaatcacaataaaaatgttttgatccatctttcctactcaatctcacttattgaaacaaaagtaaaacttatttacctcagtaatcagtaatgtaaattacctcagtaaggtaaagtcaccaaagagtcaggaactgtgctaggctttgagagtgcaaccaaaaaataacacctgattctttaaatcttcaaggatattatcatttrgggaagacagaaggaggacctgaactggtagttggctgaatgaaggaaaggaagaagatgaactaagtaaattggagatataaatgtgtaaataagtgagaaaaataaaaatttacaggagcaatgataacatatatatatatatat

SEQ ID NO: 313762 - DNA, 472 bp, Homo sapiens
agacaagtgtaattgtgtaatttaatattttctttttaattttagcatggctttaaattttgaaattaatgattcctgacttgcataatatatatttagtagctatcctactttcacgttaatatgctaatcaaatcaaaccaggagtataagataaactattacatttgagtttaatgtagcctacaagcaacatttagcctatacaacttatgcattgacgtggcttattgttgaccatcattattatctttcccttcacttattaggaacatatgtttactagttcctgtttggcagctaaaatttttcatgtgccctaagaacttggtatacagtgcacaatacttaacaatagattagaataaactagagtaatatttttagctttaggctgtgtaaacagggtcatatgccatttggatgagagttgaacatactaaaaaatttyattgtttcatttaacccagaa

SEQ ID NO: 313763 - DNA, 618 bp, Homo sapiens
ccgtgacacaccacttgactattgtgttcctagagcctagtcagtagttacaactgagaccatccctcaggctggatacttgcctggatgagcttgtaagatcatcagtttttcactttgggtcaccttatcttattgggaaatgaattcacccctcttaaaactggttctgagataatgaccttattttgctagagcatggtatctgaaatgcagatgatcggaataagtggtagccctgatggattctgtcattgtactggttagctattgccatcttcttggaagactattagataagtctttgggaattactgtaaggattcacttgataggagtctcagatgctgtatatacatggatccctatgatctttttgtacttgatgaagaggatttctatggtgatttagagtagggctcttgtaccctttattctcaagtatatctggaataaaatgtaaaaactggataaatctccagcctttcttatgctattcaatctagttaatttarcatctgttaaattcttttttctgctataatgtatagttatctccttcaatttgtttttaactatagaaggtagaaatgtctgttaacttataaaatactttta

SEQ ID NO: 313764 - DNA, 564 bp, Homo sapiens
ataattttgttgatctctgttcctcctactcaattcctttttataaagacatgtttgcttattttaaagttgctttaaaattactatttttctttctatatttctacttcatttatctttgtaacacatttctgttccctacttacttggtgacataatatcgatgactataaaagtaaccagaactcttgatacatttaaaccctgttactattgtttaaatactttgaaatgtatagttacaaatctttttacatactgtttttcctcctaactcactaagaaaataaatggaactatattactaagaaatgattgcctggtaaaatataaattcctgttcacagaaatgrggtcaaaattattcctttgaaacaagcttgcattttttcaatgttatcagtgtgattgaggctgctgagagagaagtagcatatggcccccattaatattgcacgtgttagagttctttagaaaaaaataacgtatctttactcaggcattacaggaaagtatatctaactccaagaagaaaaaagtcactcgagttactaactacacttt

SEQ ID NO: 313765 - DNA, 574 bp, Homo sapiens
cttgttttctttgatttgcccctttctcctgaaaaaccttataaagttaagggaaaaaaagccaaatataaataatcaaaatgttgttatagactaatattattaaataacaaaaaggttatcatagactgtaataaaaacaactatagaccaaattttgctctaaactaagtttccttgtcacatgcatcacttctaattcccctccctccttttagacctgcttggttcccatcccttccctccaccaatggagctgcctgggacaggtrccctaaactcagttcgttttttatacttgtgccctggtacaggatagcaagcacccagagggctacttcttactctttactatataagctgtgtatgggtcagttgtagccttgccatgctatctcccaggcacggccatatctcctgcttggtactggacattcgttccttctatatctcagttcttcatactgagcaaccaacaaaatacacaagttggctttaatatcacccaacctgagataatgcagtaaagaatatcaactacaggatctcttttcttcacttacataatttgcct

SEQ ID NO: 313766 - DNA, 465 bp, Homo sapiens
cattggtagctttcaagtgtttttgaaaatcttctgaaaactaacacctyttcatataatgttttgggagacatcccccattgatgctaaattaatacccctggattaaatcatagaacacctgggattaattgaactgaaatcatgaaagatagttttcactcagagttcagttggcaatatgagcaagggagcagtttgggagcataatttgtgaagaaattgaaccatatttccaatactctttaatacaaggtaaatcaccactattgtggttcctaactggtatccgcttctcaaatactctttgtctctctctttcttcctttctttttactttctttctctcgcttctcttttcctggagaaaatgaaatgtctctctcttcaggcctcaggaaagtgtaccatgggtttattccaagtactggacatttgtgtcccctgcctagacctctttcccag

SEQ ID NO: 313767 - DNA, 465 bp, Homo sapiens
cattggtagctttcaagtgtttttgaaaatcttctgaaaactaacacctcttcatataatgttttgggagacatcccccattgatgctaaattaatacccctggattaaatcatagaacacctgggattaattgaactgaaatcatgaaagatagttttcactcagagttcagttggcaatatgagcaagggagcagtttgggagcataatttgtgaagaaattgaaccatatttccaatactctttaatacaaggtaaatcaccactattgtggttcctaactggtatccgcttctcaaatactctttgtctctctctttcttcctttctttttactttctttctctcgcttctctyttcctggagaaaatgaaatgtctctctcttcaggcctcaggaaagtgtaccatgggtttattccaagtactggacatttgtgtcccctgcctagacctctttcccag

SEQ ID NO: 313768 - DNA, 599 bp, Homo sapiens
atacattatttcaacactaggaaaaacaacaacgaggctgtctccttacgttgtggttctgcctcctccactttagctagctacacaatccgatttatcctaatgctgacagattgcccacttcaaagtagtggtggtgtgtgtggggctgaaggagttgagaaactgtctataccactcaaaggcctttcttcctttaggagtagagaattgaactgtgaaaaagaagcccgagattccccagcgacgtggtgttgcagccccgttgaaggagtcaacttgcaggctgttaaagacctcaagtcattagcatcagctgctgcactaaaggggcaagtcagcgcctctaagtggcttagcgcacaaacgaggctcccgagacggcctcggcaactccatcccctcctccaccacccgctggatgtgaaaagctttccggagcccatcttggtaatmatttttatttttaatcacccttgccccccaaccccaagacctcagagtgccaacagtacccattatagactccctctggggctgcgcagaacgcaccaagcagagggggggaaaaaccccacgaaaacaaaaacaaacaaaaa

SEQ ID NO: 313769 - DNA, 622 bp, Homo sapiens
tatttctctcttctgaaattttcctttcacactgtcaatgacaaggcaggagcaaactcccggattatgacacatgaacacattgtgtctccaggacagagaagcagtggaaccagaactccagcatcctagaataactgagactgtgaggaagtccagcgatctcatcacgagaaatagctcaagtaaatttagtatcaccattgtttctaagtgcaaaaaagctctccttggctgatgattaagcaatagccctcatctgcagtcatagttaacaagcagctaggcaacaccagacacaaatctcttgtcctattagagtaagtatatgtttttttcctacaatatgataacatattaatagaacgtcttaatagakcctcaagttcttattaacataagcaaaacattcccttcctgtcatgtcaacaaaccaaagtatgttttcctttcactgtgtcagctatcatagtatattgccaaatattttggaatataaaagtgtagagcttaatttgaaactttttaatatacttccaccaagtaagtaccttaaatctggcatatattttgttattcttacataacatatgtttcctctttcctacatcttggggtttta

SEQ ID NO: 313770 - DNA, 538 bp, Homo sapiens
tcagccatctaaatgtgggctccctggactcattcaagcccctgatctacaggcagctctccttcaaacttttattggtatactctaaatatgcagtgcaaccaaattcttrtcgtgcaggtttttcagcattctttacaaggatgaggatgtatggtcttctctttgtccaaatgtatcaagaatcatcaagagcaggaggagataattactttccaaagagccatgagggctactccaagccacagctgtggcctgtactctctttctcaacacattcccatgctaagataccttctgagactgagcactctttctccctttatctgtctgtctgtccctgctccctcctgaggttggcatccttactgaaagtcccctagagagcctttctggatttatctgaggtgggtccagactaggagtgaaaggccttgagtgtgatggtaaagacacagttagattccccaggctgaatcctactctaccacttcctaactgtgtcattttacttcatctttctattccttggttttat

SEQ ID NO: 313771 - DNA, 589 bp, Homo sapiens
atattgttgagtatcaccaaaatgacttggtgcagcagtagtcacctttttgtcaacctcactgtcagaatcactgccagaagagcttgaagaaacaagttcctttgatttaggcatcctgaaagaaaaatacattacaaaaataattaataaggtactctactactttcaacttagctctcccccaatcaaagaaaaaaatcaaggacaagttccacggttcattctaccatttttgtggtactgagttgttacactgagcacaagttttaatctatacccttttaagttgcaaataacacrcagggtgcaatgtgctgaacccagtaagaacaatgaactaaatgtcatacactcctacacctctaacctttctccaggccaatggatctttctatacttcgttttaatggcattacacactatgggtagggtaaactgcaagaaggcagcagacaacaattactattaaaaccagaagaaatgtaattctactattactgctttagacttctcatcaacgagattggaactaacgtaaaattattcactatggggaactgaccccaacatttacacaacagggaac

SEQ ID NO: 313772 - DNA, 588 bp, Homo sapiens
agcacttggattagttttgattgaataactgggaactatggcccagccatgttgatctataaaattgaccaccacagtacccataccattaaatttaatcccacttaaaaacaaaatctaaatgtttttcttgtttgattgaaaatccytagaatgtattctcatgtacattccccagatttttgctaatgtaaattagttaagtatataattcttttgtgtttaagtcagcctcttcaaaatttgactttttaatggcagcttttgggaaatccaggatctgaccctaaatgtagaaagaagtggcctggaatcaagaaaggctcagttggcatggagagtttgaggggctccaagtgctacaaatcctctcatatgcccctattcctattctcagattgccactatttaccaatcaattcctatctttcatataggagactttaaaaggcattattttcaactccagttgcaactcagaaaccagcaggcccaaactttgctttccttctggctacttcagaattaagaagccagaagaattaagaatcccttggttttagtttacatctgagtgagaaagacaag

SEQ ID NO: 313773 - DNA, 551 bp, Homo sapiens
tcttacttcctcttgagacatttggaaagcagaaagggaggaagacctttatccttgtggcagtggcagctgatgtgggcatgagtttttgaaggacccacagtcatgatttacaattcagccaccatcttggagaggaagggacagctgtgacattggcagtaaggctggatgttgtggaagtaggttcctcatcttgaaattgcagacatggtggtgtgaccttgaggtcaaaagtctagctgagatctccaattctgctcctccagtctttccaatcatttttttaaaaagctgtagtgtaaatagtwcattttaaacggtataatcaccctataacttttatttctgttttttaaaaatagtgtgcacctataattataattaagttaatttagtgcagacttgggaaatataacaaaaattaagcacattctctgggactggtataatattaactctggaaatttggcacccatccccacctgctagaatttgctggcatggaaacacattcctactcctggcacagtgcctaatgcaaaacagga

SEQ ID NO: 313774 - DNA, 599 bp, Homo sapiens
agctgcaggtgacctcatatgaacgttaacaagctatacgctatcctatctgtgggtgctttgccagtgtttatcttcagtttccctaatgtttgatgtcagcagaaatagacattttcttagcattctgctaatagattgtcagtcaaccttcctttattttgagagtaacaggcacaaaatcaggaatggggaaacaatttaatacsctctcaatgaatttagcccaagtggaagtgggaaacttgattttgttgatttagggtaacacgattttctcagaattctgtgacacagttattccaggatttaaatcccaccagttaatgattatgtcccttccctattatctccttcccttcttggaaggctaagccttctttgcgtggcagcatggcagagggatgtgctgtgtacggaacctggccctggggagggatgttccagctgttccggccttctgcccttgctggcctctgctccataggactgggtaggcctggtcttgttctttacctccctgcatcccctgcatctttacctactctctggatcccagggttgtctcagacatacagtccttgttcagccattgccag

SEQ ID NO: 313775 - DNA, 524 bp, Homo sapiens
gccttctttgcgtggcagcatggcagagggatgtgctgtgtacggaacctggccctggggagggatgttccagctgttccggccttctgcccttgctggcctctgctccataggactgggtaggcctggtcttgttctttacctccctgcatcccctgcatctttacctactctctggatcccagggttgtctcagacatacagtccttgttcagccattgccagcatctgcctgtcattctgtgaggcttctgctggtcttccagcccttccagctgtttctgcttctctcctggggrcatagaacacattcagtggcacctgcatctcacaggtgatgggcaggcctcggcaaggctccctcatggccatctgcctgtgcacctcccgtggccatggctgctctgctcctcaggtaccagtttggatgggagagttctttctgagtgtgcagtctctctgaatataaccgggaagctaggcagtgactctcctgatctttgggttttcccaaacctacatgc

SEQ ID NO: 313776 - DNA, 524 bp, Homo sapiens
gccttctttgcgtggcagcatggcagagggatgtgctgtgtacggaacctggccctggggagggatgttccagctgttccggccttctgcccttgctggcctctgctccataggactgggtaggcctggtcttgttctttacctccctgcatcccctgcatctttacctactctctggatcccagggttgtctcagacatacagtccttgttcagccattgccagcatctgcctgtcattctgtgaggcttctgctggtcttccagcccttccagctgtttctgcttctctcctgggggcatagaacacattcagtggcacctgcatctcacasgtgatgggcaggcctcggcaaggctccctcatggccatctgcctgtgcacctcccgtggccatggctgctctgctcctcaggtaccagtttggatgggagagttctttctgagtgtgcagtctctctgaatataaccgggaagctaggcagtgactctcctgatctttgggttttcccaaacctacatgc

SEQ ID NO: 313777 - DNA, 618 bp, Homo sapiens
aatcagaatagtttttaagcagagcagatcgtttccctgaataaaacagagttctgttaattaaggaccaagrggagaatggatgttggatgggccactaggtgtctctgctgcagatggcttccatggctcagaagcccagctcagtggatgtcctccagctccaaaagctgacaaaagctcaaagccccattgcttgtattttgtctgtgctttgagcttctctccagtctccctgtgcggacatcatcctagaaccattaccttagttctccctccatgtaccatgggctggctcaagccagaggagccagatgtttttccgggcttgtccttggtttcagttattggcttggaagtcataccttttcctagggaactcttagtgaaactcaccaactgtccttgagcatggtagaattgttattttgatggctccctgtaaatcatgttcctggtactcacacccttgtgtagtgtcttcccatattggctgtggtctaggccatatgacatgctgtggcaaagggacatcagcaaatgtcatgccaaagggttgatgagcacttgtgcactgaggcttgtcttcttggaacactgtacaccactatttaagaa

SEQ ID NO: 313778 - DNA, 607 bp, Homo sapiens
tttggaatatacatcctggtccaatgcttagtcctggggctaagccagttctgctttctattgtaatatggtttggaggattctggatcattatgatatcccacagttgataaaattatgttaatcaacttcatgatcaggaagtagcaaacttctttgctgccgtagcaagacacatgtatgccacaggaagaaaaataaaaagaaagcttagggccttgccatcttgagattttctagagtccagtgatttgggtatttggggatatttcttctaaattgaaagacaggttgttgtaccttgccttgctcagaatgaggcccagagcttggtgagcctctttggaattcggaggtacttataccccatttgggttgctttgactcatttagcgggcagcccatgaggtaccagttttgaatggggcctgaaataagaaatggcgccgcagcaggtccaggctatggtttctgctgcctggccacttgagctttgggacctggcaaaactgacargagaagaaaatatcttaggggaaagaaactctagtaaaatgaaagcaaatgatttttttattttctcattttaataaaacaatataatact

SEQ ID NO: 313779 - DNA, 156 bp, Homo sapiens
attgcattcgtccttacactcattgcaattgtcctgagtaaastctgctttatcatactttcacaagtgccagtgaataatcttccttaacagtgatcctggagaatacaagaaaataaaaaagccattagttttgggatttttttttttttggct

SEQ ID NO: 313780 - DNA, 285 bp, Homo sapiens
ctcacaatacttattcactaccagaagaacagtatggggggaaccacccctgygattcaattatatcccactgggtccctcacacaacatgtgggaagtgtggaagctacaattcaagataagatttgggtggagacaagccaaaccatctcaggctgtgattgggcttaggaaacttcaccatgccatggtccctttttgtctagccagtgtctttaccaactgatttgacacaaaatgtttgattcatggagatctgagccagatattgccagtgttccaggg

SEQ ID NO: 313781 - DNA, 509 bp, Homo sapiens
agtccagctgtccctctgaagttatgttgcctctctccagtcaagctggttatctttctctactgactgagtctgaggtctttataggcacaggatggggttggggcaggccataggtagttttggaaaaggcaacattcaattgtcaaaatgacattattcagaaagaaccaattgagagagagcaggcaaacagggatcgaagtgttcactttgggcygtgggcttcaggctttttaacttgaaggtggggttttgcccggggcctgccctgtctgccaaagtttttttgccccttcctctaacatttccccctctaaagaggcacctcttaactggctcttttagaaatatgaatgtgactgatcttagctatttcctgctgaccgggggtttggtttggggaaaaccgcccgtcggattcccctcagagttctacctaagggcgccctgtaaaagggagccatcatctgaggctccaattgcatgaccatttgaaggttaaatgg

SEQ ID NO: 313782 - DNA, 594 bp, Homo sapiens
acccatactaggaggtactgggtaccccactgtctttggcatatgggtgaaattcatttgcctgtcttyctccaggtaacctcttgttctttgtgttcctggggggagaagccgtcaattgaggggatttttttaaggcaagttttgcaagcattaacgacctgtttgactgtttgtagcagatttttacctgagaacaatatctgggctaattgataggttttatccttacctaagtggaaggcttggtgaaggattttaagaactttccattggctgacagctggtagatgaagcttgccattctctgattgcagccatcctgaggactgaaagatgtatccctgagaggtggccattctatttccacaggataatattgaagttttatttctctgatggagtgttcccagatcagaggggcttcaagtggatcagaaatctggggccctctcactgcttatttagctgctttgtctgctaacctatttccctggctattttacccatctctttttggtggcccttacaatgtattattgacacttcccatgggaggaaaactgaggataatagtctattaattacctgatg

SEQ ID NO: 313783 - DNA, 594 bp, Homo sapiens
acccatactaggaggtactgggtaccccactgtctttggcatatgggtgaaattcatttgcctgtctttctccaggtaacctcttgttctttgtgttcctggggggagaagccgtcaattgaggggatttttttaaggcaagttttgcaagcattaacgacctstttgactgtttgtagcagatttttacctgagaacaatatctgggctaattgataggttttatccttacctaagtggaaggcttggtgaaggattttaagaactttccattggctgacagctggtagatgaagcttgccattctctgattgcagccatcctgaggactgaaagatgtatccctgagaggtggccattctatttccacaggataatattgaagttttatttctctgatggagtgttcccagatcagaggggcttcaagtggatcagaaatctggggccctctcactgcttatttagctgctttgtctgctaacctatttccctggctattttacccatctctttttggtggcccttacaatgtattattgacacttcccatgggaggaaaactgaggataatagtctattaattacctgatg

SEQ ID NO: 313784 - DNA, 622 bp, Homo sapiens
ggggcagtttctcatggtttaacaccatcccccttggtgctgtcatggtgatagagttctcataaaatctagttgtttaaaagtgtgtagcatctccccctccccatccctcttcctcctgctctagccatgtaagacatgcctacttcccctttgccttctgccatgattgtaagtttcctgaggtctccccagaagctgagcagactgccatcatcctgcttcctgtacagcctgtagaactgtgagccaattaaacctcttttctttataaattacccaatctcaggtatttctttatagcagtgtgagaatagactaatacaggcacaaacaagawtggttggttagtttgttttttctcaaaacttgatgtggatggtctgccactgtgggcttcattatcaacattatcttgtcctttctcagaatgagttatctatttgtaaacttctgatttccttaaggcattgtccccacaagctttttttaaagcatcaattacttcagcatttttcaacccaagcttcactgtaaatttaatgtttccccttgcttcaatttcagcagaattcattttgctctgatagtgcctcaaattgaatcctattcagacatgtca

SEQ ID NO: 313785 - DNA, 534 bp, Homo sapiens
tagtctggcccacccacactgtctatcttccttagttgcctgcctttggatccctcagatctagttttcctttctagggcttcaacctgaagcttgggtttgagtttgcagggctatgtgttaactcttgacaaggtggagaaaaggaaaaacaaacaaacaaacaaacaaaaaacagcttaagtgcaagaggggggaaaggcctgggggagaaaccttttgctctatgcaaatggattcctttaacaggaaaaggctcttaatcactgtgtcctcctcttsgttcagactgagctgggcccctctgtcatgggaggaaggattccgtgggagcgtgtaggtacgagggggcagagagtgggcaatgttgaccagccggttgcgcagggcccccaagactgccctggagcccctgccttgactgcagctcactcccacccgccatggtctttgggtgcagcatgcatgccggggacatggccatgcaccccagccggtagggcggctggtggggtgaggagctgccctctgccc

SEQ ID NO: 313786 - DNA, 427 bp, Homo sapiens
agtgtcccatgacaatgcataatgtcagtgtttcttttctttttttttttgagacggagtttcactctgtcatccaggctggagtgcagtagtacaatttcagctcactgcaacctccacttcccaggttcatatgattctcctgtcttaccctcctgagtagctgggcacacgccaccacgcccgcctaatttttgtgtttttagtasagacggggtttcaccatatttgtcaggctggtctcgaactcctgacctcaggcgatccacccgcctcggcctcccaaagtgctcggattacaggggtgagccaccgcgcctgatgtcagtgtttattttcatggcttcttttatttcattatgatggagagtttcacaacaaactaagggattagtttgtatttttgtcagcatttaatcctttaaaa

SEQ ID NO: 313787 - DNA, 527 bp, Homo sapiens
catgggctgttccaagtgctttctctccttctcaccacagaaaactcagtaaatacycattttttcccatcagaggacaaacacacaatcacatgcatacatatatatttatatttatttcacacacacatatccctaaacagtgcttgtgaggcatctctcttttacatgtaggctctgccttctgtataacagagacattgcaaagactaaaaactatctgatactccttgaaaatagacagacaggagtaagcttactctaacattcttcatacagcatctaaggaaacgttatcagtgaatagctgagatttgagaaataactaaagttttcgaaaattcctatgggataatgtatggataactctttattaaatgtagctgtagcataatttagaaatgagaaataatttaaagtcatattgtatagatggatttttctatactagtaggtaataagtcaaattttttaagaaaaacaccaacactaattagatgaatatgaaaaatatttcattaagattc

SEQ ID NO: 313788 - DNA, 464 bp, Homo sapiens
aaatacccattttttcccatcagaggacaaacacacaatcacatgcatacatatatatttatatttatttcacacacacatatccctaaacagtgcttgtgaggcatctctcttttacatgtargctctgccttctgtataacagagacattgcaaagactaaaaactatctgatactccttgaaaatagacagacaggagtaagcttactctaacattcttcatacagcatctaaggaaacgttatcagtgaatagctgagatttgagaaataactaaagttttcgaaaattcctatgggataatgtatggataactctttattaaatgtagctgtagcataatttagaaatgagaaataatttaaagtcatattgtatagatggatttttctatactagtaggtaataagtcaaattttttaagaaaaacaccaacactaattagatgaatatgaaaaatat

SEQ ID NO: 313789 - DNA, 464 bp, Homo sapiens
aaatacccattttttcccatcagaggacaaacacacaatcacatgcatacatatatatttatatttatttcacacacacatatccctaaacagtgcttgtgaggcatctctcttttacatgtaggctctgccttctgtataacagagacattgcaaagactaaaaactatctgatactccttgaaaatagacagacaggagtaagcttactctaacattcttcatacagcatctaargaaacgttatcagtgaatagctgagatttgagaaataactaaagttttcgaaaattcctatgggataatgtatggataactctttattaaatgtagctgtagcataatttagaaatgagaaataatttaaagtcatattgtatagatggatttttctatactagtaggtaataagtcaaattttttaagaaaaacaccaacactaattagatgaatatgaaaaatat

SEQ ID NO: 313790 - DNA, 527 bp, Homo sapiens
catgggctgttccaagtgctttctctccttctcaccacagaaaactcagtaaatacccattttttcccatcagaggacaaacacacaatcacatgcatacatatatatttatatttatttcacacacacatatccctaaacagtgcttgtgaggcatctctcttttacatgtaggctctgccttctgtataacagagacattgcaaagactaaaaactatctgatactccttgaaaatagacagacaggagtaagcttactctaacattcttcatacagcatctaaggaaacgttatcagtgaatagctgagatttgagaaataactaaagttttcgaaaattcctatgggataatgtatggataactctttattaaatgtagctgtagcataatttagaaatgagaaataatttaaagtcatatygtatagatggatttttctatactagtaggtaataagtcaaattttttaagaaaaacaccaacactaattagatgaatatgaaaaatatttcattaagattc

SEQ ID NO: 313791 - DNA, 429 bp, Homo sapiens
gctgacagttaaattggttttgtgattgacggagaaatatgttgtagtattgaatcatcaataacacttaaaaacattatagtgcttgttgattttttttgtcatcaatgcccagtcaatagtacgagtgcttagagcaaatcgacctactttccaaacgattctgayaccttctggctgttaacatgtctgcttaattttattaccttttctttgaagccaagatgatccctaattgagttctccttccttccttcagctcttttaattgcttgttgtatgccagatgatttgcccagctgtgggtcaagaagactcataggattttagtgctgccctcttgaaagtggggctgggaggatgatcatgcagtgaaaccacgtgaaggctgccgagtgggaataagtgccacgtgatccagccagaggg

SEQ ID NO: 313792 - DNA, 411 bp, Homo sapiens
atgttattttttcttctgatttgctcaataatgtactaacataatttccttgatgcctttcagagctccattcaaaatgtaaacttgagcattattattatttttaaattatgataayatcttttagaagtttcatggtacatggaaaaaacttgatgccagttttatttgttttgatataaatgtttcttgccgagtaattttcacttacatttgttaatgtatttgaaagaatttcttgaaaacaagtggcagatggctatatgccattcctagcaactttttggggaaggtcacggacatcacagacacctttgagaatttgatgaaaactgggagcccttgaaagaggcaactacatctgaaatgtgtgcttgctatttcagtttaggatttcctaaggcttggcca

SEQ ID NO: 313793 - DNA, 604 bp, Homo sapiens
cttttgccacttctgctccagttgcatagtaaaagcactgagaaggtctgcagtaaggaaacctgtgcagttctgttcaatcctcggttttctgaatatggtgttcattgaatatattccatgaagcactttggggaaaaactgtcctgccagctgtgcagccagcctctcctttcattctgagatttatctcccctctccagccagcctctccttttatgctgagattgaatgcctctggttcttcctgtacagatcctgcccctctaaagccagggcaggagttgcctcttccacyaaagccttccctgagcccactgactgtgtgggctctgtacagtgtgttgtgccacacatgggaggcggcagtcatgctctttaatgctgttgaacaaaggagcaaccattgggtttgtctcaccccactctttcttttctttgtccccatggagagttgctggggctctttctggaagctgagttgtctacactggatgtcatgtctggcttcagacatgaggccctgagaaaagatgtcattggttttctatcaagtcgaatgcttgtaagttcaagaaaaatgaagacagaaataaaaggagag

SEQ ID NO: 313794 - DNA, 604 bp, Homo sapiens
cttttgccacttctgctccagttgcatagtaaaagcactgagaaggtctgcagtaaggaaacctgtgcagttctgttcaatcctcggttttctgaatatggtgttcattgaatatattccatgaagcactttggggaaaaactgtcctgccagctgtgcagccagcctctcctttcattctgagatttatctcccctctccagccagcctctccttttatgctgagattgaatgcctctggttcttcctgtacagatcctgcccctctaaagccagggcaggagttgcctcttccaccaaagccttccctgagcccactgactgtgtgggctctgtacagtgtgttgtgccacacatgggaggcggcagtcatgctctttaatgctgttgaayaaaggagcaaccattgggtttgtctcaccccactctttcttttctttgtccccatggagagttgctggggctctttctggaagctgagttgtctacactggatgtcatgtctggcttcagacatgaggccctgagaaaagatgtcattggttttctatcaagtcgaatgcttgtaagttcaagaaaaatgaagacagaaataaaaggagag

SEQ ID NO: 313795 - DNA, 546 bp, Homo sapiens
cattgttgttacgtataacaaatgctttcgacattttttttgtggaggattttgatgattttaatatttgctgctctctcattttactctagattcagagtaatattaagctaaatagatgtgaaaaataaaacagaacccagaaatcagctgattttactttgggtacaactattttattggggatagacaaaaagcttttttttttttttttctaatttacacttcgtgcaaacatagtgggttctatagaattatttttgcataagaactttagttttagaaattgtagactgkgtttggggatgggaataaattttcccttgaagagcctctatggttccttaaaaaaaaaaaaaaaagaaaaaaaaagaagaagagatagggtctcgctctgtttcccagactggagtacagtggtgtgattgcagcttgctgcacccttgaactactgggcccagtgatgctccctcctcagcctctcaagtagctagaactacaggcctaccaccatgcacagctaattgaatttttttttttttttgc

SEQ ID NO: 313796 - DNA, 581 bp, Homo sapiens
attcaagacattatctattgttagaacattcagtgtagaaaaytaaatagactacctcctaagaaacaacatcatcattgctatagcacttgggacacagtacttcctttctttaagcctatctctgtatctgtaaagtggagacaattatattatagcttacctctcatgtgcatgtggttgagatgcacactgagcgtggaacacagtcaaggcacataggagatgctcagtaagtggcagtgattgtggatgtgacaaagattttcatgccaagagtaacaggtgagagtagggagttgatacgagagagaagccggctgcctccgttgcttttctagttgtaaaaacctgagttgccagaataaagactttagacattttctcccaagccattgagagatttttgaggaaaaggttgaaaacagaatcctgctgcatgcttcccttgaccccagggatatgaataagtgaacatagaaaaatgaacttatgcttattgaaaagtaatctttatatataaatatgtaaactaattcatacaatccttgtttgtcctatataaggacttattttaaatt

SEQ ID NO: 313797 - DNA, 621 bp, Homo sapiens
attccttgttatggccagatttaaatctgtcatcttgctatttgtttttatttgccccatcttttcgttaattcctctttttactgtcttgatttggattaattgaggatttttaattgattcacctttatcttggcaatttattcaccatagctctttgttttgttattttggtggttgctttaggatttataatatgtatctttaacttattaaactctatcttcaaataayattataccatttcatgtagagcataagaatcttattatatttccatttttttctttctgtcttttgtgcttttgctgtaatatattgtattttaatttttgttattaaccccacaatacatttttattaggtttgttttaaatggctaattagaagtttaaatgatgagataaaatatctttatgtttactcatgtagttaatatttttggtgctctttattcctttttgtggatcaaaatatccgtttggtattacattccttgtgcttaaagactttaacatttttttgtggtgcagatctactagtgaagaattctataagcttttttttagctgaagaagtctttatttcatcttcagtttgaaggtaattttttgtagtaag

SEQ ID NO: 313798 - DNA, 617 bp, Homo sapiens
aagaatttgatgattaaacagatggagtcttgctaaaagttcagaacagttctggaaggttctgctgaaagctgtcatttgtatgaggggaggagaggaggttccaaaatgtcatctccgtaagtaggcaataatagataatcttctaccacaacatccttgactcctaaccttatctttgccttaagacaaataggttccccaccaagcagggctagagaccccctttttcctccattttcacattcttcttaacatgttaccactgaaagctggctactaacccaagtcatttatcccaagctgccattagagaggctatctccaaaatgcgtagcaacattgtttacattcacattggtcaactgtaactggatataaaatttttggcattaccttyccctcatgaaggtattaggaataatttatatgtttataataaggaaggatttagaaaaaaataagatatacaatgaaagaggctcccagaactggcttggaatttttcagggagatcttgagcctggaaaatattatttaaaactccagcttggagttaagctttttaatacaactaaaagtatatacatgaaaatctgtggcagcaaccatgagcc

SEQ ID NO: 313799 - DNA, 611 bp, Homo sapiens
ggaattaggaaaggaaatttggaagtaaataagggaaaaaggcaggtgggaaggaaggaaaggaagggacttaggaaggaaggaagagagtgtgttgagaaagaaaacaggaaggaagggaagggagggaggaaggaaggataaataacaccaaaaagcaacaaaacaaaacaaaacaagacataaattcctaatgaattttcaattttcagaatatataaatcattcaagacaattayatcattgtataaccatttttatattatataaaattatataaccatcttttatatcataaaagatatccaagacgatgtaaaatcaattttgggggaattttaccaacattaacagtgacttgatgatgaacaagctttgaagctttcccaggttcttcctgtattaatttctctggacatcttgaatgctaaatctctctctaaaatactcaagagaaagcatactcaaatattgttgccattaaggaagacattattggtaatgtggctgtgaaatacacaaaaaacttaatggatgatttcttaaaactctaagctatgtacagggctctttcacatcatgcacaaaggtgaactcaaatggatcataga

SEQ ID NO: 313800 - DNA, 611 bp, Homo sapiens
ggaattaggaaaggaaatttggaagtaaataagggaaaaaggcaggtgggaaggaaggaaaggaagggacttaggaaggaaggaagagagtgtgttgagaaagaaaacaggaaggaagggaagggagggaggaaggaaggataaataacaccaaaaagcaacaaaacaaaacaaaacaagacataaattcctaatgaattttcaattttcagaatatataaatcattcaagacaattatatcattgtataaccatttttatattatataaaattatataaccatcttttatatcataaaagatatccaagacgatgtaaaatcaattttgggggaattttaccaacattaacagtgacttgatgatgaacaagctttgaagctttcccaggttcttcctgtattaatttctctggacatcttgaatgctaaatctctctctaaaatactcaagagaaagcatactcaaatattgttgccattaaggaagacattattggtaatgtggctgtgaaatacacaaaaaacttaatggatgatttcttaaaactctaagctawgtacagggctctttcacatcatgcacaaaggtgaactcaaatggatcataga

SEQ ID NO: 313801 - DNA, 430 bp, Homo sapiens
tgctggtttaaattatttttgggttgatccagtaagccacacctcagatggaccagatcctaaagagtgtataacttgctttattgcagctggtgctttgcctacctcatagaaaaaaaaaaagattgtagctttcaaaagggaatgtctaggcctagttattatgttccattctcttttgtggccaaggcctcagtaatgtacgatagtattttattatttttatatagcataatagatgccatgatctttggcatcatcaraacaatagttcaaattctgcatccctaactttttaagtatatgatgttgggcatattatataacctctctaagcgtctgcttcttcatctgtaaaatggggatgaagtgccctccatgtaaggatgttgtttcatttaactgagattatatttttacagtgtttagc

SEQ ID NO: 313802 - DNA, 430 bp, Homo sapiens
tgctggtttaaattatttttgggttgatccagtaagccacacctcagatggaccagatcctaaagagtgtataacttgctttattgcagctggtgctttgcctacctcatagaaaaaaaaaaagattgtagctttcaaaagggaatgtctaggcctagttattatgttccattctcttttgtggccaaggcctcagtaatgtacgatagtattttattatttttatatagcataatagatgccatgatctttggcatcatcagaacaatagttcaaattctgcatccctaactttttaagtatatgatgttgggcatattatataacctctctaagcktctgcttcttcatctgtaaaatggggatgaagtgccctccatgtaaggatgttgtttcatttaactgagattatatttttacagtgtttagc

SEQ ID NO: 313803 - DNA, 361 bp, Homo sapiens
cccccaatacacacacactcacacacacacgtrtgtgtccatgtgtaaaatattttcagtgaatcaggagtttagtttttttttttaatttttatatagaacacccagcagagtgatatgaccacagtcagtaaataattcaaaaaatatttgccaaaatagcacctattataagttggactccaaagtacaaaaatgctctctaacattgaagacgtcacagtcttgaacagagaccaaaatgctgaattacattattgaaggtattcttacttaacggctcttttacacagtatccaatatgactagaatgttctctccaacctctttttctagttaactcatatcaacggttcaggtg

SEQ ID NO: 313804 - DNA, 570 bp, Homo sapiens
acctttgttttcctttcagatttaattcatgactgacacaaacattgactataatccaaataatttaattattttttccactttgcaaattgaactgtttaaacttactgctcagtgagcacaaataaaaataaaatatttatctcagtgctttatctgtaggaaaacaacagaatattccaatccctgtaagttatagttcttggtttccagctttaagaagcagagtgtcgggcccggagcgctgactcacgyctgtaatcccggcactttgggaggccgaggcgggcggatcacgaggtcagcagatcgcgaccatcctggctaacacggtgaaaccccgtctttactaaaaaattttttaaaaattagccgggtgtggtggcgggcacctgtagtcccagctactcgggaggctggggcaggagaatggcgtgaacccgtgaggcagagattgcagtgagcagagagagcgccactgcacttcagcctgggtgacagagcgagactccgtctcaaaacaaacaaaacaaaacaaaacaaaacaaaaaccaaccaaacaaaaaagaa

SEQ ID NO: 313805 - DNA, 461 bp, Homo sapiens
gtatcttgaaaaaaatatggaattagtttgctttatgctcttgtgcataatttccaaaatatgaatttgtcaccatcccrtgacaataaatttcaaaaataatggaacaaaatttcaaggattttgcgtctttatatgtatgtttttccaaagttaatgaatatggtgcaaatatatactaacctctatcaagtagttatgctcagaaaatgtatttttttaaagataacttaaaaatagtttttaatctaagataaaaatcaaggacaaaaatgagtgggaaattatgttataaaaagctaagtgaaaagaaagatataaaatgagtttaacatttaagtaagtctaaatttttaaatatgggtaatgtgtttatgaaacaaacttaaatttgggtaatgtgtttataaaacaaatatggtaaatgtgtttataaaacaaatttaatattagaaatactc

SEQ ID NO: 313806 - DNA, 461 bp, Homo sapiens
gtatcttgaaaaaaatatggaattagtttgctttatgctcttgtgcataatttccaaaatatgaatttgtcaccatcccatgacaataaatttcaaaaataatggaacaaaatttcaaggattttgcgtctttatatgtatgtttttccaaagttaatgaatatggtgcaaatatatactaacctctatcaagtagttatgctcagaaaatgtatttttttaaagataacttaaaaatagtttttaatctaagataaaaatcaaggacaaaaatgagtgggaaattatgttataaaaagctaagtgaaaagaaagatataaaatgagtttaacatttaagtaagtctaaatttttaaatatgggtaatgtgtttatgaaacaaayttaaatttgggtaatgtgtttataaaacaaatatggtaaatgtgtttataaaacaaatttaatattagaaatactc

SEQ ID NO: 313807 - DNA, 564 bp, Homo sapiens
aattctttctactgagtgggaacaaggaacagtggtccttgccactgtattatattagaaagaagtgttacactactctcatacaacagtttgtaatttactggcatgtttacatttatgggtctaatgtaatcctcccaaaatctctgaggaaggaataatgttctttacctcctgcttcttggaaaggagaaaagcaagcctgaagaaagtgactagtgattatagtcactaggttgcatattttaaaacagcaggtgcaaggcccacaataagagattcaactctcattagtaaacaagatgagagctccacrtgaacttccatggtagatggtgtgttcggctgttcttgttttgctataaataaatacctgaggctgagtgatttacaaagaaaagaggtttaattggctcacagttctgcaggtttgcaggaagcatggtgctgcctgtttccggtgaggatctcaggaagcttacagtcatggagaaaaccaaagggggagcagacatctcacatggtgagagtaggagcaagtgagagcaagtagggaggtgccac

SEQ ID NO: 313808 - DNA, 564 bp, Homo sapiens
aattctttctactgagtgggaacaaggaacagtggtccttgccactgtattatattagaaagaagtgttacactactctcatacaacagtttgtaatttactggcatgtttacatttatgggtctaatgtaatcctcccaaaatctctgaggaaggaataatgttctttacctcctgcttcttggaaaggagaaaagcaagcctgaagaaagtgactagtgattatagtcactaggttgcatattttaaaacagcaggtgcaaggcccacaataagagattcaactctcattagtaaacaagatgagagctccacatgaacttccatggtagatggtgtgttcggctgttcttgttttgctataaataaatacctgaggctgagtgatttacaaagaaaagaggtttaattggctcacagttctgcaggtttgcaggaagcatggtgctgsctgtttccggtgaggatctcaggaagcttacagtcatggagaaaaccaaagggggagcagacatctcacatggtgagagtaggagcaagtgagagcaagtagggaggtgccac

SEQ ID NO: 313809 - DNA, 555 bp, Homo sapiens
tgaaagagtgtgatcacaaatatgaaatgaacctctgtcatatgcggttatctctctctgctctaggtaatggaattatatttaattttagttcctttcctagtgtttattttttattgcaaataatacattgaatgtttctcactttataagaataaaaagaaaaaagtatttttagaaagatgcccttttttatccttttttatatatgaacctgtgaatctggctgtgtaaataytgcaggtttaatattatacaaattaatagtacatcaattgattattttttatttctttgttttatacaggcaaaattattatgaatgtgaatatagtatgcatttctttccacatctgttctgagaaaataaataatacatggtaaagttctaaatctgacaaaatatagctttttagtggaggggaaatagtaaagcagaagagcaataacaacagaaaaacaggaatcatttatacatctctctaggctattatattggcaaatctgaaaggaaaggaaacgaacctcgggtcacatacttagttctcaatgtga

SEQ ID NO: 313810 - DNA, 536 bp, Homo sapiens
actgtcagtttaggttcagcataacaggtactgcaattgatgtatgcatgtaatgctatggtgacacaggcgatgggaacttagtacaacttttgtggcaattgtataggcrtaactctttctccatttttattgactattatatatagcacaatgactaatgcattatagatattcaatacagttcagtttcccacctcttctctttttccctctctttctttatagatttttaaattacaattaataaattgatccttttacttttttttttcattgaccagcattgatttgcttattctcagatagacattagggcaaagagtatggcttcgtgaaaaccccagggtgaggtctccttagattgtacccgtgttttcttgtaataataagtgaatatgttttgcaatagatttggtcaaattgaggattaaacgtattatgtcaaagaggcatctatagacgaatccctgtacattcttggatatctggtaattggagagacactgtaataaatagactgaggaaaacagttt

SEQ ID NO: 313811 - DNA, 536 bp, Homo sapiens
actgtcagtttaggttcagcataacaggtactgcaattgatgtatgcatgtaatgctatggtgacacaggcgatgggaacttagtacaacttttgtggcaattgtataggcgtaactctttctccatttttattgactattatatatagcacaatgactaatgcattatagatattcaatacagttcagtttcccacctmttctctttttccctctctttctttatagatttttaaattacaattaataaattgatccttttacttttttttttcattgaccagcattgatttgcttattctcagatagacattagggcaaagagtatggcttcgtgaaaaccccagggtgaggtctccttagattgtacccgtgttttcttgtaataataagtgaatatgttttgcaatagatttggtcaaattgaggattaaacgtattatgtcaaagaggcatctatagacgaatccctgtacattcttggatatctggtaattggagagacactgtaataaatagactgaggaaaacagttt

SEQ ID NO: 313812 - DNA, 536 bp, Homo sapiens
actgtcagtttaggttcagcataacaggtactgcaattgatgtatgcatgtaatgctatggtgacacaggcgatgggaacttagtacaacttttgtggcaattgtataggcgtaactctttctccatttttattgactattatatatagcacaatgactaatgcattatagatattcaatacagttcagtttcccacctcttctctttttccctctctttctttatagatttttaaattacaattaataaattgatccttttacttttttttttcattgaccagcattgatttgcttattctcagatagacattagggcaaagagtatggcttcrtgaaaaccccagggtgaggtctccttagattgtacccgtgttttcttgtaataataagtgaatatgttttgcaatagatttggtcaaattgaggattaaacgtattatgtcaaagaggcatctatagacgaatccctgtacattcttggatatctggtaattggagagacactgtaataaatagactgaggaaaacagttt

SEQ ID NO: 313813 - DNA, 515 bp, Homo sapiens
ctcacccctgcaccaaacagagaagcagcgcttttatctgtcttataaatgtttctgtgaaatattttacttgaaaaaaagtttgtaagttaaacatatacttgaaagccattagagtattgtaaagaatatggctgtagaataaatggaccaagactttatattgaaactctaccacttactaatgatatattcctgtgaatatgtcttattttttatctttattttactcatctctaaaatgggaatattaccactgattttatagagtgtagtagtcaattttcatactgctatgaagaaatacccaagactgagtaatttataaataaaaagaggtttaatggactcacaattccacasgtctggagaaggtatcacaatcatggcagaaggcaaaagaggagcaaagacacatcttacatggcagcaggtggaagggcgtgtgcagggaaactgccctttagaaaagcatcagatcatgtgagacttattcactatcatgagtacatcat

SEQ ID NO: 313814 - DNA, 515 bp, Homo sapiens
ctcacccctgcaccaaacagagaagcagcgcttttatctgtcttataaatgtttctgtgaaatattttacttgaaaaaaagtttgtaagttaaacatatacttgaaagccattagagtattgtaaagaatatggctgtagaataaatggaccaagactttatattgaaactctaccacttactaatgatatattcctgtgaatatgtcttattttttatctttattttactcatctctaaaatgggaatattaccactgattttatagagtgtagtagtcaattttcatactgctatgaagaaatacccaagactgagtaatttataaataaaaagaggtttaatggactcacaattccacaggtctggagaaggtatcacaatcatggcagaaggcaaaagaggagcaaagacacatctyacatggcagcaggtggaagggcgtgtgcagggaaactgccctttagaaaagcatcagatcatgtgagacttattcactatcatgagtacatcat

SEQ ID NO: 313815 - DNA, 581 bp, Homo sapiens
agacaatatatttaagcagccaggtgattatttatgtaatcaaggcagaaatgcacactaaaaatttacaaatataaattatgattgagaaaacakattacttacactgatattcagctgcacacccattcataactgctatagtagtttttgtataaataaaaaatacttatgaattaattttggtatatattaatatcagcaagctaacatgagataaacaacacacttatttaactttcagattttttttgacatgcacaaacccttgaaaactcacacaattgttacaaaaataagagcttccataaccataaacatgttagcgttccctcggcctcaccaagatgtcatatgaattttcaacttaggatcttttttggtgtttcattggctagggagctttgtccccaggtcttggcatagctaaatcctttttgtcatacaggtctcagctcagattttatgtcctcaaagaggacttttagactgttaatctaaattaattcttccatccccactcttgcatattcagtaatgctgtatcatacatacaattttcatcttgtgaaatggtcatt

SEQ ID NO: 313816 - DNA, 581 bp, Homo sapiens
agacaatatatttaagcagccaggtgattatttatgtaatcaaggcagaaatgcacactaaaaatttacaaatataaattatgattgagaaaacagattacttacactgatattcagctgcacacccattcataactgctatagtagtttttgtataaataaaaaatacttatgaattaattttggtatatattaatatcagcaagctaacatgagataaacaacacacttatttaactttcagattttttttgacatgcacaaacccttgaaaactcacacaattgttacaaaaataagagcttccataaccataaacatgttagcrttccctcggcctcaccaagatgtcatatgaattttcaacttaggatcttttttggtgtttcattggctagggagctttgtccccaggtcttggcatagctaaatcctttttgtcatacaggtctcagctcagattttatgtcctcaaagaggacttttagactgttaatctaaattaattcttccatccccactcttgcatattcagtaatgctgtatcatacatacaattttcatcttgtgaaatggtcatt

SEQ ID NO: 313817 - DNA, 581 bp, Homo sapiens
agacaatatatttaagcagccaggtgattatttatgtaatcaaggcagaaatgcacactaaaaatttacaaatataaattatgattgagaaaacagattacttacactgatattcagctgcacacccattcataactgctatagtagtttttgtataaataaaaaatacttatgaattaattttggtatatattaatatcagcaagctaacatgagataaacaacacacttatttaactttcagattttttttgacatgcacaaacccttgaaaactcacacaattgttacaaaaataagagcttccataaccataaacatgttagcgttccctcggcctcaccaagatgtcatatgaattttcaacttaggatcttttttggtgtttcattggctagggagctttgtccccaggtcttggcatagctaaatcctttttgtcatacaggtctcagctcagattttatgtcctcaaagaggacttttagactgttaatctaaattaattcttccatccccactcttgcatattcagtaatgctgtatcatacatacwattttcatcttgtgaaatggtcatt

SEQ ID NO: 313818 - DNA, 524 bp, Homo sapiens
agaataatgaatgtaaaaacaaagtgagtgagtaatgaataaaaagatgagggtaagattttctaattaatatgggttactaaaattaaaagttttcaatcttgcaaatgaatggattacatcaacagtaatcataactgctatttattgagccataaacatgtkccaagtcaatgcatgtagtattttgtctagtacttggcaaagtgcttgatatcaatgtatgtatatatgccttcattgactaagtgttatcttcctaacgtcccagaaatgcagttactattacatgtttccactttttaaacaaagaaattaatattcaatgaagacaagtatcttatctacaatcacacaatagcactgcttgagtctaaatgttgtgagttttcaaatatgtcaaagttttctaacattttaaaatagtaaactcctcttcccctgacaataaatcttatagaagatatctgaaaatggacctagtctagcatggagtgatctctccgcctccatgcatatacagg

SEQ ID NO: 313819 - DNA, 524 bp, Homo sapiens
agaataatgaatgtaaaaacaaagtgagtgagtaatgaataaaaagatgagggtaagattttctaattaatatgggttactaaaattaaaagttttcaatcttgcaaatgaatggattacatcaacagtaatcataactgctatttattgagccataaacatgtgccaagtcaatgcatgtagtattttrtctagtacttggcaaagtgcttgatatcaatgtatgtatatatgccttcattgactaagtgttatcttcctaacgtcccagaaatgcagttactattacatgtttccactttttaaacaaagaaattaatattcaatgaagacaagtatcttatctacaatcacacaatagcactgcttgagtctaaatgttgtgagttttcaaatatgtcaaagttttctaacattttaaaatagtaaactcctcttcccctgacaataaatcttatagaagatatctgaaaatggacctagtctagcatggagtgatctctccgcctccatgcatatacagg

SEQ ID NO: 313820 - DNA, 524 bp, Homo sapiens
agaataatgaatgtaaaaacaaagtgagtgagtaatgaataaaaagatgagggtaagattttctaattaatatgggttactaaaattaaaagttttcaatcttgcaaatgaatggattacatcaacagtaatcataactgctatttattgagccataaacatgtgccaagtcaatgcatgtagtattttgtctagtacttggcaaagtgcttgatatcaatgtatgtatatatgccttcattgactaagtgttatcttcckaacgtcccagaaatgcagttactattacatgtttccactttttaaacaaagaaattaatattcaatgaagacaagtatcttatctacaatcacacaatagcactgcttgagtctaaatgttgtgagttttcaaatatgtcaaagttttctaacattttaaaatagtaaactcctcttcccctgacaataaatcttatagaagatatctgaaaatggacctagtctagcatggagtgatctctccgcctccatgcatatacagg

SEQ ID NO: 313821 - DNA, 524 bp, Homo sapiens
agaataatgaatgtaaaaacaaagtgagtgagtaatgaataaaaagatgagggtaagattttctaattaatatgggttactaaaattaaaagttttcaatcttgcaaatgaatggattacatcaacagtaatcataactgctatttattgagccataaacatgtgccaagtcaatgcatgtagtattttgtctagtacttggcaaagtgcttgatatcaatgtatgtatatatgccttcattgactaagtgttatcttcctaacrtcccagaaatgcagttactattacatgtttccactttttaaacaaagaaattaatattcaatgaagacaagtatcttatctacaatcacacaatagcactgcttgagtctaaatgttgtgagttttcaaatatgtcaaagttttctaacattttaaaatagtaaactcctcttcccctgacaataaatcttatagaagatatctgaaaatggacctagtctagcatggagtgatctctccgcctccatgcatatacagg

SEQ ID NO: 313822 - DNA, 560 bp, Homo sapiens
aggtactggccagaaatagagcccagccattctgaagtttgatgtttaagactctgtaggaataggaaagctgaaatttaagagcagaagaattgaaccaggcttctagaagagtctctggaagttacccataaagtaaagctgggactctgcttccagctaccagtttaggactgtgcagaaggagactgaagttctgaggtgaacttttagtttcttcctgttctaggcagtacattccacatgacgctatggttaagagaaaagacttcacaagcagatagatcgaagtttacatcttagtcttsgtatttcaaaaatatagagcttatttaagactttagatcttatgtaggtgtttattttgggcagtggccccaacaacaggagtaagggcttcaaaaaatgaaagaaaacatgagagaaagtcaatcaaatgatgcattgctgctgcaggcaactggggatcaaattgcctggagtctttcttagaggctaggtagcatctatttttatttttttttctgcatttttacttgtgccagtgttttctaagactt

SEQ ID NO: 313823 - DNA, 430 bp, Homo sapiens
agattaataggcatgagtcctggacttagagcttagcccagtatcattctcttcttagacaaaacttccaatgtaatagaacattaagatgctctagcactgaaacgctttttgaaaatcatacaatccaagggttccaaattgagatgtctttagtggacaaagagccagagtaaatgaaaaaagatcctgggatctctggataagttatttttacctcgactattacatagtttgagtcttatagttctaacagtttcctgtagtaataagaggtactctagaaaacaaacagcatgagagtcaatctcatctggattttgatgcagttaaacagtggctgaacytggaacaagttgcttaatatttctaagtctcgccatgttcagctgttaaatagggaaaacaatacgtaatctagagagttgtt

SEQ ID NO: 313824 - DNA, 545 bp, Homo sapiens
tctcctgtctgcttttgtatgtaatctggggcaccatcacatatcatatatcccttggacaacttccactatattctcatgaaagaatgagggttttgaatagttttgaagctcatggatcttctaaaggggtcttgagaccccgtcccccagactatactttgaggaatgttttcctaaatcagtagcctatccttgtcttctgtcaggattttggtattccatatctggtatctaaaatgtagtataagcgaatcagaaaatgtaaaatggagaaaagtagacatgtctgaaatttgaatgattttgtgttacatctgaaaaarttttaataaggcaaacatgatcttattttaaatggattgtggtatgcatcatggggactggaaaggatagattttggagataagacatgttgagacgtagggaaacactgctgaaaaggatttttgtttttttgatttagcactaagtttttgaattgaatagtccatcttgtgtgtcaatcaacacaatcaaaacatttttataagctttttaaaaca

SEQ ID NO: 313825 - DNA, 571 bp, Homo sapiens
ctcattctgcaaattaataacatcatcttgggagcattcaagaccctggataatgaatgttaacagcagtttctgttggctgcatctgaggatgcatttatttttctcattatcttgcacacaatcttttagctattgtctgccactgctgctcactcaggaagccacagaaagtgctaaagacgtcaagaagcaagaagcctcatttatttttattgycttcatcagcatttttttctctccctcagtttttttttttttttaacgtaaaggcctataatagaatctgctgattagaatcagaactgtatctaagtatagatatgagagaccttttctgaaggtgatgggcagtggaagggcactttatccttatgatacctctggcagatactgaggctaatgttagttaatgggcatttcttctttccattctggctatattctagatattttacaattgacaaaatctaataaatattatataagagagtaaataatagagttgaatgaatgaaaaataataagtggattaaaataccatcaacagacatattcaagttagtatgat

SEQ ID NO: 313826 - DNA, 575 bp, Homo sapiens
ccaatatgggtggagaagtgacaaggcttgaagagtatcccaggtacattggaggcttaggagttgcagtctctcaggaaggaatatggtgagtgggcttgaagcacttaaatagcactttttaaaatgagaaaacatcaatgctgtatattaaagaaattaggtgctagtggatatgattaactctcaactatattcactcttctctaactatcactcttcctgtcatgtgccaagattaactcagaaactgaacagtaatcatgctagtggtttggggaattggatacttctgacgtaggtagagacaatgtgatagatacatacggtggacagaggaggcaggcattactgagaaatgacccaaaaagagtactgaatttacatcaggagcatatacctcctcctttgtctgcgagcttttcaaaacttgatctataccatctgccatcttcctccccttctgttgtgttctgattacctggtgttttctctagttagctgatttctagcyattatcaaattatcctaggttgtcctcaatacctagggcacagaggctcaattgtattgca

SEQ ID NO: 313827 - DNA, 606 bp, Homo sapiens
tgttatagttttgaatatatgcttccagacttttggaggaggtacatgataaatatattgctaatcatcaaatatatattttccttaaccttttcaaataattgtttcactcaagagtgatcaaatgagaaaagtagctgaaatgtatttctctctctttcctttaaatctcagcagtttgagaccctgaaagagtgagaatctatcaatccaaaataaccccaccttagggagacaaagtgacacagaagcaaacagacatgcttcatatggcaaacacatggagaccaagattagtaaatactstatctggctataattgtatctgtgtccacaatggaggatgaggagaggtgaatttcacaatgataaaatagaaagcttctaaattttggttgtttggaaagtggggaacatcttcaagtatcatcaactaactactgaatacttactacatcctcagcatctgaacatcactttttaatcatcctcaccatagctgtgtgaactagggatggttaactccaatttatatgtaacaaaccaagattcagagaggttctgtaattaatccaaggtttcacaattagtaattgttggaaccag

SEQ ID NO: 313828 - DNA, 606 bp, Homo sapiens
tgttatagttttgaatatatgcttccagacttttggaggaggtacatgataaatatattgctaatcatcaaatatatattttccttaaccttttcaaataattgtttcactcaagagtgatcaaatgagaaaagtagctgaaatgtatttctctctctttcctttaaatctcagcagtttgagaccctgaaagagtgagaatctatcaatccaaaataaccccaccttagggagacaaagtgacacagaagcaaacagacatgcttcatatggcaaacacatggagaccaagattagtaaatactctatctggctataattgtatctgtgtccacaatggaggatgaggagaggtgaatttcacaatgataaaatagaaagcttctaaattttggttgtttggaaagtggrgaacatcttcaagtatcatcaactaactactgaatacttactacatcctcagcatctgaacatcactttttaatcatcctcaccatagctgtgtgaactagggatggttaactccaatttatatgtaacaaaccaagattcagagaggttctgtaattaatccaaggtttcacaattagtaattgttggaaccag

SEQ ID NO: 313829 - DNA, 657 bp, Homo sapiens
atggagtatggattctcaaggtcaccttatgtagctctggatctcaaccctggattagcatgaggaacattagagatgtttgtaaaaatacagcttttcaggtccyatgattgatttggaatctttggaatacaatacagttatattaaacaatggctgtaaaatggattttgcttaacaatggcatggaggattcatgttatatcatctttgctgagctagaactgtacttcccagaattttctccttccatgcatggttcctggttagtttggacacattttacatgagacttggaagaaaggagagaagcagcaagcatcttattttttacctttaaaaggtcagtgcaggacacaaggtcctggtgcagctcacagatctatgagccatatgctagcagatttaaccttggtgttgtgaggcgacaactgggcctaatgaatctcaactttctgttgcatttcttcattcagcttctttgattcctgggccaggtgcatattttgctccgtgatgaaggacatcaacaagtttctgttgcagaatacccccaacattcaaactggagtttggaggtggtaagaaatctagaagttccagttcaactttgaagttaccagttgtttctgtttctcatagttcatgtgcatattc

SEQ ID NO: 313830 - DNA, 657 bp, Homo sapiens
atggagtatggattctcaaggtcaccttatgtagctctggatctcaaccctggattagcatgaggaacattagagatgtttgtaaaaatacagcttttcaggtcccatgattgatttggaatctttggaatacaatacagttatattaaacaatggctgtaaaatggattttgcttaacaatggcatggaggattcatgttatatcatctttgctgagctagaactgtacttcccagaattttctccttccatgcatggttcctggttagtttggacacattttacatgagactkggaagaaaggagagaagcagcaagcatcttattttttacctttaaaaggtcagtgcaggacacaaggtcctggtgcagctcacagatctatgagccatatgctagcagatttaaccttggtgttgtgaggcgacaactgggcctaatgaatctcaactttctgttgcatttcttcattcagcttctttgattcctgggccaggtgcatattttgctccgtgatgaaggacatcaacaagtttctgttgcagaatacccccaacattcaaactggagtttggaggtggtaagaaatctagaagttccagttcaactttgaagttaccagttgtttctgtttctcatagttcatgtgcatattc

SEQ ID NO: 313831 - DNA, 532 bp, Homo sapiens
atacccccaacattcaaactggagtttggaggtggtaagaaatctagaagttccagttcaactttgaagttaccagttgtttctgtttctcatagttcatgtgcatattctattctgaattgtctaccacatcgactttaagtgacaacaaaaagacagtggcattgcatacattgtgtagccaacttccacaagtgcatatttcaaatatctataatgtatctgttatatgtattagtatgtgtgtatatgtgtgtgaatgtatatatacatatgcatgcatacatacatagagatgaggatagagctatgtgtgagtatatatacacagatatacatacatacattcactgtataatgacattttggtcaaagatggattcgatataagatggtggcccataagattataaaayatttttactgtaattttctgtgtttacattgtactataattgcctacagtattcagtagagtaacatgctttattgctttgtagcctaggagcaataggctataccatatagccta

SEQ ID NO: 313832 - DNA, 544 bp, Homo sapiens
taatggcagttagatgtacttctttagagaaaggaatgtgacagccaaatgcctaggtagataaaaaggggtccccagagaatctcttgacctggctcacaagtgtctacatcagatgcttttgtgcagatgagggaacctgcccaggrctttgtctgagcatgcccacacgagcactgggggaacagcgtggggccacgaggagggggaggagcctagcctcttcacttcctgtgtggtagcctgggatttaatctgtgaggtgggggacctgttagcaggacccatctcactttgccgagtttttttttttttctcttttcacccagtagaatcctgctctactcacccttcaatgtgtccatgtgcctaaattttcctgattgtgtaacaagaaccctgttttagctgaactaaggagcaaaattctacaatattgatctcttgcaatgtattgacgagaactacataagaaaatgtaaagtcccattataaaacacagcttggcacatattaagtaccgaataaatggtagctataatta

SEQ ID NO: 313833 - DNA, 602 bp, Homo sapiens
gaatctctagagcagtcagagctggagccctagttgcaaagaaacttgtaggtttggtggataggaccacagggaaggaagaggaagatgtgttttctatcagcaaagggggagaaaaaatatttcttggttatttggtcacagaaaactattttttcttttttttgagayggagtctcactctgttgcccaggctggagtgtagtggcgttgtctcggctcaccgcaccctctgcctcccgggttcaagcgattctcctgcctcagcctctcgagtagctgggactacaggcatgcaccatcacacctggctaatttttgtatttttagtagagatagggtttcaccatgttggccaagctggtctccatctcctgacctcgtgatccacccgcctcagcctcccaaagtgcatagccaccgcgcctggccaggaaactattcttaaaaagtaaaggggtaaataaaatactagacttcttgaagagttaaactcaaactaacatgaccagttatgtgaggatgtggtacttctactagtcacagtaaactagctggtagataaaaccgtaacggcagatgctgcagttttgcaagaaacc

SEQ ID NO: 313834 - DNA, 610 bp, Homo sapiens
taaattcacatgcaatttaaaggaattttatctgcagctcagccacaatagactgctatatatttttgcttgtaatacaacaatctagttcatagtgattcgttcaccaaccctgatgtgtttcaaaaaagatttggtgtcaatttcacacaaaatttttttaagaagttttgttctgtttcaatattttttcggagttattttctgttcttcctgtcctcctttatcacatcatttggtaggcattattgacactgttaatgataagagagggcacctttaaaacacagatgtaaaattttacatgcttcatttaactattactttgtttgggatgcacaactatgtgaaatcaagaaatattatttattatcagccttttactgctgaggaaactkaggtactgacaatttaacacatttttccaaagcctaacaattaaaaaagtgaccgaactggaatacaaagtctgtttcctggaactgtattttgtgcccttcagcacttcaaatggctcctcattgcaggaacatttttcagcggccttcaccaacaccaaagacagaaagttgaaagacatggccaatgtaccaaggtgaaagtcagtcac

SEQ ID NO: 313835 - DNA, 633 bp, Homo sapiens
tgaatttgatatttagtgtgtggttttggtataataccttgatcgagttaaagaagttacaatctttttttttttttttttttttttttgagagagggtctcgctctgtcacccaggctggaggagtgtggtggcatgatcttggcttacttcaacctttacctctgtttcaagggattctcatgcctcagcctcctgagtagmtaagattacaggcgcgtgccaccacaactggctaatttgtgtatttttaacagagacagggttttgccattttggccaggctggtctggtactactgggctcaagtgatctgcctgcctcggcctcccaaagtgctgagattacaggcatgtgccactgtgcccagcctacatcctattcttgaaagtaaaagcacttttaatataaataataaacttcatcaaatgctattgctacatatattgtatattcatgtaatttttctattttagctaaatggttaatcatgttgatagattttgtgatattaaaaataacatttcttgcatttctgaagaaaagctaatttttatacacagatttagtcgtataagagtgaaacaaaattagactatatttttctcctactgtcttttttctcttacagaa

SEQ ID NO: 313836 - DNA, 633 bp, Homo sapiens
tgaatttgatatttagtgtgtggttttggtataataccttgatcgagttaaagaagttacaatctttttttttttttttttttttttttgagagagggtctcgctctgtcacccaggctggaggagtgtggtggcatgatcttggcttacttcaacctttacctctgtttcaagggattctcatgcctcagcctcctgagtagctaagattacaggcgcgtgccaccacaactggctaatttgtgtatttttaacagagacagggttttgccattttggccaggctggtctggtactactgggctcaagtgatctgcctgcctcggcctcccaaagtgctgagattacaggcatgtgccactgtgcccagcctacatcctattcttgaaagtaaaagcacttttaatataaataataaacttcatcaaatgctattgctacatatattgtatattcatrtaatttttctattttagctaaatggttaatcatgttgatagattttgtgatattaaaaataacatttcttgcatttctgaagaaaagctaatttttatacacagatttagtcgtataagagtgaaacaaaattagactatatttttctcctactgtcttttttctcttacagaa

SEQ ID NO: 313837 - DNA, 615 bp, Homo sapiens
aatttgaaaacaaggattttaacacaaaaatgagatgaatcaaatttaaaggaaaaacgaatgacagagagttccattagtargttttcaaaataatccagatgtgattaaatgagcaatggatacaagatagtggcagtgagaaagggtatagatatttatagaatatagatatttataaatatatacacatttatacatttatagatgtttatagtttccaagcaactgggattgtaatgacttggcatatgttccataaatccaaatgcagactaataacaatgacacatatatgacacaatgacacatatataatgacacatatatgagttattattatttttgaagtattgtgtgcagaagcaaagggagaaacagaagatgacgtgttaacttgtacgcaaacaaaaatatctgccttgcagatatgtagacattcagtactgaagattaaaaagactcatagaacaaccctggaacattttaaagactgaaaacaaaaacaacttaggtactaagaaccataattctacaatacgggtagatgcaagtttgtaggtcttaaaaaacagtttttagagatctggccttctgtaaaggaaagaataaaaa

SEQ ID NO: 313838 - DNA, 615 bp, Homo sapiens
aatttgaaaacaaggattttaacacaaaaatgagatgaatcaaatttaaaggaaaaacgaatgacagagagttccattagtaggttttcaaaataatccagatgtgattaaatgagcaatggatacaagatagtggcagtgagaaagggtatagatatttatagaatatagatatttataaatatatacacatttatacatttatagatgtttatagtttccaagcaactgggattgtaatgacttggcatatgttccataaatccaaatgcagactaataacaatgacacatatatgacacaatgacacatatataatgacacatatatgagttattattatttttgaagtattgtgtgcagaagcaaagggagaaacagaagatgacgtgttaacttgtaygcaaacaaaaatatctgccttgcagatatgtagacattcagtactgaagattaaaaagactcatagaacaaccctggaacattttaaagactgaaaacaaaaacaacttaggtactaagaaccataattctacaatacgggtagatgcaagtttgtaggtcttaaaaaacagtttttagagatctggccttctgtaaaggaaagaataaaaa

SEQ ID NO: 313839 - DNA, 615 bp, Homo sapiens
aatttgaaaacaaggattttaacacaaaaatgagatgaatcaaatttaaaggaaaaacgaatgacagagagttccattagtaggttttcaaaataatccagatgtgattaaatgagcaatggatacaagatagtggcagtgagaaagggtatagatatttatagaatatagatatttataaatatatacacatttatacatttatagatgtttatagtttccaagcaactgggattgtaatgacttggcatatgttccataaatccaaatgcagactaataacaatgacacatatatgacacaatgacacatatataatgacacatatatgagttattattatttttgaagtattgtgtgcagaagcaaagggagaaacagaagatgacgtgttaacttgtacgcaaacaaaaatatctgccttgcagatatgtagmcattcagtactgaagattaaaaagactcatagaacaaccctggaacattttaaagactgaaaacaaaaacaacttaggtactaagaaccataattctacaatacgggtagatgcaagtttgtaggtcttaaaaaacagtttttagagatctggccttctgtaaaggaaagaataaaaa

SEQ ID NO: 313840 - DNA, 536 bp, Homo sapiens
ctgccaatagagaaaatacaacagaaagaatcttggaggggaaagagaaagctgacccaagagactgctgttaaactatcctttttttgtgatcttaaaaaaaaaaaggcatgtgaatatcaaggccttgaaagggacccctgaaagtgaggggtctagagacatatacacttcattagcttcaytgtgaagttgtctctgaaaatacagtaaaaacacattttgtgattgatatgtttctattaaataggagttctgcattagataggctgaggaggagaggccagtaagtagcacatctagggaggaatatccagtctgtgatgattgtaaattggaggtgctggaggagaagtaaacaagagaagtaaacatccttggaaaggtagttgctgggggatgctaaataattgactattaagataacacaccacacaatctctttaagggagatagatttgaaggaaaagcgcactaatgaactgtgtccagaagtatacaaacagcaatgaaaatgtggcatggggctaatttcc

SEQ ID NO: 313841 - DNA, 627 bp, Homo sapiens
aaggcagttctacaagttggcagcttcccaagagaaaagcaaagagcttaagtaattgatagcacttcatttttttaaaatttaggatttgttgtccgaattctttgaaaaatccatgtgcattctaagattatttactttaaaaattgcataagcaatgccagaattattcctcctcgcaagatgtcttcagtccagtgagggaaagagctatataagcaatggtctatgaaccaagtccattatttactgataaattgattctttcagttaatgatatttattgagcattcgacacagcttagaaactgaatgagatgctagcggcagtgagaagtggcagagcgcctgcattacaggaactcacaacctgagaaaaacacacagtcatatccatcactatattcctgtgtgacaaatggtaygttctgtggagatctatgaaatggaagtaagttctttacaagtaaaaatatgaactttgtttccaccaatattttagtataaaactccttcaaaatctttgccccatattcatgctactcttacttccttgtcttttctgttttatctggccagaaaaaccatctcagctctctcttggcaaggttctgtacacccccaagg

SEQ ID NO: 313842 - DNA, 606 bp, Homo sapiens
tcagtccagtgagggaaagagctatataagcaatggtctatgaaccaagtccattatttactgataaattgattctttcagttaatgatatttattgagcattcgacacagcttagaaactgaatgagatgctagcggcagtgagaagtggcagagcgcctgcattacaggaactcacaacctgagaaaaacacacagtcatatccatcactatattcctgtgtgacaaatggtacgttctgtggagatctatgaaatggaagtaagttctttacaagtaaaaatatgaactttgtttccaccaatattttagtataaaactccttcaaaatctttgccccatattmatgctactcttacttccttgtcttttctgttttatctggccagaaaaaccatctcagctctctcttggcaaggttctgtacacccccaaggccttgtaatatcactctttctgctatggaactttctcttaagctttcaggcagaattttctgttgtgcataacataagttcatgtgcatttacaaaggatagcacttagtctattttattatggtcttaagcgaagtcttatttgttcactatttcccccattaagct

SEQ ID NO: 313843 - DNA, 606 bp, Homo sapiens
tcagtccagtgagggaaagagctatataagcaatggtctatgaaccaagtccattatttactgataaattgattctttcagttaatgatatttattgagcattcgacacagcttagaaactgaatgagatgctagcggcagtgagaagtggcagagcgcctgcattacaggaactcacaacctgagaaaaacacacagtcatatccatcactatattcctgtgtgacaaatggtacgttctgtggagatctatgaaatggaagtaagttctttacaagtaaaaatatgaactttgtttccaccaatattttagtataaaactccttcaaaatctttgccccatattcatgctactcttacttccttgtcttttctgttttatctggccagaaaaaccatctcagctctctcttggcaaggttctgtacacccccaaggccttgtaatatcactctttctgctatggaactttctcttaagctttcaggcagaattttctgttgtgcataacataagttcatgtgcatttacaaaggatagcacttagtctrttttattatggtcttaagcgaagtcttatttgttcactatttcccccattaagct

SEQ ID NO: 313844 - DNA, 575 bp, Homo sapiens
cagtcatgctgaggccttacttaagtgtgtccatgtaactggctgaattgaaattgactacagtttttgtttgttccccaaagtcagtttttaaatttttgatagagccaactcaatccacaaagcatttattgagcaagtaatgtaccccaggcaaggtaagaacacgaatttgaatatgccatcatctctgcactcaaagggaaggacaagtactgagtaaacagacatgcacctgcttgtgtgccatgcagacttttggagtgaatgtgcatggggagatgtgcttccatgtatttatttttttttctttgagatagggtatctgtggagtggcatgatcatggctcattgtggccttgacctcctgtgctcaagctatgctcccacctcagcatcccaagtagctgggactgcaggcatataccatcatagctggctaatttattttttatttttatttttasagatgggggccttggtttgttgctcaggctaatctcaaactcctggttttaggggattctcccaccttagcctcccaaagtgctgggattacaggcatgagtcactgt

SEQ ID NO: 313845 - DNA, 580 bp, Homo sapiens
aagaattgaatttaaatgagttactgtgtgaaacagaatactattttacttagcaaagtggttataatataatcaatgcttcatgtgatttaattaaaaaacattgatgatccaagtcaattatagagcacattatagttattgaagacaccttgaagcattatttatgcccattgctattttgcaagtacagtcattattaagtacatcagtatattttgtttttaaagtttaataaaggagggattttactcaatataattgtttttttaattgtattttttccttttgtgtgcattattcttagaagggaacctgaaaaagctgatctactgggatgcataaaatctggtaaggcaataacgtattcattcatctatttaacaaacttttgttgactccatccatagtataaagcacgttaggccttactattaagcaaggactaacaaatctatttagtagtaaatgtttatgtaataactgtkgtactctgctccgatgctttgaagaagtacgaagataaaattcaagattcattgaagtgagtctgtctaggttatctccaaatctaattaga

SEQ ID NO: 313846 - DNA, 581 bp, Homo sapiens
gttccatataaatcgtgctgtttctttactatttctgtacaaaatgacactgggattttttaagatactgctttgaatccttagattgctttgggtaatatgggaatttaaaaaatattcattatttgaatacatgaagaaagaaagtcttttcatttatttgtgtcttctttaatttctttgtattttatggttgtcagtgtaaaaatatttcacctcctgggttaagtttattcttaagtatttaatttttttgacgctattktaaatgggatagtttcttcattttctttttggttggtttattgctattagtgtatagaaacacaagtaagttttacatgttgatttttacactgcaactttactgaaaatgtttattagttgtaacagttttatttgtgaggtctttagagttttctgcccataaaattatgatatctaaagagataatttacttctttcttccagttaatatttcattcatgtatgtgtgcttgcgtgtgtgtgggggggtgtgggtgtacttattgtggctaggacttccatttctgtgttaaacaaaagtagccagaatgggc

SEQ ID NO: 313847 - DNA, 581 bp, Homo sapiens
gttccatataaatcgtgctgtttctttactatttctgtacaaaatgacactgggattttttaagatactgctttgaatccttagattgctttgggtaatatgggaatttaaaaaatattcattatttgaatacatgaagaaagaaagtcttttcatttatttgtgtcttctttaatttctttgtattttatggttgtcagtgtaaaaatatttcacctcctgggttaagtttattcttaagtatttaatttttttgacgctattttaaatgggatagtttcttcattttctttttggttggtttattgctattagtgtatagaaacacaagtaagttttacatgttgatttttacactgcaactttactgaaaatgtttattagttgtaacagttttatttgtgaggtctttagagttttctgcccataaaattatgatatctaaagagataatttacttctttcttccagttaatatttcattcatgtatgtgtgyttgcgtgtgtgtgggggggtgtgggtgtacttattgtggctaggacttccatttctgtgttaaacaaaagtagccagaatgggc

SEQ ID NO: 313848 - DNA, 577 bp, Homo sapiens
gctaacagggcaggtctttcgttaagtgttcttgtcacgaaataaaaataaaaaagataggaggaaaccttcttttagaggtatggatatgtttatggcattgattgtgatgatgtttcacagatatatacttatctttaaactcatcaagttgtatatattaaatttgtgtagcttttgtgtaaaaaaaggaatagctttctgccctagctccagagaaattccagcatgaaaatattttaacaataaatttaaagttaatattttaatgataccttgataccataccagataaactggctgtatgtgatatattgccaaagccatcagaattatcaagtgcaactcaactttggagcctgtaaaacaagatgcaaggaaaatctaaaattaatggcaatatagtatagcagaaaatgcttggagtttggttctaggcgtatttggttttgagtctttcatttgccacttacgagctgtataaacwtgaacaatttgcttttctgagttgcagttttctcacctttaaatatacggatatgtactagatgtgtactttaacgtttgttgtcagaat

SEQ ID NO: 313849 - DNA, 515 bp, Homo sapiens
aaggcatggttatttcactggatattttacctgatgaggccattatctccatttgctggtccaatttatcctgtaatattcattcattcattcactaactcattcattcattcaaaaatattggtcaaattcctgctgcatgtgaggcattgtgctggtcaatgtagatggaaataaacattccttaccccgtagaatttgatttctagtagcaggatgttaaatgtaatcaattattacaggtgatttaaagaaagctaatagtgggacasaagaaggagtcaaactggtgagggagttcatttccagagggcaaggaagagtcagaaaacgtgtcttagagaaggtcaatgaacttctaaagctgaacattgaagataatagtctgttcatgacttaaatgggccaaaggagcagatgtgcatatgagagcttttttctggaatcagaagggtgaaggtgagaattcatttattagaaaaatggggctagctacatggctataaacaataaag

SEQ ID NO: 313850 - DNA, 520 bp, Homo sapiens
taggaaaccaatctggcttaataagtcctaatcattttagagtgaaaacctgataccccccagataagccaagtaagaatgtgttggctttctttattacaaaggaaagaagacagatttgcaaaggcggaaacaaagattacatgcaacctgaattgagcatatgaacttaaacaagtcattccccctcttttgtcctgtttcagccacaaaataagggagaaagttgaatttttctccagggtttctgatgactgaattttgtttaatgagtaagaaaacagtcctcatctgctattatctactattcaaaatccccttcaaggtttgtcattttcccttctgaggcattctctacaaaaccaaaattttggtttataaaatcaaaacaagtaatcatatcactgattatttataaattctaacaacacacctacatctctttgatgctccagcttaggcatggacckacatctgatcgatcagataatttgtcttctccccatcagattagtccatg

SEQ ID NO: 313851 - DNA, 581 bp, Homo sapiens
gcaaatcctcttctcttgtatctttctctctatgtaagtaccaccttctccttaagacatcacagtcaggttcctaatgaggactttatttcaaatgacacttaacccactctcttttgtattactgtttgtattcatgtytaatctctcccacaggattaaaggctttatcttatacatctgtatacaccccacatctcctagcacatattaagtacctaagatatacttgcttaatgaggaaatgaatgaacacttagatcaaacagccaatttattattcagcctttctggactctgagcagaaataacttaggagtggccaattggctgcatcatcaaagtgagcctgttttggcagaaagatgtccacataccactacagtttctcactgtaatttttgtctctaataaaacaaaatacagattgttctaaggttttagtggagaggacaccagaaaaaagttgccacatggcaattcccacaggcaaacttccctgcctgttgtggttatttttcattgtctctgtggtatgtcttttacattctttctgaaaatgaaccctgcattccttccct

SEQ ID NO: 313852 - DNA, 581 bp, Homo sapiens
gcaaatcctcttctcttgtatctttctctctatgtaagtaccaccttctccttaagacatcacagtcaggttcctaatgaggactttatttcaaatgacacttaacccactctcttttgtattactgtttgtattcatgtctaatctctcccacaggattaaaggctttatcttatacatctgtatacaccccacatctcctagcacatattaagtacctaagatatacttgcttaatgaggaaatgaatgaacacttagrtcaaacagccaatttattattcagcctttctggactctgagcagaaataacttaggagtggccaattggctgcatcatcaaagtgagcctgttttggcagaaagatgtccacataccactacagtttctcactgtaatttttgtctctaataaaacaaaatacagattgttctaaggttttagtggagaggacaccagaaaaaagttgccacatggcaattcccacaggcaaacttccctgcctgttgtggttatttttcattgtctctgtggtatgtcttttacattctttctgaaaatgaaccctgcattccttccct

SEQ ID NO: 313853 - DNA, 581 bp, Homo sapiens
gcaaatcctcttctcttgtatctttctctctatgtaagtaccaccttctccttaagacatcacagtcaggttcctaatgaggactttatttcaaatgacacttaacccactctcttttgtattactgtttgtattcatgtctaatctctcccacaggattaaaggctttatcttatacatctgtatacaccccacatctcctagcacatattaagtacctaagatatacttgcttaatgaggaaatgaatgaacacttagatcaaacagccaatttattattcagcctttctggactctgagcagaaataacttaggagtggccaattggctgcatcatcaaagtgagcctgttttggcaraaagatgtccacataccactacagtttctcactgtaatttttgtctctaataaaacaaaatacagattgttctaaggttttagtggagaggacaccagaaaaaagttgccacatggcaattcccacaggcaaacttccctgcctgttgtggttatttttcattgtctctgtggtatgtcttttacattctttctgaaaatgaaccctgcattccttccct

SEQ ID NO: 313854 - DNA, 484 bp, Homo sapiens
atatattcttatattggtaatacttcaaataacatgcaagtcaacttacaggttcatttgattttgttctgttctttgatttcccacaaaagttgaaatcacayttctaccacctaaaatagaaattccttgaggataagaaggaatattttacatatttttatctccagcaactagaacaatgatgattatattattgaatgacactttataaaaaggtcaaaatttagaaaatagttatctaaaatatgggggttaactttattttgatgaacatttgaggtaaattatgtattgtctggaatctattttctgcctaaaagatttcatacaatatagagttttgtttaatgaaactttttatatcatggcaaatggcccatactaattaaggctttgctaatttagtttcaacaaattctacaaaatagaaaagtctgtaagatgagtctcatatcctgagtcagttactgtttaccagaaa

SEQ ID NO: 313855 - DNA, 535 bp, Homo sapiens
ggaggcatcacattacctatttgaaactataaggccagagtcaccaaaacagtgtggtactggcataaaaattggcacatagaccaatggaacagaatagagaactcagaaataaaccctaatacttacagccaactgatcttcaacaaagcaaacaaaaatataaagtggggaaagacctattcaacaaatggtgctgagataattggcaagccacatgtaggagaatgaaactggatcctcatctctcaccttatacaaaatcaactcaagatggagcaaagacttaaatctaagacctgaaactataaaaattctataataaaaagaagacaacattggaaaaacgcttctagacattggcttaggcaagaatttcatgaccaaggacccaaaagcaaacacaataaaaacaaagataaatagctgagacttaattaaactaaagagctyttgcacagcaaaaggaacagtccagcagagtaaacagacaactcacagaatgggagaaaatcttcacaatctatacgtctgg

SEQ ID NO: 313856 - DNA, 600 bp, Homo sapiens
tcatttataatttcttagcctcaatctttctttgtcttctttaatgtaagctgtaatatgtatgtgtgtaatatatttaaatgcagaaaacaaattttcaatctgacaaataagtataaagatctatgaaaccactaacaaggtcaacaaataaatgtcaaaacaccccagaagaacttgctctcatttgtcccttccagacaatcatctactcccccaccattccaccaggagtgaccactgtcctgacttttatcataatccctttctgacttttctttgtagttttaccactcatacttgcatttataaataagaattttgctgtgtttgaacattatmtaaatggatgtttatttgttgaatataattatatatatgagataaattttgttaatcatgttgctcaagtctcccatatccttagatttggttttcctgagatctgttgggcttcataaatctgtgacttcgtgtctgtgacagacaacctccaaatggttcccagtgatccctgcctcttggagttcacacctttaggcacttccctctgacatttgcaagggttggtttgggcaatcaatagaatatggcagagtc

SEQ ID NO: 313857 - DNA, 522 bp, Homo sapiens
tatataaatggatgtttatttgttgaatataattatatatatgagataaattttgttaatcatgttgctcaagtctcccatatccttagatttggttttcctgagatctgttgggcttcataaatctgtgacttcgtgtctgtgacagacaacctccaaatggttcccagtgatccctgcctcttggagttcacacctttaggcacttccctctgacatttgcaagggttggtttgggcaatcaatagaatatggcagagtcccttctgagattaggtcttggctcctctgtttatcttactcctgccctctcttggatcattttctctrggcaagttggttgccatgttgtgagcagcccccttgaaaggcccatgtgatgatgaattgaaacctcctgtcaacagccatgtgagtgacctaggaagcagatcctgcagcccagtcatgcttcaggtgactgcagccccagccactatcttgcctgaaacctcatgacaggctctgagctagaacaacaca

SEQ ID NO: 313858 - DNA, 568 bp, Homo sapiens
ttgtgttcctagcaaagtgaggagagccatgtgatgattgattggttggttgattgaaagtttttgaaaattacaagagtgaacaatctcagatttctatgacgcaggcaggcaaaaatccatgaataaagcacattggggatattaaaacaacagagttaatctgataacaaaagagacaggaggtagaaaagagaaacagaggtgaacttaagtgcaccaagaagtccttcctttcgcaaagagcccatgtagctgagggttgccatatgataacggggcctagtgataccatatcatcttctttattcaaaaaacctccaatatctagaagtacatattttgcaatactaccaaaataagttaaaattatttcaaatgatagatccaacaaaacacagctataggtcaccagtttaccatttctcccttgaaagaatagataagttctaaacaagttcactgtcaaaccaggtaatttcattataaamtctggcatgtggtcaacaggaaaaacattcattaatgttgtttccaatataaagcagttacggaagaaagaaccaaa

SEQ ID NO: 313859 - DNA, 636 bp, Homo sapiens
ccaagtccctgatgtagctcccaaagcctgggcagaaagtccttcagagcattgccttaagagaagtgggaaaaacaagattttccatttccattacagccatgtttttatcatccctagttaacaggataggaaaatacagtctaatgaatttttcttctctttctgttcccatcataaacacaatctttaattcagttgaccctagaacaacaagaatttgaactgtggtaccacttatccctggattttcttccttctctgccatctgtgagacagcaacacgatctctcctcttcttgctcctcctcagcctactcaacatgaggacaactggatgcagacctttctgatgatccacttccacttaggcaatagtaaatatatggtctcttctttatgattttaataacattttctcttctctggcttgctttattgtaagaatgcagtatgtaacatgtataacatgaaatatgtacccatccatatgaacaagtaaggcttctggccaacagtaggctattagtagttaagtttgggagragtcaaaagtcatatgcaattttcagctacacaggaggtctagtgcccctaacctctacatcatttatgggccaactgtaatttgcaata

SEQ ID NO: 313860 - DNA, 531 bp, Homo sapiens
aagtttctcttcttttttcgccttctctctaatttccgtttatcctgcaggcaaagtatcttaaagggttgactcaactaatatccctcctgttttgagcagtatagcctagtgatttagctctcaggtgctgaattcagataggacttggttccaatccaggctctgccatttgctagctatgtgtaaggagcaaattgtaataggacctgtgactgttgtgaggattaaatacagtagccctagaaaagggcttagcaccttgcttggcaaatagtaattgctgttagttacaatgttctccaagagaataatatattagctattaackgtttttatgtgctcccttggaaaataatcacagtaggcaagggttaaagatggatgtagtgactttcccagagcaaaacacagcaagactagctgaaggaaagtaccagctcaatatttgtgacattgtatgagttcttaaacatatagataacttagtgtgggattatttattttgacataagaattagaaagaagtca

SEQ ID NO: 313861 - DNA, 394 bp, Homo sapiens
aagatcactcagtgttatgggaactgtgaaatcaaggaactggatgttttaaaaggtaaaaaaaaaaaaaaataaaaaaaaggaaagactgaaagataaacttaaaaggaaaccaagagtttggagcttaatctgtatgatgaaaagagccactgctgagttttaagccatgaaaaaaatatgattaaatttatcttccagaaatatcactgatatatgaaggatgaatttgarttgtgggagaagtagtatggaaatttagcctagaaaggagaggatagatgggagaaatattcagtaagcataaaaataaatggataaattcactctcgccatgctcttccctgccaaaccaaaccaaaccaaacgttgtgactgttcctcacctaactat

SEQ ID NO: 313862 - DNA, 565 bp, Homo sapiens
aatagacaagtggtattacattaaactaaaaagcttctgagtaacataggaaacaatcaacagggcaaaaagacaacctatgaagtgggagaatatatttacaaaccatacatctgataaggagtttatagtcaaaataaataaggagctcagacatttcaatagtaagaaataaacaaacaaaaaacaattaaaatatgggcaggacgggcagagcaagatagccaaatggaagactccactgatcatcccccttgaaaaaacagcaaatktaacaactatctacacacaaaaaattaccatcataagaaccaaaagtcaggtgagctctcacagtatctggttttaacttcatattgttgaaagaggcactgaagaaggtaggaaagacagtcttgaatcacagatgtcatctcgctcccattctgtggcagtggttgtgtggcatggagagagaatatgtgtttcggagaaggagagtgcagcaattgtgagacgttgcattgaactcagtgctgcccagtcacaacagaaagtgaaactgagctgaactcagctgatgcat

SEQ ID NO: 313863 - DNA, 528 bp, Homo sapiens
gcactgaagaaggtaggaaagacagtcttgaatcacagatgtcatctcgctcccattctgtggcagtggttgtgtggcatggagagagaatatgtgtttcggagaaggagagtgcagcaattgtgagacgttgcattgaactcagtgctgcccrgtcacaacagaaagtgaaactgagctgaactcagctgatgcatgtccacagagggcatatttaaaacagccctacccagagaagaatcatccatcccagtggtcagaatgtgagttccagcaagccttgccacttcaagctaaagtactctgggaccataaataaacttgaaaggtagtctaggacacaaggactgcaacttctgggttagtcctagtatcaaactgggcttagagccagtggacctagcgggggttggcgggggggggggggtcacatgacctaccgagacatcatcaggctggctaagggagtgcttgcaacccccccttccaacctcaggctgcacagcttgtggctccaaaagagacccc

SEQ ID NO: 313864 - DNA, 591 bp, Homo sapiens
aaaggtataataacagataacttcccaaacttagggagatatatcaatatccaagtacaagaggttatagagcaccagcagatttaaccccccaaaaaactacctcaaggtgttaagtaatcaaactcccaaaggtcaaggttaaagaaaggatctaaaagcagcaagagaaaaacagataatgcacaatggcactccaatatgtctggcagcagaattttcagtggaaaccttacaggctgggagagtgtggcatgacatatttaaagtgctgaaggaaaaaaaccttcaccctagaaaggtgtatccagtgaaaatgtccttcaaatgtgagggagaaatacagactttcccagacaaagaaaagttgagggatttcatcaataccagacctatcctacaagaaaygctaaagggagccattcagtctgaaagaaaaggacgctaatgagtgataagaaatcatctgaaggcacaaaactcactggtaatagtgagcacacagaaaaacacaggatattatataagtgtgtaactgtagtgtgtcaactactcaagtagaaagacaaaaagatgaagcaatcaaaaata

SEQ ID NO: 313865 - DNA, 647 bp, Homo sapiens
tttgtataccataaatatagataatttttatttttcaattgaaaatgaatacataataacaaaaagccaattctgaataaaattatacaattttgaacccttgggagcaaagttatctttggtctgtagatgcgttcycgatgggttaagaattttttttttttttttcattttagagacaggatctcactctgttacccaggctgcagtgaagtggtgcaatcatgtcttactgaagcctcaaactcctgggttcaagtgatactcctgcctcagcctcccaaagtgctgggattaaaagcatgagccaccatgcctggccgagggaaaatatttttaaagtgtccattatgtgctatgctttgttttacggactagagacataataagaaataagaaatgccttcaaagagttgtaggcaagatgatgtgggcctaattgcctatgaggtattggaagtgattcttttgtcccataggggtcctccacagaaagggatcagttcaattaggcctttgaagatagtggtcataatctgttctcttcatttcagaacagatattctcccagagacaagctaacattctacattttcctgtgggcttgttttgtacctaacttggctctttgggtgcagtgaagttgt

SEQ ID NO: 313866 - DNA, 647 bp, Homo sapiens
tttgtataccataaatatagataatttttatttttcaattgaaaatgaatacataataacaaaaagccaattctgaataaaattatacaattttgaacccttgggagcaaagttatctttggtctgtagatgcgttctcgatgggttaagaattttttttttttttttcattttagagacaggatctcrctctgttacccaggctgcagtgaagtggtgcaatcatgtcttactgaagcctcaaactcctgggttcaagtgatactcctgcctcagcctcccaaagtgctgggattaaaagcatgagccaccatgcctggccgagggaaaatatttttaaagtgtccattatgtgctatgctttgttttacggactagagacataataagaaataagaaatgccttcaaagagttgtaggcaagatgatgtgggcctaattgcctatgaggtattggaagtgattcttttgtcccataggggtcctccacagaaagggatcagttcaattaggcctttgaagatagtggtcataatctgttctcttcatttcagaacagatattctcccagagacaagctaacattctacattttcctgtgggcttgttttgtacctaacttggctctttgggtgcagtgaagttgt

SEQ ID NO: 313867 - DNA, 635 bp, Homo sapiens
  misc_feature (1)...(635): n = A,T,C or G
ataaaataagataggatagttaatatatctgtgatggaataaagagtagtaaattgaaataacagagtaaaacaaatgcaagcagattttggaggcagtgcaaggtagccaaatagaagcytcaagcaatcttacttcctacaagaacaccaattgaacaactatccacccaaaatatgttatcatccataagtaaggacttcgtcttgccagtttgttatttgctttctggttgatttgtggtcttctcttccttctttctttccttccttcctgtctctttttagtgaaggtgatcttctctggtggtatgttttaattcatttttttgcatctgttgcatgttttttgatttgagcttatcatgagggttgcaaataatatactataactcattattttatattcaatgataacatggaaagtaaatggaccaaactcaccaaccaaaagacatactgtggctgaacggattaaaagatacacacttcacctataaagacacacagagactgaaaataaagagatggaaaaagatatgccatgccattaaaaaccaaaacgaagcaggagtagctatgtgtatataaggcaaaataaatttcaaaacataattctaaaaagagtcaaagann

SEQ ID NO: 313868 - DNA, 635 bp, Homo sapiens
  misc_feature (1)...(635): n = A,T,C or G
ataaaataagataggatagttaatatatctgtgatggaataaagagtagtaaattgaaataacagagtaaaacaaatgcaagcagattttggaggcagtgcaaggtagccaaatagaagcctcaagcaatcttacttcytacaagaacaccaattgaacaactatccacccaaaatatgttatcatccataagtaaggacttcgtcttgccagtttgttatttgctttctggttgatttgtggtcttctcttccttctttctttccttccttcctgtctctttttagtgaaggtgatcttctctggtggtatgttttaattcatttttttgcatctgttgcatgttttttgatttgagcttatcatgagggttgcaaataatatactataactcattattttatattcaatgataacatggaaagtaaatggaccaaactcaccaaccaaaagacatactgtggctgaacggattaaaagatacacacttcacctataaagacacacagagactgaaaataaagagatggaaaaagatatgccatgccattaaaaaccaaaacgaagcaggagtagctatgtgtatataaggcaaaataaatttcaaaacataattctaaaaagagtcaaagann

SEQ ID NO: 313869 - DNA, 612 bp, Homo sapiens
ctacaatagtgccttaggaagctcttaaggtgtatacagctgtcagaatttatcaaatggactcattctttaatttgacataattctttctgattttagtatttttaaaaaatttttggtcagtgattatatggcatcgttaatgtggcaactcttcccttctcatttgtttcttctaatcagcactgtccaaagataatgagctaaattgtctcactagcattacatttgtgaacatgaagatccacaaccacaatcctccttcaagggaagacctgttgctccagcaacaggtttagtctagtgacagaaaatgctgcctttcccaagggcacactgttctcctggagcttatgtccaatcacacacacacacacacacacacacacacacacacacacacacacacacacacacacacagtggtccacccttatctgtacttttgcttttcatggtttcatttacccatgggcaactgtggtacaaaaatattaaatggaaaattccagaattctaaaataaacaatttatatattttaaattgcaggtctttctgcatagagtagtgaaatctcacatcrtcccactccattccatctaagacatgaa

SEQ ID NO: 313870 - DNA, 540 bp, Homo sapiens
aaataatgcccaatcaaattgtgaaagtgtaacttctttactcagtctattaattcaaatgccaatctcctccagaaacatactcacaaacacacccaggaataatgttttaccagccatctgcacatacctaaatccagtcaaattgacacataaaattaaccattacaaatccatgcttgtcaactcagcacccatacacagctccttaagccatacttgatcttcaaatgaagacagtaacaatctacctaccataatacaaatatcctgcatatagccaaaaacacactaaccccttccccagaagaggagataaaagttttgagtggtatttactctcctcctgatagcccataatttgacactmtgatgtaaaattagtaatatttaaatactgttattaaggtcaacacatcttatacatgacaaggggataagagaggaaagaatacaaagatatatgcctaatctaggtatatatactcaaaaaatgaattcataacttaataaagtggaaatacacataacaattacagt

SEQ ID NO: 313871 - DNA, 590 bp, Homo sapiens
actgccagtgaggccataggtgcatcagggagacagaagatagtgtcacaggagtagggccatgggcacttataagacctctcctcctgatacttctcttcctatggaagttttgctcttcctttaagacatagtttgaatctwgatttcttcaagaaactttggctaatcagaactaaatttatcttatcaccccaatattcccagagtactttttaataacgtttccttatataaactgcctttttattagtattttctatgtctacatgagtataaccctaggacataaattataaggccctgaaggaaaatgattatgccttttttataattatattagtgcaacaagttgaggaatgtgtacataagtaggggggaagaaataattgaatggagtagtacaacttcctaaaagctgtagtcttatatgccattaaataagacagcatgcatgtatacatgtgtatgtgtatgtgtgtgtatgaaatcatcaggaagagctttcaagaagcatctgtacatctttaggtgaggaaatttaagtgagtatatttaaatccaatcattttaaaatgtgttattaaaat

SEQ ID NO: 313872 - DNA, 497 bp, Homo sapiens
gagaagcccaaagtgcagggtgtcagtcataacttccagttcaatggaatcattgtgactcctgggtgaaagtattccttcttctggaactaaaatctctaggtaacaggatttcccttcaccattgtccttcagggctgtccctgagaagggctgtagtactgcagctgtccactttcaggtggtgcctgcatatcatacagagaatcatctgtaaacaagtcatctcctcttccttgtcaactgattatatggaactgccagtgaggccataggtgcatcagggagacagaagatagtgtcacaggagtagggccatgggcacttataagacctctcctcctgatacttctcttcctatggaagttttgctcttcctttaagacatagtttgaatcttgatttcttcaagaaactttggctaatcagractaaatttatcttatcaccccaatattcccagagtactttttaataacgtttccttatataaactg

SEQ ID NO: 313873 - DNA, 614 bp, Homo sapiens
tgagtacaatttattttcttgcatatcttgcagatatgcaacatataattcgccactgaaccctatttttctttgcactttccaaacccttgtgtatgtaagcacagcctcatactcaaagttcaaggtgaccaggatctcttttagtaaatgtccacttcatgttacattgtccaacattaaggagtttgcttaattaacaatgttaaatccacaccacgaataccaccttggaagtaacattataatatttactgacatgaaaccaggtttatgatatgttattattaaataaaaaagcagtatggcatgtgcagttaattctaaatattatatgtgtttatcagtagatatctatgttcatatctacccatttgaaaagagagaaaagatgagaaaactggttttcacaatgcttctctctgaacagtagacgtttgggttagttatagtcctttccacttgcctgtatttctaatacttctcacatatttctgcactaaacatgcttttgaatgcactttaaatctttatttaaaaagccatattgcaaagctacccactttatattttgyaaacagctatcaattttttttacatgttaatttaaaagt

SEQ ID NO: 313874 - DNA, 635 bp, Homo sapiens
cttagatccatcagaggagtcactatctatggcagctatagccttataaatgtatttcttaaataataagacttgaatgttgaaattattccttgatctacgcatggactacagaatggctgctgtgttaggaggcatgaaaacaacattcatgtccttgtacagctctattagagctcttaagtgaccaggtgcattgtcaatgagcagtaatattttgaaagggatctcttttttttttttttctggtcagtaggtctcaaggtaggcttcaaatatttaggaaaccatgctgtaaacagatgtgctgtcatccaggctttgttgttccatttgtagatcacaggcagagtagawttaacataattcttaagggccctaggatttttggagtggggaatgggcactggcctcaacataaagttaccagcagcattagcccttaacaagagagtcagccagttctttgaaactttgaggccaggcattgatttctcctctttatctatgaaagtcctagatggcatcttcttccaatagaaggctgttttgtcaccactgaaaatctattgtttagtgtgaccaatttcatcagtgatctcggctagatcttctggataacaagatgcagattc

SEQ ID NO: 313875 - DNA, 482 bp, Homo sapiens
gtttgacgtattcagaccactgaaacttttttcatatcaggagtaaggctgttttgctttcttatcatttgtgtgttcattagagtggcacttttaatttccttccataatttttcttttgcattcagaacttggcaaactgatgcaagaggcctagatttcctcctttcttggctttttgtatgccttccttacagagcttaatcatgtctagcttttgattttaagtgagagacatgtgactttgcattcacttgaatacttagaggccatcacagggttatgaattcaccaatattgttgcgtctcagggaatagggaggcgtgaggaaagggagagagatgggaaatggcasgttggtggagcagtcagaatacatacattcatcaattaagttcaccgtcttatatgggcatagtttgtggcagcccaaaataattacattagttacatcgaagatcacttatcatgattaccatcg

SEQ ID NO: 313876 - DNA, 536 bp, Homo sapiens
ttttgaaatagtctcaggtaggtcccatactggctctctaatacctacagtttagtttggaggtcaataagtttccaaacattgcttctgttactcctatgacatttattatgtattgccacatattattcttgtgttttttgatttgtggatgcattaattcagtattaaatgattcagtaaacataatcatcaattatattgaaggccagacacattacatgtgttatttcacttaataccttctcakattttattattaccctcaatattcagatataaaaattaaaacttaaaggaattaagtaattcgcccaaagttacacagcgaataaacagcaaagctggaactctaatgtcaaagctctattgcttttgaaaacctatttattgagcatcagagatataaagattgagacaccctgtttttctttttttttaacttttaaaatataatggaatttataataacttttctcctgggctttctgtaaatacagggagaaatcagaattatatacagaaatttacaaatt

SEQ ID NO: 313877 - DNA, 536 bp, Homo sapiens
ttttgaaatagtctcaggtaggtcccatactggctctctaatacctacagtttagtttggaggtcaataagtttccaaacattgcttctgttactcctatgacatttattatgtattgccacatattattcttgtgttttttgatttgtggatgcattaattcagtattaaatgattcagtaaacataatcatcaattatattgaaggccagacacattacatgtgttatttcacttaataccttctcagattttattattaccctcaatattcagatataaaaattaaaacttaaaggaaktaagtaattcgcccaaagttacacagcgaataaacagcaaagctggaactctaatgtcaaagctctattgcttttgaaaacctatttattgagcatcagagatataaagattgagacaccctgtttttctttttttttaacttttaaaatataatggaatttataataacttttctcctgggctttctgtaaatacagggagaaatcagaattatatacagaaatttacaaatt

SEQ ID NO: 313878 - DNA, 536 bp, Homo sapiens
ttttgaaatagtctcaggtaggtcccatactggctctctaatacctacagtttagtttggaggtcaataagtttccaaacattgcttctgttactcctatgacatttattatgtattgccacatattattcttgtgttttttgatttgtggatgcattaattcagtattaaatgattcagtaaacataatcatcaattatattgaaggccagacacattacatgtgttatttcacttaataccttctcagattttattattaccctcaatattcagatataaaaattaaaacttaaaggaattaagtaattcgcccaaagttacacagcgaataaacagcaaagctggaactctaatgtcaaagctctattgcttttgaaaacctatttattgagcatcagagwtataaagattgagacaccctgtttttctttttttttaacttttaaaatataatggaatttataataacttttctcctgggctttctgtaaatacagggagaaatcagaattatatacagaaatttacaaatt

SEQ ID NO: 313879 - DNA, 536 bp, Homo sapiens
ttttgaaatagtctcaggtaggtcccatactggctctctaatacctacagtttagtttggaggtcaataagtttccaaacattgcttctgttactcctatgacatttattatgtattgccacatattattcttgtgttttttgatttgtggatgcattaattcagtattaaatgattcagtaaacataatcatcaattatattgaaggccagacacattacatgtgttatttcacttaataccttctcagattttattattaccctcaatattcagatataaaaattaaaacttaaaggaattaagtaattcgcccaaagttacacagcgaataaacagcaaagctggaactctaatgtcaaagctctattgcttttgaaaacctatttattgagcatcagagatataaagattgagacaccctgtttttctttttttttaacttttaaaatataatggaattyataataacttttctcctgggctttctgtaaatacagggagaaatcagaattatatacagaaatttacaaatt

SEQ ID NO: 313880 - DNA, 582 bp, Homo sapiens
tctagtgcatttttcatttgaaatccttgaagccgtatgttgtatataccttttattacatggaggggwtctggagttatcatgggcttctcaaaggagtccggaccaagaaacatgttatggatcattgtgttcacatatgtttctaggagtacttaccctaaaagaaaattaggactgataaagaatatgaaatatgagtaaaaatcagaaaaaaatcctgaatgtaaaacaaatagaatctgtactgtaaaacatttcttaaaggcttttattggctatgggtttttgttttgagacatggtctcactctgtcacccaggctggagtgcggtggtacgatcacagctcattgcagccttgacctcctgggctcaagtgattctcccacctcagcctcacggatcgctggaactacaggcatgagccaccacacccagttaatttttgtattttttgtcgagatggggttttgccatgttgtgcaggctggtttcaaactcctgggctcaagcaatgcgcctgtcaaagtgctgggattattggtgtgagccactgtgcctggtgggctatttcttataa

SEQ ID NO: 313881 - DNA, 436 bp, Homo sapiens
attttaactataatactttaatcacacttgaaattttattgtatctttgtagattgtcaaacaacatggaggaagttgacaacattacagcagtgcacataaaatggattctgaaagagggttttaaaatggcattcagaagaacagaaaaatgacatactttatattaaaaacatgtgatctgtaagaaatccagagaaggactcagaagggatgagagttctggaaaccatctcatatgagaaatggtgtgaggaatttaggctcttttagtaaagtatttaagattaactagtgacctaatagttatttcaaattcatagaaatgctrttacatagaaaagaaaatagatttatttcatgtagtctagaaggcagaagaaagacttaccaatgaattaacaaaacaaacatgcaaaaccctcaaacattctag

SEQ ID NO: 313882 - DNA, 545 bp, Homo sapiens
gcagaggttgcagtgagctgagattgcacctctgcactccagcctgggtgacagggcgagactccatctcaaaaaaataaataaataragagagagagagacagaaagaaagagagagagagagagggagggagggagggaggcaggcaggcaggcaggcaggcaggcaggaaggaaggggaagggaagggaacggaagggaggaaggaaggaagggagggagagatagaaagggaaaggaagaataagataggaaggaagaaagagaaagagagctatgcagaaatgctccgaggaagagggttcctggcagagtacagccgagcaaaggcctggagtcggaacctccacatgcttcctcacaatggcacaggtgacagataacaagtacctcagtgtggctatagccgattgaacaccagggagatggtacaagaagatttaaaaaaaaaaaaaaaaagaaagaaaggaaaccaaaaattcattaaatgtcataggttagtgcacaaagtttagctttttctctgagtaagatggaagcccct

SEQ ID NO: 313883 - DNA, 545 bp, Homo sapiens
gcagaggttgcagtgagctgagattgcacctctgcactccagcctgggtgacagggcgagactccatctcaaaaaaataaataaatagaragagagagagacagaaagaaagagagagagagagagggagggagggagggaggcaggcaggcaggcaggcaggcaggcaggaaggaaggggaagggaagggaacggaagggaggaaggaaggaagggagggagagatagaaagggaaaggaagaataagataggaaggaagaaagagaaagagagctatgcagaaatgctccgaggaagagggttcctggcagagtacagccgagcaaaggcctggagtcggaacctccacatgcttcctcacaatggcacaggtgacagataacaagtacctcagtgtggctatagccgattgaacaccagggagatggtacaagaagatttaaaaaaaaaaaaaaaaagaaagaaaggaaaccaaaaattcattaaatgtcataggttagtgcacaaagtttagctttttctctgagtaagatggaagcccct

SEQ ID NO: 313884 - DNA, 486 bp, Homo sapiens
caaaaaaaaaaaaaaaaaaaaaaaaaaaaacaactaataggcatttctgctttcttcctttcatgggaaaaaaattagttatgacaaggaattttgaaattgaatatagccacagttggtatagtgatgttcctaatttttcctaattttcctaaracaaataactctgccattcttatgttgtaagaaggagatatgtccatacttactacaatcaattgaaagcagacatcactggcttgtccacaaagcttgaattccctctctaccctccaaattaaaaatgtagagtgaaatatgtctttcttattctcccatggtctggccagccccaagacttgatactctgggatgagccccctactgatactttagcttctgctgcagaagctggaagtctggagctgacactcattccaaatgtccagccttgctgttactggcccatctctattctcttctgtgccttacttgtcaccattgcta

SEQ ID NO: 313885 - DNA, 538 bp, Homo sapiens
ctggctattggagaaatagtaccatatattggatactgattcagagcatatgtggctttctggagaacactgccccagccctgtaaagtattgtcacctagttggcattgtcattgtgacttaaaaggccattccacaattctatcaatccagctgcttcagaatgatggggaacatggtaagaccagtgaattccatgagcatgagcccactgccacacttctttagctgtaaagtagtgctttggtcagaggcaatgctgtgtggaataccatgacggtggacaaggcatttcatgagtccccggatggtagtcttagcagaagcattgcttgtgagataggaaaacccttatctggagtgtctattccagtgaggacaaacctctgccctttccatgatggaagaggtgcaatataatcaacctgccaccaggtaactggctgaycactccgaggaatggtgccatattgagggctcagtgttggtctctgccactggcaaactgagcactcagcagtggccatagccaggtcag

SEQ ID NO: 313886 - DNA, 344 bp, Homo sapiens
cactcttttagcaatttttaaatatacaatacatcgttattaactgcagtcaccttgctgtataatagatcaccagagcttattcctcctaattgagactgtactctttgacaaatatttcatcctccccctatcactgccagctgcactctcagcctctggtaaaccatctactctctagttctatgagtytgagttttttagattccacatgtaagtgagataatggaatatttttgtttctgtgcctgacttatttcacttaagcatgataacctttagattcatccatgttatcgcaaatgacagtatgtcattattttttaaggctgaatagtgtgcta

SEQ ID NO: 313887 - DNA, 558 bp, Homo sapiens
ttttctgacccccaacaccatcaattagctttgcaagcttagtaaatttacttcattgttttcaatttcatattctttagattctaaatcttcttatatataatgatttatttgttgaaattgtggtaagtaatttagcatatttcttattaccatgtgaaataaatttggaaaatgtaatgcatggagtctttgaaagaactaaaatctcatggccatatttagttgtagtactcaagttatatagcaattttgatgatttgatatttacattacagatatttttctactgattacaatcagtgaggtattgtcattattgtcattaccatacaactcgtaaaggtaataagaccacttcaagtgatattgttagattggtgccaaaaaatgctgtactttcattacttttaattaaaaataatggcaaaagcacaattacttttgcacyaacctagtatttgactggaatggtaatggagaccatcccaatctaatatcatcttccaacttcatcatggtgtctaaagtttttgtttggaataagtcatcaaattc

SEQ ID NO: 313888 - DNA, 529 bp, Homo sapiens
atgaaaactcacactctactactgatatcttagcattcaccattttgggactaagaatggcattcatgcctagaacgaaaggatgaattgctaggaaaaacagcaggcataaggaatactgttgtgttccagaatagaaatctgtgtatcagggtaaacagatgggggctgggctccaatggaaggaaacaatgtgagaaagaaagtatagaaaaatgagaagtaatgacagtgtaattaatgtgatgatagatgccaaaaacaaagtggttaagacaaaatgtacatttatttaaaacgaagataaagcataatcaataatttattcaatttttatgaggaataaataacarttttaattttaaaggaacaaattcagaatacaacttccctggatatatcatctgaagctatgttattgagattaatatggattactaagtaattttgacatcataggcttatcagtttagttggacaacaaatcttatatttgagaatagatttgctctgcttcatagatattcta

SEQ ID NO: 313889 - DNA, 471 bp, Homo sapiens
tttgctattccttgggtgttgtttgtggttattcagaaaaagtcatttcagtatgatatgtctgacatttggaaatagtaataactggaaatcattgagctattaatatgtcaggacaaagaacttagcactgagcatgcattgtcttatttaatcttcacaccattattcgtaagtagaaatataatattcatacatgtataaaaatctttatacatataagcttgtgtttgtgtgtgtatctttgtgtgtgtggtagaaaaagacagaaagcctgaaaatataaataatttggaccatttgttttattattgtataaattcattaattctgggaaaggcaaggaaaaawtaccaattataaatattcttgactcctgcaatgtacctaacctaaaaagtcagaaaattttcccaatgttcccaaccatgaagttatcaagtataaaatcaaatgaagatatgtctggca

SEQ ID NO: 313890 - DNA, 593 bp, Homo sapiens
tttcagaagcaatagataccacatttcaaatgtaaatcttatatttcagaaaaatatctctccaatagacattaaaaatgatcttcaataatatccaaaggkagtatgttgccatggcaacttatatagatagttgtcactcttctcaactcccatgcgatattccccagaaatgttttgtttacagtcaaaatcaagctgaaatgaacacgaagggtaacattggagtcaaggggaagaatttctgagaaagatttctgaaaagaagtataagttatgaaaaaaaatcattcccattttgccttggagcagtgtttctcaactttggcattatttggtccagatagtgctttgttgtggtggcctgtcctgtttattgtaggatgtttggtagcattccctgcctttacccaccagaagctagtaactaacactcccacactcccatttgtgacaacaaaattatctctaaacattgccaaatttctcctggttgagaacttactgtcttagaggaaagggattattgcctgatttttataaaaaagagcaacagatctaggtctattactgatgactggctgatgaaacag

SEQ ID NO: 313891 - DNA, 492 bp, Homo sapiens
agaaattttaggttggaaaatgcttttccagaaaggtagggagcaaactaatgacataataaatgatttgtcctgaaccaagtcctaaaaaacaaaaaatgcacctcaagcaaaaaaactgaattgaaatgtgtcatcatgcagagaaaatataacaatattaggcagaaatgtttcagaagcaatagataccacatttcaaatgtaaatcttatatttcagaaaaatatctctccaatagacattaaaaatgatcttcaataatatccaaagggagtatgttgccatggcaacttatatagatagttgtcactcttctcaactcccatgcgatattccccaraaatgttttgtttacagtcaaaatcaagctgaaatgaacacgaagggtaacattggagtcaaggggaagaatttctgagaaagatttctgaaaagaagtataagttatgaaaaaaaatcattcccattttgccttggagcagtgtttct

SEQ ID NO: 313892 - DNA, 452 bp, Homo sapiens
tttctctaatatcagaatattttccatgttaaattctactcatgggcctttctaaaataattctttaaatacaaaatatcaagctgatttatttttaaagtgaggagataagcatattaaatttgttaggtcacttttttttttccacagggatatgactttacctggttagatattctaattaaaaaaaaaagcatataactgcagagatataaatttaaaattacaaatagtcatagaggaccaatattttatttagatggtactcctatttcagtcttgctatttgcaataaacaaaatccaatggatataagtccagagaaaaatgggaaattataacrtatagcagacgattgagatgcctcctacatcatcctcttggtccactagattttggcacagctgtcatggtctgttgcatgcacactgtcagcttcccacctctgggtc

SEQ ID NO: 313893 - DNA, 575 bp, Homo sapiens
ttcttataaaaacgtgcttttgttcatttctgctactggtgctaagtaactacttgctcctgggtaatagtcaattcattttctctcagatttacaacatctggatttgtaatatagggtttaattttatacataaactagagctcagcctttccattgatggacacacccaggaagtataatatgctttgtgtaaagcttgagtttatgtttattaaactaaaaaaaggttgaggggaggtctgccaaaattaattactgcatgaaaaagtcagtgktgctttcttaagggtaaaagatcagatggattatataaaactttcccagaaaaagtaggttataattaactctactcaaaacaagaaagatatttctactgcatgagcaaacagaaaagataaaactgaaataaaaagtttaacttaaattactatcttaacaaaacagcaaaaatcccggacagataaacattgtttcttgctgttattttcattgttaattaatgttttgtttgtttggtttttatttgttttgggtcctgtttcttgtcagtcaaatatgtggaccgttttgac

SEQ ID NO: 313894 - DNA, 575 bp, Homo sapiens
ttcttataaaaacgtgcttttgttcatttctgctactggtgctaagtaactacttgctcctgggtaatagtcaattcattttctctcagatttacaacatctggatttgtaatatagggtttaattttatacataaactagagctcagcctttccattgatggacacacccaggaagtataatatgctttgtgtaaagcttgagtttatgtttattaaactaaaaaaaggttgaggggaggtctgccaaaattaattactgcatgaaaaagtcagtgttgctttcttaagggtaaaagatcagatggattatataaaactttcccagaaaaagtaggttataattaactctactcaaaacaagaaagmtatttctactgcatgagcaaacagaaaagataaaactgaaataaaaagtttaacttaaattactatcttaacaaaacagcaaaaatcccggacagataaacattgtttcttgctgttattttcattgttaattaatgttttgtttgtttggtttttatttgttttgggtcctgtttcttgtcagtcaaatatgtggaccgttttgac

SEQ ID NO: 313895 - DNA, 606 bp, Homo sapiens
gaactacaattagaaatggagcctgacaatgtaactgaattgcttaaatctcacaattaaacttgaatgaaacttgcctcttagggataagcaaagaaaagggtttcttgagatgggatccactccttattaagatgccctgagcattgttgaaatcacaataaaaagattgagaatattatataagcttagttgataaagcagtggcatggtttgagagagttgactctaattttgaagaaagatttattgtgggtaaaatgctatcagacagcatcccatgctacagggaaatcttttgtgaaaggtcaagtcaatcaatgtgataaaaatttattgttatattatttttagaaattgccatagtcacctccacccccagcaaccaccactctaatcagtcagcaaccatcaacactgaggcagcacccttcaccagcaaaaagattacaacttgctgaaaacccagatgattgttaacattttaaaactatacaatatttttaaattaaggtatgtatattgrttttttagacataatattattactcatttaatagagaacagtatagtataaacatgacttttatatgtactgagaaacta

SEQ ID NO: 313896 - DNA, 489 bp, Homo sapiens
aagcataagttaacatataaaggaaaatctatcagactaacagcagatttctcagtggaaaccctgcaagccagaagggrttggggctctatcttcaacctccttaaacaaaacaattatcagctaagaattttgtactcaaggaaactaagcttcataaatgaaggaaagatacagtctttttcagacaaacaaatgctgtgagaattcaccacgatcaagccagcactacaagaactgctaaaaggagttctaaatcttgaaacaaatcctagaaacacaaccaaactaaaacctctttaaagcatgaatctcacggtacccataaaacaaaaatcaaaaaacaaaacaaaaaaagctactcagcaaaaattgcatgaggaatggaatgctacctcacatctcagtactaacattgaatgtaaatggcctaaattctccacttaagaaatacagaattgcagaatggataagaattcaccaatcata

SEQ ID NO: 313897 - DNA, 377 bp, Homo sapiens
actcctatttttaacttttttcctctcataagtactatttttcaaatgaatgtgaaaaccaaccccaaagattaagacgaatactgtggcttatgaggattaccttcatctcagcttgaaaatatagaaaatcctacacatttaaaactatagttaatttcatttattaagyattgtctttacattccaagaataaaaatcacttaaggggccaatatgtgatgtaacaaagggaagggaatttaggactttccacaagaagaatgaatgaaataagctctattaatcatttccaaaggaaaggacattttaattccaactactataaacctgctttctgtttacatggtaaggcaagaactgtggataaatatgag

SEQ ID NO: 313898 - DNA, 650 bp, Homo sapiens
tgattagctttcaaagtctttgctatcatctgatgattctacattatgtttgctaattttctgtcaaatcccctttgttttgtagttatgtctccagaatcagtttaccactaatcttataaaatgtggctttgtccaaaacatacttaagtactgctgctactatgtataacattctcgctagaatattacagctactggctttattatttttgttttgaccrtgacattaatgaaggatgctgctactgatgatgataataatggtgaatatgaaggtgatgtaacaatatcattttcttcttaaaccagatttatcttgcattcctcttagtttttatcatagaggaatcttgcatcttcaataaaaaccaagttacccaccatctacttttttttcatgtagatatacacaaatcatctacatttcttcattgttttctactcaaaagccttctgtttctgctgatttcatgctctttttttagctccccaatgaaacaactatctcactattatttccctccttgggtgaggggggcgggctacatgctttcagtttttatgctgttagggtcccagcagtaaagtgatggcatgctaaaattgagatcgtttgaacagtctatatttacaaagggactaattac

SEQ ID NO: 313899 - DNA, 453 bp, Homo sapiens
ccttttaaaatgacaacactctcctttttcctcaaaaatcaccactatcttaacattcatgagtcatcatttcctcattttgctttgttcttttatcatttaggtttccctacctaaaatttatagttttgctgtgccaatttttgaaatatacataatggagagttgtagagtacacatttttttcctttgcgtttctaagattcatccatgttgttgcaggcagctgcagttcctccatttcattgttatgtggtttttaaaaattatctaattgtgccatatggcatttgtccattctgcattggtgattttggggattgcttaactactatagctattacggaaaattctgaccagaacattcttttycctacactgaattctgagttgcatcacttggtgcagtgattttgctgacaggtattttgcaaaaaaatctaagagatgaag

SEQ ID NO: 313900 - DNA, 445 bp, Homo sapiens
cttattcatcaaaatcttctttgtattacttcccttccaatacagatttgayatcataaattgatatctataccgaaattctccaagtctctgttattaacattcatcacctgaatctcaactgttacctaataaaattgaccaccttatccatatttgcacctaaatagctaataaagactggtgagtcttatacattagggcacactggtgccaatataaactcatggacattaatctcagaacttcacttaatgtttctttataatcaattaaatatttctaagtggtcctcacttctatgctccatatttactataacaaagtttctccatattctcaaactgcaagcctcagacatatctttgcctcctatttcagtgaaaaaaaaaagaaattaccttgcctcatcacaacaaactattacaaaatcttaaatattaac

SEQ ID NO: 313901 - DNA, 418 bp, Homo sapiens
tcacctccctaaaatccctgtcttcaacatagtcacatgaggatcagggcttcaacatgagtttaaggkaactcatttcaatccatagaagttcccggccaggtgcggtggctcatgcctgtaatcctagcacttcaggaggccgaggtgggcggatcatcaggtcaagagattgagaccatcctggccaacatggtgaaacctgtctctcctataaatacaaaaattagctgggcgtgatggcgcgtgcctgtaatcccagctactcggtaggctgaagtaggagaatcacttcaacccaggaggcggaggttgcagtgagcagagatctgacattgcagtgagcagagattgtgacattgcactccagcctaggcgacaagagtgaaactccgtctcaaaaaaagaagttcccatc

SEQ ID NO: 313902 - DNA, 465 bp, Homo sapiens
gcatgatggtgcatacctgtagttctagctgcttgagaagctaaagcgagagaattgcttgagtccaggagttcgcggttacagtgagctatgayggcactacactccagagtaggtgacagagaaagactctgtctcaaaaaagaaaaaaaatgtgtcaagccatgcaagcagacaccactaaaactagctaacagaacatgtgatagtcaatgagatgggcatcacaataaaaatgatttatgtggtttattagacatcttgagaaatagacaatgtatgttaaatttgaggagggtatgaaactacctctcattatagatgttgtttatatagatgtcagtctagtatggctatgagttaataatgctgcatcttatcgagaattgctttcaataatcgcatttttactaatcacattcattggcagttaggtatgttacttattcattcattctgtcactc

SEQ ID NO: 313903 - DNA, 465 bp, Homo sapiens
gcatgatggtgcatacctgtagttctagctgcttgagaagctaaagcgagagaattgcttgagtccaggagttcgcggttacagtgagctatgatggcactacactccagagtaggtgacagagaaagactctgtctcaaraaagaaaaaaaatgtgtcaagccatgcaagcagacaccactaaaactagctaacagaacatgtgatagtcaatgagatgggcatcacaataaaaatgatttatgtggtttattagacatcttgagaaatagacaatgtatgttaaatttgaggagggtatgaaactacctctcattatagatgttgtttatatagatgtcagtctagtatggctatgagttaataatgctgcatcttatcgagaattgctttcaataatcgcatttttactaatcacattcattggcagttaggtatgttacttattcattcattctgtcactc

SEQ ID NO: 313904 - DNA, 562 bp, Homo sapiens
ctctgaaacctctttaaactgctttctgatgtgcctttttatgaaacactgaatctatcctacattgtgtggtgagaatgtctattctggcattgcttattgcaactaacaactataaatcttgatgcctacccttcttttatttatcttaggtcaaatcaccctataaaagctggcttctggaattttttctttttttctctacgtaagccctgtggagaatttcaaagtttatcacgtctaaaatataatcatcactgttttccaggagaccatggttacatcccatacagattatgatttagayttgctggtaatgaaactgctgaggaaaatggaactagacgtaatgtcaaaagtagctctaaatatattagatacatacaagtgaaatcctaatttacactgcagatcatcaatttgttctagccatagaagccacatcatcaacatgctttgctattgtcctgaagggcatgttgacctatttgatttaattttctgttctgccagttaaagctttctttgaccaatatttaacaaaatcttcagttgggattta

SEQ ID NO: 313905 - DNA, 562 bp, Homo sapiens
ctctgaaacctctttaaactgctttctgatgtgcctttttatgaaacactgaatctatcctacattgtgtggtgagaatgtctattctggcattgcttattgcaactaacaactataaatcttgatgcctacccttcttttatttatcttaggtcaaatcaccctataaaagctggcttctggaattttttctttttttctctacgtaagccctgtggagaatttcaaagtttatcacgtctaaaatataatcatcactgttttccaggagaccatggttacatcccatacagattatgatttagacttgctggtaatgaaactgctgaggaaaatggaactagaygtaatgtcaaaagtagctctaaatatattagatacatacaagtgaaatcctaatttacactgcagatcatcaatttgttctagccatagaagccacatcatcaacatgctttgctattgtcctgaagggcatgttgacctatttgatttaattttctgttctgccagttaaagctttctttgaccaatatttaacaaaatcttcagttgggattta

SEQ ID NO: 313906 - DNA, 472 bp, Homo sapiens
gggctccctctgctgctgttgcccacaggcctgtggactgcttccttaccactagcccaacactgtatgtttcatttgctcattgtgcacgtactgtctgaccgccccatgaggatgtgagctccagaagggcagggaacgttgctctctgggctgtttactgctgatccccagctaccggcacrctgcctgccacagacgatgaataaatgagaggtgtcagacctggagtgaaaagaaagtcacttttgtgagacagaaaggaaggatgaggaaaatcatacactaaaagggattttttgttgatggagtacatatagaactttcagcagtaatggccacctctattttctcagaatatgtttgatgtagagaggaggctggttgaggtgtgtccaagttgtctggcttccagcttagtaaaacatggcagtttgtaagtgaatttgagaaatcatgatatcaagtgaga

SEQ ID NO: 313907 - DNA, 354 bp, Homo sapiens
cattagtaaataattggatgaagaagaacaatgtctatttaaattagaagtgaagtctggatcaatttctagcactcaggctctgtgggagctctgaatttatctgtcttgcttaatgctctttctccagtgcctasaacaggatatttcagtgtgggcactcagtaacaactagctgaagggtgactaattttatttcaaaaatctttccagatgcacagagatttttgtaaaaccataggtaggtagtctttcctctttgattggaaatagaggtgaggtgtgtgtgtgtgtaaagattatgaaagttgataagaatagagtgctaaggtctaaatgtttgtgttccctaca

SEQ ID NO: 313908 - DNA, 521 bp, Homo sapiens
aatgctacctctgtacattttctccatggagacaattcatgagtgtatacaaatcaatgccaagcctgcatggatggcagcgctaaccatccataagtcatttgtcactagmgtgaaagaatcacttcacacacctggtgaaactacatttattttgacttaaatgtacttcaagacgtgctattctggggacgcgtctaaagtctctttaaaaaaaatcaaacttcagcatctaatattgtgagaaattgattatatataggttgaaggtggagtagaagattagagtttgttattaaagcttgctgtgaaacatctttctaatcatagaatgacacaaatgggatttttacatacattggttgtactccagcggtgtgaaatttttatatttttttgtgattgagtctagggagaaatgagaaacttagaaaaaaaatgctttctagatagaactctctcttactggggaaagaaacaagagttgacactgcttaaaaagcattggctttttaagcagc

SEQ ID NO: 313909 - DNA, 574 bp, Homo sapiens
ggattatggacaattgatataaccgaatttgaaattgaggataagtataaaatacttgtgtattataattctggttggacatgatcctgtacctggttagtctacaagatctcccaccctcactagtaactgtggaattaattttgactgaagtccctaagtgacrcagagtcaattctctatttgataattagggaggtgttgccaaagcacaatctagtaacattttacagaaggaagaaacaatatttaaattgctgctgaaatgtttggtagagaaggaatttcagataatctgaaccctatattcatcaaaacacttgtcatatacaatcttcaaattaattttaagaaatttcagctcactgcttttttttccctaaactttggtatgattgactctatttgaacattgttatattaatggaatatagcacagtgtaaaacatatttataataaaaagaagtcacataataggaatctgcaaaattgtatgaaggaaacctgactaaaattaacttcgacctttaaaaaaaaggttatcaatgaacaaaacaatcactgatatgtagg

SEQ ID NO: 313910 - DNA, 574 bp, Homo sapiens
ggattatggacaattgatataaccgaatttgaaattgaggataagtataaaatacttgtgtattataattctggttggacatgatcctgtacctggttagtctacaagatctcccaccctcactagtaactgtggaattaattttgactgaagtccctaagtgacgcagagtcaattctctatttgataattagggaggtgttgccaaagcacaatctagtaacattttacagaaggaagaaacaatatttaaattgctgctgaaatgtttggtagagaaggaatttcagataatctgaaccctatattcatcaaaacacttgtcatatacaatcttcaaattaattttaagaaatttcagctcactgcttttttttccctaaactttggtatgattgactctatttgaacattgttatattaatggaatatagcacagtgtaaaacatatttataataaaaagaagtcacataataggaatctgcaaaaytgtatgaaggaaacctgactaaaattaacttcgacctttaaaaaaaaggttatcaatgaacaaaacaatcactgatatgtagg

SEQ ID NO: 313911 - DNA, 579 bp, Homo sapiens
gcaactgatgctattttctatagaatagttggaatttgccccagtaatttcatcgacatggtcgtctctaagtgcaccttgaaatagactataataacaacaacagtaacaaaaacttgttgagtgcttactatttgtgtcacacatgctgcttggtactatctgcccctagaggtgcagaaattattatattcatcctataggttaaaaaactaaataacttaagcaacttgctgaagatgacactatgtgaaaaaatacccaggatttttctatacattcatattaattatttttaaacatcaataaaatatttagcatagaagctctaaaacttgaacgagatgattgatgggaagtttattctcctatttccttttagtaaatacagtaagtagttcataagattacaattaagtggtgaattractgcctgatccccattcataaccgtgtggataattgttctaacttatgttcccaggacaaggaaactccagttgcaaaatgaaaataaaaatgtttctgtgacaggaataggttagacaaaatgctctccaaggattacctcagttccaa

SEQ ID NO: 313912 - DNA, 552 bp, Homo sapiens
gctatccctgagtgacttggacatttcaaaggtgtaaagaataatccaaaaggagagactagtagaatgcaaaatgaagtctgatttttttcttacaccaccaagatctcatactttaaagaactttgggtagctccatcttaatacaaacgctaggacagttagacttggcattaaacagttccttcccttcacttccttttaaatgactgaatgagactcagagcttttcaactcttacaacctggtaaaatgctcaaatcacaaagcaaagttaaaacacgctcttccttgcagcaacatgatggcttttactttgaatagtaaacactcgtcccctcccaatcttctctgctcttaaggtatgctatccatgataagaacagcataattttgctcttctgacccttttcttaatttttgtgaaagaaactctctaaygggaggcagtcatgtgcttttcatattatctaatagttctttcttctccttgtcttcttgaaagcaagatttaaattcaagggttttacatataaaagaaataagataata

SEQ ID NO: 313913 - DNA, 545 bp, Homo sapiens
ataagttaatcttagatgataagttttccttactttttacagatgttttaatgtgtaaaacttaaaaattaactatcatattgccattgctgttttattttttgagactgttacagtaacaggtgggatttagaagttgtacatattgaagaacatgcattttgtatgcatctgatgcaagtgcttgatacgctaatcaattcatagcataaattccatttttctgggggttatgtggtcttcatatgaatatgtatgaaagaaacaagtataaattaggttattaaaattatatcaagtgaaaatatttttattcagtctatactgggtgttaataaaggtctaggaaccagatacrgaatagaataaaacacagaggcaaaaatttgcaggtttcacaaaggccaccagtaataacatatgatcagaagtagctcttatttaatacatgataatgtattcaatgcttaatcagtttataatataatgtgtaatttccaatgacaataaaactattaaagacaatgatcctaaaaactgcagaa

SEQ ID NO: 313914 - DNA, 539 bp, Homo sapiens
gtcccagctacacgggaggctgaggcaggagaatggtgtgaacctgggaggtggagcttgcagtgagccaagattgcaccactgcactccagcctgggcgacaaagtgagcctccgtctaaaaaaaaaaaaaaagaaagaaagaaaaattayagtagtcagaggtgggaaccaaggagtggtcttatgatgcctaatattaccttcagggctccaaataagaagccatcatgcatagcaaatggtacccctgctcctgaatatgttgctacattttaattagttactgggttacttagggatatagagacccacagagtcaaactctttacttaaagtgttaaatgcaatacatttaatttttttaatttaaaattttaaataagctaaatagaaaacacctcgtctgtgtaagtccaaatgaagtaatagtatgtaactaattgtgaacctgaatatccatagttgttaatatttcatttagtccagcatttcagttaccttaatttgctgcaacgaaaaagtgttttaattatgtat

SEQ ID NO: 313915 - DNA, 539 bp, Homo sapiens
gtcccagctacacgggaggctgaggcaggagaatggtgtgaacctgggaggtggagcttgcagtgagccaagattgcaccactgcactccagcctgggcgacaaagtgagcctccgtctaaaaaaaaaaaaaaagaaagaaagaaaaattatagtagtcagaggtgggaaccaaggagtggtcttatgatgcctaatattaccttcagggctccaaataagaagccatcatgcatagcaaatggtacccctgctcctgaatatgttgctacattttaattagttactgggttacttaggsatatagagacccacagagtcaaactctttacttaaagtgttaaatgcaatacatttaatttttttaatttaaaattttaaataagctaaatagaaaacacctcgtctgtgtaagtccaaatgaagtaatagtatgtaactaattgtgaacctgaatatccatagttgttaatatttcatttagtccagcatttcagttaccttaatttgctgcaacgaaaaagtgttttaattatgtat

SEQ ID NO: 313916 - DNA, 424 bp, Homo sapiens
atctccagaaaaaagagaaatatgatacctggtcctcatttttctacaattttccttatagactcaagagcatggctattattaactatctagataattcttattcattcaatcatatttattgagcatctattatgttactgggtgctgtgttaggcaatgaggattcaaagggatgagagaacctagaaatcacttctaggtaggagaaacagaaacacagacacattattatgatatactgtaaccacactattgaatataagtacayccaatgtacaacgggaaattcaggtatctatgtccagtaattctctagatagttctacttgcattttccagcctgggcacaaaatctgcctcaaaatattccttgcaaatttcttttatatccgatagttttattttaattctagctagtcag

SEQ ID NO: 313917 - DNA, 619 bp, Homo sapiens
catgtctaccctctcgtatcataacttcaattgtaaaacatagctgtgagctggaaagaccatttgtaacagtagaattagaaaaatgaattttgaaacctcttttgctcccccaaatacatggtgaatataagctatttccatcgggaacgtgagagatggggaaggaaatatttcggctgttttgaaaaagtgttccaggtaaatcacatatgcccctcactccaaggttttggatcctaagagttacagaatattctctttatatgttaagccaataaatgtactagaaatacgcagttggttcttgtgggggttgggatgacaggaaagagtaagcatatttcagtcctcactgaaaagtttggctttacatttcaattagaacaatcatgagattgtttttctgacaataagtgagagagaatctttactagagtctcctgaaatgttaggtaaattttattcaatactagcacacaatttattcattcaaaatatttgttaattactttttagtaccaggcatatgaaatgcaattctaaaaatcacaaaaaaatgcaataccaaacaaaatataaacccaataaatgrataagtagaaagataatttgcagt

SEQ ID NO: 313918 - DNA, 529 bp, Homo sapiens
caagcatgctattggcagctcacagcttacatttgcgtctatttgttgtgattctcgtgccagcttaggagtgtgagaaaaaacttgtttgtttggactggcacaaagattaaaggcaggttcagttttgcaatctaattacaactgcagtgtttacatgtacaaaagagaaaaaaaaaaaacaaatggcatattaatcaagcatttgctagactgttaagaagtaaggttcacctaatattaacatttcacatttttaaattctgcgagaaaagatgagtccaagttatcacgcaactggcatgaacaaatttggtaacgtaaaaggcatttttcttatctaagctttctaattaaactgcttatcatcrtagaagctgtgttacctggatgttatgtacagaatataaagtgatcatagaaaagtaattaaaattcttaaacatgcagcccgttgacttaacatacaattagtttttagagtgtgatgtttgataataaggcgagttagctgagtagagaaatatac

SEQ ID NO: 313919 - DNA, 540 bp, Homo sapiens
attgggaatcccactctggcttaatggctctaactgttaaacctgtctcagccttaatttcctcatctttaaaagtgaaagggctgttgtcaggatgaaattacataacatgacgaaatgccttttctcaccgttgggtgcagagatacctgagaaagagttactcaaatctgcttaggaatttgtagcaagtgaagcgtaggttttgggggatattttctattttgagacagagttttactgtgtcactcaggctggatggagtacagtggtgtgatcaaggctgactgcagcccatacctccaaggttcaaccaatcctcccatctcaggctcccgaatagctaggaccacaggcacgtgccaccacactgagctttaaaatatatatatatatatatwttttttttttatttgtaaagatagtgtcccactatgttgtccagactggtctcaaactcctgggcttaagcagtcctcctgcctcagcctcccaaagtgctaggattataggcatgagccaccgtgcccagcctagcat

SEQ ID NO: 313920 - DNA, 571 bp, Homo sapiens
acttggaggataagcaaattctggcttatttgatcctaccgtgttattgcttttctggggactgcttaattgaagcaagaatgctatttcaagtaaaatacatcaaaaggcatttcatttaaacctagttaattctttacaaggccctgtagtaaacaaaatagagcagctatattcttcactcttcactttcttctgctattaatttcagttctcaatgtgatcagcaactttttcttccaggtagttatagctaagaagaactcttcttgttgacagagggagataaagaagttgagaagaaaggttagagaagagggccaagtctggtctagtcaagtcaaatcaggtctactccggtgtctgctatacatttatatatgatcttagttaaggcaaggtatatgtckagggcagtttccttacttgtaaaataaacagattgcattacataaacttcaattaatatttttagagtaagggtccactcattgaaactctgataattcccgtagatttttcccacctatctggatatatgttaagtacaattttatatgtaatgtagcag

SEQ ID NO: 313921 - DNA, 573 bp, Homo sapiens
tcctaccatgaagttgttagttggttgtttcatagtttctattgtgtggttattttaaagaatctgtgggctatgtacttaggtgtggttttgtagtagcaggtatcattctttcaactccatgtttagaactcccttaagattctcttgtaagactggtctagtggtaataatttcccttaatgattgcttgtctgaaaaaaaatttatttytccacttactcacttagtttggcagggtatgaaattcttggttagaatttcttttctttgagaatgctgaaaataggcccccagtctcttctggcttgtagggtttctgctgagaagtctgttgttagcctgacagggctccctttgcacatgacctgacctttttctctagctgcctttaagatttttttctttagcattaaccttaggcagtctgatgactatatgccttggtgatgctcattttgtatagtatttggaatgtgttctctggatttcttgcatctggatgtctacttctctagcaagattagggaaattttcttgaattggttcctcaaatatgtcttccaggctgtt

SEQ ID NO: 313922 - DNA, 558 bp, Homo sapiens
acccctttgtggtaggtactatgaatatccctatttcatagtgaggaactgaggcatttcagcacacctcaatgtgtaacttgttcaacttcatacaagttttttagagtgaggctcaaatatacttctagattacttcaaagtctaacaagcatccgaatacatgctcattctgatgataatgtgtcctgggccagaatgtgtaatgcaattaaacattctatattatcagtttcacagaaattaatggatattaacatgtcgattttttggtgctaatgttttagacaaccatatgaggaccattttcatgatggaaaaaagtgggaattgaatgatttaggtctgaaaatgcaaggaacacaacagagaagggattttctaggatcccgaaggttgagaaaacttcaggtcctgaccacctggcgcagrcctgtaatcctagcaatttggaaggctggtgggcagatcacctgaggtcaggagttccagacccacctggtcaacatggtgaaaccctgtctctactaaaaatacaaaaattagttgggcatggtg

SEQ ID NO: 313923 - DNA, 571 bp, Homo sapiens
catgcatataagcaggcagggaataaagcagacaggaaagcacattccaggctctagaatatctaagaaggatgatctggttactccctattataccaccctgtgttaatttcctgtgttgaccctgttattgtctggaaatgttatataaccatagcttgtgtttacttatgctttcttctcacaataatgtttgctccatgagatctrggacctttatataccttgactaccattataatgactgaatatttgagcagaatccaatgttgagagaggaatgaacatgtattgcagtaccagatagaactgtccacactctaaaaaaagagagaaatataccaaaaagacagagtcatgttagcagagttgtaacctttgctcttaaagcagaaatttctgttttgtgttctcttttgtgtacatgcacgtgtgtgtgcaagtgtatatgtatgtgtgtatgatagcaagagtgagcaagagtgagaggagttgcgaccagggaatcaggggcaagatgggcttacaaatgtgtgtgtgtaggcagagaagagcaagaaatcaacaactt

SEQ ID NO: 313924 - DNA, 581 bp, Homo sapiens
tatatgtgaaaatatagagtaatgacyttttattgttattaaaatctttttaaatctgtagacttcctcttcgtcttctctctctctttctctttttatctctgaaactggaatatgcacctgtctatgtagtgttgctcacagtctgaatttagctgattgcatccccatggtttagcttaatatgctcctctgttctctgcattcgctgacatttgctcacatttgaaaaggctaatttaagggccgtgtaatttttctgtctcaggtggcacatattgtacacttatctcgtgtgtgtgtgagtgtgtcatgctagacaccattcattcacagtacttagatccttgaatgaattaaggactgctggcatgacagtctatcatttaatcttcaattattagtcagaataattctataaagagaaactccctctcatctactcttttgctactcagtagtacagtttatatggaaaaagcaagaaaaatgttggattccttcctttcacttgccagtttagcctcttatacgtcagtctagatcttgacaaatgtgtcctattttgaatgccaataaaa

SEQ ID NO: 313925 - DNA, 527 bp, Homo sapiens
gccaatttgttaacaattagtgctcattagaatcatttcctgttatcgattctaaayatgtgacaaagcacttttaggaaactggaccccaaaacgtagctattcgtcagtgataagcaattaaaaatctcaagatccagtgtaattcctaaccagagtcgtcagtttccaagtaattatttttgctttggaacccacctgctatcctgtccggtttaaagatgtgctggaacaaggacatacttcttaattagcagagggtgtggataagtcagtgtgggaacaaaaggaattttcttttattatctgctttagctgtttgtagtatatctttaagggacaaaaactgccagcttgcaatacaacacatgtatttgcaagagtgtgaaatgaaatgcattacttctgttatctaaacatctaagcttagtttttaagtctctgttcacctttgatcattatgaactctaaatatagaatcataaatggagtcattgtgcattacattcaagtttaactattgccag

SEQ ID NO: 313926 - DNA, 542 bp, Homo sapiens
ctctactcctgagttgcagtacttatgatctttaataaagggggtgaaaaatgaagtattagcttccatttaactggcttttattagataagctaaagccccagcttaaaggtcttgcatgtgttttccaaggggagccctcctacagtttgtccccagctttgccttctattttattsagttaatggaatagataagatatcaaaggaaaccagtgataggctcatataatacgctggagccccgtgtggtgctgcaaactagtttctatttttatttggaggaaaggcagctcagagcacacatgaaagtgaacatgttcttaaccaggtgttcaggagggcacatagcttcccccataagagaggatactatttacaaaagtgacttgtgattggaagcctatttctagctgtatattaaaataaactttctggcacatacactaacacctgattgcccaaatcatatttatttaaagaattgtaattctcagatcatttgcctttttgtttcttttgttactattccttatgagctaa

SEQ ID NO: 313927 - DNA, 577 bp, Homo sapiens
aatccagtgtaactttttgattgattacgtgatggtgattattgatgggatgttcgttggtgtccaataatgtgttaaaattgggagcaaatatttagaagaccatactattaacaagaagctgtttataggatttcatctaaatctcatattgtgatatgcaagattctattcttattcacttcccacatcagggtaaagaaattaatttgccttcaatctcaggaaaaccagaagtagactagcactagttctcagacaatgtcactgctgtgactgctgttctcttctaagtggatactgtagcacaacagagagtacatttattaatttgaatggtttggcacagctaagaggtctccccaccacctgcatctgtgaattagtaacataaactgaaacagaacctgcattgaaagtaacaatattggcagcagctgacaatgagamgttagaatattcagacactgtgctaagcacttttccctaagcatcatcttatttaatcatcacaatataccatgaaatagttacaggatcccttcccatagcttttaaatatgctaaagtctcctct

SEQ ID NO: 313928 - DNA, 579 bp, Homo sapiens
gtcaattctgtatgagtgaattataagcatctggagggcaggccaggtgcttgtttgtcctttcaccttcactctcacagcagatcctcattaggactcaccaggatgccctgctcatctgcagcctctttagaattaaactaccccatccacagctgctggcgaaggcccatatcactctgtcttcctctctactttatatctaacagctgattaaaccagggacaagcaccttgtgcataaagttgagggttcagttaggttttttcagtctcagaaatttatattgkgaagtaggacactagtaatggggcaagggtacaaaggaatgttggtgggggagcttgggggtttgtgttccaccatatctatgaggatctgacctaccaagagaatcagagacatctaagaaatgaaacagatgggtaatgagaaaggctaagaaataaatagcaagtcctcagaatggctttatttccccagttccaataccttcctatgataaacctctattttatttgctagaatgaggtgtctgttccttaaaatcagaataacaagtgaggatgcactatagta

SEQ ID NO: 313929 - DNA, 601 bp, Homo sapiens
aatatccaaattaaaatcatataaaacaaagagtagcctaagaaaaccatgagaatcatttttaaaactttaagctttaaataaaacctaacccaatttaataatatactaaacatatattgttgaataactcaaaaccatatttcttttacttgtattatttgttattacttttacatctaggatattgtttgaaccatgaaaaatatatgaaaataaagataatctcccctcatatgcccaatatcagttaagcttttcaggaaactaattcagtggcccacatataaccttagatagacaactcagagagggtggaagttaagttactgcttttaaaaattcattttaaccaagattaattttccattccacaaaacttagctttaaactgtgaccaaaatgctaaccatatttcccatgtaagactagaatcttattcagatactggggaatctgaagaaggagggaaggaggaaagatrtctttactgtcttgcttatgttggccattttaagaactacatgcaaaagtgatgtttctacctgaggataaatttactcaaacttcaagaattcattgagaccaagtgccgtggctc

SEQ ID NO: 313930 - DNA, 584 bp, Homo sapiens
ccccttgtagaatataaactctagaaggcagtgactttatttttgttcatagttttagccaagcatctagttgcaagccctgacacatccaatttgtgtctgatacaaagggctatttaaaataaagagatacccaagacaaacagatcccctgccttcctggaactcgaagtctcaagaagtgttttcaaaacttggctgcacattaggattgcctagggagacttttgaaaatttctgatgcctaagccttactctaagaattctcatttaattggcctaaggagtgattcaggtactgatacagcttctgaaagttcccaggtgattctattgtacatctgtgacccactgaaacgggcttatgggagccagccatcaaagggcaggaaagtggcatgactcagatctttgttttatgaagtagagagcggattggagtargtgatgaaaatgcaggctaaggagactattgctcttacaaactctcaatgtttgaatatttgctcgaaagctcacagaacacaatgaattgggcaagcatacttttaaaactgttcaagtaggattatttgaataaaatc

SEQ ID NO: 313931 - DNA, 534 bp, Homo sapiens
gtcccaattcagttcttgctcttgaatcactagtaagaaaccccaggtggagatctgactgggtgtttaccagtgtgaacacattcactaatctatgcattctctgtctgattmtttttttcatgaactaaacttgaaaaattatcactgagttttcattgatacaccttggaatatctgacttggggcacatgaggatatgtggacatgagacacctatggacatgatcacactcattcctttagcttctgctgtatgacaggtgctcaggccggggccactactgtctcccctgaggacatgtagacagcagatgatataagaaatcccagaacgaaaaagcacaacataaaatctagcccctttcattgaataatatcatcccatatgtttcatattgtggtcagtatttatacattccagattgtggaagataatcaagtggtaggtaagactgctctgtgagaattgatgcagtaggtaaaaattgctcttttgtcctcagccttcctgcttcaggatgtaccctgagt

SEQ ID NO: 313932 - DNA, 572 bp, Homo sapiens
cctaaatacaattgacaagttggttgcagatgagacctctaactcctgccagtgtggatctttttsaaaaattggagatagcagtatcaattagttcccttctcccttgttgaaaggcaagagacccatcctcatgccctcatactatagtcagcgtaaatattctaccagcctctcctcactactatctatggctgtcagctccacacaggtctaactagtgtaggccaaaatggtaaaagtaatacaggcagcaccttgccttgtgtctaccagataaatctccttgcttatagctggactgggtccgcatagcccttttggcttcttggaatatcgaagcctgctgctttggacatctgatgtgtttcccttgtctttcggatagtaagaagggagccctgctgtgaggaacactttattcattcgacgtttatttagtggctgccagatgcaaggccaagtgctggaaatatgttggtttacaaaatccaattctgccctattaattggggaaagcagcaaagtgggaattttaatacagtgcaataattaagggaaaaatacaggag

SEQ ID NO: 313933 - DNA, 572 bp, Homo sapiens
cctaaatacaattgacaagttggttgcagatgagacctctaactcctgccagtgtggatctttttgaaaaattggagatagcagtatcaattagttcccttctcccttgttgaaaggcaagagacccatcctcatgccctcatactatagtcagcgtaaatattctaccagcctctcctcactactatctatggctgtcagctccacacaggtctaactagtgtaggmcaaaatggtaaaagtaatacaggcagcaccttgccttgtgtctaccagataaatctccttgcttatagctggactgggtccgcatagcccttttggcttcttggaatatcgaagcctgctgctttggacatctgatgtgtttcccttgtctttcggatagtaagaagggagccctgctgtgaggaacactttattcattcgacgtttatttagtggctgccagatgcaaggccaagtgctggaaatatgttggtttacaaaatccaattctgccctattaattggggaaagcagcaaagtgggaattttaatacagtgcaataattaagggaaaaatacaggag

SEQ ID NO: 313934 - DNA, 584 bp, Homo sapiens
ctaacaaaatactatgttaaaactttataaatggaaagattatgtattgaaacaatagtaaatgcccttctttgcttatagataggttaatataataacatcatttatagtctctttggtgttccagcagttgttagtctttaacatagcttttgttcttcccctttccttctccccactgccatagtcttgtgttatatctggacagttgggaactaaccagtctctctcccttcctccagttcactgtggcagtggagatgaagaggagcaggatgtgacgaatttttacttaagactgttttagtttcctgccaactgtttatttatagagtttcacccagtgatacttatataacttaagttataatgccacagtactttcacaaaatatacayattactgtttcagtgtttttttttaatagccttggtttcaatgccattatcagttcattatcagtgtattgtttgcttccttgtccagtaccactgtctgataaaatccttaattattaagtatctgataatactatccaaactgctttaattacagaacattttgtgtcttgtttttattacatt

SEQ ID NO: 313935 - DNA, 602 bp, Homo sapiens
tttcttctggaaaaatctacatgttggttcctaatgaagattatctattggagtaattcaaaggcaatgaatatttcaacctagttgtgtcaagaggagaaacaataatgacaggcattagatctggaaagaactgagcacttaagatagacaggcattcttaygtgattcaaaagttaactctaggtgctcaaaagttaaccctctaggtgctctgggggcagtcttattcactggattaacaatagctcaaattacaagtgatgaaattttcagttgccttaggttgctattactatcactatcttaaagtttttgagtccagcttttcattatatataaataagattagtttcttttcatctgtgtgatagcccttcaaaagacaagaacttgaaagggtagaagagcaaggaaaacagtaacaaaaggacgaatatgtggaggagagagataaatgcataaaataattagctcaactaaaatttattattattcaaatggcatcctaccagcttacaaagacagaggggggtcatgagggctttcctctaggaacttcaaatctatgcagggagacaataagttctatgcatgtatgt

SEQ ID NO: 313936 - DNA, 619 bp, Homo sapiens
gttgttggatgaggatgttgcagtgtctgttgtgccttcttcttcttcttgcttttttggctaagaaaatgatgttgaaagaacaaagaaaattaatgattttggaagacatttgttattaaaaatcttgtttgaaaaccaatgtttcctggcaaagttgcatctcctagacagttgctctaatttagggtccatcacaattttagaaataaaggaaattagctcatggcagctttttatacaatgaaatgaagaaaacaaaacccgcttgaatatggctatgatattcacatggatataaataagacagaatgcattcaaataagtgattctttaggttttctcttacttgggaaactcggggktgaaggtgtataaacaaagtgactgtatgaatttctgaggtgataatatgcaaaagaataagacagaatgtctaaatagtcttcagcaatatggagacctgatgttcagaagccacaatcaccttatgtttttccccttaagtacagaggaaacttcactggcttagtaatatgctgacaatgggtaagccaaacatcacagagttttaggactaagttaacattatgtactggagcctaggacattgctatct

SEQ ID NO: 313937 - DNA, 246 bp, Homo sapiens
gaagaagcagtggccttgctgtctaacgatgagtgtaagagaatcgtgctgcttgttgcaaggccagagattcaggtcagaacagagatcaaaagccttgagactgaactttatattcattgaattcactgaatgtaaattcgtgaatgaattatattcattatctgctattctctatcaaatcattatcayggttatctctccccatataacccaccagatggcctatgtgggagtgaattttaa

SEQ ID NO: 313938 - DNA, 602 bp, Homo sapiens
cactatttcatcagtttttgccatgtagatgctccagaaatttgcctcccttctgccagggaaatgactccagcaaagctgttctgtggaggcactctgagagaaagaaggcagaaaatcygaaaagaaatatgaaaagcaatgtaatgtgctgagcattttaaagttgtcaatagaaataaatactttcatatatttatggtaaaagcaccaacttaaataaaaatgtatgttttagaatacattcataagcaccaagtcatactgagttttcatgattagcaaagataaatgtttcaaagaacttcagagcccagaaggatctgagtaaactccttctcctgcagaatcagttagaaaacccctcctttgtatggctttctcctttaacatggattcataactctgttattaatgtttgctattactttgtatgtttgtattgtaatacttactataccatattatagataaatgtttccccataagttttaattttgtcaaaacataatgagatatttgtagctgatttacattagtgcaagttttagaagactaatgcagacaccagaatgttactttatttatcaaaaagtattgag

SEQ ID NO: 313939 - DNA, 174 bp, Homo sapiens
atgaaatagctaaaataattttatatcacttactactggggcagtaaaataatccattaaaaaaatcaccttcataagtgccgttcctttgggaaatttactgaattgaaaactgatctggatgaagtgtgaaaattttttattacytgagcattaaagataagatggtattct

SEQ ID NO: 313940 - DNA, 584 bp, Homo sapiens
tgtgtgtgtgtgtgtgtgtgtgtgtgtgtgtgtgtgtgtgacataaaatctgtagtctccatttcttgattctaactcttactttgtatttttgttttactgaattgctcagaccttcagaacaatgtttgagaatggagagctaaaattccaaactggacccccacttccactaagaccccctcctattcattttccatgcaaaaattgctagaacaatcttgtcaaaatgtgaatctgaacacgctgcccactgtttaaaatccttcagtgactttccatggctctcaaagcaagggtgcaaatccttaccttggccaccaagcccccttgggagctgagccttttctgtctctccagcctcatctttcactgtcctctccttgccacggcatgtcctgtccactcctacctttcttcagttccttacatgagtgacattccctcttgccacagtgcctttgcacataytacttcctctacttgatacggtctttccttgcctctttggtgggcaagttcctctcacccttccagtttcagcatcacttccacagggaagccttccccagtcccttaggtca

SEQ ID NO: 313941 - DNA, 484 bp, Homo sapiens
tgtaccattttacagccccaccagcagcatataaaagtttccattgcttcacatccttgctaactagtcagtctttttacatgttagccattctagtgggtgtgaagtggtatctcactgtggtttgaatttgcattttcctgctgactgatgttcagcatattttcatgcacattccttttccttcttttgtgaagcctctgaaacagcctctgtctaggaagttattggtctcccggcaaaggaaaataagagacatggtgaacctggagcagatcctgaagcttctgctccaaaatgatacayattatttctgtctacatgtattgactaaagcaaggtacacggccactcctgagttccacagggcaaggaagtccaaccctcccatgaggagggtcactggaatgtttggcaaaaaggaatataatctactccagtccccaagaaggatatcctagtggaatttattttctcaacagga

SEQ ID NO: 313942 - DNA, 572 bp, Homo sapiens
atatattctaggagtcttttatttttgtctggagttgttttgcaattaacccacgagttttatcaacaatagcttcggaagggaggaaaagatggaaagttcaggcggcgtccttggaacacaggtatccatgccatcatcacttgccctgtggcttgctggtttggcatcctcgttcttagagactgagggttgttgtagttcagaaggaagaaggtaccyggacaacagaacgggacctgatgccacacgtagggtccatgatgagacctttcctcctcttttcactggatctaaaaagtaattactgtattttaattatgcaaacatttcatgaagataccttttgtaaatttttaaaagcattccatataaaagtaatacttcttttgatcttcagcttcaatctaaaccgcctaccctatccccttgaattatctattggtgtgtgaatgtgtgtgtgtgtgcatgtgtgtgcgtgtgtgtgtgtggtgtgtgtgtgtgtgtgtatgcacagggacacacccttatttcagaagcaaaaggcaaaagactgcatggtttgaattcca

SEQ ID NO: 313943 - DNA, 430 bp, Homo sapiens
tgatctggaacattctctaagaaataccgcaaagtcaaagcagcaagcagcgtgtgcggtgtgctactatttgaggttaaaaagaaaatgaaagggaggccacggcatggaagaaccttgaggacattatgctccatgaaatcggcccgtcgctgaaggatgaatactgtagaattccacttagcagagataattagagtggtcaagttcatagagacggaaaatacaagggcgggtgccaggggctgggatgagggggaagtggggagttcgtgtgtaatggggacagaggtttagttttacaagatgaaagttgttctggagatggatggtggtgacggctgcacaacaacatgaatgtgcttcatgcygaggactgtacccctaaaaacggtgcagatcgcaaattttatgttatgtgcaccttacc

SEQ ID NO: 313944 - DNA, 577 bp, Homo sapiens
cctgcacagttaacgccttccctctgctcaacatgcattcactgaggccaacacctgctgagcttcagcactgagtcagacattgcgtcatcaccagatacctctctgccctctactccctatggtgccggattccccatcccctccaagtgatgtccttgcacactgcatcacagagcacatgtttatcataggttcacatacctgtatgaccgtctgattgatgcccctctcctccaccrgactataaacctcatgagggcgaggagcatcctggtgtaacacatgatgggcacacatcaaatgtctgttgaatgaatgaatgaatagatggatggacagatgcttgtgcctgttttgcagatggggaacgagaatgctgagaagaacagagggcagcttgctccagatgcagctgatcggaagctgagtattagagctccagtctgggctcttcatcctgctccctcccccatgctccattcttgcagaaacctttccctgcttcctttatcactgctgtgttaagatccaaaatctggacctgacccctgctactgcgagatggagaggccaa

SEQ ID NO: 313945 - DNA, 463 bp, Homo sapiens
tcatcaaaaatatctccagacattgccaratattcactgcaagataaaaatcccccctgttgagaaccactggcatgaaagttggagagcagctccaccatcctcaaagtgattatctctgttctaagagacagaagggaacacacatattgttatatatgctggtcaggaagtggcttctgagatgacatctgtgcttctgtatatatgtgtatatatatatatgtgtgtgtgtgtgtgtgtgtgtgtgtatacactttaagttctaggtatacatgtgtcacgttggtttgctgcacccatcaactcatcatttacattaggtattcctcctaatgctatccctcccccagcccccagccccccaccccccaacaggccccggtgggaacacacatattattaaagcaagtgtttttgaatgtctttgttacagtagattactataccctaactaatatgc

SEQ ID NO: 313946 - DNA, 583 bp, Homo sapiens
tcatcattggttagtgaatgctttgttttcccacatttacrtggcgatatcttgtttttaattaatttggcagacagagcaatcaaaagagtttctgaagttttagaagtgcccctccatttaagaaatattgaatgaggtttgatttgtttcatgtctatccaaaatgattactgagatgtggccacaagcaagctgggccaagtctttgtttgagaatattctattattattattagcattgatgccgaaggtgtccttggtattaaataggctactcttggttgcaggcagcagaaccctaacccagactgttaaagaaaaaacaaaaggaaattgaatgatccatcagtttcacttctgggtatatacacagaagaattgaaagcagaactcaaagagatagttacacaaccatgtttatagcagcagtgtttacaacagtcagacggtaaaagcaagccaagtgcctataaacagatgaatggataagcggaatggggtatagatatacaatggaatattattcagccataaaaaggaaggaaattctgactcacattacaacatggatgaaccctgc

SEQ ID NO: 313947 - DNA, 583 bp, Homo sapiens
tcatcattggttagtgaatgctttgttttcccacatttacgtggcgatatcttgtttttaattaatttggcagacagagcaatcaaaagagtttctgaagttttagaagtgcccctccatttaagaaatattgaatgaggtttgatttgtttcatgtctatccaaaatgattactgagatgtggccacaagcaagctgggccaagtctttgtttgagaatattctattattattattagcattgatgccgaaggtgtccttggtattaaataggctactcttggttgcaggcagcagaaccctaacccagactgttaaagaaaaaacaaaaggaaattgaatgatccatcagtttcacttctgggtatatacacagaagaattgaaagcagaactcaaagagatagttacacaaccatgtttatagcagcagtgtttacaacagtcagacggtaaaagcaagccaagtgcctataaacagatgaatggataagcggaatggggyatagatatacaatggaatattattcagccataaaaaggaaggaaattctgactcacattacaacatggatgaaccctgc

SEQ ID NO: 313948 - DNA, 570 bp, Homo sapiens
cggtgctattatctcatgcgtagctgtttttttacgaaggagtttttacatacttgctggggaaagcarcactagtgagagaccagggctccttgaggggtgagttagtaggtcagcctcatcaagtattgatagggcagctgcgctgaagtcatcttccccctgccaaagctcctccgtgcctggccactgagtctctcaaggaagccgcagttacctgtaagaagttagaagttacttaaggagccattaaggattgatggatgggctcttttgcccttttggggttttattattaatacactcttttgcagcagtaactcttgaccaaagagaagtctggttcccatcaagttagcagtggggtgtttgtgtatgtgaacgtgcatgtacgtgaatgtgcatgtatgtgtgtgtgtgtgtgtgtgtgtgtgttacatccataccatttcccctaccatagtggaaaaaagcatggcatcagggcaatattttcaagccaacacttgcctaggtttcttctaactctgtagtcagagtgcagggatcaaccactcactctttcctaac

SEQ ID NO: 313949 - DNA, 364 bp, Homo sapiens
aactacccagtctcaggtattgtgttacagcaacacaaaatgtactaagaacacccacttttaaaattcaggttaaattctcataacataaattaactattttaaagtgaaaaatatggtggtatttagtacattcacgattttgtgtgatcaccatttctacctagtcccaaagcatttttgtcattccaraagaaaatctcataccctaagtagttactcatccctcctgtctccccaaagcctctggaagccaccaatctgctttctgcctctggatttcctattttgcatttctctccacttcatttttttcccagtattcaagttgagaacactcagatttggatctatgcacgccaat

SEQ ID NO: 313950 - DNA, 577 bp, Homo sapiens
tgaggctgggtacatgctgcccagacaacgctagggtccactcagccacaaagcagagtgctgtctcttgaatacaggatattgccacctccctgaggctcagttttatcagcttttgaaataatggccagaaagaaaaattagttcaattatggagatatgggggagcaaattctgagtttgtagaatgagatctgtgcatgttagacttattatccaggaaaaagaaattgcctagtgtttgacagtgttttcagtagagatactatctggagctatttcattcaatactttatatcttaggaacttccagaaaatttgtgaagaagaacctttctttttttcagcaggatgaagcaatgattcagctgccagctttcagcacaccctacacaaggccatctggagacccagaggccctctctcctaagcagtatttttatctttactctctgtagctgactgtagtggggagggggtcaaagggagggcacaattggatttgacagcatcccctacagtaagggaaaggcaggcagcaggcgyatgagccgcagatgatggagcagcagaatga

SEQ ID NO: 313951 - DNA, 599 bp, Homo sapiens
aagtgagtttctagcttctgtcttgtgaagatgacaatggggaccattctcctgatatgatggtggatatacaaaaagcaagaacagccaggcacrttggctcacacctgtaatcccagcactttgggaggctgaggtgggcagaaaacttgagatgaagagttcaagaccagcctggccaacatggtgaaaccccatctctaccaaaaatacaaaaattatccaggcgtcgtggtgtagtctcagctacttgggaggctgaggcaggacaatcgcttgaatctgggagacagaggttgcagtgagctcagatcgcgccactgcactccagcatgggcgacaagagcgaaactccatctcaaaacaaaaaacaaacaagcaaacagtaaaaacaaaaagcaagaacaatgtctaccctagttgctaacactgttctaaaaacccaagagatgtcacaaagaaagtcaggcattcagctcttcttgaaaactgaggtctggcaggtcagcagttctgcacggcgatgagtgcgaggagcagagccacggtcaacctcatcagacagggcacatgcatccagttcactggactactctcag

SEQ ID NO: 313952 - DNA, 599 bp, Homo sapiens
aagtgagtttctagcttctgtcttgtgaagatgacaatggggaccattctcctgatatgatggtggatatacaaaaagcaagaacagccaggcacgttggctcacacctgtaatcccagcactttgggaggctgaggtgggcagaaaacttgagatgaagagttcaagaccagcctggccaacatggtgaaaccccatctctaccaaaaatacaaaaattatccaggcgtcgtggtgtagtctcagctacttgggaggctgaggcaggacaatcgcttgaatctgggagacagaggttgcagkgagctcagatcgcgccactgcactccagcatgggcgacaagagcgaaactccatctcaaaacaaaaaacaaacaagcaaacagtaaaaacaaaaagcaagaacaatgtctaccctagttgctaacactgttctaaaaacccaagagatgtcacaaagaaagtcaggcattcagctcttcttgaaaactgaggtctggcaggtcagcagttctgcacggcgatgagtgcgaggagcagagccacggtcaacctcatcagacagggcacatgcatccagttcactggactactctcag

SEQ ID NO: 313953 - DNA, 658 bp, Homo sapiens
acggagataggcgagactaaaaggaaggtgtttgaaccttgtacggaggtttaaaggcaaatatatcgggctttcccgccgttggggttaattgaagccactaagagcattactcaaaaaaataaaaaacaattaagagttaacctgtatctggaaaagcctcatacaaaattctgaaattaattcttgaactgtttccaaaaaagcagagaacaggcctgttgctatggaaattgtcgactttttttcttttgcatagaaaaagttaaaatgttacataaaaaaaaaaactacaacttttttccctccagattgctatcatttggccatctaatttaaacagttcagcggcgtgcacatttgaactgaattgaacaaagcaacattaaaagagagggtgctatttagaagattcgagtggcctcttttcctctcattgcctctcctgtggttgtgtactcttagcttgctgctgctcttgttgtctttttgcgaggcactttcaaagccctcagtaaacattaggcagagccagccccgtgtgtgatgggtcaggggttgtcactattggaggtgctatatcttggtcctggggtgtccrtgtgtccagccaagagcccaggagccctgggaagctgcctgtccacggtgggagaca

SEQ ID NO: 313954 - DNA, 547 bp, Homo sapiens
accaaagagagagcctttgagatcagggaccctatgtttctcactgttttatttccaattccctcagcagatgagggtcacccatcaatgacagttgaatgattaaagaccaataaaatgccctaggctatggtaaataattccaaaaacatggtaggcatgccactggtaagataccaaattttagttacacttcttttatttactaattatgatttgtattcatatgcataagaaaaaatataattcacttatcaaatttattgatggcacagaaggaagtgaggctgcatgttttaaaagtgagtttggttgaattcggtwtacagaaaaatatataaataatgagatagttggttctcaaatatagcaaatactgcaaaatgaataaggcaattacggaaattcaaggaattctgctgtggatgctggcaccctttgtgctctgattatgacgagttatttttctccttatttttcttttttattaattggcgcatatgcctcaaaacataaaatcttgtccttcaaacctttgtgcagctga

SEQ ID NO: 313955 - DNA, 514 bp, Homo sapiens
ggattacaggcgtgagccatcacgccccgctgaagatgtagatttaaaataacagaatatatcaataatttttatattgattagacattgaaataaaatttgttgatatattggataaataaaacatactgttaaaatttattttatctgtttcttttacttttttattatagccacgaaaatattagaagttacagatacrcctcacagtatatttttattaaacagtgcttctctggccccattgatatttcttcagtatcagacttagcccgtggcttggtatataatgtgttcataaacatttataaactaaataaatgaatgtacaaaacaaaaacctttcataaactggaaaaaactttgcacaaaatgtggagacggtatacaaacattttctaaggaatgctaaaaagtgatgttcttataaggagataaccaccatgttttgaatgggagaactcagttttctaaagatgttaatcgtccctaaagtgacacacattataaggaa

SEQ ID NO: 313956 - DNA, 514 bp, Homo sapiens
ggattacaggcgtgagccatcacgccccgctgaagatgtagatttaaaataacagaatatatcaataatttttatattgattagacattgaaataaaatttgttgatatattggataaataaaacatactgttaaaatttattttatctgtttcttttacttttttattatagccacgaaaatattagaagttacagatacgcctcacagtatatttttattaaacagtgcttctctggccccattgatatttcttcagtatcagacttagcccgtggcttggtatataatgtgttmataaacatttataaactaaataaatgaatgtacaaaacaaaaacctttcataaactggaaaaaactttgcacaaaatgtggagacggtatacaaacattttctaaggaatgctaaaaagtgatgttcttataaggagataaccaccatgttttgaatgggagaactcagttttctaaagatgttaatcgtccctaaagtgacacacattataaggaa

SEQ ID NO: 313957 - DNA, 435 bp, Homo sapiens
ttgcactccagcctgggtgacagagtgagactccatctcaaaaaaaaaaaaaaacattaaaatcatactgatgtggggctagaatctgggcccctgtgtttgaataacagggttttcttacaaagttgatctgctgtttgatggaaaattgtaaagggttctaaaaggtttgtgaaaatcataccttatggtcaaactaattaaaactcgatagagatataaaattttatattaaaaaactagctttaacattaaagatgtactaatgcaacattaaatttggttttctcttgtgaatatgatttttatgtactgttaaaagaaaatgaaagtgttttgttttctcctatgagtaaatggcaggaaaaaataggagasagagaagagacagattcatttggtcttatgctatcttcgcagggtctcgtttggaaa

SEQ ID NO: 313958 - DNA, 627 bp, Homo sapiens
caccatcagccctatcttgcaagagctcctgaaggaagcattaaatatggaaaggaaaaattgttaccagccactacaaaaacacactgaagtacgcctaccaatgtcactatgaagcaactacattaacaagtctgcaaaatgaccagctagaatcatgatgacaggtttaaattcattaacaagtctgcaaaatgaccagctagaatcatgatgacaggtttaaattcattaacaagtctgcaaaatgaccagctagaatcatgatgacaggtttaaattcattaacaagtctgcaaaatgaccagctagaatcctgaygacaggattaaattcaaacataaaaacattaactttaaatgtaaatgggctacatgtaccaatgaaaagacagaatggcaagctgaataaagagtcaagatccactggtgtgctgtattcaagagacccatctcacatgtaaagacacacatgggcgcaaataaatggatggaggaaaatttaccaagcgaatagaaccaagttgcaatcctggtttctgacaaaacagactttaaacaaagatcaaaaaagacaaagatggagattacataatggtaaaaggttcaattcaacaagaagagctaa

SEQ ID NO: 313959 - DNA, 588 bp, Homo sapiens
aagaatgaaaaagatgtttcttatgaaaggcctgtttcttgacagtatatgaatagtgtaaccattactttgtgttctattgaaatgatcaatagacagacaactttttctgcttataattgccaacaacagaaatgatggacattattatttctgtttgaaaacaaaacctatttctgcagttctatgattctggtttattcgtgctatctaatgaatgcttccaattacaacacataaaaaggacaattttatatcttctggttttcaaataaagtttgcatttcatccaatctggaccttagcagtaaaattacggatgtcaaatattttttcaggtaagakaattttttttaagcacagcagagcaattttatgtgatacagaaaattcttagaccaaaaggcgagagcttaagctattaatggctcaaacaatttgtattgactaaatactaataagacctgattctctatagctaggaatgccatctgaacctaagtttgcatccatcactctttatcctgggctagttcagagcaagttatgtcaatcagtcccacattggtttagtgaatgttttccaaa

SEQ ID NO: 313960 - DNA, 299 bp, Homo sapiens
cttccttttgaatgaacactgaaggattggttaatatgttgaacttttgagactttacatttctgaaggaagactatgttttattacttaaaatggttataggattttctattacctgagtgtgagcagaggaatcagaaatcctgctggagttatcatacagtggtatcggggaaatttttcacatgctaaataatatgtaaagggwctttaggaaacaacataaaattacatttaatcatatcgtatgtgtgtttaacatattagttacaaaagtaattaaaagaaagaaaccttcc

SEQ ID NO: 313961 - DNA, 573 bp, Homo sapiens
gggcgggggagcctataagaaacagaatatacgtataaacataaaataagcctatgaataaaataggtctattttaatcaaatttctttcaagaggagccccattttttacttctttaactcccctctcttctcattaggaaagaaaacaagtcacgactttagtattgtgatatctatctgtccaccttacaaatgttttacaaatgctgtaaacgtaaatctgggaaactgaggaagtaatcagtttaaattctgtggaaaatataaattttattctgcaagttkgaatcatcctgaaatgttgaagtcttagggaactcaacatctttagggcctttaaaactaatatacttttagggacacagacatatttactgaaatacataacacagaaaataaagttctttgccttgctttacaccctggagtgtgataaattttgtgggttgtggaataagccagtcccctggtttcttagaggatttagttcagtaccagatatcattggaattttagtagcagctttttggcctttagaatgaccatttgttttgtaaagcacatgatgtaa

SEQ ID NO: 313962 - DNA, 582 bp, Homo sapiens
tgctttacaaaaacttgtttgtcttcgctttactactcagttgagtttctaaagcaaatatatttctcaactgcattttaatttttctgatcatttctgtttttattggctaatgcacaaattcatgtttactaaaaatcactgcattcccaatgctattgagtaaagaggatttcataacatctctgattttacatggatcaaacaacaaatttgagattcatcactgtctaaaaatctttatcacttaractccccttactctaacatcattctttctgtcatactatcaaatatttcaccatttcctctttgctccaaaggcactaggtggagctaaacgtgtcctctactgtcttactttagttatttgccgtgattttactgtgttaattctcactgcatgttgaacatgctcactcttcagaatggtctgagatatcaagaatttgctctcaacaacatctgcagttattttgatttacttaggacattaatcctcatgttttcttcaataccaagtatgtagaattttttagttggagttttttcaagccacataattgtttgaactttttgctt

SEQ ID NO: 313963 - DNA, 565 bp, Homo sapiens
aatgaaatcatgttatttgtagcaaaatggataggactagaggtcattatcttaagtgaaataagacacagaaccagggaaacaaattgatatgggttggctgtgtccccacccaaatctcatcttgaagtgtagctcccacaattcccacatgtcatgggagggacccagttggaggtaaatgaatcatgggggtgcgtttttcccatggtgttctcataatagtgaatamgtctaatgagacatgatggttttataaagggcaattcccctgcacaaactctcttgcctgccaccatgtaagacatgcctttactcttcctttgccttctgccatgactgtgaggcctccctagccatatggaactatgagtacattaaacctctttttatttataaatcacccagtcttgggtgtttcttcatagcagtatgaaaatggactaatactgtaaatattgcatgttgtcgttcatatgttagagctaaataagttgatgttatggaggtagagagtagacagaaagttaccagaggctgttgttggaggggaggatgaagaaag

SEQ ID NO: 313964 - DNA, 619 bp, Homo sapiens
gttcaacacaagaacaagaacaaatgtccatggggctgtcttgaagattaaggcagataggtctaacaaaaaataatgccattattttggggaaatatgatggttattgtcatgatactgaaagttatgcattgtgtctcagggacatagaggtttcttggcttaggaaaaaatgaccagtgtgaccaagagtatgcgatgcacttggtaaaaatatttaggatgattaaacagaaaaaaaaagaagggggacaatttgttagaaaagggtagacgtttagtttttttagttttttttttttttttttaatgtgccagggaagtgctttatgcagagtgggtgctaaaaatatgtttgtcaaatgtatgagtaaattagtctatatatgaattgaatgcataaattcaaggaaagtaaaataaaatacaggtaaagctcattttatatatgaagtgasttcattacatatcataaaacaaataagtgatacaaaaatatttatgaatatgtttatatatgaaatactgtgtagtatgaaagttatgtctacttctctatcaaatgtttattaactatcagcgaactagtagtttcatcattgcttaacttataatcata

SEQ ID NO: 313965 - DNA, 641 bp, Homo sapiens
gggagcttgtttgtccttcctgctatgcaaagatgcagcaagaagatgccttctatgaaccagaagacaatcctcactggatactgaagtgaatctactggcaccttgatcttggacttcccaacctccagagttgtgagaaataaatttctgttgtttataagatacccagtctatgatattttctcctggcagccctaacaaatatgacaatctctctatgcttcagtttctcttctgtaacataggaattataataatacttacttcgtaggtttattgtgagtattaaataagtcagtatgagaaaatcacttaaagcattttctgtcacatactaagtactaaacaaatggtagttattttattcttactataatggtagtagagcatagtttttaaatacagattctagaggcagattgcctacatttaagtttcttaccaccacrttctagctttgtaattttgtgtctgtcacttaaccactcataagctcagtttacttatctgtaggataagaatagtagtaatatctaccttaggagctgttgcaatggtaaataaattattaaatgaatgaaaatgctcagaagactgccagacataccagaagtgttatctattattgagctttagaa

SEQ ID NO: 313966 - DNA, 453 bp, Homo sapiens
ctatgtccaacatttatctctattggtggaattttttcattttatatattcttcttttattttttatgtgagaaggaaaaaacaaagtcagatcaaacacatctatggaacaaagcacaagggttcacactaatgtgcagggatgagaagactttgctctaatttgctctcaaaagccctgatgcattttcccataccccatacacaggcatgacagtggatacctcagccacttttgcacatgcctaagaaatgtgtttctcacttaaattgcagtttccacacttttctgaacatatctyttaaacttttttttgtcttcctttcctttttttgaaaagaaatagaaggtaagtttcgaaataagcattagtggaataacttgttagatttggagatggagcagtacttttcattcttccaggcatgtatttgaaaagaatttgcacctaa

SEQ ID NO: 313967 - DNA, 549 bp, Homo sapiens
ttcacaatttcagatatttggaaccaacctaagtgctcactgaccaatgaatagataaagaaaatatggtatatatacaccatggaatactactcagccatgaaaaagaataaagcaatgcttttgcagcaacttaaatggagctggaggccattattctaagtgaaataaccaaggaatagaaaaccaaatattgtatattctcacttataagtgggagttaagttatgggtacacaaaggcatacagaatgatataatgaactacagaaactcagcagtgggatagtgagaatggggattaagggatataaaaaacacatattggatacaatgtatattactgaagtgtcaggtgctctaaaatctcagacttcatcattacacaatttattcatgtaacaaaaaccacttgtacyccaaaagctactgaaaaaaaatttttttaaatgaaggaaggaaaccatgagccaaggaatgtaggcagtcttcagaagctgtaaaaggcatggaaacagtctttaccctagaggcttcagacaggaatgca

SEQ ID NO: 313968 - DNA, 596 bp, Homo sapiens
tgatatcttaagtaatatccaaaatctttaaagtggaagcaattttcatttctttacattttccatgatatcattctaaggtacctagcagaatgctccaaagaggagctaccctattcaacagttaagactgagccaggtggatggcagctcatcaagtccagttccagtcttagaataataagcaacatgccattctgtcatgtaagtcagtgggccggctgcggtggctgacgcctgtaatcccagcactttgggagggcaaggcgggcagatcaggaggtcaggagtttgaaytagcctggcgaacatggtgaaaccctgtctctactatggatacaaaaaattagctgggcatggtggcacatgcctgtaattccagctactcaggaggctgaggcaggagaattgcttgaacccgggaggcagaggttgcagtgaaccaagatcgtgccattgcactccagcctgggtggcagggcaagacttcatctcaaaaaaaaaaattaattaaattagattaaaataaaataaatatataaataagtcagtaagatattgttaaacaagatgaggtcaagactaattcgcacaga

SEQ ID NO: 313969 - DNA, 596 bp, Homo sapiens
tgatatcttaagtaatatccaaaatctttaaagtggaagcaattttcatttctttacattttccatgatatcattctaaggtacctagcagaatgctccaaagaggagctaccctattcaacagttaagactgagccaggtggatggcagctcatcaagtccagttccagtcttagaataataagcaacatgccattctgtcatgtaagtcagtgggccggctgcggtggctgacgcctgtaatcccagcactttgggagggcaaggcgggcagatcaggaggtcaggagtttgaactagcctggcgaacatggtgaaaccctgtctctactatggatacaaaaaattagctgggcatggtggcacatgcctgtaattccagctactcaggaggctgaggcaggagaattgcttgaacccgggaggcagaggttgcagtgaaccaagatcgtgccattgcactccagcctgggtggcagggcaagacttcatctcaaaaaaaaaaattaattaaattarattaaaataaaataaatatataaataagtcagtaagatattgttaaacaagatgaggtcaagactaattcgcacaga

SEQ ID NO: 313970 - DNA, 540 bp, Homo sapiens
aactggcaacatttagtgcaccacactaatatcccaacaacatcgctatggcaacctcaggcaagccctgcgcatcccttaacttccaggcctcggcagaaaacttggcttgcaccaccaggaggtggggaggtggggagccggggagctggggagtggggagctgcgaagaaggttggctccgggctctacccrgcattagaaacaagggcgggagggctggcgggtgaagggggacgacaccacttgatatcctttctaagtgattcctgtgttactctgactttgttttagttatcacgtgagctaattacaatgctaattagcccagtttacggggactgctgtgcatttgtacacgagggttctttgtttgatctgctacatcataagcttaccagcacggagggatagcatgtatcgttgaacgtggaagaacacaccttcatttgtgttaatgaagaaaactactgaaaaccaacagactaattaaggtacgatgaacaattttgatcagcaattattttttaatatcgaagt

SEQ ID NO: 313971 - DNA, 615 bp, Homo sapiens
tgagagatttaaagaagataatctattcaaactgattttttaataaatagtagactactaagcaaacacaaagaaatgtagcagcgatcttctgggtcagatgacctgaatttgggtatgagctggatgtagataaagaattgccttgaagaagcccaagtccctaaagaataaggaacacacacacacacacacacacatatacacacatctgtttcctctagagtaggggtcccaacgcaccagtctgcggcctgttaggaactgggctgcatagcaggaggtgagtggctgtcrggtaagcattgttacctgagctctgcctcctgtcagataagcagtggcattagattctcacaggagcctgaaccctattgtgaactgcacatgcgagggatctagcttgtgggctccttatgagaatttaactgatgcctggtgatctgaggtggaatagtttcatcctgaaaccaccccccagtcccccacctccccaccgcacacacacaccacgaaaccagtccctggtgccaaaacgttggggatcgctgctctagaggtagcaggagtttgtcaaggtttcctgactgagtttctaggaataagataagaagt

SEQ ID NO: 313972 - DNA, 615 bp, Homo sapiens
tgagagatttaaagaagataatctattcaaactgattttttaataaatagtagactactaagcaaacacaaagaaatgtagcagcgatcttctgggtcagatgacctgaatttgggtatgagctggatgtagataaagaattgccttgaagaagcccaagtccctaaagaataaggaacacacacacacacacacacacatatacacacatctgtttcctctagagtaggggtcccaacgcaccagtctgcggcctgttaggaactgggctgcatagcaggaggtgagtggctgtcaggtaagcattgttacctgagctctgcctcctgtcagataagcagtggcattagattctcacaggagcctgaaccctattgtgaactgcacatgcgagggatctagcttgtgggctccttatgagaatttaactgatgcctggtgatctgaggtggaatagtttcatcctgaaaccaccccccagtcccccacctccccmccgcacacacacaccacgaaaccagtccctggtgccaaaacgttggggatcgctgctctagaggtagcaggagtttgtcaaggtttcctgactgagtttctaggaataagataagaagt

SEQ ID NO: 313973 - DNA, 646 bp, Homo sapiens
acttcaagttttgttgctctcactttcttccactcaattcctatctcactttagcccaaattcattgagactcagttatgctcaaggagggctcttttcctggcctttctccaatcaagaaaaaaaaaaaagcttttgttgatcttaactaattatctctcctattaacactggaattgcaatttcagaagatttgtatagacaaatgtcttatatagtctcaattgaaaaaccacttatgcccaaacttccatattctctaacaataagtaagttccatgtatgtctgaccagtctcaacaaggaatcgagctccttgaggccataggcagttatctatttctttaaaatgaagcaacatgaagaaaacataaataaatggaaagatagcctgtgttcatggattggaaaaattaatattatgaaaatgtctatattattaaagtgatctacagattcaatgcaatctctatcaaaattctaatgtgatttttttacagacacagaaaaaagcaatggttaaatttgcgtgtaatcacaaaagaccccaaatagtcaaaacaatcttragcaaaaagaacaaagctgagggtgtcatacatcctgatttcaaaacatattataaagtgattttaatcaaaacagc

SEQ ID NO: 313974 - DNA, 546 bp, Homo sapiens
agaacgtggtgaactagaagtgaaataaaggaaaagtttcaaggaggaggagccaactgtgtcaaatgctaatgttaggtaggtaagatgagaaccaaaattgaccattggatttggcaacatggtggtaactsgtaagtcggagagattggtctgaacggacaatgaaggataacaactacaacacatacacaacctccaggcccatatgtatgaggactgtgggagaaaaacaaacaaataacaacaacaacaaaaaacccaatcactacctcagagacattgtaaggaaagttgggttttcattagagtaaaaaggtgaaaagaatgttcagagaagaggttaaggatctaggagattttttgacttcagaccatgaattctagaagacacagtggaaggagttcatgaattggggagtgatgggaaaggagtgagaggtcaaaactgtgcagagccctgtgagaattcacgtgacagatataacaggtgcctgagattatggacttcttttgatgactggcaggtcctgggataacaggcat

SEQ ID NO: 313975 - DNA, 546 bp, Homo sapiens
agaacgtggtgaactagaagtgaaataaaggaaaagtttcaaggaggaggagccaactgtgtcaaatgctaatgttaggtaggtaagatgagaaccaaaattgaccattggatttggcaacatggtggtaactggtaagtcggagagattggtctgaacggacaatgaaggataacaactacaacacatacacaacctccaggcccatatgtatgaggactgtgggagaaaaacaaacaaataacaacaacaacaaaaaacccaatcactacctcagagacattgtaaggaaagttgggtttkcattagagtaaaaaggtgaaaagaatgttcagagaagaggttaaggatctaggagattttttgacttcagaccatgaattctagaagacacagtggaaggagttcatgaattggggagtgatgggaaaggagtgagaggtcaaaactgtgcagagccctgtgagaattcacgtgacagatataacaggtgcctgagattatggacttcttttgatgactggcaggtcctgggataacaggcat

SEQ ID NO: 313976 - DNA, 581 bp, Homo sapiens
catcactaacattttacttactaatgaatattttagggtcccttacgggggtcaatatcagaggttccagcagtaagaatattcatgtgggattaaccttgcacacagtggagatagtcccaggacgcatggtcaccactcactctactagataattaggtagttgcagaaggtaataaaattattaattcttttatacattgcataaattgtacagaacactttcatgcattttattttatagaattttcattcaaaaaaatctgtgaaatttgagagcattggccttaacaagtgcattttacagatatgattcaaatgtgggttccttaactccactcccctttgttcaatctcacaatgaagagcaacaagttgccttggcatagtgactgacacctgtaatcccagcgctttgggaggctgagacaggagaattgcttgaggccaggcactcgagaccagsctggacaacacagaaagaccttgtttctccaggaaaaaaaaaaaacaacaagtaggagggtaaatcctgccctcatgtttggttgaattaggcctagcactgaggtaggctgcca

SEQ ID NO: 313977 - DNA, 581 bp, Homo sapiens
catcactaacattttacttactaatgaatattttagggtcccttacgggggtcaatatcagaggttccagcagtaagaatattcatgtgggattaaccttgcacacagtggagatagtcccaggacgcatggtcaccactcactctactagataattaggtagttgcagaaggtaataaaattattaattcttttatacattgcataaattgtacagaacactttcatgcattttattttatagaattttcattcaaaaaaatctgtgaaatttgagagcattggccttaacaagtgcattttacagatatgattcaaatgtgggttccttaactccactcccctttgttcaatctcacaatgaagagcaacaagttgccttggcatagtgactgacacctgtaatcccagcgctttgggaggctgagacaggagaattgcttgaggccaggcactcgagaccagcctggacaacacagaaagaccttgtttctccaggaaaaaaaaaaarcaacaagtaggagggtaaatcctgccctcatgtttggttgaattaggcctagcactgaggtaggctgcca

SEQ ID NO: 313978 - DNA, 447 bp, Homo sapiens
tccccttgtgcactgaacagctcatgccgtgtcaaagggcgttgaccttttcactcttagaacaaaaagactggaaacaaattatgctctgagaattggtcaaaggataacaacaacaacaaaaaagtgcctgacccccaaaacaagtgatgaacacaaattctaagctttagagtattatcattaagagtattgtctctttaaccaacttttctttaaagtgtaatatgagcatttgcttcaatttactctgaaaccacccaccccccaaccccccttggctccttttgcagaacacaatgaaccaactactgttgtccctactccccctatccagctgaatctrttccagtttacgagctgtccaccatggagctaagtcttccaaacagaatgactcatctgcaagttttgctcgtggcttctgagagtatatttagtgtgaag

SEQ ID NO: 313979 - DNA, 583 bp, Homo sapiens
aggaagaatgcaataaactgcttgtaatctagtggtctcaaaagaaattacatcaaaaccagctgttacaccactagtcattaaagactgacaacatgttaactaacatatggccattatattgaaagagactttcctccccacccgctgccaaactactagaggactcttgcttcacttaacatcagaaaatgtggatgcaacgaagcaactcaacacttaaactatcaataagagagttgcatttggttgagatatgacctctttattttaatatttttgaggaatctggccaatttagaacattgtggtttasatgtcttggcagttagaataacttttctttggattgttaaatgtctgtgtttctgtaggattgcagctgtctttcctcccacctgccttttgaaatgaagaaaattgatgcagggattttaatgataaagtacaattccccaggtaccactttctgcgttcttttgcttgaaatgttgaaggactttgtgttggatgtcacgccagtctatgtctgacaaccaacaacatgtcaaagctgtggcataaaagcttgaaatgtagtgca

SEQ ID NO: 313980 - DNA, 532 bp, Homo sapiens
ctaattcaggccttggaatccatttttttccagatctttatgttgctggctttgctacctttcacatcaaactaattctcatcccagtgttctctcccctcctatcctactttaatttcttaccagaatgttttattcttactatttattctttgtacacattttattcctaatatgtatattatgtattactatgtattcttactatgtatattatgcatttgcatacttgtttatagtctgctttcccaattagaatgtgaattttttgtggcatagactttttgtggtgtagacwttttgtggggtagactttgcctcactcactcctgtcctgtctgcccctttctcccctccaatttagattagtgcctgctacatagagagtacaagaaagatctgttaaatgaaagaatgaaaaagcaacacgttgagtaatgttactaaatatatcactaagatctcctctaaagacacccttctaaaaatacttctgtaaattgcaacaaaagatgaaactcttaaatgttgt

SEQ ID NO: 313981 - DNA, 485 bp, Homo sapiens
gagaaaggagaaaggagcaggtgcagaggaatatacctcccagctgaataactttcttgaaaaactcatccattggcttctacttacatttcactggccacgtctatttgaaagggaggatggaaagtgtcattattatctgagcactttagtggtcccaatagtatagagttttttgggttttgttttttgtttttactaagggaaagggaagagtaggtactgggtaggcagtgtgtactaccactatccagtgtatataccactatatatttttttgtttgtatttgtttcrttcactgttatattcctcacatctatcatagtgcccagattttcaataaattatgcaatcccaataaattaatatataaataaataattttacaatatttgtctgtactttaactgtggtgtagctatgcagcatatctttgccattgttcctgtttcggccacttcttttatcatctggtgatgtcact

SEQ ID NO: 313982 - DNA, 600 bp, Homo sapiens
ttgttttttgtttttactaagggaaagggaagagtaggtactgggtaggcagtgtgtactaccactatccagtgtatataccactatatatttttttgtttgtatttgtttcattcactgttatattcctcacatctatcatagtgcccagattttcaataaattatgcaatcccaataaattaatatataaataaataattttacaatatttgtctgtactttaactgtggtgtagctatgcagcatatctttgccattgttcctgtktcggccacttcttttatcatctggtgatgtcactaaatcaacatcaactatgtcctaattcatgtcaattatctgcttccctgtgtgaatctcaataggctaatagcatattgttcaaagttttgattttaaaagtgcagagtattcaccaattgtaattctatatcacaggctatttctaggtctatttctattttctaatgcacatatataggcaaatactgtaatttcaatttcaggctaagttttccaattctgaaagtaagtcaactactagggaaaatgtttaaacacattctctttgatgtagtggctttgacaggaagaaaac

SEQ ID NO: 313983 - DNA, 581 bp, Homo sapiens
tcctcttccagcccagcaaccaccattctactttctgtttctgtgggtttgactactatatatgccttgtataagtggaatcatatgttatttgcctttttgtgatgtgtttatttcacttagcataatgttctcaaggttcatacatgttgttgcatatgataggattgccttcttgctttaaggacaataacattttattgtatgtatatgctacattttcctcatccattcatctgttgatggacatatagggcatggtgaataatgctgcaatgaacatgggtgtgcaagtaacttcaaaatccagctttcagttgttttagaaatatatacccagaagtggaaattctgggtcttacggtggktctacatttaaattttggaggaatcttcatactttctacagtagctgccccatttcacattccaaccaagagtgcacatcaatcccaacttctccacatcctcaccaatacttgttttttttcataatgagtatcccaacagatgtgaggttatatgtcattgtggttttgatttgcatttccctgatgattagtaatattgagcatcttaac

SEQ ID NO: 313984 - DNA, 554 bp, Homo sapiens
cagctacagtttatattagtaatttccaactaaaacgtcttacaatcagaactaagctcttattctcaagggcaaatttgtcactaaaaccttgtgatagtacatgcagatgagtcaaatgatatactgctgaggtaagttttaattaattcatggctatcattaatggctatattttaataataatttcttcttatatttatacccttgtcatgattttataaaaaacacaaaaatattagcctggtctaaatccctaagagcacaataattcctaagaattatccagagtcaagttagatgggccacgggcctcagtcaaatatttatattaaccyggatcttgattgtcatcctgaaattcatcttttcaaaaacaaacatactcctggctttcttatttttagttactactacattatatttctgtgacttatgaattttcaaagtccagaattttctaaaatgtttttgggataaatacaagtgctcagggacattaaaggtcctatggttaatgaaatttgggaaataccagattaaatgaaattata

SEQ ID NO: 313985 - DNA, 574 bp, Homo sapiens
ttcttccgaaacctccttctgtcagttcatccatctcagcctcagcccagttctgtgctcatgctggagaggtgttgtgattattttgaggagaagaggctctctggcatttggaattttcagtgtttttgcattgattctttctcatcttcatgaacttatctaccttcratctttgaggctgctgacctttgcatagggtttttgtggggtctttttgttgatgttgttgttgctttctgtttgtttgttttccttttaacagtcaggcccctcttctctagggctgctgtagtttactgggggtctgctccagaccctattcacctgggtccctcctgcacttggaggtgtcaccagtggaggctacagaacagaaagatggctgcctgctctttcctctgggagctttgttgcagagggacaacaatttgatgttagtgggaatggtcctgtataaggtgtctggtgacccctgttggggggttctcacacagttaggaggtatgggatcagggacttgcttaacaaataattctggctgccccttagctgagcagtgtgctgtgccaga

SEQ ID NO: 313986 - DNA, 627 bp, Homo sapiens
aatattatatgagcaagaaataaacttctattgaattagcttctaatttgaggcccatagatctccaaggggtctgtagattgaattcaaggggtctgtgaacttggaatgggaaaaatatgatttttactaatgtctttcttacctcaatttagcattttcttttgttatgagtataaacaacaaaccagtcgcattagcagtacctatgaaaagtatttttgtatcacattacaattgtaacaaatatctgaaatttaattcrtactcatcaagattttaaaaatatagtagtaatgaacctgctggtatattttatttgatgttttaataaataagcatctttattattatatcataaattattttaatactttagcactgcatttcaatgtaattagtttcttttgaaactttaaaaattttctctcatgtatttaaaaacattattttgatgatgtgtacacatgggcatagagagtaaaataataaaggttggagactcagaaaagtgggagagtggcagggggatgatggatgagaaattaccaggtacaatgtatattatttgggttatattacactaaaaacccaggctttaccaccacacaatatatccatgtaaca

SEQ ID NO: 313987 - DNA, 627 bp, Homo sapiens
aatattatatgagcaagaaataaacttctattgaattagcttctaatttgaggcccatagatctccaaggggtctgtagattgaattcaaggggtctgtgaacttggaatgggaaaaatatgatttttactaatgtctttcttacctcaatttagcattttcttttgttatgagtataaacaacaaaccagtcgcattagcagtacctatgaaaagtatttttgtatcacattacaattgtaacaaatatctgaaatttaattcgtactcatcaagattttaaaaatatagtagtaatgaacctgctggtatattttatttgatgttttaataaataagcatctttattattatatcataaattattttaatactttagcactgcatttcaatgtaattagtttcttttgaaactttaaaaattttctctcatgtatttaaaaacaytattttgatgatgtgtacacatgggcatagagagtaaaataataaaggttggagactcagaaaagtgggagagtggcagggggatgatggatgagaaattaccaggtacaatgtatattatttgggttatattacactaaaaacccaggctttaccaccacacaatatatccatgtaaca

SEQ ID NO: 313988 - DNA, 622 bp, Homo sapiens
cagatgtgtcttggatattatccaagaaggtgtagttttactggagaagccaaaaagatctcattataagttagtctcatgacatggactctgaggatggtattagacactggttacaatttatgtaccttccagtgtgcgaatgggataaatggggaacaaaattaataacctggtctgatatgacccaaagttaaaactaggggatgaaagctaggaggatgttatacaaagaaaataagagcctggttttagttgtataaaagaagaatctttggaacaggrattaagattctaaatggttaagagttgtcaaatttatatatgtcaaatccatatttgcaaagagttttagtataaggtagaacacagttgttttatatatatatatatatatatatatatatacgtgtatatatatatgtgtgtatatatatatatatatgtatatatatatatatatatatggtaacatttaatgaaaagttacattttatttccttgcaaaacaaacacattcctggaagacagtgtatagcacactatgccttctaaaattatgtgtacaaattgtgattgatatgtttctactctgaaattaccattatgtgtgtatagtata

SEQ ID NO: 313989 - DNA, 622 bp, Homo sapiens
cagatgtgtcttggatattatccaagaaggtgtagttttactggagaagccaaaaagatctcattataagttagtctcatgacatggactctgaggatggtattagacactggttacaatttatgtaccttccagtgtgcgaatgggataaatggggaacaaaattaataacctggtctgatatgacccaaagttaaaactaggggatgaaagctaggaggatgttatacaaagaaaataagagcctggttttagttgtataaaagaagaatctttggaacagggattaagattctaaatggttaagagttgtcaaatttatatatgtcaaatccatatttgcaaagagttttagtataaggtagaacacagttgttttatatatatatatatatatatatatatataygtgtatatatatatgtgtgtatatatatatatatatgtatatatatatatatatatatggtaacatttaatgaaaagttacattttatttccttgcaaaacaaacacattcctggaagacagtgtatagcacactatgccttctaaaattatgtgtacaaattgtgattgatatgtttctactctgaaattaccattatgtgtgtatagtata

SEQ ID NO: 313990 - DNA, 443 bp, Homo sapiens
ttcagtcttctgttgttcttttgaaaataagtaatgtctttaccacttagctgggaaagtggtgaaggaactagtattttatggactctaactacgtgtcgcccacacgcagcagtatgttacaatcatagcatgaaatgcttctattcataatagctttgcaagttgatttataagtttaccattgttaacttgataaggcagaaaaagtatccatagtgtgwggcctctagaatcttcaaaactgggtttggaagctaattctggttcttaggcaccataaaaattacttgacttctttaagtttaaggttgatttttttcatttcattaaaataggtgtaataccaccattactaataggagtaattatgatatcaacgtattataacaacatattaatagtagtaggtaataataatagtagtgtgaagtaagataata

SEQ ID NO: 313991 - DNA, 508 bp, Homo sapiens
actcccataaatatgtatcttgtttatcttagtgatatacaaaatattttctaaagctgtatctacaaagtcaacatgaacagaggtgaaacatgggaataattcatgacaygatatgtcaatatatttaaataaatttatttcttgtgtgatttttctctcacttgtgaagacataaacaagtaaagtgcttgatggtctaatataatttatcataaaaattaattctgtgtgaatacaatgaaatttcttgttaaattacctttgctgagatattaaggttttgttttgccttatcaggtcatttgcctttacagaattatttttgggctttttagatcagtttataaaactgaagaatacaattataaaatgacatgtttaaggccatggataagaacagtaaattattatcaataattattataatagctacttcttatatttggatttatatagtatgcatcttcatctaactactagataaatttaatgctaattccatgca

SEQ ID NO: 313992 - DNA, 618 bp, Homo sapiens
tgtttgaagtggcttggattaatgctctggcactcgatgccagcttcctcatgaagctaccctagaagcagtttaaggaggcatatttttaaaagaagtattcctctatcttatttccaagtcctactgtctaccttggactctatttcatttagctgtgtttgggcctggttatggggtcactttctcagcaggccttcatctccccaacactggggctctgccatgttcttgcttaccttctccctagggctgtattgtttattcaggtttattgtagcataaatgtagcattttaaagctgaaaaaccattaaagaatcaytaaattcaatatcctcctttcaggagtgtggaaaccagaggtaaaatcagaggtcaaattttcccaattaagcactaaaggcgtggcttgagtattgcacatcttgcaatacttttcttttccttctcaccgtgactactactagtattactagtgtattttgtacaaagtaagttcttcctcacctaacatatatttcctcccttctcaattatactttctttctgtgtgtatcttgtgtcttgtcccaccagcagaaagatatctttcttgaacaaaatgcaagtctgtagc

SEQ ID NO: 313993 - DNA, 602 bp, Homo sapiens
catattattttaagtctcaatccagttgagatcagttgattgataattattcatcagattttggctctatgcacggcaaagtcaaatattaagggcagaagacaggttatgtttcaaaaatgatcctatgttgtaattgcacaattagtactgtttccaacccttttctcagtttccagtgttagggtggacagataatttacaaaatgccttgacgctcaacattcctccacagtctagaaggggtagaaggaaactyacaaggtcataagaacttgtccaccagaattcaaatctcgggagtatggccgagtgcaaagctgcccattagcagagatgaaggtcctcagttctcgccctgcaggattgggcagctgaggctctgctcctttagccccagcttgcatgatatgttagtgaatgaattctaaagataaaagacatccctgaaaaccttttaataaaagcaaggtttcggactaactgtacgaaaacaagataacaaacgggtgagcctttagaaaaggaaaattaagtgccttcagcatttctgaaaaacagtataaatagcctgcttgggtttttactgtgctacatgttgt

SEQ ID NO: 313994 - DNA, 602 bp, Homo sapiens
catattattttaagtctcaatccagttgagatcagttgattgataattattcatcagattttggctctatgcacggcaaagtcaaatattaagggcagaagacaggttatgtttcaaaaatgatcctatgttgtaattgcacaattagtactgtttccaacccttttctcagtttccagtgttagggtggacagataatttacaaaatgccttgacgctcaacattcctccacagtctagaaggggtagaaggaaacttacaaggtcataagaacttgtccaccagaattcaaatctcgggagtatggccgagtgcaaagctgcccattagcagagatgaaggtcctcagttctcgccctgcaggattgggcagctgaggctctgctcctttagccccagcttgcatgatatgttagtgaatgaattctaaagataaaagacatccctgaaaaccttttaataaaagcaaggtttcggactaactgtaygaaaacaagataacaaacgggtgagcctttagaaaaggaaaattaagtgccttcagcatttctgaaaaacagtataaatagcctgcttgggtttttactgtgctacatgttgt

SEQ ID NO: 313995 - DNA, 417 bp, Homo sapiens
acagctgtgagccaccgtgcccggcctgctaagggctttatatatattatttcctataatcttcataacactgccaggtgggaatttctgaagcttgtgactccacgttgcacagctagcgtgcagaggatgacacacctgagcctcctagggcccttgccctgtgtcaggacatcccagcagctccctgagacgcagcaagtgacgactcctgggaagaagccagtctcagtgggcaggcgtgaagtcagagtcccaggcaccgctctggtcccctcactcctgtctgtctctgtcyctcctgcagctccagtaccagggcagcccctttagtgaccctggcttctcagcccctgagctccagctcagcagcctgcctcctgccaccgccttctttaagacctggcacgccctgga

SEQ ID NO: 313996 - DNA, 528 bp, Homo sapiens
tccagcctgggttacagagtgagaccctgtctcaaaaaaaattttttttcaaaaagtggaaaacgcaaatctgcccttgtggaatttacattgtagttggaggaacacagtaatgtaatagggaagatattagggctgtaagtccagctgcgggcagctggctgtcaagatgggacaggtgtggatcagaagcagagatgagtaaaggaggcaaggacccatgagcaccagaactcagtcaggaatcaagaagcccaagggtggctggagacgactggataacaccagtccccttggcatgacatcaggcagcatgcgtggcatttgtgtatgtgttgggcagcacactttctatgctgggaggcccacagctgggatgagcccatgtgacctgacagctgccctgtgggcaggcagagtgggggggctattgccttcaatcataaacraggcttctgaggctcagggagaggaacagacttgcccagggtctcatttccagttagtgatggagttgggttccaatcc

SEQ ID NO: 313997 - DNA, 573 bp, Homo sapiens
gactattactaaacaactcccatataccaagcactaatgaagactacagaatcacgaattcctgtaggcagtagctggagcctgcattattcaaacactccacaagggagtcctttgaatacgcccaggttgagagtcactgattttgtacctgaaaaggtatcctaagactgttatgctttatgtaagggatatatacagttgacattttaagtaacaaagttcgaaaacttggaagagaagaaaaattgattatgaaggcgaagtatytgttttttttttccttgtttatttttactcaatgtagatgattgggataaaatgtggaaggggaaatgtttaaggttttcatgggtatgtaggagccacactgggccatctccttttgattttgaaaagaagataaagccctcctgctgacacattaaaccaggggagactgaatgacaaagacactggacagtgagggactgggatgagggttaggtgtgggagagacaccagctttaaatctgggccctactctacctattcaacctccagcagtcttgacagaaacctttgagccaaggt

SEQ ID NO: 313998 - DNA, 461 bp, Homo sapiens
acaaaggaaaacttttgaaatattctattccagcttcaacatgatgttgttttcttctgtgctgttttgaaaatgagccaggatgtaaacgggctgtgttatcttgtatggaactgcctcaggcaaagtattcccattaagcaggaacagatccaggtatggggtgggggtgggggcctgaagctgattccatgtggaggactccctttaagtatataactttatgaattcatacttaagtggaaagccaggcacagtggctcatgtctgtaatctcagcactttgggaggctgaggttggaggataacttgaccccaagagttggagatcagcctgggcaacatagagaaactgtctctactacaaataaaattwaaaaaaaaatagccggacatggtggcacaggtctgtagtcccagctactcaggaggctaaggaggcagaatcacttaagcccagg

SEQ ID NO: 313999 - DNA, 558 bp, Homo sapiens
gttattaagtaaataccattttggtgaataaaattaaactaaacccacatacatgaaatgacttatttcccttccttgaaatcttattaacataacactaccagaaaattaatcaacaccatacaattgttaaatgattaataaaaacagtgattataataattccaaattgagagtacttctcattcaaagtaggactatgagttctgtttggatttttctgccagtatgaaaaaaaaatgtttataaatgcagaractgtttgtaaatgcatcgccttctatgccactatagaggttagataatattccacaaatgggtgatttctaccaatgggttttagcaattttttcttcttttccctaaattaaacttaatatacaaataaatggtgccaaggctgaaagaaaaaaaaaattaggaaataaaacaaccttttgaatggcaagcttaacatgagaaaaaaaggaaaggtagataattacaatttatatcgacacaataaactgccagtttttcagctgactaaatgctagtctagctcattatgtagccatg

SEQ ID NO: 314000 - DNA, 603 bp, Homo sapiens
accaatgacataaacacagtaaaagaaaatatgataatctcaaaatctcacctttcaaaaatttacctccctgttctgatgttatttaacagctgcacggtctttgtgagttaagctacttcaaagttctcttctaaatacccacacaaaaaagagattctgactctggagttgaggaaagagtggtaaggcagagagtaacattctaatcaggcgtgcatataagaaatggactagaatatgaatcataatgaataataagaaagacattaaatttattyggatgttcttttccttaaattttgatctttatcaattgttatatgcaaagagtaataacatagttgaagctttctattttaaaatattttaataaagattggttccattgtttaaaaatgatacccaaatcaaaatttcatggtttggaatctggatctaaaactaaagtccttggcttatggttcaaactccagaccacaaaccaaagtactgtggctcatctggtagcattttatcctattatcaggacaaggatccagggagaactctaacattacatttgcaaacactgatgacaagagtcagtgtgaagcattctat

SEQ ID NO: 314001 - DNA, 639 bp, Homo sapiens
ttgcaagtattactattagttactactaagggagagtgggggcttttacctctaccatggaagaatgcaacttcttttaaatacactggattaaattacacatacagccatggctgcaaaagaacaagaaaaaacagcattgtaagtcaagcttttgtgttacaagcagttacaaactgaamagacattcaagaaaatcttgaatattcaagttctatctgtatttttaaaaaaggagaagaaaaggaaaatgtttccaagctttaaatgtcacaagttcacttctttcctagagtcttatacatcaaattcaaactcagtcacagtacaattaaatgaaaaaaatgtaaaactaaaaaacctccttgaacatgcaccttatccagttagttgtttcactgcagtaattgccaaaggacataaagatatctgctcatttctgtcataaagacaggcaaaatgaaagtgaacttttagctgcctattactcaaattcctgaaccatctttcgaaaggcataaaaaataactcttaccttagtgattctgatagaacctcaggttattcaccagacattatgaatctacttcaggcaatgaaattaatatttcagtaagtcctcttccatgaaacaggaag

SEQ ID NO: 314002 - DNA, 555 bp, Homo sapiens
ggttttttttttaagtggaaagtgtgggaaagattcacaccccattctatccataacatgggygatgttaaagtcatctgcatttggcccactttcatgtgtacatttctttgcagtgaagttctccatagccaggccaatctgagaaaaccctagctgcaaaatccaccctagcatgggacggtaccacatgaatcacataacacactgctcacccaatcacaacagcaactgctatcattaagccaccacttagaaccaacagagaatttcaaaccacaatcaaaaatagatttcagaggtccaaaatattgatcacatagacttaaaaaatcaacaaaatgtcatgtgtgataaatgctctaggtttcaaaaaagaccaagctgatcctgctaccaagatatagcctcattttgctttgaaagaaaacacacacagacttacatagaatttatctgacaaaaaaaaaaaaccctgatatttatactgtcattaagcacatttgtcactaaatttaatctgtgtcatctggcatactcttagatgtttacaat

SEQ ID NO: 314003 - DNA, 597 bp, Homo sapiens
aaatctcttctctcttctctcctccatcccctcctcccttcctttccttctcagattcaaatctccacgtcacaccagaacatcattcaagcattcagtaaatgtgaagagaagttcagtgtctgctggtggagaagaaatctgggctctgtttgatcgatactgagatgtgggcacctcggtcctcaattcctagatggcgggcttcccctttccaccacctgagtttgccgcctggatccaggcaaagtcgtctgcagtctttctggccgcttctctgtctctctgcttttattttaacttagcctgggcacaatcagagaatctaatcctagcaacaaagccaggagcacaaatccaccgtgatgaactgrtaggcctgctcccccgccccttcctcccactaccccggactcgcctttgaaaagactagcgtcggggccagaaaattaatatgtccgaggcaagtgggagaaaagcggcagaaaacaagtggccacgagtggtttgggttttgttgctgttcatgtgtatcttttaaacattaaggacccacgcacaggaaccccagccgctcaagccccgggtgggcgcgtc

SEQ ID NO: 314004 - DNA, 543 bp, Homo sapiens
aattgatgatgacccctcactttgggtcctaagaaattggatggatggtggtgccatttatggagattggaaagactggggtaaaagtgggtttaggggtatagtggaataacattagttctgtttagacatgtatgtatatgatatttctcaaatatctaagtgggagtccaaytggatatatagatttaagaatagccaatatataatatttatttatttatttatttattgaggtgaagttttgctcttgtcccccaggctgtagagcaatggcacgatctcggctcactgcaacctctgcctcctgggttcaagtgattctcctgtctcagcctcctgagtagctgggattacaggcatgtgccaccatgcccagcaatttttttttttttgtatttttattagagacgaggtttcaccatgttggccagactgatcttgaactcctgacctcaggtgatacacccgcctctgcctcccaaaatgctgggattacaggtgtgagccactgcacttggccccagtagatgatatttaaaa

SEQ ID NO: 314005 - DNA, 614 bp, Homo sapiens
ttctgccatccctgagcagagagcttgctactcgaggatgggcaaaaaggctttttcagccacagacactccagactgagaaggctgaggctgttagagtggaaagggacgtgtgtttctcaaaggcaaaatgttctactaaattccctaatataamatatacccgctagaattaataaaaggaatgaaaacaccctagattacacttaattttctgacacagacagtgataaaagctgaaaagtacctatcaactgaggccacacagctcaatatgcctccctaatgacattttatcaaagaggatttgtacgtgtcaaacacggaataaatagcattttggtcctgaagacacttcctcagctcctgcccatactaaagagaaaatacattgtcgagggtatttagacactttttcatagtgaggccaggttctcaaactagagaatgaaataaaccatatgaatggctcagagagctacttcaatgaatttcgaagagaaatgtctttttcccttaatgaaacactagttggtattcctttaaaagaggcatttagaacctaagataaatctccttgcaagtcaaagtcttggaggaaaatattacaaatt

SEQ ID NO: 314006 - DNA, 646 bp, Homo sapiens
gacatgatacaatgggcaaatgcttcataatttgttcatttttaatcattttgaattaaagttaaaattataagcatgcaaatatatatgcatctctctctctmtatatatatatatacacacacacacacacacacttatattcaaataccacatttatcactcaacattttagaataaatgaaattttactcagaagatccaatattcacatctcctgtaatcttcacatcagaaagaaaatttcagaggaaggaagaaaagtttttcacaaatccttaaaaatctttataaagcaatgatacagatattgctcccatagcattgatatgaaatctttttcaagaaatcaattttctatatacaactgtctaatgtaacacaagggcaaacattatataatatgtgtgtgtgtggtgtgtgtgtgtgtatatgtgtgtgtatatatattccagaccaaattccagactctgctatgacataaaaaccccgaggaaaaccagaataagtgaatcgagaaaaaaaaaatgatggacagaatgcctagaattgtcgacaacactcaaccctcacaggattaacacagagaaatgctgaactacacaaatggtcaactctccagcactgagctgtgaatactggaaac

SEQ ID NO: 314007 - DNA, 621 bp, Homo sapiens
ctctaaacttattttctcaatttaaaaatgaacctaacaatacctacctcatagaattgtgatgagcttaacataacatatgcatgatgcttttcacaaaacatcctacggcccagagtaaatccataataaatattaatgtgatacaaacctttaaattatgattaagcttcaaagaatctcagcaccttgcatttagaaagggcttggtttacacatgccaaatgatacatggattttcttttggtttcacactttggttttctaattccctatctcttttttatttatctccttatttgttcataatattaataactcgaattttatcttatgacccacagtgttttatcaactctataaatgagtcacattttttcatatatttttcatatatatatatataaacaattgtgatcactggaaattcctaaactttaaattccaaatatttaaagyattccctctgttgctgagggaaatcaggagcatttaataatgtgtgtagattaaatagtgtatactcgtttaagggcgatcttctctggacacccatttgcctcctggaactccatgtcctattccataaaggacctatttactgtgccaaaagatagatcc

SEQ ID NO: 314008 - DNA, 603 bp, Homo sapiens
gtgagagcaccaaggcccattccacagaggaacagctcagagcagaaacccaggaaatatgcaaatcatattaagaacaaagggcaatgctgatcactaggaagttagtgttttacatgactaattatgccaagttgacgatagatcaactgaagagaacctccaaaaagaagagggctcaaatctatagtacattggtaagagcaaggggagcagaaggcatcccagagatggaagagtggaaggttgkgtacatggtgtgatgaacttgtttgctgcctctgagtagatgcatttcttagctccactcagaaacagggaacagggagaaccagcttcagcattacagcaagaaacttggccagacttgtgagggtcctgcctagggcctcccagcactgcccaaaggaaagaaaaggcatactgcaaggcaccctgggcaatgggagagaggcaagtgagcctgcaaaacagtgcctgattcaagcaaaaggcagcagtaaaaggaaggggtggcaataattgtaacaggagcaggaggtacccaagctttactagtggtctcagtgtgatagtcaagctgcctaggaaaagccaaatgga

SEQ ID NO: 314009 - DNA, 591 bp, Homo sapiens
agtctctgtccccaaccactccgtaaaggatgtcgtccccagtcgaagagccgccgccgccgttcactacatctcaccctgaccacaagccccgcaagcccgagtcaggcgtggggaacggacccgcagactggtaaccctttccctttcctagcgaaagtggaggctgggctccctctctgcgccgcgcctcgcctagcgatgacccaacttgcacctcggggtcccctaagtgcatcatccatcggcatctgaacatcccccactgcgcccgagaggcaccggctgccaagcaggctcgccacctgaaccttctcatccacctgcaggggcggctgggagccggggatgggtgcactgatccgcaacccccctcgcaacccctccccagatcctcagccccaaacttggccaactctccgtgtaaacctcccggctcccgccgcggggccaagccaccctcttctcctgtttgcagcggtagcaacggcggctcggggctgcgcggaggttggaactttacaaggtgaaaagtttcccccamgcgcttcgtcggctctcgcctccccagcccacctcgcagcccatttg

SEQ ID NO: 314010 - DNA, 586 bp, Homo sapiens
tgacacccctcccccagcttttctggaatctgtttccttactttctttcattttatccaacacctatctgcccttcaaagtccaccttgattgttaggttcatcatgttcaccatctcactactcctcttcacttcagaagaccacacttaagtctctaccagcaatgtaacatgtagctaccaattgattggtttacttttcaggagcacatgagttgtgtaaaataagaaatacctctaaatgttcatttggatgataatgattcttaaatgcaagacttatgtacatttatgcttgcttataaccttttatttttcataattccagttttctagcaactctcctaggttaagaaatgaagaagttggattaggtatctcatctttagaatgttttcaccattaagatttgaataaattttcagartgcatagttgatcacgtttatgtgtgtgatacatataaaatatgtgtgtgatacatataaagtaacaatattttttaaaaagaatctcatatcttattaaatcaagtactgaatatgaaaaagaggccactttgttgacacatgacagaatacttttt

SEQ ID NO: 314011 - DNA, 475 bp, Homo sapiens
gtactccaaactcagaatcacaccatatacatttgtaacaaacctgtacatgtaacccctgattctaaaaagtcaatcttttttttttttaaaaaaaaaggtaaacttgggcaacatggcaaaaccccacctttactaaaaacaacaaaaaaattagctgggcctggtggcacaagccygtattcccagctcctcaggaggctgactgatgggagaatcacctgagcctgggaagtcaaggtgagctgtaattgcaccactgcactccagcctggcttatagagtcagaccctgtgtcaaaaaatagaacactaaaattctaacccacagaaattcctgaggggaggaggagtggctgggtaagagggcttgacctttctgaagcgattggtgaatgagcttatagttatgtattttatgttaaagttacatgtttaaggtatgcattaatcctttaataaacttttatgagtaa

SEQ ID NO: 314012 - DNA, 499 bp, Homo sapiens
ttttctggttccttccctcagtgggaatgagaggtgagtggaaacacaggagggcagtgaatgtcattaaatcagtgaatatatctagaatatgaattagggagtgttcagagaagttgaggctgcatgctgaagacagaagactgatgtcttccatttttaatagggaggaatgagagtgcagagtgtaagagtgctctgcagactctgcttatgtgttgcatgtgcacagctaagattacaacttctaaaaacggtttatttttctagttagacatacaattgcatgtacatctgatttttggtaaggacaagctattacttattgatgtattattattaatattgttattattttgctaaatggttagtcgttctattgtggaaaaaagcgaataygctgtgcaagcttttatgtgtaggaatgggaaagaggatactgggagaagtaatgcacatttcagatggttaagtgctgaacatgttctattgaggggag

SEQ ID NO: 314013 - DNA, 620 bp, Homo sapiens
actaagagctcatttgccttttgctattaacgcttgtggcatctgttagagaaaagcgactcctggtagtttagactgcattaggtgtgtagcctgaagtattcaatgcatcaaactgacttcaagttgactcattactccctcttgaacaaaagacagtatgtgtggaattctgattacagcttacatcttcagctttaagaagytgccctttgagcttgctctgtaaatagtgattaggtgcaaaccttggattttggtccttcaccacccagaatggtgcctgggtactgaagaaaagagcttttcccattgcagaagcactttaaacagtagattctttagcagggaaactaaaataggtttcctgttcttcaaatgggtattttaagtgctttgcaggtgtatcttagagaacggaggtatttatttttaatgagaagaactgaagaataaaaacaatcacagccttggagaattgcagatcaaagcttttttttataaaacaaatgaaggcctccatcctacgagctagtaaattcattaatttttaatagaggaataggctataaatggtaatttaattcttttggcagaagatcgtttaagtggtgtttaaa

SEQ ID NO: 314014 - DNA, 598 bp, Homo sapiens
gtgcctgtcccataataagccatcaggatattgaataaatgaatgaatgctttccagcacaatctgctttttcatggccaaaaggttctgttttctgtggcattaacatttaataagagaggccaggcgtagtggctcatgcctgtaatcccaaaactttgggaggctgaggcaggtggatcaccagcggttaggagatcgagaccaccctttccaacatggcgaaaccccatttccacacacacacaaaaatacaaaaattagccggtcttggtggtgggcacctataatctaagctactcaggagattgaggcaggagaatcgcttgaacctgggaggcagaggtttcagtgagkcgagatcatgccactacactccagcctgggcgacagagtgagactccatctcaaaaaaaaaataataaataaataaaaatatattttaaaagaggtattctgagaacactagcagaaggagtagattgagtttatgtggctttctttagctgcacaccagccacttgtagcaccaagttacttctctaactaattggagaatttccacataattagactggtgatattttaaatactaatt

SEQ ID NO: 314015 - DNA, 598 bp, Homo sapiens
gtgcctgtcccataataagccatcaggatattgaataaatgaatgaatgctttccagcacaatctgctttttcatggccaaaaggttctgttttctgtggcattaacatttaataagagaggccaggcgtagtggctcatgcctgtaatcccaaaactttgggaggctgaggcaggtggatcaccagcggttaggagatcgagaccaccctttccaacatggcgaaaccccatttccacacacacacaaaaatacaaaaattagccggtcttggtggtgggcacctataatctaagctactcaggagattgaggcaggagaatcgcttgaacctgggaggcagaggtttcagtgagtcgagatcatgccactacactccagcctgggcgacagagtgagactccatctcaaaaaaaaaataataaatraataaaaatatattttaaaagaggtattctgagaacactagcagaaggagtagattgagtttatgtggctttctttagctgcacaccagccacttgtagcaccaagttacttctctaactaattggagaatttccacataattagactggtgatattttaaatactaatt

SEQ ID NO: 314016 - DNA, 619 bp, Homo sapiens
ttctcttgtgccttgacaagggtaaacaattcctgtatcttgtctgtccttggagggatttgtctgtttctggaatttatttctcatggttgccttatgactttggatctctgataggttcaataaaagttttgattttatatattatctgacatgtgctgttgttattaggatgggaacaacaatctcttctagatttccatagttcaagtggaagcagggtttgtatgatttactttcttgatacagcattgtatttttaagattcattcatgttgttgcatgtagctgaagattatttattaccccaatgtatgatattctattatgtgtatataccacaatttatttatttcctataaataggcttttgggcagtttctagttatttatttttatgaacagcattgctttgaactattatttatagctgttggtgtgcctttgtaagtttttctaacttccatacctaggaggtattgttggattataaatatgctattgttcaacattacaaaataatgcctttgctttcaattttcatgtatgcctccacaccttttgagcaataaagaaaaagcaaacatatcaartatgtttatcctctttcctttcagtt

SEQ ID NO: 314017 - DNA, 611 bp, Homo sapiens
tattgcaattcattaatttaaaaataagataaagaaaatattttgtcagcagtttgctaaatgttcaccgaaggaattaagctttatttaaatagcaccaagttctgcagtctacttcctgagttgtttatctttttaataatgaagcggcactgaaatctttccattacagtgatgttttcattgtgtgatacttgctgttggggcttagaagaatatttgtgctttctaatgtagaatgttttgttcatatatatatattttactgwcaagctaaaggaaatagtaacacacaaaatgaaaaatataactagtttcaaaagctgaagcagtaaaagtcttttttattgcaaggataaagagctggaataagaagagagagtgaaacttattaatgaaataggatcaagtatgatgaggttgcactttaatattggctgaggatttgggctaagatgaagagtgcagagactgttcttgtctgtttttagagacagttgatcatttcattaaagtctgaggctgtttctcagtctgtaggaaaaaaaacagtttatccttctttatttgacatactcacaaatagaaaatacctgtttgcaggtcagaga

SEQ ID NO: 314018 - DNA, 623 bp, Homo sapiens
gtgtattgcttactttccacatatatgtgagttttcctattctccttaacattgatttctagttttatattattgtggttggaaaatatacwtgatatgatgtcaatccttgtaaatttgtttaaaattgttttgtggcctaacatatgatctctcctgtaaaatgcatgagtatgcttgagaatgtgtattcttctgctgtcagagtgaacgttctgtaaatgactgtcaggtctatttggtccacagatgattcttggctttacaatgattcagcttacaactttttaattttataatggatttatggggaaataacccgatcataagtcaaagaccatccatatggtgttgtctagtgtatgctttccttgctgatttcctatctggatgatgtatacattgttgaagtggggtcccctactgtaattgtattgctgtctatttctctatttgtttgttaatatttgctttatgtatttagttgccccatccttgagtgtatatatatttataattggtatatcctcttgatgaattgacccctttatcattataactgccttctttttctcctgtgacagtttttgacttaaagtctatattgtctgatgtaaatatag

SEQ ID NO: 314019 - DNA, 623 bp, Homo sapiens
gtgtattgcttactttccacatatatgtgagttttcctattctccttaacattgatttctagttttatattattgtggttggaaaatatacatgatatgatgtcaatccttgtaaatttgtttaaaattgttttgtggcctaacatatgatctctcctgtaaaatgcatgagtatgcttgagaatgtgtattcttctgctgtcagagtgaacgttctgtaaatgactgtcaggtctatttggtccacagatgattcttggctttacaatgattcagcttacaactttttaattttataatggatttatggggaaataacccgatcataagtcaaagaccatccatatggtgttgtctagtgtatgctttccttgctgatttcctatctggatgatgtatacattgttgaagtggggtcccctactgtwattgtattgctgtctatttctctatttgtttgttaatatttgctttatgtatttagttgccccatccttgagtgtatatatatttataattggtatatcctcttgatgaattgacccctttatcattataactgccttctttttctcctgtgacagtttttgacttaaagtctatattgtctgatgtaaatatag

SEQ ID NO: 314020 - DNA, 558 bp, Homo sapiens
tttgggcagcatattggaaagtgatatatttacgaagacctggaaaactgagtaaaaaagaatttttcattgtgtttgttaagtggtattgccatacagaaacagcagttctctcttgggctttttcgttttagacgcatattaaatacacaagtgaagcagtctgtagatatacagtcaagttttaatggaagaatcaggggaagaggcacaaattgggcagtctccagcatatccaagaaacacagcatagaaggagaaaggaagagaccaagatctaagccattatgtattccaacatctaataggccaaccaagaaggaaccagctcaaaggtgaagaaggaatgaccaatgargtaacaagaaaactgtgggagggtggtatcaagaaagacaagaaaagagagcatttccctaagaaggggatggtcagattatctagatactgcttagaagtcctgtacaatgagaacaagaagtagccattgaattcagccagatagaggtcgctggtgatcttgagaagaggagtttcagtcgagtgtttagtgtggaa

SEQ ID NO: 314021 - DNA, 632 bp, Homo sapiens
cctttctacactaagttgtatggttcctttaatgggtgtgagtgtatatacaatccaaagatgaaaatgtgcaaataatgaaggtctttaatcatgccttcaatatccatttaacaattacctatttcaaactcaaagcctgagtatttacctgaagtgcagtttataaaaacaagtggttttcatcctgcctctgaccagaaataaaaattttacaattcaaattctgatgacaatttagtgttaacatgagtgagataacagattcctcctctcccactgttctgttaatggaagaagaatgtagctaatacccacaagttgcatgaaaaagacaagagtgtcatgtaatctgatttcatataccccctggctctaagttttgtggktgacaacaaaaaaaagcttcttcaatctccagtgtagttcatcctgttagtgttgagacgacagaaataagtcacagagacacatcacctgcttttgtaaagctatgcaaaatccaaagataatacagaagatgcatgtagtcctagcaaacatcgacctgaaatgatttgaatttatccccatttctcttctatcctgaaggaattgctcattaaaaatttactctgggccgggcacggtgc

SEQ ID NO: 314022 - DNA, 511 bp, Homo sapiens
atttgctcttccaaatttgaatcagatttttggtgattaatagctcttttcctctggtactgttttaggagtcagtttgaaacaacgtacttttcttagtacattttccactgggggagtcattagtattaatggagcgctgacatcattcatacactgaaacccactatgtgcctagtggccagtgttgggcagctttgtggtataaatggttcttgacatcaagaagcttacccacgaacggagcactgcacttgggcttaggaacactggctctaagggatgtcaataawctcttcaaccatactacctttattttccgttctttgctaccctgcaggcctaggaaattttctggtgactgccagtctgggtctagtttctgtgttctccctggcaattggtctttacctctgtgatatcacttctcacacagcttcatcctcatcttttatctgtttttgtgtctccagtgactaggagcctctttgggataaaggctgatctttta

SEQ ID NO: 314023 - DNA, 447 bp, Homo sapiens
gtgaggtgtttgggattgaattcccaaataattgcttcaattagccaatttatttcacttaggtaggcacagctggaggtaatagcatccactgtatcctaaaggtgttccagcctcttcccctcaggttgaagccaactacagacctgctgaggagggggaattaaccacttggcgagagaatagagccagtatctgcacctatttggccacgttaacarttttctttcttctacatcctggttcttttgatcttatgctactaaggtctggcctgtgagtcatagaaggaagtgctttcccatatagtcaagcacacttggggagcatctccccatagttggaatcataatagaagaagggaagtaactggaggaagttcagctgtctattgtctcagctgctttgattttcctgttaagtggcattttgcatgaatgtgaactg

SEQ ID NO: 314024 - DNA, 447 bp, Homo sapiens
gtgaggtgtttgggattgaattcccaaataattgcttcaattagccaatttatttcacttaggtaggcacagctggaggtaatagcatccactgtatcctaaaggtgttccagcctcttcccctcaggttgaagccaactacagacctgctgaggagggggaattaaccacttggcgagagaatagagccagtatctgcacctatttggccacgttaacaattttctttcttctacatcctggttcttttgatcttatgctactaaggtctggcctgtgagtcatagraggaagtgctttcccatatagtcaagcacacttggggagcatctccccatagttggaatcataatagaagaagggaagtaactggaggaagttcagctgtctattgtctcagctgctttgattttcctgttaagtggcattttgcatgaatgtgaactg

SEQ ID NO: 314025 - DNA, 394 bp, Homo sapiens
gatcacatcttttgacatttgctttgtggatttgttctggtgtgtattcattttacttattaaaccattaccttcaatttttatttatgttggtgactgagatttttggtgcctcttaaatgttgtgcctgaggccagctcccctcccccatgccctggccctgctggagagagaacgacagcaattctgtttcctaacgcagagttaatgcatctgctccagcagcagacggggagggtgtgcttaagtttatatcctaaagttatttgctcaggaatgtttaytgagcacatactgtgaaccaagtcatgttctaaccccctcaaggagtttggaatctagtgtgagatgaagatgtcaggatctcatagcacaatagagccagggcagtga

SEQ ID NO: 314026 - DNA, 648 bp, Homo sapiens
aattgtttgaaaatttattggggggatttgtctattctcctcattcatgtattcaatcctttatttatatatgagtggactgtggatatttattttctgccatggcttataacccaacactagtttattccatttctcacattgttatagtcttgttctttgagaatgcttcctactggtttcagtgtctctctggcatggcccaacatgctgttgtttgtttttcttttatagaacttccttcagctcatcttgtatatttcctgcccagttttataacctgctatttctccaaagagccttggatcgtttactggagaagggtgttagaacaaagagcaaccaagagcygagcattaggggtgctttttgctactgggatgccatttcttttagcccctctcagctgacagagcaaggaaatgtctaccaaaccctgcagattcacgtacacttatgtatacatacgtttctagacctatatatccatatccatgtgaagctaagcatgagttctgtatctatgtagctgtatctatttgaagctaagcatgagttcatactgatgtctccaaccctaatccagggccacaagcaccatgccggcctcctgctgctcctacctcagcagtgagaagctgctgccag

SEQ ID NO: 314027 - DNA, 648 bp, Homo sapiens
aattgtttgaaaatttattggggggatttgtctattctcctcattcatgtattcaatcctttatttatatatgagtggactgtggatatttattttctgccatggcttataacccaacactagtttattccatttctcacattgttatagtcttgttctttgagaatgcttcctactggtttcagtgtctctctggcatggcccaacatgctgttgtttgtttttcttttatagaacttccttcagctcatcttgtatatttcctgcccagttttataacctgctatttctccaaagagccttggatcgtttactggagaagggtgttagaacaaagagcaaccaagagctgagcattaggggtgctttttgctactgggatgccatttcttttagcccctctcagctgacagagcaaggaaatgtctaccaaaccctgcagattcacgtacacttatgtatacatacgtttctagacctatatatccatatccatgtgaagctaagcatgagttctgtatctatgtagctgtatctatttgaagctaagcatgagttcatactgatgtctccaaccctaatccagggccacargcaccatgccggcctcctgctgctcctacctcagcagtgagaagctgctgccag

SEQ ID NO: 314028 - DNA, 484 bp, Homo sapiens
tttctgcatgggtttcaggaaaggaccttcagagagtgagttccaccctgaggtggaaggagaaacagggaagatcagaaagtcctttgtcccgaggctgcttctcaggccttttcacttcctttagttcaacattctcagtgtgccaagtgccagactgtggagtgtcattttctgagctcataaaacccactgggaattgcacccatagaagtcagctttctatgaagtttgtatattgttattgtttcttccttaatggtttaaaagtattcaccagtgaagcatgctagatattaatcactctttatggaatatttttaaaagaaaattaaatttatgtaattactacaggcttattccagtyttctgaattttctgagtttggataatttgtttcattaagttgggaaaacatttcatcattctttcttgtcctcatcttcctctttccttctggggccctaattatacccaggtagtg

SEQ ID NO: 314029 - DNA, 567 bp, Homo sapiens
gccgattcttatcttcaggatcaaggccaagtgtcaacttcttggagaagtctttcccagctgcctaccttgtattcttagtagcatcaccacagtccggcggctgcacgtgctggcgctctctgcagctgacttgtgaaaccacggttttctcgtctattgcggagctcgcttgctggcgggaactctggtctccttgctcagccctgaccttgctggctagaccagagcctgtcacatagtagcacgctgaatatttgttgaataaagaaggcctagtttaaatsaatgttctctcctcaaagaagcctccgatctttatgggtgtaaagtagaagaagaaaatgactaagaaaatctaaaatgcaacccaagtcactgtgatggagaggttttcagcactggatcaactgcagtataaaacactcttctttctgaaccatgtgctgagggtcattgtaccatctggttcctgactttatctcttcagtctcatccttggccccctccccatgactcctctttcccttcatctccattcccttccttccttctccttattaaaca

SEQ ID NO: 314030 - DNA, 567 bp, Homo sapiens
gccgattcttatcttcaggatcaaggccaagtgtcaacttcttggagaagtctttcccagctgcctaccttgtattcttagtagcatcaccacagtccggcggctgcacgtgctggcgctctctgcagctgacttgtgaaaccacggttttctcgtctattgcggagctcgcttgctggcgggaactctggtctccttgctcagccctgaccttgctggctagaccagagcctgtcacatagtagcacgctgaatatttgttgaataaagaaggcctagtttaaatgaatgttctctcctcaaagaagcctccgatctttatgggtgtaaagtagaagaagaaaatgactaagaaaatctaaaatgcaacccaagtcactgtgatggagaggttttcagcactggatcaactgcagtataaaacactcttctttctgaaccatgtgctgagggtcattgtaccatctggttcctgactttatctcttcagtctcatccttggccccctccccatgmctcctctttcccttcatctccattcccttccttccttctccttattaaaca

SEQ ID NO: 314031 - DNA, 505 bp, Homo sapiens
taatttcactcctaggtatctatcttggagaaataaaaatatatgtccacacaaaaacttgaatgcaaatgtttatagcagtattatttattatagttaaggatggaaacaacccaatgtccatcaacagacaaatggataaacaaaatgtggcatatctaattaaatattatttggcaatataaaagaatgaagttcagatgcatactayatcaatgaaccttgaaaacattttgctaagtgaaaaaaagccagacacaaaagatcacatattatatgatttaatttgtattaaatgtccagaataggtaaatctatggagatggaaagtagattagtgttgcctagggattggggaaaaaattaggagtgataactatagggtttctttctgatgtgatgaaaatgttctaaaaatgaacgtggttgtgcttgtatatatctgtaaatatactaaaagtcgttgaattgtacatgttaaacgagtgaattacattatattaaa

SEQ ID NO: 314032 - DNA, 413 bp, Homo sapiens
tacattatgtatatctaggcaccaatttaaaataaattgtgtgatagcagtacagactctaggattcttaaaagwaaagttttggaactcacgtagatttaaaagtcatctaactcaagccatttacaaatgaaatcctgtagattctagaatctatgcttaactcctgcagctgggtagttgagtgttgtgaagggaaaatgacgtatcacgttagactgatatcactaaagtcatatggtttcaaacttcatgcagggcatcagttaatccttaaaatagcctttgttcagctctttttattttctctgctgtcttccagacctttactattttcagtcctcaagcctctgaagctattttcactctaggtggacaacctggcctcctgattaaacaagacaattgagctc

SEQ ID NO: 314033 - DNA, 384 bp, Homo sapiens
ttctatgccaccctgggaagaataatttttcagatttagtcagatttttaagaggacacattaattccagaggaaayaatccaggaaaattggcatgtgccatatcagagtagataggaaaatgaacagttatctccattaatcttcaaatttcaaagcaagtttgcatcctgggatacttggtcactagatattatcctttttatgtatcgttggaattgatttgctaaagttttaagaattttttcatctatgtctatgatagatattgctctatggctttcttgtaatgtctttgtgtggttttggtatcaggacaatgttgttctcacagaattaattgaaacatatatcctctgcttcaattttctgaaaaactccatg

SEQ ID NO: 314034 - DNA, 567 bp, Homo sapiens
aaaaacattagaaatcactcccatgattcaatcacctcctaccagcctccacctctagcactgaagataacaatttgtaatagttaattctcacacggctaataaagacatacccaaaactgggtaaattatacagaaaaaaggttcagtggattcacagttcagcatggctggcgtggcctcagggaacttaccatcatggcagaaggggaagcaaacatgtcctttgagcaaaagggggaaaagccccttataaaaccatcagatctcatgagaactcactcactatcatgagaacagyagcatgggaataaccaccctcatgattaaattacctcccactgggtccctcccaaaacacatggggattatgggaactacaattcaagatgacatttggatggtgacacagctgaaacatatcacaatttaacatgagatttgggtgggaacatagagccaaactgtatcattctagccctgaaccctcccaaatctcatgtccttctcacattttaaaacaaaatcatgccttctccacagactcccaaagtcttaacacattcc

SEQ ID NO: 314035 - DNA, 555 bp, Homo sapiens
cttctccacagactcccaaagtcttaacacattccagcattacccaaaatgtccaaatagtaggtctcatctgagacaaggcaagtcccttccacttatgagcttggagaataaaaaacaagagagttacttccaagatccagtggggatacagcaactgagtgaatgttcccattttaaaaggaaaatgttgaccagaatcaaggggctccaggccccaggcaactcctaaacccagcagggccctcattaaatcttaaagctccaaaataatttcctttgactctatgtctcacatctatggcacaccagtgcaacgggagggctctcaaggctttgggcagctctggccctgtggatctgcctgtcttttcctcatcttcctgtctttttctgagccttccaaactgtttcaacctctgcccattaccaagctccaaagttgcttccacatcttcaggtatctttataacaatgccmcacctctctagttttctgtattagtttgctgtcacattgttctcacatcttctgtattactttgttctcacattt

SEQ ID NO: 314036 - DNA, 609 bp, Homo sapiens
tctaatacataaaccataagaaagagttgtttctgttatttggtccacagaacagaagcttaaaaagcatatttcttgaatttcaggtggataattaatggtttatttttcaggtttaagttagactgattaaatcacttcaaggccttaaattattttcaatgacttctcttgttcatataatgttttaatttttttattgtgccttgtcattttgaccaatgctatgcagrattatataaactagctttataatgcagtaatattgataagtgaagatattaagtttcaaaaggatcttttattttgaaaaataaaactgaattttatagggtttgtcctacgctgtctcaaggtttaagattaaattctctttaaaagcactcgtattggagtttaccagtaatgtcttcaatctaagttctataaatatgagagaacctacttaccttccaagtaagttacagcaatacactgcttcaattctaatttattttttatttcaaggggcaaataaacaatgagttggcccagatttttagtgaaaattgtgatgtttgtcttgtatgttaactgtccaataaactgtgggtttatctaagtttacaa

SEQ ID NO: 314037 - DNA, 546 bp, Homo sapiens
tgtagtgtggcattttgatattatcatgatattggaggcaggtaacagatatcaacaaattctgccctgtcatttagtacttttgtttacaggatgactgaagaatacacactacaaatgttataaatgttatcagaaagaagttatgtattaatgggtaacttcactagcacaataacaagaagtaggtattgaaaaaaatctgaaacgtatcatggagtttaggctttccatgtaacctgggccgttttacttaccctaattttgaaataggcctattcagtatgttgttcagagggctattcagagaatggaaacccaaggctcacctttcttgagtctaagtacccactcagccaagtatatttagcaaaatagaaaaacyaaactgctttggtgactggactttgccaatgtctgaaagaaagaagtaacagaaaggagagtctaaagttgatcctgtacagtataaaacatttccccaaaacgactttgcttctaacacctatattgatgctacctcccatctgagaaagaagggggata

SEQ ID NO: 314038 - DNA, 620 bp, Homo sapiens
agtcttttctgttacatgggagtgtaaaaataagtccttcatgaaatacaaaatatttcttaatgagaatgttctttgtttcaaaattattgatggtcataactgacttcctatccaaaactatgcaacctggtaaaatccttagttagaaagacaaaagatgttttccacatgaggcctggactatgcttgagttattattttcactttagtaacaaccctttgtaattggataataatacacaaaataaaatgccaggctagttccctttagataggaattatagatatggttcagaaagtttagtccagtccctctagattacaatgttacatgatttctgtcctgcaataatatctcactatttcttggccttaacttgtcaagtcagacatttccaacttttttaatacctggaatactgaggatacacaaaccagaaatatatayaatcattttacttattctcccctcataacatggaaaaataaattgtagatggaataaagagccaaatatcctgtacaataatttttaaaatctatgttcaagaaagcataataaatggcaaaagctctctaaactctgcctttaaatattggtcattacagcatctgga

SEQ ID NO: 314039 - DNA, 581 bp, Homo sapiens
tgtaggtttatggtgcaataatgtagttctaggaataaatatcamttttgttcttcttttgatactccacagaaaagcgtagggatatttctataaagaatcatgattttaggctttggactttttcgatttttttctttgtatgtttttcaagcatattcttcctttgctttcttaccaacagtaccttcagattcagcttgtatctgtttatactgaaaatcctctatacgtctatgtagtatataattttagccctccttatatccttactttcttacactatggattaagcaaaatatttttaattacataaacaatcataacatgaattttatgtttatctgatgtacatgattcagagttatctgcttactttacttctgtaatccctctctataatgagtaaaatataatttaaaagttaaaactttatctgaaccgtaatgttgctgagtatcaacaggttctgatcaatttatattccattgatatcacctcacatttataatgtatagttaaaattcaattgaattcaaaatctttactaagaaatagtcattatatatttgtttgaaaat

SEQ ID NO: 314040 - DNA, 581 bp, Homo sapiens
tgtaggtttatggtgcaataatgtagttctaggaataaatatcacttttgttcttcttttgatactcyacagaaaagcgtagggatatttctataaagaatcatgattttaggctttggactttttcgatttttttctttgtatgtttttcaagcatattcttcctttgctttcttaccaacagtaccttcagattcagcttgtatctgtttatactgaaaatcctctatacgtctatgtagtatataattttagccctccttatatccttactttcttacactatggattaagcaaaatatttttaattacataaacaatcataacatgaattttatgtttatctgatgtacatgattcagagttatctgcttactttacttctgtaatccctctctataatgagtaaaatataatttaaaagttaaaactttatctgaaccgtaatgttgctgagtatcaacaggttctgatcaatttatattccattgatatcacctcacatttataatgtatagttaaaattcaattgaattcaaaatctttactaagaaatagtcattatatatttgtttgaaaat

SEQ ID NO: 314041 - DNA, 648 bp, Homo sapiens
ccctaaataataaactgattaatcactttttgtgtttatgatctagtcagaactttgttcacgtactgcactcattttttcaagtgatatttttcattagattcttctttagtatagagactttattaaggataaatttattattcataagagatccagaatcctaagtcatcatgaccatggctcagagtgactggcaaagagacaaaattaataaagatcagataaacaagtaaaaattaatgaataatccttagataaggtgaactttgcagttggattgatcaataataatgaagacatgcagattgcaagaggtaggatagaatgaaataaaaattgagacaatcacattgaaacagggcataaatactttaacaaagcatrtaatggatagttaagaccaagaaaacaactagaaactagagagctttggaagaaaaactaatcaggaaagctttaacagaaggtgttaacaagcaatacttttacattttaatcagtttactggtaatttcgagatcattaagtgattcttcttgggggctgtaccagtcaatcattcagttccactttattttatgtaatcaaacaacatttcatataattagggagcacatttctgatttcaagaatatctaattattt

SEQ ID NO: 314042 - DNA, 483 bp, Homo sapiens
tatactaggctatatatgttgttgtatgtcattttttcttgtagatgtgtatgtgtctgcagtagaataaatgggaaagaattgagccacttaggatcacctcagtattctatgccatatgattaatttgacgcctgttcataggaaacctattttatatttaaaatatctatgaataaatattttacaatgcataataaaggtttcaatagttgtaaacttttaaattcacacacttttatgattttactgtgtttctattttcaatatataatgaatttgctagttacacagtgacttctgttgactaactcaacagcttatattttggtgatttagagacatgactgcaaatactttgacattctaatcaaaccatagtccctgcccttgcactttagcaaggcttgtggctgtctcagcaaagaaaatatggtagaagtgrcagcgtaattttgaagactgtgttagaaaaggcagtat

SEQ ID NO: 314043 - DNA, 627 bp, Homo sapiens
aaaattacataaaataacatgtactattttaaccatttaaaagtgaacaattcagtggcattcacagtattgtgtaactgtcacttcaatctagatccaaaactgtcaccaacctaaaagaatgtttatacacattagacaatcactctccattcaagcttaccctatgttggttatatggcattttgtgttaaaatcattctgttgtatattagaagatttttttttaagacatacaaattatttttttcttaattctcttggtgttatgtatcacgtttatgggtttgcataggtttaaccttccctgcatccctgagataaatcccagttcatcatagwgtataatctttttgatgtgctgttgaatttgattggctaatatttgctgagaatttttgcatctatgttcatcagaaaaattggcctacagaatttttctatttttttaaattttttttggctccttctttctggttttgctatcaaggtgatccttatcccagccataaaaccctattttttaaagcattcaattccccttaatgttttggaagaaacatttttagaaaaatggtttatttttcaataatttgaataaaattagtacatttttatggagttttt

SEQ ID NO: 314044 - DNA, 654 bp, Homo sapiens
tttaaagtatatataattgagtaattgttggtcattatattttttgattcttacttttatttttaaagtaagtttcaagcaatgcagaaataaattaatgcctcttttccttaagaaagcaaatttcttttgcaatgatgccctttttgttcacttttgtagaaaattctgccctcttcagtgagttatttcaaagattttttccctacatgtctctgaaattcttttaagaattgtgataataaaaaccatacttctyattcagtttcccaactaggtcatgcacaaaccaaagcttttatcactcatggtgatataaatggggtctatgaagctatttaccatggagtccctatggtgggagtttcctatgtttggtgatcatcttgacaacacctctcacatgaaagccaaaggagcagctgtgcagctgaacatgaatacaattacaggtacagatttgcttaggtctttgagaacaggtatcaataatcttttgtaagtattactgctttaaaaggcttatctaccattgattatgttatatatcatactagaaaatgttagggccatactggaagactatttaaaagatcttccctctcaatctcaggtattatcatcttagtattgccattatcttagtattgcaat

SEQ ID NO: 314045 - DNA, 529 bp, Homo sapiens
aaaatgtgtaaagtgctaagatgagaacacctttggaagcttaaagaaaaatagtaggccaatctagaagacagtgtgcaggtaaaagtgttagaaaaagaccttgccagtgtctaacaatgtagggttctgtagaccaaataacagagttggattttattcttaaaataatgagaagccaggcaaaaatcttaatcaggggagtgccataatctcactttagttgcaaaacatcattctggctacagggtgggaaacagtaggagacaaaagagtaatctagaagccaagtgactagctatgaggcatgtcactcaccatgataaaattcctttttaggaacttagagatgttaattctcagattgcattttcacatctttcttrcagcacttaaaatggctcatgatgttgagcacgttctaatatgcctgttttagaactaatagtgtaatgtggaatgtgttcataatacaaaggataaatgcttaaggaatgaatatcttattttccatgatgtgattatttca

SEQ ID NO: 314046 - DNA, 510 bp, Homo sapiens
tttaatggacttacagttccacatggctggggaagcttcatgatcatggcagaaggcaaggagtcacatcttacatggatggccgtaggcaaacagagaccttgtgtaggaaaactcccatttttgaaaccatcagatctcatgagattcattcactatcacgagaactgtgcaggaaagacctgatatataattcaagaccttccactgtcttcctcccawgacacatggtaattttgtgagttacaattcaagataagatttaggtggggacacagccaaacaatgtcatccagtcttaggaagttcattatagtagtgtgagaatggactattacagtaagttggtactgaggtagtggggtatggctataaagatacctgaaaatgtggaagtgactttggaactggataacaggcagagactggaatagtttaaaatgctcaggagaagatagaaatatgtaggaaagtttggaccttcccagagaatggttgaatagttttgac

SEQ ID NO: 314047 - DNA, 664 bp, Homo sapiens
attgtattagtccattttctagctagtgataaagtcatacccgagactgggaagaaaaagaggtttaatggacttacagttccacatggctggggaagcttcatgatcatggcagaaggcaaggagtcacatcttacatggatggccgtaggcaaacagagaccttgtgtaggaaaactcccatttttgaaaccatcagatctcatgagattcattcactatcacgagaactgtgcaggaaagacctgatatataattcaagaccttccactgtcttcctcccatgacacatggtaattttgtgagttacaattcaagataagatttaggtggggacacagccaaacaatgtcatccagtcttaggaagttcattatagtagtgtgagaatggactattacagtaagttggtactgaggtagtggggtatggctataaagatacctgaaaatgtggaagtgactttggaactggataacaggcagagactggaatagtttaaaatgctcaggagaagatagaaatatgtaggaaagtttggamcttcccagagaatggttgaatagttttgaccaaaatactgataatgatgttgccaatgaattctaggctgaggcagtttcagatggagatgagaaacttttggaaaactggagcaaaggta

SEQ ID NO: 314048 - DNA, 559 bp, Homo sapiens
taatatgttatataaaagcatgcagagaaaacaataaatcaagatgtatatattcaatatttatggaggatattcataatataaacattggaagtaatccaaacatcttaaattaaggaatacttatactctgtgtatgtcataccatcacaatcattttatcaaacaaatattgttatttaattacactggcacccataatacaagtttagctggaaactgaggatctaaatgacaaatatagcaaaatgtcaacttatttwaagatgaaaaggtacatgcaataatattaaaattttcttaataaatgtcacatatgtacattatattatataaataaaataaaaaccataatgaacatataccatttttacattggtaatgcctctgggacagaaattataggagcattttattttctttttaaaacttttcatatgtttataaaatttcttgcattgatcttttttttttgaaatggggtcttgctctgtcacccatgtgggagtgccgtgcacgatcttggctcactgcaacttccacctcccacgttcaacag

SEQ ID NO: 314049 - DNA, 431 bp, Homo sapiens
tgatccacccacctcggcctcccaaagtgcaaggattataggtgttagccaccgtgctcggctcttgcattgatcttgtattacttttgtaaagttttcacagaatgggaaaaaaatagcccacatcagtgatgaatctgtaaacagaggatatattattttaacactgggtagatgaagaaggctctgggcatcaggccagtgagacaaaacactgaatacaagttacattaaatgtggctacaagttactgcaatcacatgcaatacctgaatataccatgtattayctggaatagtactacaatgactctcgtgttgacattgaggtcttaagattaaaaatcatattttaaaaaatactcagcaatttgtggtctgcacagtcaatattttctttcttcatttgtaaggaacacttaagaaaaagtt

SEQ ID NO: 314050 - DNA, 537 bp, Homo sapiens
ggagtttcttcctgctggtgggttcgtggtttcaatgacttcaagcatgaagctgtggaccttcacagggagtgttacagctcttaaaggtggcacggacccaaagagtgagcagcagcaagatttattgtgaagagcaaaacaacaaagcttccacagcgtggaaggggacccaagcatgttgctactgctggctggggtggccaggttttattctcttattgrcctctcctatgttccatgtctgtcctatcagagtgctcttttttcagtcctccctgcgattggctacttttagaatcctgttgattggtgcgttttacagagcactggtttgttcattttacagactgctgattggtgcattttacagagcactaattggtgcattttacaatcctcttgctggctacagagcactaattggtgtgtttttacagagcactgattggtgtattttacaatcggcttgctagctacagagagctgattggtgtgttttagaatcctagctacagagtgctgattggtgcgttt

SEQ ID NO: 314051 - DNA, 568 bp, Homo sapiens
tttggtactcagtattctttgtgccgttcttgagttgaatctctgagttatgactgtggctgaatgaaagatgtgagacccttcttagccacacttgcctagaattaagcttctggagcatatgcctgagtctatatatataaaaaaatcagagagacaccttttctcaactgcataccctgacactcaactgggagctttgaagagtgagagccctrtggtagcatcagcacctccctggaagagagggagtttctgtcactgaactaggagggggggcaaatgagcatgttgtggcttaaatgccaaagacacttgctgttttcactacaaattactggattttcttcagtgaatgttactttattatatgtctttaggattattgccagggacaccaaatggttgttttaaaaaacaattttcaccagttattcctgtttcccttgaaatttcctccatggaactttttatgctaccatttgagaatggtctatttcagaatgtcttgtaaagtctctctactttccgcatatattaaaacaatcaatcaaaaagtaaaaagtaa

SEQ ID NO: 314052 - DNA, 568 bp, Homo sapiens
tttggtactcagtattctttgtgccgttcttgagttgaatctctgagttatgactgtggctgaatgaaagatgtgagacccttcttagccacacttgcctagaattaagcttctggagcatatgcctgagtctatatatataaaaaaatcagagagacaccttttctcaactgcataccctgacactcaactgggagctttgaagagtgagagccctgtggtagcatcagcacctccctggaagagagggagtttctgtcactgaactaggagggggkgcaaatgagcatgttgtggcttaaatgccaaagacacttgctgttttcactacaaattactggattttcttcagtgaatgttactttattatatgtctttaggattattgccagggacaccaaatggttgttttaaaaaacaattttcaccagttattcctgtttcccttgaaatttcctccatggaactttttatgctaccatttgagaatggtctatttcagaatgtcttgtaaagtctctctactttccgcatatattaaaacaatcaatcaaaaagtaaaaagtaa

SEQ ID NO: 314053 - DNA, 591 bp, Homo sapiens
agcttttagagaaaaataggagccatctcccttgattacttggcagcaggcaaagctttcttagacagattacagaaaaagcataaaagaaaaaataataaaataataaattagacttcataaacaaatgacaacagtgaaaactcccactcacaagacactgtagaaacaatccaagtatccaccaattggagaatgaataaacaaacgaggtgcagaatatgcagtatactcatatacatctgtgacacgcaacaatacagatgaatccaaaacatgttaggctgagtggaawctagccacaaaagagtacatactgaatgcataatttcatatataagatattctaaaacaatctcctctgggaagcaagggctgagttggactgcaaaaaggcatgaaggaacatttgtgtggtcataataatgtcttatgggtttgggtttatagaggtgtaagcatttgttgaaactcaaaaaatgtatagtgaagatacatgcatttcgttgtatgcaaattttataacgaaatactgaaaaatatactgtagtcaattatatatatatatgctgactatgagtaaaaaaagca

SEQ ID NO: 314054 - DNA, 591 bp, Homo sapiens
agcttttagagaaaaataggagccatctcccttgattacttggcagcaggcaaagctttcttagacagattacagaaaaagcataaaagaaaaaataataaaataataaattagacttcataaacaaatgacaacagtgaaaactcccactcacaagacactgtagaaacaatccaagtatccaccaattggagaatgaataaacaaacgaggtgcagaatatgcagtatactcatatacatctgtgacacgcaacaatacagatgaatccaaaacatgttaggctgagtggaaactagccacaaaagagtacatactgaatgcataatttcatatataagatattctaaaacaatctcctctgggaagcaagggctgagttggactgcaaaaaggcatgaaggracatttgtgtggtcataataatgtcttatgggtttgggtttatagaggtgtaagcatttgttgaaactcaaaaaatgtatagtgaagatacatgcatttcgttgtatgcaaattttataacgaaatactgaaaaatatactgtagtcaattatatatatatatgctgactatgagtaaaaaaagca

SEQ ID NO: 314055 - DNA, 649 bp, Homo sapiens
tgttctcagtcttctttataatgtgttgttaccatcttcagcaattcctatttcatttttgactattttaaaacttatgcactagcctagaacctctgataaacatttccactaaaaccaccaaagtgaagtataggcgacactccagtatgaagtgtgttaccacttcatgataaagactggggattttttcccatataaaatgctgtcactggaaataaaagacaggctgttatttttcagttgcaactgaaatatccctacataaggagaaagggtgtttgtaatgattgaattaggagacagacaacctagaaaattattgaacttttattgtttaagaggtaactacagttgaaatagaaataaagataatttgttctagccataaagaacgtaactgtgtataaaaaaaatggtaactrttgtaattaattgtatttttcccccaggactggaacataaatataaacatgctagattttatttttgagtttttaaataataaatggtgaatctgttttttttctgttgaagtattttcatcatgattggctgttagccatgttttcaatctttgttcttcagagtctcaccaaggccattctggactacccactatacagcgaagtattgatactaaggtatc

SEQ ID NO: 314056 - DNA, 569 bp, Homo sapiens
gttaacacttaagccatcagtacatggcaaggctaaaagagtacactaacacatacccacttgggcttcaggagctgcagacaaccacccctggatgctgccgtgggaacacagtccaggggcgcttgcccagctcccgcacctgcctgtctgcatgctccccctcccataacggrcttgaacatgaatgggggctgaacagatgagccacacagctgtcgcacatcttgtgaggggaggcgcagaactcttgcatttcatatacaacaatgtttataacagaattattaatattgttcaaaaatcgttagcaaccccaatgtctattggtcataaaatgatgacataatctgtggtttagcaatcaacaaaatactacacagcaatggaattaaataacaactgctatacaaaattttaaaaaatagactctaatgaatgtatgttatataattcaattacataaataaagaaaactaatgtattatatttgaagtcagactaatatttaactgaaggataaaagtagtgactaaatggttcaggaaaagagagttattctagacagg

SEQ ID NO: 314057 - DNA, 569 bp, Homo sapiens
gttaacacttaagccatcagtacatggcaaggctaaaagagtacactaacacatacccacttgggcttcaggagctgcagacaaccacccctggatgctgccgtgggaacacagtccaggggcgcttgcccagctcccgcacctgcctgtctgcatgctccccctcccataacgggcttgaacatgaatgggggctgaacagatgagccacacagctgtcgcacatcttgtgaggggaggcgcagaactcttgcatttcatatacaacaatgtttataacagaattattaatattgttcaaaaatcgttagcaaccccwatgtctattggtcataaaatgatgacataatctgtggtttagcaatcaacaaaatactacacagcaatggaattaaataacaactgctatacaaaattttaaaaaatagactctaatgaatgtatgttatataattcaattacataaataaagaaaactaatgtattatatttgaagtcagactaatatttaactgaaggataaaagtagtgactaaatggttcaggaaaagagagttattctagacagg

SEQ ID NO: 314058 - DNA, 569 bp, Homo sapiens
gttaacacttaagccatcagtacatggcaaggctaaaagagtacactaacacatacccacttgggcttcaggagctgcagacaaccacccctggatgctgccgtgggaacacagtccaggggcgcttgcccagctcccgcacctgcctgtctgcatgctccccctcccataacgggcttgaacatgaatgggggctgaacagatgagccacacagctgtcgcacatcttgtgaggggaggcgcagaactcttgcatttcatatacaacaatgtttataacagaattattaatattgttcaaaaatcgttagcaaccccaatgtctattggtcataaaatgatgacataatctgtggtttagcaatcaacaaaatactacacagcaatggaattaaataacaactgytatacaaaattttaaaaaatagactctaatgaatgtatgttatataattcaattacataaataaagaaaactaatgtattatatttgaagtcagactaatatttaactgaaggataaaagtagtgactaaatggttcaggaaaagagagttattctagacagg

SEQ ID NO: 314059 - DNA, 539 bp, Homo sapiens
tatttgttttcctcttgtcgatttgttcaaactctttgtagattctgaatattagtcatttgtcagatgcatagtttgtgaatattttctcccactctgtgagttgtctgtttactcagctgattatttcttttgctgtgcagaagatttttagtttaagtcacgtcgatytatgtttgtttttgttgtatttgcttttgggttcttggtcatgaagtccttgtctaagccaatgtctagaaaagactttctgatgttatcttctagaatttttattgtttcaggtcttagatttaattccttcatctatcttataaggtgagagatgtgaattcagtaccattctactacatgtggcttgtcaattatcccagcaccaatggttgaataggctgtcctttctccgctttatgtttttgtttgttttgtcaaagatcagatggctataagtattcaattttatttctggattctctatgttgttccattggtctacatgtctgtttttatacctttgccatcatgtttcagtagctaca

SEQ ID NO: 314060 - DNA, 547 bp, Homo sapiens
catttttcctctacaaaacacaagatctttttgaaacttagtatcttcagttatcattattactgcattataaagctratttatataattttgcatagcattggtcaaaatgacaaggcaaaataaaagaaaataaagcattattatacaaacaagaaaagtcattgaaaataatttaaggccttgaagtgaattaatcagtctaacttaaacctgaagaataaaccattaattatccacctaaaatgcaagcaatatgtttttttcagcttctgttctgtggaccaagtaacagaaacaaatcttccttatggtttatgtattagaatccttctggacttgaatgactaaaagtcaattccatttttcaactgttcacggaagatttaggactgttttagccgtgtgtgtggaatgccaaactgtggacactgtgcagatgctagtgctcagaaggcttctgctgctaagtaagagtgagactgaatcatggacttccaccttgatgtttccattatgtcggttgcttggttgctgttccagtttt

SEQ ID NO: 314061 - DNA, 547 bp, Homo sapiens
catttttcctctacaaaacacaagatctttttgaaacttagtatcttcagttatcattattactgcattataaagctgatttatataattttgcatagcattggtcaaaatgacaaggcaaaataaaagaaaataaagcattattatacaaacaagaraagtcattgaaaataatttaaggccttgaagtgaattaatcagtctaacttaaacctgaagaataaaccattaattatccacctaaaatgcaagcaatatgtttttttcagcttctgttctgtggaccaagtaacagaaacaaatcttccttatggtttatgtattagaatccttctggacttgaatgactaaaagtcaattccatttttcaactgttcacggaagatttaggactgttttagccgtgtgtgtggaatgccaaactgtggacactgtgcagatgctagtgctcagaaggcttctgctgctaagtaagagtgagactgaatcatggacttccaccttgatgtttccattatgtcggttgcttggttgctgttccagtttt

SEQ ID NO: 314062 - DNA, 547 bp, Homo sapiens
catttttcctctacaaaacacaagatctttttgaaacttagtatcttcagttatcattattactgcattataaagctgatttatataattttgcatagcattggtcaaaatgacaaggcaaaataaaagaaaataaagcattattatacaaacaagaaaagtcattgaaaataatttaaggccttgaagtgaattaatcagtctaacttaaacctgaagaataaaccattaattatccacctaaaatgcaagcaatatgtttttttcagcttctgttctgtggaccaagtaacagaaacaaatcttccttatggtttatgtattagaatmcttctggacttgaatgactaaaagtcaattccatttttcaactgttcacggaagatttaggactgttttagccgtgtgtgtggaatgccaaactgtggacactgtgcagatgctagtgctcagaaggcttctgctgctaagtaagagtgagactgaatcatggacttccaccttgatgtttccattatgtcggttgcttggttgctgttccagtttt

SEQ ID NO: 314063 - DNA, 547 bp, Homo sapiens
catttttcctctacaaaacacaagatctttttgaaacttagtatcttcagttatcattattactgcattataaagctgatttatataattttgcatagcattggtcaaaatgacaaggcaaaataaaagaaaataaagcattattatacaaacaagaaaagtcattgaaaataatttaaggccttgaagtgaattaatcagtctaacttaaacctgaagaataaaccattaattatccacctaaaatgcaagcaatatgtttttttcagcttctgttctgtggaccaagtaacagaaacaaatcttccttatggtttatgtattagaatccttctggacttgaatgactaaaagtcaattccatttttcaactgttcacggaagatttaggactgttttagccgtgtgtgtggaatgccaaactgtggacactgtgcagatgctagtgctcagaaggcttctgctgctaagtaagrgtgagactgaatcatggacttccaccttgatgtttccattatgtcggttgcttggttgctgttccagtttt

SEQ ID NO: 314064 - DNA, 759 bp, Homo sapiens
caattccatttttcaactgttcacggaagatttaggactgttttagccgtgtgtgtggaatgccaaactgtggacactgtgcagatgctagtgctcagaaggcttctgctgctaagtaagagtgagactgaatcatggacttccaccttgatgyttccattatgtcggttgcttggttgctgttccagtttttcttatgtttacacccaagttgtcgaagtacactgcacctactaataatgtctatggcttttgctttcaactgttctgcaatgtgcaaatctgcaaggacaagtgtatcaacaacattttctactgagggattactacacaaagcttcctcacacatgactttcagctgttcccagtgcatgtttgtctgcagctgccaacaagttgtcagccattttgtcaaggtttagttatttccctgtgttaatgaatctcatcatttctttaaaaacatcagggcctaaataatttatttccactcgattctttatgttttcttccatttcatgttcaaacatggcattaaaaactggggatggaggtaccagcagatttatgagctttaaattcttgtcctctcacaaaaaactacagtctgtacatcttgtgttttcacagagattacataaatcttctcctagtcgacactcagccaccttcaaagtatttgtattagtatgtcctgatatgtttactgaatctagtaccacactcatctcacaaaataatgtaagctcgtcatctggt

SEQ ID NO: 314065 - DNA, 759 bp, Homo sapiens
caattccatttttcaactgttcacggaagatttaggactgttttagccgtgtgtgtggaatgccaaactgtggacactgtgcagatgctagtgctcagaaggcttctgctgctaagtaagagtgagactgaatcatggacttccaccttgatgtttccattatgtcggttgcttggttgctgttccagtttttcttatgtttacacccaagttgtcgaagtacactgcacctactaataatgtctatggcttttgctttcaactgttctgcaatgtgcaaatctgcaaggacaagtrtatcaacaacattttctactgagggattactacacaaagcttcctcacacatgactttcagctgttcccagtgcatgtttgtctgcagctgccaacaagttgtcagccattttgtcaaggtttagttatttccctgtgttaatgaatctcatcatttctttaaaaacatcagggcctaaataatttatttccactcgattctttatgttttcttccatttcatgttcaaacatggcattaaaaactggggatggaggtaccagcagatttatgagctttaaattcttgtcctctcacaaaaaactacagtctgtacatcttgtgttttcacagagattacataaatcttctcctagtcgacactcagccaccttcaaagtatttgtattagtatgtcctgatatgtttactgaatctagtaccacactcatctcacaaaataatgtaagctcgtcatctggt

SEQ ID NO: 314066 - DNA, 466 bp, Homo sapiens
tcctttcggtatatagtccttgatttattctgaacattttttcttttttttctccttggaggttgtcttttagaatcctaattatacttcaggagttcattctaaagggtcctctccattgccttttttcccaaatataagctcaaawggcttctctgcacttttgtatgagaagctgaactattattttcacagataaatgagagaccagagactgagctcctcagctctgaagagaaagggcattttactcctcccagccaagggggcccacttggaatgtctgggatgttaaaacttcatgatgtatagtggccaaacagagaacccctgccaacacaacgagtttaaaaaagctcatctagaaaatgcatgtaagagctgatcactcagtgttttgagccctcatggaggtgatagctgtctggagagagaaactaatgagagaaaagaaaataaggaacca

SEQ ID NO: 314067 - DNA, 569 bp, Homo sapiens
ataggaaaattgtcaatgtatttatagtcatatctcaaaataacaacacatataacctttcaaagaaggcagcagaagttattaaactatcatatgattcataaaatattaaaaatagtacaagaaaaaaattacatgaatttagatttctacaattactgcaatttttaaacattgtattttatttattcaaacatattttcaaaaacagaacaaatgttctaaaaacaagctgcaagtggataaaatagataacatacaagaaacattatcaagttttttgaatgacactaataaattaatttgtgatgttacattttggaacttcctgtcttgaattgctgtgttcatttcacaaattaaactttaaatctcataattaatacatgaaaacktttgtgaaaagttaaacattgcagaattatatagaataaaaatttaaattctcatccttgtaattacatgtatttttcaagattctttcttctttgtaacagtttacatatactttatttcattgaaaaaatacgtttttttgtttttctggaaactactttttctgtttagca

SEQ ID NO: 314068 - DNA, 608 bp, Homo sapiens
tataaattccatcacgattgtatgctttctgtagtcctcaccagaagcagatactggagacaaacttgcacagcctaaagaactgtgaaccaattaaacctcttttctttataaattattcagcatattagtctattytcacactgctctgaagaactatgtaagactgggcaatttatgaaaaaaataggtttaacgactgacagttccatagctgtaacagaaggcatgactgggagacctcagaaaactaaaaatctggagaaagtaaagggggaagcaaacacatcttccatggtggcaggacaccgagagagagacagagggacagagagagagagagagagagagagagagagagagagaaagcaaaggcagaagtaacacaaaattttaaactatcagatctcatgaaaattcactcactatcaagagaacagcaaggaggaaatccacctccacgatctagtcacctcccaccaggccccttttccaattcaatatgagatttgtacaggaatacaaattcaaaccatagcacccagcctaatttattactttatagcaatgctaaaaatagcctaacacagaaaattgataccaagtgt

SEQ ID NO: 314069 - DNA, 513 bp, Homo sapiens
gagactggtggaatgtttgtgaccaaaatgctgacagaaatattgacagtgagggccacactgagaaggtccctggtgaaaatgaggaagatatgaggaaccagaataagggtcacccatgttacaccctaccaaaaatcttggctgcattatgatcatgtcctagggctttctgartgtttcaacttaagggtgatgacttagagtgttgggtggaagagatttctaagaagcaaagcattcaagaggtgacctgtctgtttctaacagcctatgataagatatagaagcaaggaaagaacctaaagttagaatgtgtatttaaaaggaaaaaaaagagcataaaagtttggaaaattctcagaatggccatgatgttgaaatgaaaatagctttcagtagagttattcaagtgggcttcagagcattaacttgctagagaggtttgcttgagtaaaagggagagtggaagcaagagagagaaggtaagttgaagactttttttaagaacta

SEQ ID NO: 314070 - DNA, 573 bp, Homo sapiens
ggtggaatgtttgtgaccaaaatgctgacagaaatattgacagtgagggccacactgagaaggtccctggtgaaaatgaggaagatatgaggaaccagaataagggtcacccatgttacaccctaccaaaaatcttggctgcattatgatcatgtcctagggctttctgaatgtttcaacttaagggtgatgacttagagtgttgggtggaagagatttctaagaagcaaagcattcaagaggtgacctgtctgtttctaacagcctatgataagatatagaagcaaggaaagaacctaaagttagaaygtgtatttaaaaggaaaaaaaagagcataaaagtttggaaaattctcagaatggccatgatgttgaaatgaaaatagctttcagtagagttattcaagtgggcttcagagcattaacttgctagagaggtttgcttgagtaaaagggagagtggaagcaagagagagaaggtaagttgaagactttttttaagaactagatttttctatgatgtattagtctgctctcatgtgctataaggacatacccaagactgggtaactt

SEQ ID NO: 314071 - DNA, 550 bp, Homo sapiens
attgactcacagttccacatgactgaggaggcttcatgaaacttacratcatggtagaaggggaagcagccatatcttacatagtggcaggcaagagaatgagtgtgtgagggaaaaaactgtcagacacttataaaaccatcagatttcatgataacttacaatcacaagactatcacgggaggcacattgcctccataatccaatttcctcccatgtggtttcttccttgatgtataaggattatggggtttacaatttataatgagattttagtgaagacataaagcctaaccatagcatttcccccggccccttccaaatctcatttccttacattacaaaatcaatcatacctattcaacagtcccccaaagtcttaactcatttcagcattaactcaaaagttcatatccaatacctaatgtgaaataaggcaatttccttcaacctagaagcctgtaaaatcaaaagcaaattagtttcttccagtatacaatgagggtacaggcactggataaatgctcttatttcagataggagaaattga

SEQ ID NO: 314072 - DNA, 551 bp, Homo sapiens
tcatttccttacattacaaaatcaatcatacctattcaacagtcccccaaagtcttaactcatttcagcattaactcaaaagttcatatccaatacctaatgtgarataaggcaatttccttcaacctagaagcctgtaaaatcaaaagcaaattagtttcttccagtatacaatgagggtacaggcactggataaatgctcttatttcagataggagaaattgaccaaaataaaggggctatactccccatgtacatgagatatctagtggaacagtcattagatcttaaagctcctaaatgatctcctttatacttcatgtcttacatccagtcatgctgatgcaagaggtgagctcccatggtcttgggcagctatgctgctgtggctttgcccagtgcaatcaccctcccagttgctttcacaggctggtgttgagtgtctgtggcttttccaggtgtgtggtgcaagcttttggtgaatccacaattctgggatctggagaatggtgacccacttctcacacctccagtagacagtgtcccagtgc

SEQ ID NO: 314073 - DNA, 558 bp, Homo sapiens
tatatttctgttgctaacgatttttggacactgttgataattctgtcatgaacactcttccatataccattagatttatatatttatacatatctgttgtgtatataattgagagtagaattgctgagataaaagtgcatgcataattatgatttacttcttgactttaaatttttttgaagtgtattttgttaatttccaaaatttaaagatattttagtaatagtatttataacatcccttacttccactatggctggatcatatagtctttatgatattgaatctttttatatttcctaagtcttgatttatttcccaccacatgccacttcaaaygactattaactattcgacatgctctaggaaaatgtgtcttccagttgatatatacgatacctatacgtgtattgtatatgtacatatgtgtgtgtttatcattttacattataagattccatttgttaattgtgttcttcaaatgttttatgttcttactcattatttgctctttttttaaaagtctgtttagattgagtgaaagtatttgtataatca

SEQ ID NO: 314074 - DNA, 582 bp, Homo sapiens
ggtgatagaagagctattatatttagtggcatttgaaataaccctgcaggagaggaaaaaacaggtgtaaagctgtagaaataggagacagagggacagcccgggaagatattgwaaaattctgtgagatataataacacctgaaataaagattctctctgattctgaccgtgaagaatgtgagtgtatatcataaaatgctaacaattatagctaatttttccccctaggactggaaaataaatataaagaagttacattttgttttccttaacaaatattcaataagcttgtttcatgatgaactattaacactctaatacgctgttactaatatatccagtatttgttcaccagagttttacctagaaggtcattctggggtatccacctgtacagccgagtattgagacctaaggcatctggtttattcccatcaaatctccaaagaacctgttacagtaaagagaatatcttattccacgagtggaactcaaaagttataaaatgttagaactgtaaaaagagtagaaatgagatcaagggatgatagtaaataaatctattcaaagaccgctgtaa

SEQ ID NO: 314075 - DNA, 613 bp, Homo sapiens
gaaaatacagagtcactggtgatagaagagctattatatttagtggcatttgaaataaccctgcaggagaggaaaaaacaggtgtaaagctgtagaaataggagacagagggacagcccgggaagatattgtaaaattctgtgagatataataacacctgaaataaagattctctctgattctsaccgtgaagaatgtgagtgtatatcataaaatgctaacaattatagctaatttttccccctaggactggaaaataaatataaagaagttacattttgttttccttaacaaatattcaataagcttgtttcatgatgaactattaacactctaatacgctgttactaatatatccagtatttgttcaccagagttttacctagaaggtcattctggggtatccacctgtacagccgagtattgagacctaaggcatctggtttattcccatcaaatctccaaagaacctgttacagtaaagagaatatcttattccacgagtggaactcaaaagttataaaatgttagaactgtaaaaagagtagaaatgagatcaagggatgatagtaaataaatctattcaaagaccgctgtaaaaagaatacccaca

SEQ ID NO: 314076 - DNA, 579 bp, Homo sapiens
aacgtagcacatatacaccatggaatactatgcagccataaataaggatgagttcatgtccttttgagggacatggatgaagctgaaaacagtcattctcagcaaactatcacaaggatagaaaatcaaacactgcatgttctcacttttaggtaggaagtgaacaatgagaacacatggacacagggcggggaacatcacacacctggcctgttgggggttgggtggctggtggagggatagcattaggagaaatacctaatgtaatgatgagttgatgcatgcagcaaaccaaaatggcacatgtatacctatgtaactgacctgcacatcctgcacatgtacccttgaacttaaagtattttatatatatataagacttaaagtattrtatatatataatatacacatatatacatatatataatatacacatatatacatatatataatatatatatacacacacacatatatagcatagatatcaccaaaacagtatggcagtggcatgaaaacagatacatacaccaatactatatagaatagagatccacaaaataaatttatgcatttact

SEQ ID NO: 314077 - DNA, 573 bp, Homo sapiens
gttaatgttaatatgttgacttcctctcatgaaccatgaatgttcttaatggaatctagaatgaaaaatccttttgaaaaggttttcaatatactttccccattagtaagagctatagccttacaaaatatatttcttacataagacttgaaagtcaaggctatatgatccatggcatgtaagatggatgtaataatagcaagcaggcaaacattaatatctgtacatcttaatcagagccctttgttgaccatgtgaattgtcaatgagcagcaatattttgaaaggaatcctcttttttgagcaataggtctcaacagtgtgcttaaaatattcaataagccatgtcatataccaatgtgatatcatccaggctttgttgttccattgatataacacaggcaaagtagatttaacataattattaagagtcctctataattattacaaaaagtaaatgggcattggctttacctttgtcatcagctgcattagccactacaagagattcagcctgttttttgtagcttcaragacaagcattgacttctcttctctagctatgaaagtttt

SEQ ID NO: 314078 - DNA, 460 bp, Homo sapiens
gtagccacatttactgagtatattagctaagtcttctgcatgacttcctattgcttcacattgaacttttgcatcatgtaggcagtttattcctgtaaacctcattagtcaacctctactagcttcagtctttttttctgcatcttcctctcctctctgaggyttcatgcaattgaatagttaacgctttactatgtattagtttttagctaatgccaaaacctaaggtgatgttgtggttggtttaattttttttcttttcttttttttcttttttttttttttttttttggtagtggttttgctctatcacctaggttggagtgcagtggagcaatcatagctcactgcagccttggacttcaaacttctgggctcaagccgttctcccacctgagcctcccaagttactgggattacagatatgaatcactgcagctagctagctaatttgattttc

SEQ ID NO: 314079 - DNA, 460 bp, Homo sapiens
gtagccacatttactgagtatattagctaagtcttctgcatgacttcctattgcttcacattgaacttttgcatcatgtaggcagtttattcctgtaaacctcattagtcaacctctactagcttcagtctttttttctgcatcttcctctcctctctgaggcttcatgcaattgaatagttaacgctttactatgtattagtttttagctaatgccaaaacctaaggtgatgttgtggttggtttaattttttttcttttctttttyttcttttttttttttttttttttggtagtggttttgctctatcacctaggttggagtgcagtggagcaatcatagctcactgcagccttggacttcaaacttctgggctcaagccgttctcccacctgagcctcccaagttactgggattacagatatgaatcactgcagctagctagctaatttgattttc

SEQ ID NO: 314080 - DNA, 604 bp, Homo sapiens
aaaatgttcaatttaatgactcttgaaaaattaattcaaagaagaccttctgaagattttcttaaatacatgatgagagagaaaataatgattagcattttatttcaatagaaattctataamattcagactaacaatcagtgattctcaaaaatatgtgatgttgatttgcgctatttggaggaaatacaaaatataatctcttagttattgatgatcatttttaagtatattactggtattaagaaagtaggttatcttacgcttagaacaaatacactttctttatgaaaaacagctacaacattttctaaaaaaactcattgacctgcatatatatgtcatagacaatgtatgacaatttttaaaaatatttcttttgataactaaattaaaaataaaacaaaagtgtcttacctaatgccttactataaaactcttcccaaaaatgatagtcgtaatcctgaatccagaagtggaacaaaactgaaagcattgaattttttactctttccagaaaggtcattctgtctgttagtcctgtcataggcacaggtacataggaaagtggagctggaagtttcccacagcttcgctccatatt

SEQ ID NO: 314081 - DNA, 512 bp, Homo sapiens
agaggggaaaatgcacaattgctttaatatgaaataataaaagctttaataaggcatttgacttaggaggtgagatgaaagctttgataggatttactgttgccaaaggaagcatttcacaatmgatagaagcatacaaaagtataggatatttgaaaatcattccagtgagtagtggtcacagagaaagttcagagcaggacgttacagaagaaagttagtttgaaattggagaacataattttaaataaaaaattatgagtttgaatcataatttataggcaaataattatttactcaagttttaaaggatagtcacaagatcaaccttttctttagcaagaaactcttgcatctcaacacagagtggtatgtaaaggtaagagtttaaaacagggaaaacgataaaaattatatattagttactgagacatgtcaacctaatagaatgaaacataaattgttaatagttaaatgcaagaaattaatttaaaatttgaatttactgataa

SEQ ID NO: 314082 - DNA, 367 bp, Homo sapiens
tcattttttgtgatgtgttttttgtggttttagtagaaggggtcaatgaaatatgttggtagtgttttctcctcttctrttattaggaggattgttttttgaagaattgttatgttttcttccttgaatgatttgtagaattctaaaacaaagccttcttggcctgggctttttttttggtgggttgtcttttgattagtaattcagtctttccgttttttatgggtctattcaggttttctatttcctctccggtttattctatagttgttcttgtctgcatctacctgtagtaaaattctgacacgctgagttcggaggggatgagggggcagtttttgtttgcaaggtaagaggcgatccctgt

SEQ ID NO: 314083 - DNA, 543 bp, Homo sapiens
catgcttgctaatataacattcattctatagccctggatcaaaaagtaatttcaacttttaagttattgcatttaagaaatacattttgtaagaatatagctgccattgatagcaattactttgttggatattagtaaagtaaattgaacattttataaaaaagattcatcttcctagatgacattaagaacatttgagagtcatgggaagaggtcaaaatatcgacatcaccaggagtttttaggatgttgatttcaaccatcacgaataatattgacagggtcaagacytcaatggaggaagtaactacaaatgtggtgaatattgtaagtaaaatgtaattagaagtagaacctgaagatatgactgaattgcttcaatttaatgatgaaacttgaatagatgaggagttgcttcatatgaatgaacaaagaaaggggtatattgagatgaaaaatactcttggtgaaaatggcttgaacatttttaaaatgaaaacaaagaatttagaatattacttaaacttatttaatgaagcagca

SEQ ID NO: 314084 - DNA, 610 bp, Homo sapiens
gtggtttttgtctttggttatgtttatatgctggattacgtttattgattttcatatgttgaaccaaccttgcatcccagggatgaagcccacttgatcatgtacaccttttttattaatgtatttactacatttactttcaacttccaaatataatgttaagcttttcatttctaaaacaatgaattggcaatgagtttacttatattcacttgtttcataacttatattctcatatctgatgatttacaaagaaagcaaatctatcaatcatctatgtatgagaagtacatgaatttgcttaaaaagcacatatatattttttccagttacaaattattaagcactgtttccaagaaaaaaactcaagtgacttttttcccatatatccagaataatatctcatttgctacaattggaaatcatttaaaggtagaaaagactgattggcagttctttaataataggtctgtttaaaatatcccaamattgtggtgatgctaaatttcattctgctggctcttagctcttcaatggcacaatccaaagcattgacagcagtggtttatatggtctgctatagctaagccagagagtacatgcctagtac

SEQ ID NO: 314085 - DNA, 337 bp, Homo sapiens
atagcagcacaactacttaccccagaggtcagagctgtaggtgttgatacaaacttgtaagagtccatgaattggatgcgtcctgtgaaattcattctatgcaacttacaaaatctggatgtgtcagagtcctcacctgtaagtgaagaatgcacataaatgacaactgttgcacaacagttgttaccaaactgtcaaggggcatttttttgtgtgcacaaacatcacactatataattttctatcctcaaaattgtatttttcayggaaaatggttcagccactatgggaacgagtctggcagtttttcaagaagctaaacatagaattaccatat

SEQ ID NO: 314086 - DNA, 536 bp, Homo sapiens
gtgtgttgagctggatctcataccagcatctctgacattttaayttgtactcttccctctttaggaatccctactctttgggcttctccagtaaagtggattcactagtataagaatgagaggcatctatgttctctaatttctaaaggtgatttctatcttaaaaataataattagattgaagcacccggataccttctcaaccatcatcttacatgtaaagttcctggtatagagctcagcacattgtcattctcacaaatggcaggcaactaaaatgatatgtaagtgcctattcccttcatttcctcatctttagtggtgggcaaaaggagctacaagggaaagagagaacggtttttcacctccttattcaaccttttaagcaagtcggcctagggatcatatgcttgcaggagaattgctattcctctgtgtgcatgaattttagcacaatccctcaatgagctaggctcaccaagtttaattcatttaacactccaatactagcaaaatttgttaagattttcttgctt

SEQ ID NO: 314087 - DNA, 609 bp, Homo sapiens
gactcttactgccttttatttatattatagaacaaaaatatccctggttggacttctgcttttagtaataatgtactaggcaatttcgactggtgaggataaccagaaaagtcagttatatcttctctttgaagatgcaaaattgctatcaggacactgaaaagtggctaggccaggataagggagaggaaagagatccaatgaagaggagcctgagatttggaatcacttttctcctgggggaagttgccattcagaatggggtggctgagaggaggagagatcatcaatgattatgaccatccaaggagatkagagaatcagaaaacagagtctggaacttggtgaagggggcccagatgaacattcttgtctaagctggtccacagaagaattcacagcttaggaggaagagtaaagtggatgttgacaggccctcatagaaattgcagctcagctttgaatcttcccatccaacaaattggatgaagaaaattgtgttttgatattgcctccagtacctggtagaaacaactgttaatcatctctaaaggaggggacattatcctagcccttacactgtttctacaaataattttaaaaacatag

SEQ ID NO: 314088 - DNA, 607 bp, Homo sapiens
tgtccccacccaaatctcatcttgaattataatccccataatccccatgggttgaggaagggaccgagagaggtgattggatcatgggggcagtttttctcatgctgttcttgtgatagtgagtgagttgtcatgacatctaatgcttctataaggcagtttttactgctctttytcacacatgtaagacatgcctgcttcccctcccatcatgattgttaagtttcctgaggcctccccagcaatgtagaactgggagtcaattaaacctcctttgtttataaattcccagtcttgggcagtatcttgggtagcagcagtgtgagaacaggatacagatacaagaaagttcatagaggcatcatttttaataaacttaaactaaaagcaacccaaaagtttaaaaataacaggatgggtaaataattacaaccctataataatggaatatacaaaaagattaatgaactacagttaaccacagtaacttaatgaatctctcaagcacaatggagataaatgaagccagacacaataaaatataaagtttacataaagttcaaaagaaggcaagactcaactgccatgtttaaggatgcgtatgtag

SEQ ID NO: 314089 - DNA, 483 bp, Homo sapiens
gggttttgtatcaaatcatgagatgatgattgggtggagcccaagcaacatgtgtgaaattcacatttgagaggcttaaataacccctggaaaaacatgaagaaacaatgaataagacaacctgtggtttcagatgtcagcctcaaactccaagtcagaatagccggcaatccatagtgatggctccaacagrcattcaagtgacttttcacccaagaatgtgctgtgttccagggcagttagcaatttctctgatggttaatgatcctccctatcaaccctggtggaagacagttagttattcactgcaaccaagtgcagatcatttccacttactttaccatctaactgtgaagattattaaggaaaaggactttttcttcttctctcttctaacatgttaaactaagaaccttcccactgtgaactactggcatcttactttttgaccccttgacaagaagaactggagttaccaaaatg

SEQ ID NO: 314090 - DNA, 489 bp, Homo sapiens
caggcagggtgagggctgcttttgagttggtaagggaggctggagaaggggatggtaaagctcaggactgtgaccctgtggtgtaatgcttgtcagaaacttgaaactcttcagcctttctcccttcccagtgttatacatttggtcaatttgtttcgattctgcttttcctagctttctcaaatcttcatccccatcacatcctggctattgcttatcagctcaaatcctcattatcctgatgcatttagaaggcaaataaatgcagccacagcacagtgagctacaaggacttrgctgagagtaagatcagaacttcctgtgaggaagctaccatggactgtaaaggaggtcatttaaagcccttgttagatgtagtaacattccttaaaatcatgtggtttgcataggattagggcgcttgtaagtcatctggaaaatgcatactcctaaaaatcagtctttccttagcctcttcactcataagct

SEQ ID NO: 314091 - DNA, 594 bp, Homo sapiens
cctagctttctcaaatcttcatccccatcacatcctggctattgcttatcagctcaaatcctcattatcctgatgcatttagaaggcaaataaatgcagccacagcacagtgagctacaaggacttggctgagagtaagatcagaacttcctgtgaggaagctaccatggactgtaaaggaggtcatttaaagcccttgttagatgtagtaacattccttaaaatcatgtggtttgcataggattagggcgcttgtaagtcatctggaaaatgcatactcctaaaaatcagtctttccttagcctcttcactcataagctacttttcgtactccttatgagaatatccttttcattaaatattattatatattggttttaatgtttgcataatatttactttatgaatgtatctggattttrtaaaatactcaacctttgaagacttagattttttctttctaattttgacttgctataaactacactaggatgaatatatttttagctattgcgttataaatgttcatgattattttcttaggacaaattcctggagaaggaaatgctgcaccaatgggtacacgagatgcct

SEQ ID NO: 314092 - DNA, 590 bp, Homo sapiens
atgaactggttttgggagtgaaataggagattggggaataacacccacacggaaagatggaggagtacatatttggctcttccaagctgtctgttctcagtcatgtttggagaaacggaggtagttgagtaactcctgtggttgaaagcccctaggatagctcccagtgaccctgcctcctgacattcacccactgtgtaatcccttcccctggagtataggttgaattactttattttctagaataaagatagactagaatagaatacaaaaaaaaagtgataggttatcacttctgagattagattgcaaaagcattgtgacttccgtcttgcttatcctctctggctctctgggagaaccccagtgccatattgtggtggaactctsgaaaggcccaggtagcaagaaactgccatctccaagagtgagtaaggacttgaggcctcccaatagcagtgtgagtgagcatggaaacaggttcttcccatggagccttgaggtgactgctgcccaggctgacaccttgattgcaaccttgtgagaagccctgagtcagaggcactcagctaagccatacctggattccc

SEQ ID NO: 314093 - DNA, 562 bp, Homo sapiens
tttctgggttctctattctgttccattggtctatgtgtttgtttttatgccctttccatgccgttttggttactctatctctgtagtatgacttgaagtcagataatgtgattcttccaggtttctttttacttagattgttggctattctggatcttttgtggttccatataaattttaagatttttttctatttctgtgaagaatatcrttggtattttgataggcattgcattgaatcagtagattgctttgggtagtatggacattttaacaatattgatttttttcaattcatatatatggactatatttccattttttggtgtcccctttaatttcttgcatcaacgtttgatagttttccttgtagagatctttcacttctttgattaattcctaaatattttatttaatttatatatagttaatgggattattttattgattttttttcagattgttctctgctgacatagaagtatgctactgatttttgtatgttgattttgtatcctgcaacttcactgaatttgtttatgagttctaatagttttttggt

SEQ ID NO: 314094 - DNA, 562 bp, Homo sapiens
tttctgggttctctattctgttccattggtctatgtgtttgtttttatgccctttccatgccgttttggttactctatctctgtagtatgacttgaagtcagataatgtgattcttccaggtttctttttacttagattgttggctattctggatcttttgtggttccatataaattttaagatttttttctatttctgtgaagaatatcgttggtattttgataggcattgcattgaatcagtagattgctttgggtagtatggacattttaacaatattgatttttttcaattcatatatatggactatatttccattttttggtgtcccctttaatttcttgcatcaacgtttgatagttttccttgtagagatctttcacttctttgattaattcctaaatattttmtttaatttatatatagttaatgggattattttattgattttttttcagattgttctctgctgacatagaagtatgctactgatttttgtatgttgattttgtatcctgcaacttcactgaatttgtttatgagttctaatagttttttggt

SEQ ID NO: 314095 - DNA, 460 bp, Homo sapiens
ttgccctttagaggccattttctagatcttataggcatgcttcattgtttttcattctttttcttttgtctcctctgagtgtgtcttttcttctttttctttttcttttttttttttttttttttkagacagagtctcactctgtcacccagggtagagtgcagtggcgcaatcttggctcactgcaacctccaactcccaggttctctgccccctaggttcaaatgattctcatgcctcagcctcctgagtagctgggactacaggtgcacaccaccatgtatggctacttttctttaatttttagttttagtagacacagggtttcactaggttgcccaggctggtctcaaactcctggggaaacttgaaggcatccacccacttcagccttccaaagtgctaggattataggcgtgagccaccatgcctggcctgactgtgtattttcaaatagcct

SEQ ID NO: 314096 - DNA, 460 bp, Homo sapiens
ttgccctttagaggccattttctagatcttataggcatgcttcattgtttttcattctttttcttttgtctcctctgagtgtgtcttttcttctttttctttttcttttttttttttttttttttgagacagagtctcactctgtcacccagggtagagtgcagtggcgcaatcttggctcactgcaacctccaactcccaggttctctgccccctaggttcaaatgattctcatgcctcagcctcctgagtagctgggactacaggtgcacaccaccatgtatggctacttttctttaatttttagttttagtagacacagggtttcactaggttscccaggctggtctcaaactcctggggaaacttgaaggcatccacccacttcagccttccaaagtgctaggattataggcgtgagccaccatgcctggcctgactgtgtattttcaaatagcct

SEQ ID NO: 314097 - DNA, 476 bp, Homo sapiens
ggccttgatgctttttgatgttcatctgtgtctgggcattgaagagttaggtatttattatagttttcacattctgggcttgtttgagcctgtcctttttgagagagatttctaggtattcaaagagacttgggccctgagtccaataatgctgtggttttttgcagacttgtataggtaccaccttggtggtcttggataagatccagaagagttctctggattaacaggcaaaggctcttattctttttccttactttctgccaaacaaaaggagtctctctctctgtactgagccacctggaactgggggtgtattgatgtaaacacccctatggccaccaccaccactgagactgcactgggtcagacctgaaactagcacagyattgggtctggttcaaagcccttcccttcaggaaggcaagctccccgagaccctggatttgtccagagatgctgtctgggagggagtc

SEQ ID NO: 314098 - DNA, 582 bp, Homo sapiens
tcccaatgtaatgatactggcaggtgtggcctagtggggggtgtttagatcatgagggcttcagcctcatgaatggattaatgttgatatctcaggagtgagtttcctcttgctctctgtagccctctctcttgccacatgatgacttccaccaggttatgactcaacaggaaggccctcacaagatgtggaacctcaatcttagacttcycagcctccagaagtgagccaaataaatttctgttcattatacattacttagtctggattattctgttataagggcacaaaacagactagtacacaatatgtgtgtgctttttacatcagatgaatctcatggtcagttaagtctggaaatcacttgtctaaatgagttgcgtttggtttttcctaagaaatatgctgtcagttcctcaagagaagcaaaatataccagcccttatatttcctttaagaagactcacctaatttaggtcatatatctcaaagtgttatggggcaagatatattcaacactgtattcagtatggtaagcttcattgaataaattttcagatgctttgaatgaagttgcgtaaa

SEQ ID NO: 314099 - DNA, 558 bp, Homo sapiens
ttccatattttttgtatcttttcagcagtgccccaccccggtaccaatttactgtattggttcattttcatactgttgataaagrcatatccgagactgggcaatttataaaacaaagaggtttaatggacttacagtttcacatggctggggaggcctcacaatcatggtggaacgcatgaagaagcaagtcacatcttacatggatggcagcaggcaaagagagagcttgtgcagggaaactcccatttttaaaaccatcacatcttatgagactaattccctatcacaagaacaatgcagcaaagacctgcccccataatttaatgacctcccactgggttcctcccatgacacatgggaattgtgggagttacaattcaagatgagatttggctggggacacagtcaaaccgtatcagcagccatttttattatttcctgttcttaattcttcatttgctacacttcataactccaatgggtagtcacagaaatatttggcttgccagtttttaacattgtattagtcagggttctctagtaagacagaattaa

SEQ ID NO: 314100 - DNA, 527 bp, Homo sapiens
agaaagcacccagttgatgatagactgttcaggtcatatggtgacttgatgactcatagtcaaacattcagtttctaccaaagcccggtaacaggccaagagctgtctctcaaaaggagagtagttatctgcagaagatggcagggcctgctccaaaatcctagaggccttcatcatgattcatctatgggaggctgccaaatgctccaaayggcatttctatctgccactgacacctcgagcaccattggatctgctgggtcatatggcccaagtggcagagcagcttgtgtagcagcctggacctgttgcagagccttctcctattctgggccccactcaaaactggcagccctttgagtcacttgataaattgcctggagtaactcgcccaaatgaagaatgtgttgcctccaaaatccaaagacttgcaatcataggggaaggaaacatgtccctcttcacatggctgcaagagagagaagaatgagaatcaagcaaagggagaagccctttttaaaaccatc

SEQ ID NO: 314101 - DNA, 547 bp, Homo sapiens
caggtgtacaaatattaccaactatctgctagcaacttagaaaactgagataaatggacatatctctagtaaaatgtgacttatagttaattcatgaagtaataataaagcttaattagtcccatggtttttaaagaaactaaatagtgatttaaaattttctcacaagaaaactccagaccttgtctacttcaaagttgagatctacaaaagctttaaaaataaaaggattgtggtccaatttattctgagttcagcatawgcttgttaccaaacccaaaaatgttatagaaagacaaaaaaactgtagaaccacacttgttaataaatatagatatgaaaattctaaatataaaaattttaaattaagtccaactctggagaaaagataatacagcaaaaccaaattggatgtatcctatatattaagaattactcaacattagaaaattcactaatgtgattcttttaatatgttaccgttactgtaatgtattttttaatatgttaccatgttaccacacattaacacttaatatattaccac

SEQ ID NO: 314102 - DNA, 600 bp, Homo sapiens
tggaaaggacagtagactatccctagaaactcccaaggttgacacttggatctgacagagtctcattctgtgtctctccacgaaggagagagccctggactcctgttctagttctgcccctttgaaactcaggcttggcaactatatagtgacggagtaatcgcacccacctcacaggtgtgctgtgaggactcagtgactctggraaggtgctctgggaactctaaagcgctatacaaacacaatgtagtcatgacttgggtttcattttccctagtggcaataattgcctgctaggcccttgagtccaaactaaaacaaagcccttaagaaaaacattcccaaattcaagattaataagggaaagtaaaagttaagtacttgttttaaagtacttctttttcccctcatgacagaatttaaatacaccaggaaaaaactataattaacctttggtaaatatcttccctctaattgttttttcgtgtgtcatctttcatagtttaattacaaaaccatatcactgcccgtttgccatctgccaaccagttatctagaacattaaactaagagaacattgatcatgtgagcatgaagtta

SEQ ID NO: 314103 - DNA, 600 bp, Homo sapiens
tggaaaggacagtagactatccctagaaactcccaaggttgacacttggatctgacagagtctcattctgtgtctctccacgaaggagagagccctggactcctgttctagttctgcccctttgaaactcaggcttggcaactatatagtgacggagtaatcgcacccacctcacaggtgtgctgtgaggactcagtgactctgggaaggtgctctgggaactctaaagcgctatacaaacacaatgtagtcatgacttgggtttcattttccctagtggcaataattgcctgctaggcccttgagtccaaactaaaacaaagcccttaagaaaaacattcccaaattcaagattaataagggaaagtaaaagttaagtacttgttttaaagtacttctttttcccctcatgacagaatttaaatacaccaggaaaaaactataattaacctttggtaaatatyttccctctaattgttttttcgtgtgtcatctttcatagtttaattacaaaaccatatcactgcccgtttgccatctgccaaccagttatctagaacattaaactaagagaacattgatcatgtgagcatgaagtta

SEQ ID NO: 314104 - DNA, 607 bp, Homo sapiens
attcggcttttacatctgaacacaaacgtgtatgagatagccaaaacactacaaaatccacgagtctgcacatgtatctcaaaagaaccttcgacaactcaaagagtgcctgttagggtgttgcacgattgctactgcacttctcaatgtctgccgctgaagcctagcggacaggtttgtgttctctgcggctagagtggtgtctcacacacagtaagagtccaagacagaatagctatgtggggtgctcactgcagtgctccataaatatagggtacaaaccactctaagcagaaaataagtcctcggtgctggcccagagagacttgcaaacaaactgatgccagagactctatatcatggggctrgcgggataattacatgagattacacgaaaaacgtttaaaactgccgttggctagtagtaaatgttcagtaaatgcactggcctttattattgggcatgggcgctctgaagggataggatcccccaccccacgcccaaacccgttcgccccgccgctcacccggggccccagggtgcgggctgcatccccgcagcgtagagacatttcctctttaggactagcgcagtgcaggggttgag

SEQ ID NO: 314105 - DNA, 490 bp, Homo sapiens
agtctaacagccacctgctacacataaagctgtttcaaatttggaaaacaaagagaaagagtgaccaaagggcagaaatagaaaaagaagattttaagctataaaatacrtttgtaaatttttcattttgatagatttttacatctttattaaaaacttttgcaaaaagaatactatttaatcctcatatagacctgggaagggaatacgaaaagaaagaaaacagacataatgctaagcaggatatgtggcagcatcaggtaagaatctacttgggaggcattcaagaaggaggaatggcttgaactcaggaggcagagcttgcagtgagccgagattgtgccactgcactccagcctgggcgacagagcgagactccgtctcaaaaaaaaaaaaaaaaaaaagaatcatttttcctgtttgatagctgataatactgaaactcagattaatattcaagaagtccctactggaaatttattacatattt

SEQ ID NO: 314106 - DNA, 448 bp, Homo sapiens
gtaggcaagaggtaaataaacatttatactcttattaccataattaaataagagagaccagtgctaacatctttctcagaactttacagttgggaatctgaaacaaacctgcatagacctgacagggacaggagactagaggggaagaggtcccattgattacagacctatagaaagggggtgagacaagtattttgccttaaaaaacaactattatgtatcagtaaaaaaggaaaatacgttaccagtcacagcttgcctacatccctggacctcygattcaaaatgaaggagttttaaaatgacaccatattatccctttcttacctatctttcttttttgtttattaaggctcattcagtctataggtttctgttcagaagaagttattatatgttaaatactttataaattattttcaattatgctatgtggaaattgctaaca

SEQ ID NO: 314107 - DNA, 455 bp, Homo sapiens
ttggccacaagttattatactaaggacagttaccaagctcaggtgtatagatttttctcatctgaaatgggaaatcaactaaggatttaaagcaaagccatattgagttagagcagtagtagtgcaaaagagaaaggcaaagattaatttggaagacattaggaaaacagaatcaataggagcaagggctgcctgtatgcacagaggaaagttaagacttgttytagattctaaggttgaatgcctggaagaatgtttatcttcttagaaaacaatgtagaaatgaagagtaggtttatttaaaaatatgttgttaggtttttttttcttgttggattttaaatcattagaaatgactaggcttcattcagtagacttttaaaaaaatcacaaagaataatggtttttaaatgacagttgataaatcagaaatctctagggactacgtgacaaaa

SEQ ID NO: 314108 - DNA, 565 bp, Homo sapiens
taaaagatacagctaatgagaagcattggccacaagttattatactaaggacagttaccaagctcaggtgtatagatttttctcatctgaaatgggaaatcaactaaggatttaaagcaaagccatattgagttagagcagtagtagtgcaaaagagaaaggcaaagattaatttggaagacattaggaaaacagaatcaataggagcaagggctgcctgtatgcacagaggaaagttaagacttgttctagattctaaggttgaatgcctggaagaatgtttatcttcttagaaaacaatgtagaaatgaagagtaggtttatttaaaaatatgttgttaggtttttttttcttgttggattttaaatcattagaaatgactaggcttcattcagtagacttttaaaaaaatcacaaagaataatggtttttaaatgacagttgataaatcagaaatctctagggacyacgtgacaaaaatacagagtcctatgccccaactttggagattctagtttagacattaggtgggggccctggaaactggtatcaaaaacaaaacac

SEQ ID NO: 314109 - DNA, 346 bp, Homo sapiens
aaacaaacttcccttaacaacaggctctcagctcttcctattttattttctaatatctgcctgtgccgcatcatttaagattgttttgcttgcaatagcatatctctaatctttaactgattcttccagtagtctctttttgctgttggcattctaatcaattaaagttttctattgtgctgcctcctgattttccttcatccattttttgctccataaagaatgaaatacatgacgaggtgaaagcctatgtttatayaggtatacctttattttatttctcacacttgaataggtcctttcattttatttttcttacattttcttatatcaggtcaaatttccc

SEQ ID NO: 314110 - DNA, 591 bp, Homo sapiens
atgaggcatttaaaaaggctttgcagttagatcagaggctagctgtcatccttagaaatctccccmctcccaatatccatgggatcattttaaattgctggctgctctcatatggacaagaattctttccaacttttgacatttgtgtgggcttaggaaacgaaaatggattttgacctaacaaatactcattctatgcactgatattagcagagagaaaataacattaaatcagatgtttacattcccatatataagccaagatataagatggggaagcctttcaggtacagtaaaaaagatagtgtatggaaggtcctacagagcgcattatactgatgcgttccagtgcccatccagtcactatgtgactcagtttccaaattgataaaagtatcactgaattatgtaatagaaggcagtaatatcatttctgaacaaaatactatattcatttaacataaatttattgagcacttacagggtgtcaaattgctgttcttggtactctaccgatagcaaggaagaggacaacaggcattttctaacagggttaacattagagctgtgcctagtacatgcgagagaata

SEQ ID NO: 314111 - DNA, 569 bp, Homo sapiens
gtgcaggaaagacccacccccataattcaattgcctcccaccaggttcctcccatggcacgtgggaatcgtgggagttacaattcaagatgagatctgggtggagacacagccaaaccatatcactaggttggcagaaagtttaatatgataaatcatgtaaaaacactttgaaagtataaaatgctccaatgattttcagttgtctgtattagacattaggagaaattggctccacattctgatattatataactatgaacatgtatagaaacttagtaggtaacatctattgagtccttacwttggatcatgagcatgaatcatcccttttaatcctcagcataattttgtgggtaggtactattattgtccacatttgacagaggagaaaatcaaacatggcttggagcagttaagcaacttgatcaagttcacctaactagttaattgctgagctagcaattggttttagttgtatcaaatttcaaagcaaaaattttaactctgcatgctatttataattgtagctccaactatactatgaagtaaccttaaaaatgcaaaact

SEQ ID NO: 314112 - DNA, 555 bp, Homo sapiens
caaaaagtgaattttttccccaaattgagctgagtccacctgttttggtaatgagttagagaaatatattctgttcttttttagaagctccatcagagtggaagacatttatgaactatataaatgtctcattagactccgtctcaaaaaaaaaaaagaaatgtctcattaatttttagttattggtttctcattctatgacccagagtcatgaaaatttcagaaaaccacaggttatttgttgagtgttcaaattgcataattaaataactgtcattgttgggaaaggagaatgatatggaagacatagcccacacttggctcttgaaaagtttaccrctgaactgagctaacagataaaacttcatcaatttcttatcactgaacctgagggttacacacagctgcacacatccttgctctgtaactctttctgtgagagaggacatgtgtaacttcctatctaaggtcaatccctttatccctcttctgagagctgcaatggagatccagaacacagtggaagaatatattgaaatatgtgtatctaaggtg

SEQ ID NO: 314113 - DNA, 576 bp, Homo sapiens
actttcctggtgaatttgcagaaaatttgataaataagaaaaacaagtcgtaaaatggatcacccaaacttcacagtaactgccaataaagggaaggttgaagaacattagggtgagagccatcatgaacctgccacatcctctttcctccactgtgctagttggcatagaccttcaaaagacaaatttgagtttacagaacagaagcaccattccatgttattacatctccttgaaccaagtgtagaggaaaagaataaaaggaaatctctaggctcaggaattttgacagcttcttttcccagaagagaagcaagaaccaatatctatcacctcccaccaattaacccctcacacaacctctggggcggaacaggaagttagattggaaggcgggagtggttaacgaacatcatttcaaggaaacaacaaaaaaaggtttcaagcagagtatttccctttaacaaaaacttgtttcagaaagattttcgtaaattaatgttgggcaattgtattatataatraatgtacagtgtaaaatcttttgtatgtatggatgtttacagtagagtatat

SEQ ID NO: 314114 - DNA, 548 bp, Homo sapiens
ttccttccttaatcatctagaggagtccttcatgtttctccaaacacattatctgtatgtggtgcctttttataatacagggacctccagaaatcctcttcgtttattcttttcccttcactttaaatatgcatctttatctgtctttttacaaaactcaaagtcaatgaatgtgcctgatacttttcattactattaaattagaaaattttgctcaggaaatatgagcaaagatctatgactcctacttatccaaatctgaaagaggttttcttctgtgatgttctgttatacagatagatgttagctccatggtatgtattagcaatggctttccctcaaatggcaagtgctcagggccatggtacctactctcttctaaaggctgggggwattaaaacacagtaggattcagggcagttagttactagccaatagtcatctttcggctttggaaaccttagatttttatcagatcctaaaatctggggggagattttctcagcatttttaggcactgtgaaaatcttactttgaaaggaaacaaa

SEQ ID NO: 314115 - DNA, 573 bp, Homo sapiens
gtgtgcttatacctcataaaacacttaagtcctctacaaagtaatttaggtaggtaccagtaaaatccagctaaactaaaatgttttgttttattaaatcttaaagtcatttagatgacatttgttctttaacttcggagaaaactgagggagtaacacatattgttttccaaattagtcatcaagctacatttaagtggcatcgtatggtacattaaacggtatctggtaaaacgaaaattcttcattttgaawtgaggagtcttttaaggttttcagagtgaccatattttaccatgtaatttatcatccaaccgaatatatcctgagattaaaagagtgcttttcataactgtgcccaaacaagcctaaatcaaggctgtttcaaaattagacatgtgccccaaccctctgttttgctggggcaaggaacttccatgtaatttaataattacccatttgagcaaatgtgcaagaatgagatataaaacttggcttgaaatatttatcccatttaatccctttcctctgattttgctattatagctcagacttcccagggtacctgcaggc

SEQ ID NO: 314116 - DNA, 570 bp, Homo sapiens
tatctataccagtaaatatatctaagttgttttggcattagctgttttctattttgaaagtttccaaagaaactggaagttgttagcagggaataacactgggaagtaaatgaagggggctttcccatttttacttttcagtttcctatactgtttgagtttttatagtaatcttaataatttaacaaaacataaaggaataaaagataaaggtttttaaaaagaaaaatacctacaagtcttcaggttcattgacttttattggaacaatgaagaaaacttgtaaataatgctagtaagccactgccrtttacctttaaattataaaacatgcatttccagtggcctggataaggacaaattttcagatataagggaaaaaatttcattcatttaatttgcttccttgttctatctgatttttttattatgtcaggaggcatctggaacttttttatgatgaggttgtgcatcataaagatcttttctaatgtcttcataatctggcattgcagtctggagggatgagaaccatacatttggcatgcttctataaaaatagacttgatt

SEQ ID NO: 314117 - DNA, 461 bp, Homo sapiens
taggattgtggggatcaattgagttagtaaagcttataaatgatgagtgttgtgcctggcacagagtaaacattcaataagtttagttggtgactgcttcaagctgaaagtaaatttgaagaacatgaaataaaatattaggataataaataatagattttcatgcaaagccacatactcttctcataattacacactgcatctcaggacgtcagtcatgattttgctatgataactctctttttgggaatgttgtctgcttatccatcttcccctcaactcctacttttttttccataacgcagtaaaataattcttactatgtgtcctcataatatgtgtccttaaacaataaatatgagaatgactggtgatttmtttaaaaaaaatccaaaatatttttaagaccaaagaaatattaatttgtattgtacttatatcaagtgaatgtttggcaaaga

SEQ ID NO: 314118 - DNA, 620 bp, Homo sapiens
ctggtatatttttatagatattctgtattattctcaacctttattgagagagggctgcaattgtcaaaggtacacgtatcttctgagtaaaactgcataggggagagactttagcacttgcactacaacaggaaaattgataaaaggattacatatttagaataaaactttatttccttcacaaactaatatatcacttattaatgtgtgtatgagctatggataccagctaacattctatagtggttttacactcataactaccagagcaagaaaccaaacataccaacttattctcacataggcacagatacacagagatgcctaaagccactgagctgacaagtttcattctcagctgtgctgyaatacataagtagattctcaagattttctgcccatatatgtagcagcatctatttccttattttggataatgtgagaaaatatttgtcatctgaaattacaggcagtctattagagagataacatataacctacaggtccacaagcacagactccattgtataagctcaattctaagacatcatattatgatgtaaataaggcatgacaggaaacatctctcctgcctgacaccatcaaatctttttttgata

SEQ ID NO: 314119 - DNA, 564 bp, Homo sapiens
atttaatgttaatcctagtatcctcaaaagttcttagacaaccagtcaactgtcccacatagtacctgagggatcttgttggaagtggagaggttttacaatgaagagtgattgacatcattacacttatttattcactcattgtattgctacccattgaaatttacatgtgaccatatgagtggatttataaattatatttcattttaataaattcatcttacaaatgttcctgcaaagaaaatttccaattgaaatgatattaatcatacaagcataagaaaccaatgagaaaatggcagaaatactttagttttagtatgatttctttgtaagtcgtatttcaagataaatgaaataattttctcagagctgataactggcctaaattttgaaatttaaaatgatcaagaatgcttttgaaaacatgaatttatattcactattgtatgacccttgcctaatgtgcatattaaacaytgagatattagctaatcatagtagtatatgcatgtaattatgaatttgtatattatttataatgaagaaagaacaaacattttg

SEQ ID NO: 314120 - DNA, 589 bp, Homo sapiens
tttactgcagcaatactaataatagccaagatatgaaatcaacctaagtatccatcaacagatgaataaaaaaaaatggtatayaaaatatgtttggaaatgtaaaggatctaaagttgccaaactttactatctaatttcaatacttatttgaaaattctaagactctagatcaagcattgccaaaagaccaaaaggacaaagaagtatatattttagcttttttgggtcatacggtctttgttacaactactcaaatttctcattttagtgtgaaaacagtcatagacaatacataaataagtgcgtgtgactatgttccaataaaacattatttacaaaaactttcaatggactagatttgtccagggagccctagttcgctaacaacacatctagacaatatggtcttggtgtaggatagatatatagatcaatgcaatggaattgagtactgaaatgtacccttacagttataatcaaatgatttttgacaacagatgccaagggcaatttaataaggaatgcagagtcttttcaacaaactctgctgggacaattgaatattcatatacaaaaatgttcttaa

SEQ ID NO: 314121 - DNA, 541 bp, Homo sapiens
actattaccaaaaagacagaagaataacaaatgctggcaaggatgtggagaaataggaactcatacagtgttgatggaaatgtaaattagtacagacattgtggaaaacagtaggaaggtttctctcaaaactaaaaatagaactaccatataatcccacaatcccactgctaagtatatatccaaaagaaagacaatcagtatgttgaagagatatcttcactctatgtttactgcagcaatactaataatagccaagatatgaaatcaacctaagtatccatcaacagatgaataaaaaaaaatggtatataaaatatgtttggaaatgtaaaggatctaaagttgccaaactttactatctaatttcaatacttakttgaaaattctaagactctagatcaagcattgccaaaagaccaaaaggacaaagaagtatatattttagcttttttgggtcatacggtctttgttacaactactcaaatttctcattttagtgtgaaaacagtcatagacaatacataaataagtgcgtgtg

SEQ ID NO: 314122 - DNA, 589 bp, Homo sapiens
tttactgcagcaatactaataatagccaagatatgaaatcaacctaagtatccatcaacagatgaataaaaaaaaatggtatataaaatatgtttggaaatgtaaaggatctaaagttgccaaactttactatctaatttcaatacttatttgaaaattctaagactctagatcaagcattgccaaaagaccaaaaggacaaagmagtatatattttagcttttttgggtcatacggtctttgttacaactactcaaatttctcattttagtgtgaaaacagtcatagacaatacataaataagtgcgtgtgactatgttccaataaaacattatttacaaaaactttcaatggactagatttgtccagggagccctagttcgctaacaacacatctagacaatatggtcttggtgtaggatagatatatagatcaatgcaatggaattgagtactgaaatgtacccttacagttataatcaaatgatttttgacaacagatgccaagggcaatttaataaggaatgcagagtcttttcaacaaactctgctgggacaattgaatattcatatacaaaaatgttcttaa

SEQ ID NO: 314123 - DNA, 633 bp, Homo sapiens
ctaataattgagaagtgttgattattataatgatagtgtagttacaaatcttttcaaattctgtgacatttttgtagccataagaaatcacatatcactgacaagttatagttctctatatacctccttgattttatttcatctcactgagggatgattattatatatgcatatgaaatattattcctatgttataaaaggattttatacatacaaatataacgaggggaaatgtagcctcaaaagaaaagaaatggatcatagtccacatcttaacattaatgctgatgtaaaaatgaaatactcacatttctaatgacagattcaaccattaataagttggaacaagtattagctgatcatgtagtacttttctttggtgtcttgatgaaggttgacatttttgacattaagggttaattagwtgccacttagaatgaggtcacaaatggctaattgcaccttcagctaggtaattactgtcatgtatcaaattctcattctgtgtaattatacaggaatcaggtgctctgactgctcaactagggatacctttgctttccaagtcctctctgtgggaattctgaagttttacacaggagctgaattcacttgcaatttgacctgatgact

SEQ ID NO: 314124 - DNA, 604 bp, Homo sapiens
tgattccatgtctttgttattgtgaattgtgccacaatggacatacgcatgcatgtgtctttaaaacaaaatgatttatattcctttgggtatatacccagtattgtaattgctgggttgaatggtatttcttatgagttactttcccaagtcccagaacatcacttatgtcatgaattaagtaagtcacaaattcaagcccagattcaagggggcaaaaaaggaatattagattccacttctcaatggaagaagtatcaaagtattttaaccatctttaatctattatattcatcttttgctgtatgtaatacactctaaattagataacattaattttagcaacagtatctagccttgaagaaatcatattataatttttgaggtaaacacaacatataaaaaagcaaaaataaaggtaaatatatgaaaatcatctaaatgctttccctacataacatcactgaaaattgcctgtattgtgkctctaagccaatttttagtattcacgtagactaaatcaactggaaatatgttactctgaaatgaatggaataaaaatagtggagtttatacttcagaagagaaagttgcttatagtttg

SEQ ID NO: 314125 - DNA, 581 bp, Homo sapiens
atttaaataaaaagcaatttgctttgcctgtaattgaattccccttgctgttattgctaattattgacaatatttgtgatggactaagaggcttttgcattcagagacaaattatttttctgctatatcttagaacagacagtgggctgtctttttgatatcatagtctgttaccatggaaataattgtgatttgagaaatgtatcagcaacatgcaaaaaaaaaaatctctatacagagaatttccttttctttactgctatgggcattgtacagtcttgcatagtaagtgcatgataatgacttcccacatttatataatatgtctttgttttacaatgtcctacacaatagataaagcatggtatatgcaactataaatgaaagactactaaagtaaattgaaagcaataaagtgaaatgatcctatatttcagaataaatttacaattaaattagaataaaaattctgctttcaaatttctcaatgttgagaagattcttataaatgagagtgatcwcaataagaaaatatcaatgttttattttaaaatacatttcttatttttgaggtcattact

SEQ ID NO: 314126 - DNA, 601 bp, Homo sapiens
ttcctcagtttttctggacatgcagattaactgcaagggacactgagaaatgttaccatgaaacaggaagaaaagtaacataccaaggttttgtatggtccatatatatgcaattaatcactttcttcttcaggtgccaattgaatggagaggatgccaagttagaactgccagatacaaggaacgtggattyttttttccatttatttatttttttttcttttgagatggagtctcactccgtcaccaggctggagtgcagtggtgcaatcctggctcactgcaacctccgcctcccgagttcaagtgattctcctgcctcagcctcccccacccctccccacccttggagtagctaggactacaggcacgtgggctaatttttgtatttttagtagagacagggtttcaccatgttggccaggattctctctatctcttaacctcgtgatccacccgccttgcctccgaaagtgctgggattacaggtgggagccaccacacccggccatggatttcttgatgaccgtgtggagctgataatttcacttcctcaaacttgccctactacctatttaaattaagataagtaagaaaaaaa

SEQ ID NO: 314127 - DNA, 601 bp, Homo sapiens
ttcctcagtttttctggacatgcagattaactgcaagggacactgagaaatgttaccatgaaacaggaagaaaagtaacataccaaggttttgtatggtccatatatatgcaattaatcactttcttcttcaggtgccaattgaatggagaggatgccaagttagaactgccagatacaaggaacgtggatttttttttccatttattkatttttttttcttttgagatggagtctcactccgtcaccaggctggagtgcagtggtgcaatcctggctcactgcaacctccgcctcccgagttcaagtgattctcctgcctcagcctcccccacccctccccacccttggagtagctaggactacaggcacgtgggctaatttttgtatttttagtagagacagggtttcaccatgttggccaggattctctctatctcttaacctcgtgatccacccgccttgcctccgaaagtgctgggattacaggtgggagccaccacacccggccatggatttcttgatgaccgtgtggagctgataatttcacttcctcaaacttgccctactacctatttaaattaagataagtaagaaaaaaa

SEQ ID NO: 314128 - DNA, 627 bp, Homo sapiens
cagtcttgataatcttttatagcaatgcaaatggactaacacaacacactataactctttctatagagatgaaaaaagtaaggtaaagaagatggtaaaattctttcccagtcattgtttggtctcatgactcagtaaaagaatagaacaatactgaaaattattcctttttatttttcttattcatattgttattttctacaaactagatgctaagccattttaaaatagagtttcactttgtcaaatctttcacagaatttctaacgaactgttcttacagtcttatgaaaatatgttctggaaatgtgagtaaaatttttccattaaagacatgcatagaaattgacattgtaattctatcctacatatttccctttcagatagttattctatatttctattgttaccatctctaacttcaaaaacacttttctggaatttccaattatttttatttggcagtataaatattatactgtatgtgttttaacattaaaactctaycactattgtttattgactgaaaagccacttttcttatattgtctcatctctctctaatcattttgaatgtgttcttagttttgtttaggtattttcattaactccttttcaagtaagtta

SEQ ID NO: 314129 - DNA, 480 bp, Homo sapiens
gagaaaaaaacggacaattgatgaatcctcagctctgtagcattgtgttcttatcatgaaatgagtttattcagcctctcacaggctccgtcaatagagcctgtaccttgacctcatttttcagtggtcaatgatgaattttcactgyttcatcaacactctttcacccggttccattgtaactgacatcagatatttcgtggctactgatttggggtaagggtgaagtccatggtcttggagcacagccaaagtaagaaggacaatcagggctctaaagcatggcctcattatcactgtgttctaataaactgaactgtcatgtcactaaagcactgatatcttcagaaattctgttatggctctttgatttactttgttatcatatatgagattttttagtaacttgaggaaactcctttcttgctgtgacctcatttttttttcacccagggctgtcttttactttatgttgcacct

SEQ ID NO: 314130 - DNA, 606 bp, Homo sapiens
tccttcccaaaggagactagccaaagttccatctagtacttgtgtccatattcaattctagagtctctgagtgattcagaaccttcttcatcagatctrttcatggttcctttttgcttccccaccatgcgtaactgatatggtttagctgtgttcccacccaaatctcatcttgaattgtagcttccatagttcccacatgttgtaggagggacccagtgggagataactgaatcattggggtggtttctcccatactgttcttgtggtggtgaataagtctcacgagatatgatggttttatgagcagaaaccccttttgcttggttctcattctctcgtgccgccaccatgtaagttgtggctttcaccttcctccatgattatgaagcttccccagccacgtggaactgtgggtccattaaacctctttttctttataaattatccagtgttggctatgtctttatatgcagcatgaaaatgggctaatgcagtaacatgtgtaaaacaatgggtgaaataaagataagagcagtaaatactctcattctgaaaaaagaaaatcaggaaaacttaataattagtggacacttaaccacaaat

SEQ ID NO: 314131 - DNA, 624 bp, Homo sapiens
aaatttcaacttccccatgatctaaagagtttttgacagataaataattggcaaaataatttgattggcataaattttctccaggcaatagctctagtgcgtggtttacagctagttaagcagatagcaaaaggtggctgacaaacctcgttacaatggtgcttgtcctctttttctgtttctgctaattcatctgcctatattttatttgttatatttttgagggcaatacatgaacttgtgaagaaaactgtttcatgtcagcagcaaatcaactataagagaggcttcctagtaaccccatgatgatgtcatttgcagttactgtggtcatgggatttcacctgccactaggaatgtcaagggatagattcacagggaagttaaaaaaagagagctgaatcgattatctggaaatataaataaatatttgtttgaaccatataaaattgaagtttttataggtaaaaacagtagaataccagcaagataatatgccttaactgaatagaacwgcaatggcagaaaatttgtgatttgagtagtcactctcttcaaagataaaattaggtctcattatttaactctacaccttattttgtttctggaaacaaaaccaaagcc

SEQ ID NO: 314132 - DNA, 628 bp, Homo sapiens
cctattctatattattatgctttatttttttaatgcagaagcatagttgcttggacttaagaattctgcctagaaattggttaatgcacacaaggctagtttaatatggaataattgtctcttaaaattgcactatgttgctgtggagggtgccaagagggacaaagctatcttatgctgttctgcggtctgggataggaattatcagtaggagaaaaactttgaagtctttgtgttcaggcarcatatagaaattctgataacccttctctaaccgtcttcaaaatcaatatgcctgtgccccagtcctcaatcaatctcaccactagttgtgtgtccttgaattatgaattactcaacctctctgggactgactattcattcatttgcacacagaaaacgtctggaagatctctaaggatcttgaaaatactaacatgctatgagtataagtgtaaaaatacctttaaaagttgaaaatgatgtatagataattattataaaattgtgccaaaattagcacttccaattctgctgtttagtgactggccaatattatgaactccattttacagatgtgtagatgatttttcaagtaacttaattgaaatgtttatggaacacctat

SEQ ID NO: 314133 - DNA, 628 bp, Homo sapiens
cctattctatattattatgctttatttttttaatgcagaagcatagttgcttggacttaagaattctgcctagaaattggttaatgcacacaaggctagtttaatatggaataattgtctcttaaaattgcactatgttgctgtggagggtgccaagagggacaaagctatcttatgctgttctgcggtctgggataggaattatcagtaggagaaaaactttgaagtctttgtgttcaggcaacatatagaarttctgataacccttctctaaccgtcttcaaaatcaatatgcctgtgccccagtcctcaatcaatctcaccactagttgtgtgtccttgaattatgaattactcaacctctctgggactgactattcattcatttgcacacagaaaacgtctggaagatctctaaggatcttgaaaatactaacatgctatgagtataagtgtaaaaatacctttaaaagttgaaaatgatgtatagataattattataaaattgtgccaaaattagcacttccaattctgctgtttagtgactggccaatattatgaactccattttacagatgtgtagatgatttttcaagtaacttaattgaaatgtttatggaacacctat

SEQ ID NO: 314134 - DNA, 628 bp, Homo sapiens
cctattctatattattatgctttatttttttaatgcagaagcatagttgcttggacttaagaattctgcctagaaattggttaatgcacacaaggctagtttaatatggaataattgtctcttaaaattgcactatgttgctgtggagggtgccaagagggacaaagctatcttatgctgttctgcggtctgggataggaattatcagtaggagaaaaactttgaagtctttgtgttcaggcaacatatagaaattctgataacccttctctaaccgtcttcaaaatcaatatgcctgtgccccagtcctcaatcaatctcaccactagttgtgtgtccttgaattatgaattactcaacctctctgggactgactattcattcatttgcacacagaaaacgtytggaagatctctaaggatcttgaaaatactaacatgctatgagtataagtgtaaaaatacctttaaaagttgaaaatgatgtatagataattattataaaattgtgccaaaattagcacttccaattctgctgtttagtgactggccaatattatgaactccattttacagatgtgtagatgatttttcaagtaacttaattgaaatgtttatggaacacctat

SEQ ID NO: 314135 - DNA, 615 bp, Homo sapiens
ctctgggactgactattcattcatttgcacacagaaaacgtctggaagatctctaaggatcttgaaaatactaacatgctatgagtataagtgtaaaaatacctttaaaagtygaaaatgatgtatagataattattataaaattgtgccaaaattagcacttccaattctgctgtttagtgactggccaatattatgaactccattttacagatgtgtagatgatttttcaagtaacttaattgaaatgtttatggaacacctatgctaggtacagaagcttagaagcttatccaggtttgttgggccagaatctcttgattcagagggccctctttactatacctatatctatctatctatataaaaaattaggtatgaagtgaatatttaagagtgaatatttctagaatgagaaaagaaatcacagcaagttaccagagtcttagagattcaagtctcttttttttctgagctccctttaagtaatttatctgaattgtttacatagaaatgcttttgattgaaacctggcttcccctccttacctagacagaatattctgtagcttccagcaatgtgccacactaagtggggcctgtgcaagtgaacagc

SEQ ID NO: 314136 - DNA, 615 bp, Homo sapiens
ctctgggactgactattcattcatttgcacacagaaaacgtctggaagatctctaaggatcttgaaaatactaacatgctatgagtataagtgtaaaaatacctttaaaagttgaaaatgatgtatagataattattataaaattgtgccaaaattagcacttccaattctgctgtttagtgactggccaatattatgaactccattttacagatgtgtagatgatttttcaagtaacttaaytgaaatgtttatggaacacctatgctaggtacagaagcttagaagcttatccaggtttgttgggccagaatctcttgattcagagggccctctttactatacctatatctatctatctatataaaaaattaggtatgaagtgaatatttaagagtgaatatttctagaatgagaaaagaaatcacagcaagttaccagagtcttagagattcaagtctcttttttttctgagctccctttaagtaatttatctgaattgtttacatagaaatgcttttgattgaaacctggcttcccctccttacctagacagaatattctgtagcttccagcaatgtgccacactaagtggggcctgtgcaagtgaacagc

SEQ ID NO: 314137 - DNA, 615 bp, Homo sapiens
ctctgggactgactattcattcatttgcacacagaaaacgtctggaagatctctaaggatcttgaaaatactaacatgctatgagtataagtgtaaaaatacctttaaaagttgaaaatgatgtatagataattattataaaattgtgccaaaattagcacttccaattctgctgtttagtgactggccaatattatgaactccattttacagatgtgtagatgatttttcaagtaacttaattgaaatgtttatggaacacctatgctaggtacrgaagcttagaagcttatccaggtttgttgggccagaatctcttgattcagagggccctctttactatacctatatctatctatctatataaaaaattaggtatgaagtgaatatttaagagtgaatatttctagaatgagaaaagaaatcacagcaagttaccagagtcttagagattcaagtctcttttttttctgagctccctttaagtaatttatctgaattgtttacatagaaatgcttttgattgaaacctggcttcccctccttacctagacagaatattctgtagcttccagcaatgtgccacactaagtggggcctgtgcaagtgaacagc

SEQ ID NO: 314138 - DNA, 557 bp, Homo sapiens
cagcaatggtccataaacaaaaatggaaacctagaaatgacaaakaattcaaaagtatgaatgtcaaggaagctcaatgagatgtaagacaacattgaaaatcaacatgaagaaacttctaaagcaatccaggaaatgaaagaggggatggccaggcacggtggctcacgcctgtaatcccaacactttgaaaggcagaggtgggcagatcacaagatcaagagatcaagaccatcctgcccaacatgatgaaaccctgtctctactaaaaatacaaaaattagctgggtgtggtggcacacgcctatagtcccagctactcgggagattgaggcaggagaatctcttgaacccgggaggcggaggttgcagtgagccgagatcgcgccactgcactccagtctggcaacagagcaaggctctctctcaaaaaaaaaaaaaaagaaagaaagaaagaaatgaagcaggagataataagatcttgaaaagaaatcaatcagaacttcttttttttaatgaaaatatccataatttattgggaacctaatgaagctcaa

SEQ ID NO: 314139 - DNA, 557 bp, Homo sapiens
cagcaatggtccataaacaaaaatggaaacctagaaatgacaaagaattcaaaagtatgaatgtcaaggaagctcaatgagatgtaagacaasattgaaaatcaacatgaagaaacttctaaagcaatccaggaaatgaaagaggggatggccaggcacggtggctcacgcctgtaatcccaacactttgaaaggcagaggtgggcagatcacaagatcaagagatcaagaccatcctgcccaacatgatgaaaccctgtctctactaaaaatacaaaaattagctgggtgtggtggcacacgcctatagtcccagctactcgggagattgaggcaggagaatctcttgaacccgggaggcggaggttgcagtgagccgagatcgcgccactgcactccagtctggcaacagagcaaggctctctctcaaaaaaaaaaaaaaagaaagaaagaaagaaatgaagcaggagataataagatcttgaaaagaaatcaatcagaacttcttttttttaatgaaaatatccataatttattgggaacctaatgaagctcaa

SEQ ID NO: 314140 - DNA, 557 bp, Homo sapiens
cagcaatggtccataaacaaaaatggaaacctagaaatgacaaagaattcaaaagtatgaatgtcaaggaagctcaatgagatgtaagacaacattgaaaatcaacatgaagaaacttctaaagcaatccaggaaatgaaagaggggatggccaggcacggtggctcacgcctgtaatcccaacactttgraaggcagaggtgggcagatcacaagatcaagagatcaagaccatcctgcccaacatgatgaaaccctgtctctactaaaaatacaaaaattagctgggtgtggtggcacacgcctatagtcccagctactcgggagattgaggcaggagaatctcttgaacccgggaggcggaggttgcagtgagccgagatcgcgccactgcactccagtctggcaacagagcaaggctctctctcaaaaaaaaaaaaaaagaaagaaagaaagaaatgaagcaggagataataagatcttgaaaagaaatcaatcagaacttcttttttttaatgaaaatatccataatttattgggaacctaatgaagctcaa

SEQ ID NO: 314141 - DNA, 641 bp, Homo sapiens
gttcttcttaatcttcccaagggagataggaaaatattgaagtgcctgcttctcttacccttctgctaaatcaatactgaacttgactgatttctaattgactcattatgtgcagtatctgagaatttttttaaactaacatagaaaatgatcagaccccaaaaaatgaagttcctaagtatgtcagaataataggaacagaaaaaaaaatacaaacttagggaatatttctggttgacttattttggacttttatatgagaccaaatatcatgatatgaggttactgtttctttaggactcaaaaacaaaaaagaagacagacatgggaaggacatacttttttaaccttaawagtagaattataagggtcaaaacaaaatggtgggaatggactgtccagcaatcatcccctcacagcaacatcaatgtgaaaaactattcactcacacaaatatttgcatgagaactaacgaaaccaaccgagagataacagtacctagctgtaacacaataataaaaaaataagaaaaagatgcatttaggagggtaggaagaatagttttacattacccacaccaccccttccccaattccaggcagcacagcacagacagagatactgtccacttgggataaaga

SEQ ID NO: 314142 - DNA, 641 bp, Homo sapiens
gttcttcttaatcttcccaagggagataggaaaatattgaagtgcctgcttctcttacccttctgctaaatcaatactgaacttgactgatttctaattgactcattatgtgcagtatctgagaatttttttaaactaacatagaaaatgatcagaccccaaaaaatgaagttcctaagtatgtcagaataataggaacagaaaaaaaaatacaaacttagggaatatttctggttgacttattttggacttttatatgagaccaaatatcatgatatgaggttactgtttctttaggactcaaaaacaaaaaagaagacagacatgggaaggacatacttttttaaccttaatagtagaattataagggtcaaaacaaaatggtgggaatggactgtccagcaatcatcccctcacagmaacatcaatgtgaaaaactattcactcacacaaatatttgcatgagaactaacgaaaccaaccgagagataacagtacctagctgtaacacaataataaaaaaataagaaaaagatgcatttaggagggtaggaagaatagttttacattacccacaccaccccttccccaattccaggcagcacagcacagacagagatactgtccacttgggataaaga

SEQ ID NO: 314143 - DNA, 641 bp, Homo sapiens
gttcttcttaatcttcccaagggagataggaaaatattgaagtgcctgcttctcttacccttctgctaaatcaatactgaacttgactgatttctaattgactcattatgtgcagtatctgagaatttttttaaactaacatagaaaatgatcagaccccaaaaaatgaagttcctaagtatgtcagaataataggaacagaaaaaaaaatacaaacttagggaatatttctggttgacttattttggacttttatatgagaccaaatatcatgatatgaggttactgtttctttaggactcaaaaacaaaaaagaagacagacatgggaaggacatacttttttaaccttaatagtagaattataagggtcaaaacaaaatggtgggaatggactgtccagcaatcatcccctcacagcaacatcaatgtgaaaaactattcactcacacaaatatttgcatgagaactaasgaaaccaaccgagagataacagtacctagctgtaacacaataataaaaaaataagaaaaagatgcatttaggagggtaggaagaatagttttacattacccacaccaccccttccccaattccaggcagcacagcacagacagagatactgtccacttgggataaaga

SEQ ID NO: 314144 - DNA, 499 bp, Homo sapiens
agggtaggaagaatagttttacattacccacaccaccccttccccaattccaggcagcacagcacagacagagatactgtccacttgggataaagagagggaagtgattacagaactttgccttagatcccaacatgagatctatcacagtaaaacaaagaactgggtggatattcaggcatcatacttgagctggtaacttatgactgagcctctgagcctgccttgacaacaagtgggactgtacagcwtcaggcataaggcttgcatggtgaactcaatatctggcccacaccatcgccaggccgacatcaggggccctgggctctggatacctctcagtgacaggtaaccctcagcaacatgggcttctgatacaccagtgccactctgatcacatctacctggggcttctagtagcaccatgccagccacagcaggccccatgctcctgacctgtctcattgcttctcctgccacagtgagccctgagttttga

SEQ ID NO: 314145 - DNA, 547 bp, Homo sapiens
gcaacagaaaaaacactatgtaagggagattgcagaggaacagagttctacaagaaagtgtttgccctagggcctttccactaaatatttatgacctagaaaaatacataggttcatatatatgtccctgatgagtttatttttcccagggcttatatcttagcttctgttcctgggaatgggggtggaggaggagagagtttggagacttacttctaccactcyctcaatagtccaagccacataatgcaaaacacacatcaagtactacattgcttgtaatttaaaattcttacattctttaaatacatacagagtatgatatatatgcataagttattttaatatatatcctaggagcagaaatactcattacctcaatggttctttagcatttgacaatccctattcaggaactgataccccagagggcagtagtactttagatgttgctctctgaacttacactagaattcgatagcttgcatgagggaagttagagatattctttcaatgataacttgagtcgatgtaaagacatgtagac

SEQ ID NO: 314146 - DNA, 581 bp, Homo sapiens
  misc_feature (1)...(581): n = A,T,C or G
nnnnnnnnnnnnnnnnnnctgagctttctgttctgccctggggggtcaggggccatgaaaggtggagctggaccagtgccaaagaagaatccaattggcaactaccaagtgcccataggtgtgcctaggtgtggagctaggaaacctcttcagccccacgttttctgcatggaatcagggatggcctaaactaatccaggacaktgggcactccagatgcctggagatctgcctgggctgccttctgcaccatgatctctgcatagcaggaacggggtgactcaagctgctgaactaggcaagcagatgctttgaaggccttgttatttatctggatgtgtagcagacaggccctccctgcagcaagacctcagcccaggaagcatggggcagctcaggctactgatctatgtaggtaagctggtgttccaaatgcctggagatctgcttgggtgtgaaacacaaagggcctctatgcaccaggatctctgttcaggaaggataggatagttcagcctgccaatctaggtgagctggtgctgtagatgcctggagatctgcctgggtgtggaacaatgagg

SEQ ID NO: 314147 - DNA, 581 bp, Homo sapiens
tgaggtacaagtggtgtttggttacataagtaaatcctttagtggtgattttgtgagattttggtgcacccatcacccgagcagtatatactgcaccctatttgtagtcttttatccttcaccctccttccacccttccctccaagtttccaaagtccattgtatcattcttatgcttttgcatgctcataaattagctcccacatatcagtgagagcatatgatgtttggttttccattcctcaggtatttcacttaggataatagtttccaatctcatccaaatggctgtgaatgctcttaattaattccttttcatgtctgagtagtattccactgcatatatayaccacagtttctttatccactcattgattgataggcatttgggttggttccataattttgtaattgtgaattgcgctgctataaacatacgtgtgcaagcatctttttcgtataatgacttgttttccttggagtagatacccagtagtggggattgctggatcaaatggtagttctgcttttagttctctgaggaatctccacactgttttccgtagtggttgtattagttt

SEQ ID NO: 314148 - DNA, 535 bp, Homo sapiens
tcgacccagccctgtctccgggggccgagaactcgcccttttccctacattaaaagtaaactgttacgtggctctctcccacaacagggaagctcctcagcgttagcactagccgcagggcggagggtgcgtatagcggggcctcaaaagactacgaggtctcaaagaacaccccaagtgttcagccctcggcggcaagctgcgtggccggcattctgcgaggcatagggagatcgcgggtttctgcacgagacgcattctacccttggaacrggagagcgcctgcacgcggctacatcgagtaaccctagagccctaaaggccagacccgctctttttacaaaggagattttctttaggcgcctggaccgcggccatacaactggacaactccagtttggtacctaccgccgaggtcaccggcggcggctttggccccttccaggtttctggcaatgaccgccagtcggtagcctttccgggccattaactgggccacagctctgccaatgcctcgggagcctccaaaaacagc

SEQ ID NO: 314149 - DNA, 535 bp, Homo sapiens
tcgacccagccctgtctccgggggccgagaactcgcccttttccctacattaaaagtaaactgttacgtggctctctcccacaacagggaagctcctcagcgttagcactagccgcagggcggagggtgcgtatagcggggcctcaaaagactacgaggtctcaaagaacaccccaagtgttcagccctcggcggcaagctgcgtggccggcattctgcgaggcatagggagatcgcgggtttctgcacgagacgcattctacccttggaacggragagcgcctgcacgcggctacatcgagtaaccctagagccctaaaggccagacccgctctttttacaaaggagattttctttaggcgcctggaccgcggccatacaactggacaactccagtttggtacctaccgccgaggtcaccggcggcggctttggccccttccaggtttctggcaatgaccgccagtcggtagcctttccgggccattaactgggccacagctctgccaatgcctcgggagcctccaaaaacagc

SEQ ID NO: 314150 - DNA, 476 bp, Homo sapiens
ttgagcccaggcatttgagaccagcctgggcaacatggtgagacctcatcttttttaaaaaaacataaaaaataaaataaaatggttaaaaactttctgtttttaattgccaactctttgaatccagaaatgatcacattggtttttgtttccctgtttgtagcacagttcctagggcttgtgaatgctaaataaatgagttaacaaatgaatcaatgagtgaatgaaataactcacttaaaaggaatttattgctataagcaagaaccagtgtcratacagctatgattaagatagacctggtgcctgttttcgttgggaaaataatctggcaaggaagacagacattaaacaattaatcatgccatcactatttaattccaatggtgggaagaactataaaggagaagtacaggctgctaggagggatcataactaggggcattgatccaatatggaggcctggggtcagagaa

SEQ ID NO: 314151 - DNA, 527 bp, Homo sapiens
gggacacagtggaccgaagtgtaaaacagatttgggccagcactccattcattaccccatctccacatgctcccattaacatcagagccactgtggtgttttgggtacccaagcaacaatgttagcttgactgtattcccaagaatctttgaaacacctggttagattcctttctccagtgtactgttacttggacaagtgagcatagattcctttgagaaaggttggacagctgctctgtgtacatttgctgtattattgcagggttcttcatgaaggagacccttcaattgattaggtctggatcagagaactggtccaagtctgggaactgagcaaaagatcataatttttcattacggtaaacagaatgatccccctagagatgcctattctctaatccttggatcctgtgaattttacgtgacatggctcatgggattttgcaaatataactaaggttatacacytcaaaatatagattatcctggataatctggctagacccagtataatcacatgaaccc

SEQ ID NO: 314152 - DNA, 580 bp, Homo sapiens
gatgtttcttataagataacattctgtttctccataatgtgaacaatttgcatgaaaaaagtactcccaaagttacatttgtcccatttgctttacaacattatgacaggaacctttgagggatacttctgtttcatattcctatactgccagtggttgcaaaatttccaagagcaggagctgtaggtcacaatggaaaatggaaacagtagaytgggatttgacttactaactgtatggctttagggcagtctcttaatacctagggttttttgttacttggtcacctgttttctttaaagaagggacttatagatggattctcaaagtctcctctaacttacaattttatattttgtgataaaaagagttgagtttgtcagaggacaaaattcttttcttgattttgtctgaaagggaggaatcttcaggtctggacaagatgcttcttttcttacctaattttctttctttctttctttcttttttttttcctaattttctttaatgaacatttgtctttcttggctgaaagaagataaaccagatgggaaaaggttccatttaatattagtagtgt

SEQ ID NO: 314153 - DNA, 591 bp, Homo sapiens
tttccaaagaaagcattctcttgggggcaatgaataaacacagcacttcctttctagtagctataaactttacygtagatataaaatttacttaccacactataatatttgaatgattttggtacccaaacatttagccctattgtgggatgttcagatcagatttaaaattttcttttgaagtgtcttaacaaagaggaaataaaaacaagttcaggtggaaaaaaagtagctaacagcaatctcacttgtagaatggtagctggtcttactctcagagtgcatcaactttgatctcatttgtaactctaagtgtcagttagagcaacaaaatggagattgtaagagggttagatattccacattaggaactgttttgaaaagatatccatccattacattattcaaagatagagattgtctggtagctgtggtatgtacagccctgacccaatttctcagtaaaaaataattagcatatcaatgttccttaaggaaataatggttttcatgctagaggagcaggttcattctctgcacacaatgttgatcctgaaatgtcactctccagatgcagtttataactgaatg

SEQ ID NO: 314154 - DNA, 509 bp, Homo sapiens
aaactttactgtagatataaaatttacttaccacactataatatttgaatgattttggtacccaaacatttagccctattgtgggatgttcagatcagatttaaaattttcttttgaagtgtcttaacaaagaggaaataaaaacaarttcaggtggaaaaaaagtagctaacagcaatctcacttgtagaatggtagctggtcttactctcagagtgcatcaactttgatctcatttgtaactctaagtgtcagttagagcaacaaaatggagattgtaagagggttagatattccacattaggaactgttttgaaaagatatccatccattacattattcaaagatagagattgtctggtagctgtggtatgtacagccctgacccaatttctcagtaaaaaataattagcatatcaatgttccttaaggaaataatggttttcatgctagaggagcaggttcattctctgcacacaatgttgatcctgaaatgtcactctccagat

SEQ ID NO: 314155 - DNA, 509 bp, Homo sapiens
aaactttactgtagatataaaatttacttaccacactataatatttgaatgattttggtacccaaacatttagccctattgtgggatgttcagatcagatttaaaattttcttttgaagtgtcttaacaaagaggaaataaaaacaagttcaggtggaaaaaaagtagctaacagcaatctcacttgtagaatggtagctggtcttaytctcagagtgcatcaactttgatctcatttgtaactctaagtgtcagttagagcaacaaaatggagattgtaagagggttagatattccacattaggaactgttttgaaaagatatccatccattacattattcaaagatagagattgtctggtagctgtggtatgtacagccctgacccaatttctcagtaaaaaataattagcatatcaatgttccttaaggaaataatggttttcatgctagaggagcaggttcattctctgcacacaatgttgatcctgaaatgtcactctccagat

SEQ ID NO: 314156 - DNA, 591 bp, Homo sapiens
tttccaaagaaagcattctcttgggggcaatgaataaacacagcacttcctttctagtagctataaactttactgtagatataaaatttacttaccacactataatatttgaatgattttggtacccaaacatttagccctattgtgggatgttcagatcagatttaaaattttcttttgaagtgtcttaacaaagaggaaataaaaacaagttcaggtggaaaaaaagtagctaacagcaatctcacttgtagaatggtagctggtcttactctcagagtgcatcaactttgatctcatttgtaactctaagtgtcagttagagcaacaaaatggagattgtaagagggttagatattccayattaggaactgttttgaaaagatatccatccattacattattcaaagatagagattgtctggtagctgtggtatgtacagccctgacccaatttctcagtaaaaaataattagcatatcaatgttccttaaggaaataatggttttcatgctagaggagcaggttcattctctgcacacaatgttgatcctgaaatgtcactctccagatgcagtttataactgaatg

SEQ ID NO: 314157 - DNA, 538 bp, Homo sapiens
tcatgtattcatctaggtggaaacctaactttcaaagtgaaaattgaaatataaatctaggccaggcgtggtggttcacrcctgtaatcccagcacttttgggaggcccaggcgggtggattacctgaggtcaggagtttgagaccagcctggccaacatggtgaaagcctgtctctactaaaaatacaaaattagctgggcatggtggcaggcacctataatcccagctactcaggaggctgaggcaggagaattgcttgaacccaggaggtggaggttgtggtgagccaagatcacgccattgcactccaacctgggcgacaagagtgaaactccgtctcgaaaaaaaaaaaaaaatctaattatgtctccttcaaggagttttccttctattgctataaacttttaggatttcccagtgttcagtgcaacctaatcaatacctttggatcttttgcaaaggtgttttcctcaaggagttttccttctgttgctataaacttttaggatttcccagtgttcagtgcaacctagtca

SEQ ID NO: 314158 - DNA, 538 bp, Homo sapiens
tcatgtattcatctaggtggaaacctaactttcaaagtgaaaattgaaatataaatctaggccaggcgtggtggttcacacctgtaatcccagcacttttgggaggcccaggcgggtggattacctgaggtcaggagtttgagaccagcctggccaacatggtgaaagcctgtctctactaaaaatacaaaattagctgggcatggtggcaggcacctataatcccagctactcaggaggctgaggcaggagaattgcttgaacccaggaggtggaggttgtggtgagccaagatcacgccattgcactccaacctgggcgacaagagtgaaactccrtctcgaaaaaaaaaaaaaaatctaattatgtctccttcaaggagttttccttctattgctataaacttttaggatttcccagtgttcagtgcaacctaatcaatacctttggatcttttgcaaaggtgttttcctcaaggagttttccttctgttgctataaacttttaggatttcccagtgttcagtgcaacctagtca

SEQ ID NO: 314159 - DNA, 584 bp, Homo sapiens
catccttctggctttcctcctactcctttagctgcaccatcacaatctcctttaaaggytctttttcctctatctgtcagttagatgtttgtgtttatttaggctctgtctcagattttctgcttttatcagtgtacacaattttccagcatggttataattgcctacattagctgcaaatgccagctatatattggtgactcccacatctctgtgtccatactgaatctcctctctaagcatcagacaagtctgttgaaaatgtctgttgggcatgtccacttgaatgccccccaaataagcttacactcatcatgctcaaaattaaattgtgatctcctcaccaactgcctcagacctgctccttttcctcatgttgtctgtgttggtgagttgcactgaccaaatacccaatcgcaatggttggaaacctgaaagtcttccgttattcctttgtctctctcatatacacccccactcaatcaactactaggtcttattgaatataactctctttccctctctcacatctgactatttctctccatctgtactgtcaacatcatagttcaatccacaatcac

SEQ ID NO: 314160 - DNA, 584 bp, Homo sapiens
catccttctggctttcctcctactcctttagctgcaccatcacaatctcctttaaaggttctttttcctctatctgtcagttagatgtttgtgtttatttaggctctgtctcagattttctgcttttatcagtgtacacaattttccagcatggttataattgcctacattagctgcaaatgccagctatatattggtgactcccacatctctgtgtccatactgaatctcctctctaagcatcagacaagtctgttgaaaatgtctgttgggcatgtccacttgaatgccccccaaataagcttamactcatcatgctcaaaattaaattgtgatctcctcaccaactgcctcagacctgctccttttcctcatgttgtctgtgttggtgagttgcactgaccaaatacccaatcgcaatggttggaaacctgaaagtcttccgttattcctttgtctctctcatatacacccccactcaatcaactactaggtcttattgaatataactctctttccctctctcacatctgactatttctctccatctgtactgtcaacatcatagttcaatccacaatcac

SEQ ID NO: 314161 - DNA, 582 bp, Homo sapiens
agatttagaagacaccattttgtaatcaccattgtaaagattggttcagacaagaatcatcyattgatgttaaatgctaggtaggaggatagatgtgaaacaggatatttacatggtattgaaatgtctccctacattttccttatcagttgcaaggggaaaatagtaactatacatggagaaaacacatgacgctttgatcagttgatcaaaattaacctcatctctcatcagtgaggggtagaccaacaatgtatgcccctgaatgtgctttcctaaaacagactcagcaccatttttgtagcatagagggagggagtctcacttgaatctaattatgagaaacctaaattgaagcacattctataaaaaaagaactgtatttaaaaaaatgccaatatcatgaaaacaaagtaaggctaagaaactgtttcaaattaaagaaggctaaaagagacatgaaaactaaatgcaatatgtgtgattggactgaattctatacagcagggtgaaaatgctgtaagtggacatcaatgagtcaattgacaaaagtagaatatggactgtagattaaagtgtttt

SEQ ID NO: 314162 - DNA, 587 bp, Homo sapiens
atatctacaaaagaaattttcattaataaaggtaactgtactaggaagagaactgctaagaaacaacttttatcacctgagaaactcttacttgcataacaaggcaaactttattcaccgtaaattttctcccctcatcctcctataatttgtcttcaccactgcctagaaatgccaagtttctattcctttctgtagatcagaatcttatataagcttcaatcatctgacctttctttaagtttcctatttttgtgagactyccatatatacatatgtaattaaaattgcccttttttgctgttaatctgttttaggtcaatttaatttgtataccagacaaagaacctagggggagagagagaagcaattttttttctcttctgtactactgatacagacagaagacaggaaaatactgggcaaaagagtgtggttcactagcaaaggctccaccctcaagcctggatacctgcagctctaaatgaagacaggcattcctgttttcttgcccaaagagttgtgttttggcccgccatgtccactatcctggacccatataaacccagaacctcaggctccagaat

SEQ ID NO: 314163 - DNA, 600 bp, Homo sapiens
actctgtaaactgtaaaggctacataaatatatgggattattatttctgtaagtgtcgaggagcaaygataacagtaagttaaataacagataatgaaggaagtatgggtatcctacctcttctccatatcaagccttataaagctagttgtggatatccttaaggggtggctcatgtgaacttacaaagagtggtcttatattttcttttctggataccttcattaatctcattaatttaagctgccatctagctacatgagcatggcatctcactgtggcctacctgcttcttggcatggtgccctccatgtccatgccatgttctcctcatgtttctgaagctgcacagcatagtgatgtcaaagacatattagaattccttcaatcttctttgagctgagctcacactgtgtccacataggatgtccttttcctccattttgtgtcacgtttggccacctgaccacaatgctggaccattaaagactgaagacttcttgatgacttagacttcactcaagattactttcactttgtgttgttgccaaaccagaaaacaagactagaagggatatataccagttatgattataaatg

SEQ ID NO: 314164 - DNA, 687 bp, Homo sapiens
gtagtatatactgcttactattactgctactattatgattgtatgttcttctacatttttcgaactgtaactctcacttcatataagcctctttcacaatctcaaacttggaaaagttgaagactttcatgcttgccttaattgatcttctggagtgtaatggaggcagtgggagcaattttttcagttatttgtatttggcaagcacagagggtgggggtgtttcatttccatattcttcttattgtatttttctgctttctcacaaccctctgattcagcttgttcccttaaaaataatagaagtaggttgttttatggacattggctttggcaagaagcctgtttacacttgctaagccccctagtagcaatatcaagaaattaattaaaatgctgagaccacagtacctacccagagaggcaaagaatgagtgtgctagtagtcccctgctctaaacctttgcaatcatttgttgaaataccttgaggaagtaagtttctatttcaccatgcagggtgatataaggtgatatgacatrccaatttttttaaatgataaaactatagggactaaaatttcctctttctcctcctccctccatgacacctaataaagctgcttccagaatgaaatagtcatactgcccactgagtttcttttatcaaactcataactgtggatgt

SEQ ID NO: 314165 - DNA, 551 bp, Homo sapiens
ggcaagagtaaaagtaaatgcaatgaaaacaaaacaatattcttaaaatctagctaaattttgctgcctgtgsgtttgagatctgtttttcctttgtgaaaagtttaattagaaagtgtcaggtaaatgttcaaaacaaacttgtactaaagtgagaatggaaaaagaatgtaaaaggcaaagctttctcattatgtaatcctgtataatttaatatcaatagcatttgtggaccacctgaaattattttgtgcaccaccaccacctttggcaaagcactagcataggtgattaatggagaatggtttctggttcctctaaggtctatagcagtgtttctcagggtgtagcctctggatcacttgcatcacaattacctatgggtacttcttttaaaactggggaagtaattaatgaattgctacttcatcaggaaaatggaacaaaataaattatattttaaaggaacactcccaggcgattttgatgtacaataaaatttgagaaacagggctgtattgtagcaattattgaagaatatggaatccact

SEQ ID NO: 314166 - DNA, 551 bp, Homo sapiens
ggcaagagtaaaagtaaatgcaatgaaaacaaaacaatattcttaaaatctagctaaattttgctgcctgtgcstttgagatctgtttttcctttgtgaaaagtttaattagaaagtgtcaggtaaatgttcaaaacaaacttgtactaaagtgagaatggaaaaagaatgtaaaaggcaaagctttctcattatgtaatcctgtataatttaatatcaatagcatttgtggaccacctgaaattattttgtgcaccaccaccacctttggcaaagcactagcataggtgattaatggagaatggtttctggttcctctaaggtctatagcagtgtttctcagggtgtagcctctggatcacttgcatcacaattacctatgggtacttcttttaaaactggggaagtaattaatgaattgctacttcatcaggaaaatggaacaaaataaattatattttaaaggaacactcccaggcgattttgatgtacaataaaatttgagaaacagggctgtattgtagcaattattgaagaatatggaatccact

SEQ ID NO: 314167 - DNA, 641 bp, Homo sapiens
ttctatgtgttaagtagattacatgccagtgcagtcatatatgctcttcttattcacagtacaygagtaaggctataaatcatctcacacaaaccttggagattaggaaaatacaattgacttcaaatatcaaatctttgtaagacggtatttgattagctgtatgtggacaaagtaaaaagttgtttatgagttctaaagagtttgggaagatccgaaagtctaatccaggtgaactaggtacaatctcataaaggtaggacgaacactgggattcagcaagtgaactgaaccctaattttattatcttgtagctgagaatagcaattctcaacctctttttgcctcaggattttccacactatcatgagtaaccatagtttgctagagattctactggggaaaaaagtatctttcttatgtcagaatactttttgtagcaattcatccaactcaaagcaatttaaataatgaagataatttataatcctatatagctgaaaattccaaagtagttttaggtaaggcttgatcctgcagttctatcaagtcccagaagacagtatttcttttgatgtttcttctgtcttccttgattaacttgtcatcataagacttatttccctcatagccccatgatg

SEQ ID NO: 314168 - DNA, 603 bp, Homo sapiens
gttttatgaagccaaaatatacttaatataaaattctgaaaaagacattaccaaaaaaaaaagaccaatatttttcacaaatataactgcaaaaaattttaataaaatattgatgaatcaatttaaccatcttttttttaaataacacaatggctaaatttgttttatcactgggatgccaggttactttggcattcaaaaataaaacaatataattcaccagattaacagaataaaggagaaaacatatgattacttcaatagagatagaaaaaagggtttgagaacattgaacagctattatgattaaaaatataaacaaactgacatgaaactaggaaaaaaaatctcttaatctgaccaaaggcatctattttttttwaaaaaaaagaactaaaataacagcatatttaataatgagacatttaacactttcccataagtgtttgctagtactcctagctattgcaataaggcaagaaaaagaaataaaaaacataaagactggaaagaggaaagtattgtgtgtatttccagatgacacaattatttatgagaaaatcctagataatctacaaaacaactcatagagctaaccaacaa

SEQ ID NO: 314169 - DNA, 603 bp, Homo sapiens
gttttatgaagccaaaatatacttaatataaaattctgaaaaagacattaccaaaaaaaaaagaccaatatttttcacaaatataactgcaaaaaattttaataaaatattgatgaatcaatttaaccatcttttttttaaataacacaatggctaaatttgttttatcactgggatgccaggttactttggcattcaaaaataaaacaatataattcaccagattaacagaataaaggagaaaacatatgattacttcaatagagatagaaaaaagggtttgagaacattgaacagctattatgattaaaaatataaacaaactgacatgaaactaggaaaaaaaatctcttaatctgaccaaaggcatctatttttttttaaaaaaaagaactaaaataasagcatatttaataatgagacatttaacactttcccataagtgtttgctagtactcctagctattgcaataaggcaagaaaaagaaataaaaaacataaagactggaaagaggaaagtattgtgtgtatttccagatgacacaattatttatgagaaaatcctagataatctacaaaacaactcatagagctaaccaacaa

SEQ ID NO: 314170 - DNA, 572 bp, Homo sapiens
tgacaactcactcactatcatgagaactcactcagtatcatgagaacagtttgggggaaactgcctccttgattcaattatctccacctggtcctgcacttgacacgtggggattattacagttaaaggtgaaaatgggtggggacacagagacaaaccatatcagagagataggcaggagacagaccaagcagggccttgtagaactaggtgacactttagttagtaatagtgtaggaacagtggaaagccattcaagagagtgatcatatttgtgttttgaaaaggtcactgtgtctactctatggagaatctgcttaaatatgggaaatggggggtacaaaaggaaaccagttaggaggccatttgcggtagtctagggaggagaaaatggagacttggaccagggtggtgaccatggaggtagggtgaagttagtaaatgccagacatattcacaaagtaaattaataaatcttaatggattagatttggagagtgaaggagaaggtggtgtccaagatgatrccctgtcctgggttgggcagttagatggatggtagaagagtagct

SEQ ID NO: 314171 - DNA, 491 bp, Homo sapiens
ctttgaagaagccttctgtgattgttctggcctgtgtttatttgtctcttctgtaaccatttatagcactgtacagcatactttggmatttaatagactaccaatattgcaagctcttgagggcagagctgtctacttttttaattccctcaacatctcctaacatggggatagattctatagtagccaatacttcatgcatacgactctggaatctattattctcagcctaccatctctatcatgcactagtcctcctgatagttccatttggatgacctcacattatttccaatccaacatacttacaatgaactcatacatttccttaaaactagcttctcaattccttagtttctttgagccacctaggccttaaacatcactgtaacctttgactctcctcccccttcctttttcttcacatctaatcatatctctagaatgcttgcctctcaatttttttcttcccatttctacctgctgccaac

SEQ ID NO: 314172 - DNA, 491 bp, Homo sapiens
ctttgaagaagccttctgtgattgttctggcctgtgtttatttgtctcttctgtaaccatttatagcactgtacagcatactttggcatttaatagactaccaatattgcaagctcttgagggcagagctgtctacttttttmattccctcaacatctcctaacatggggatagattctatagtagccaatacttcatgcatacgactctggaatctattattctcagcctaccatctctatcatgcactagtcctcctgatagttccatttggatgacctcacattatttccaatccaacatacttacaatgaactcatacatttccttaaaactagcttctcaattccttagtttctttgagccacctaggccttaaacatcactgtaacctttgactctcctcccccttcctttttcttcacatctaatcatatctctagaatgcttgcctctcaatttttttcttcccatttctacctgctgccaac

SEQ ID NO: 314173 - DNA, 501 bp, Homo sapiens
ctttgtgtagattttggatacatcaagagggatggcaactcccctgctcatatatagctaaggacacacagcttcaaggtatccatttaatcttcactttgaaaatagatgttattaatttcaatgagtacatatgccctgtaaacaattagaaatatcagtaagactaagtatgattcattattaagggagagtctagtgaggaaagggaaagtaagacaatgtattgcaaactttttagaataggtgatccttaatactcatttcctgttatttttataaatatctaagaaacatttcagctgatgcaaagaacagtaataaaggtasaatgtggcaaagtttaaggactcaaatgtgcgcccatcatatgaaattctagaattcttagtttataatttaaataggtgcgtatgtgtgtgaatatgtgagtgtgtctgtgtgtgtgtaatttgttttcatgcttacaagaaaaagagagaaagaaaaggtaaaacagca

SEQ ID NO: 314174 - DNA, 607 bp, Homo sapiens
agtggcatctgttgaaagcaaacttgtccctaaaaagaaccactctgaaatccatagtgtaaaataaaatttatttgtgactcactgattggaaatgatcctttgtttaattgttagcttgtattcttggacaaagataaawatattaaaatgatatatttcattctatgatttgggaagaagtatacttccttaagaggaagcaattatccaaaaagaattgcaaaattgtaactgagcaacagcgtttggcataagttgtgatgacattattaagtgtggtttgtttccatctaaagaaaaaaaaagtgaaatgctttacttggaatctaaatacttaaaaaagagatttcatatctttaggaaagtgtcggagaaaggcaatttggctatttttaaccaaagaattttcttctatggaggcatatgattttgtctccctgtaatcaagattattctagtttatatttacatttcaaagtaaaatctgttatttgtattctgtgtcattttctgtggaatagatttttaaagttaactcttttctgttatgaacatatttttaaagttattgaagacagtagttaatatgaatttttaaataaag

SEQ ID NO: 314175 - DNA, 587 bp, Homo sapiens
gctcttcatcatgactgctccagccatggctaaaagggggccaaggaacaacttgggccattgcttcagggggtgcaagccccaagccttggtggcttccacatggtgttaagactggatgcacagagggcaagagttgagactagagagcttctgcctagatttcagaggatgtatggaaacacctggatgtccaggcagaaagtctgttgcaggggaagagccatcatggagaacctctactatggcagtgcaaagggcaaatgttgggatggagccccaacacagagtcacaactggcacagtgtatartggagctgtgagaagtgggccaccatcctccagaccccagaagagtagacccactgacagtttgtactgtgtgcctggaaaagctgcagacactcaatatcagcttgtgaaagcagtgaggaagggggctgtaccttgcaaagccacagggacagagctgcccaaggctgtagaagcccaccttttgcatcagtgtgccctggatgtgagacatggagtcaaagtagatcattttagaactttgaggtttaatgactgccctattggattttgaa

SEQ ID NO: 314176 - DNA, 568 bp, Homo sapiens
actctactcctaataattttctctctagcttaaaaagtcaatagtctccaccagaaatttaaatgactattactgatataaatactcaggccacaagtattctttttattaattagtttactcattctccctaaggtggggtatttcttacttaaatacatcagcactttctccctttgtagttagatataattgtaacaaagaagttcttacatgtgaatactgttcatcaatgtaaaaacaacaaaatattccwtctgtcatagaatctgaaacccaagtagcttcattttgagggagtgataaactgaaaaactatgacctattttatgatcttacaaaaaacacttcataataatacaaatgataagatttagtaggatggtggagtagctaacagcataggcctttcaataaaacacgcttccatttcaaattttagcttagcttcttactagttgcttaaatttgggcaaattgttcaactcctttaggtttctattttcttataggtaaaattacaaaaataatacttgtttcactggatgttgaaaggtttgaatgaaca

SEQ ID NO: 314177 - DNA, 555 bp, Homo sapiens
tctggcaggaatttctagaacatttggatttttcaatctcatatacaagaggaggatatgttacttttcacagaatttctacaacgtaagagttatggtgcattttgagtgctgtctcacagtgtgaaatgatgactgagataagaactttaaagcaatgaaaaaaagsatttagtctcatcccaaaagagagaagatatggttcaaaagtttactcttagaatggctccaggataattacatatcttatccttgttgcttccccaaaacatagctaaatagtaacttcctattcagtaaagttacagggaataaaggacaccttttgcaggcagcttttagtatttttgttgttacctacaaaagtgtacctgtagctaaatccttggaataaaaatcaaacagtaggaagtgtacttaaggggttcttcagcccgaatcactcactaccggtgagtgctgctgccttgtcttacgtcttacagcttgctgacatgatgaggaagagggtccaggaagaagcagtcacaagaattcttcacagtacacagcaga

SEQ ID NO: 314178 - DNA, 543 bp, Homo sapiens
ggaggagaattctcactctagtttttggaattttcagcctttttgtgctggtttttcctcatcatggatttatctacctttggtctttgatgttggtgaccttaggatggggtttctgtgtggacatcctttttgttggtgttgatgctactcctttctgtttgttagttttccttctagcagtcaggcccctctgctgcaggtctgctggggtttgctggaggtccactcagaccctgtttgcytgagtatcaccagcggaggctgcagaacagcaaatattgctgcctcttccttcctctggaagcttcatcccagaggggcacccaccagatgccagtggagctctgttatatggggtgtctgttgacacctcctgggaggtgtatcccagtcaggaggtacaggagtcagggatccacttcaggaggcagtctgtcccttagcaaagcttgagctctgtgttaggagatccactgctctcttcagagccagcaggcagggatgtttaagtctgctgaagctgcacccatagctgcccct

SEQ ID NO: 314179 - DNA, 543 bp, Homo sapiens
ggaggagaattctcactctagtttttggaattttcagcctttttgtgctggtttttcctcatcatggatttatctacctttggtctttgatgttggtgaccttaggatggggtttctgtgtggacatcctttttgttggtgttgatgctactcctttctgtttgttagttttccttctagcagtcaggcccctctgctgcaggtctgctggggtttgctggaggtccactcagaccctgtttgcctgagtatcaccagcggaggstgcagaacagcaaatattgctgcctcttccttcctctggaagcttcatcccagaggggcacccaccagatgccagtggagctctgttatatggggtgtctgttgacacctcctgggaggtgtatcccagtcaggaggtacaggagtcagggatccacttcaggaggcagtctgtcccttagcaaagcttgagctctgtgttaggagatccactgctctcttcagagccagcaggcagggatgtttaagtctgctgaagctgcacccatagctgcccct

SEQ ID NO: 314180 - DNA, 550 bp, Homo sapiens
gccaatgatggtatcaggttaattttaacaccttaggagacagacacactataaactgtaggtatttaattctgtgactgaatgcctgtattagttcattcacacattgttataaagaactacctgagactgggtaatttatgaagaaaatagtttaattgactcaccattccacaagctgtataggaagtatggctgggaggcttcaggaaacttacaatcatgggggaagggcaaaggggaagcaagcatgtcttcctatggcagcaggagtgagtgtgaagagagacgtgccacacacttttaaaccaccagatctcatgagaactcaccattatgagaatagcaaagaggaagcccgtccccatgatccagtcacctcccatcaggtccctcccccaagactagggattacaattcaayatgagatttaggtggggacacagaggcataccatatcagtgccatacattatgtactgtttcagtggatcccaacttgtgaaaactccgttacatcctcagtgttactagtgatatcttgtatgttc

SEQ ID NO: 314181 - DNA, 550 bp, Homo sapiens
gccaatgatggtatcaggttaattttaacaccttaggagacagacacactataaactgtaggtatttaattctgtgactgaatgcctgtattagttcattcacacattgttataaagaactacctgagactgggtaatttatgaagaaaatagtttaattgactcaccattccacaagctgtataggaagtatggctgggaggcttcaggaaacttacaatcatgggggaagggcaaaggggaagcaagcatgtcttcctatggcagcaggagtgagtgtgaagagagacgtgccacacacttttaaaccaccagatctcatgagaactcaccattatgagaatagcaaagaggaagcccgtccccatgatccagtcacctcccatcaggtccctcccccaagactagggattacaattcaatatgagatttaggtggggacacagaggcataccatatcagtgccatacattatgtactgttkcagtggatcccaacttgtgaaaactccgttacatcctcagtgttactagtgatatcttgtatgttc

SEQ ID NO: 314182 - DNA, 614 bp, Homo sapiens
atagtcaaggacgtgtaagccatagagaggacttttagttttattgtagttgtgtaattgtaattgtggaagcacacttttggaaggtggacagcaagggagtaaatgaactaatttctatttggagaatgattctggcagatggcaaagaataggttcaggtgggggtaagcgtggaaccttgcaaccacctgggaggtgatggtggcttggaccaaggtagtaatgaacacttgggaggagttgaacaatgttcgtatatgaaaaatagtttgaagtcaattacgaccagcatcataaatatttatgggatatttttgttaatttcagtagcattataattatttctctttttacctcactttttactatagatgtgggcagcgtaatatactgttcttatgatttcaagtatgcattgtrattgccactctttctatctttcaacagcatcattaagatagaatctagaaatttaaagagaaataatgtatatgttcatacatatataggtatgtacaggtacaaggaaggtcttaaatatattcaatgctatttaggatgttgaatttttaatttttgatatttttaaaagacccataaaattggttgtc

SEQ ID NO: 314183 - DNA, 628 bp, Homo sapiens
aacataccatcagaggctatgcatataatatttacatattgttacttggttctttctacaacgtgtcttcccttgtgtctggttggccaaatcccttttccgatctaaaatttgtcggtaaaatagacattgtttcttcagtgtacttaattttctctttggtaatacctaaaatacctgcataagtattttatgcatacctggataagttgggcatttgataagttcaggcagtcgagtggctaagatgtctctgagtttagtaagaattctctagggagaaagttaccttcatctattttgattggtgtaaaattgggaagcagataaacacttgtttaaacataatgaacaggcaactggatacatttaatccaagtttaaactgaattttataaaagaaaaaatagtagaaaactgcatagtattggtcttatactttttaacaacatgtaagtaaaaasgaactactgtttttcactctagtcacacctccactgcttccaagaatatgacagtacatacagtttttgaaattttaggagctggatagacaagtaaattgtctacaaggctgcttttattactcattgaaatgatgtttttttagtattctaccttaacaata

SEQ ID NO: 314184 - DNA, 635 bp, Homo sapiens
gtgaccctgggcaaggagcacctgtgatgatagagagtccccaggggaacagagggcaaaggggtcctggtcttttgtggccggaagagcagcagggtgaaggccaacagccctttgactcatttatagcctcaatatracaagcatgtctcattcctattgtggactctaatagaggagcccccacacaggagaggggaggctccatgaaagcttcccctgccttgtgagaagaaagttactccccactttgaaagagcctctgtgacatatgaccttgtccaatagaatggcccaaaaatgaaggtgtcagatatgtgtgttagacatccactggggtgaccacacagaccctctgtcaatgtgactcagagcaatgtgctgccctttattcctctcctcacttccccacagcaggcactcacaggctatctccatcaccccaccccacacccacacccactgagcccaatgctctgatctagatgctagagcagctcagtgtatttcattcttgggcatgtctggtcagaagaagtaaggtcaataaaaagtcacagtgagattcagtgaaagatagtggaattggatagtactttactcttagaatcagaggaccgtcacaggcctcaccc

SEQ ID NO: 314185 - DNA, 489 bp, Homo sapiens
ttgaatcataagctcattttttactatatatatatataccgtgtatatatatatatacctacaacttgtcagtttacaatgaaaaagataaagaaaaaactctgtggggcacattccagaatgaattcatggaaagttagatcatttatacactggaaacacaggttttcctcctgtgggcagtgtggaggtggagaggaggggctagcttgtaaacagccatgttactctgagtgggatattattctgaaggccgtggggagccatttaatttcctgtggtatcttcttggctttctctaaaatctgtgtgctcccacccaccacttctgtataagacagaagcttgaggtcaagrgctctttcacagcccctggaaatacctttccacattgcacctacctcaccagcactgggatcacgcttttcatatgatttttctctgttcctccattgtccatcagcatataccaggaaaacagcccacacc

SEQ ID NO: 314186 - DNA, 605 bp, Homo sapiens
tgaaattcattaaaactgactttcactaaacttctttaaccttcaacataaactacaccttcaatatatttgaacagtggatatcaaagtgamgatatttctcttgggctgctatgttctgaatttagggatttctagtgtgttcttcccaacatgctcctgtgtgctgagccagggtggtagggcagcctttgccttttgctgaaggcaatggtgtatcaccgttcatctgatccttgtacttcagtgccactacgttgatcaatgaatgcagtaaaagaatagttcagtgagcagagcccatgtgagccacgggggccacagacgtaaaaagagaaagagcctcagtgtaccatttatgaggaagctttgctttcctcttttcttttcgtggggagagagttgagaaaaagaaagctgctggttgagtcactgccagagatgactattgctgaaaccataaaatggactcctttaattcattaagacagaaactacagcaaaatcaactctaaaagtgttatttctggagagagaataaaaagctatgagatgagaaaataaatatgaaagagctttgcaacacattctttctttaagcatcg

SEQ ID NO: 314187 - DNA, 605 bp, Homo sapiens
tgaaattcattaaaactgactttcactaaacttctttaaccttcaacataaactacaccttcaatatatttgaacagtggatatcaaagtgaagatatttctcttgggctgctatgttctgaatttagggatttctagtgtgttcttcccaacatgctcctgtgtgctgagccagggtggtagggcagcctttgccttttgctgaaggcaatggtgtatcaccgttcatctgatccttgtacttcagtgccactacgttgatcaatgaatgcagtaaaagaatagttcagtgagcagagcccatgtgagccacgggggccacagacgtaaaaagagaaagagcstcagtgtaccatttatgaggaagctttgctttcctcttttcttttcgtggggagagagttgagaaaaagaaagctgctggttgagtcactgccagagatgactattgctgaaaccataaaatggactcctttaattcattaagacagaaactacagcaaaatcaactctaaaagtgttatttctggagagagaataaaaagctatgagatgagaaaataaatatgaaagagctttgcaacacattctttctttaagcatcg

SEQ ID NO: 314188 - DNA, 577 bp, Homo sapiens
gttctggagatcattacttagctcctctcagtctcaccttcctcatttatgaaagggggttaatatgaaaatacttaccttaaagggatattgtgaggattaaatgatatttcatgaatagcacttagtttagcaggaggaacatattaataacaatcattcagtaatggatagctagttagctaggtatgctaggtaccttaacctcatcagtaatgcagcttgctctctggagtaagcattccttcggatgaagttttcagtataaaccaactcagttcatgatgttggtttcagttgtggaaaggggttggcctcctttggtttgtggatatacttaacaaagtaaggctggtagccctgctcatctcctatagttccagcatcttctttactttacagccaattgtcaaawggctactgttcacaaaagagtctgctgtgctagatgttgggaggagaaatgcctgagtgtacctagaccttgctcaggcagtttgtggtttagtggaagaagacaggaatgtgtgcaggtaacgtggaattgtgaagatggctgggctgaagggagtcaggg

SEQ ID NO: 314189 - DNA, 490 bp, Homo sapiens
tggccacacaaatccatctggaaaagacctccattctcattgaaaccacaggccatacacatacattggtctggctagttaagaaggttagatattcaaataacataattttaaaatatttaatttcactgttcttttaaggccataaaactgacttgcttttaagaattyacaaagacactttgaagagataaatttacggaaaaatctggcccacattttccaataaaactggtcctgtgttcctcagagctacaaacaaggctttgatgaaaacacagaaatcagtagcttgcctaggatgaagaacatgaggcttctcctactcattctcagttccccagagaccatcttcttcccatggatatttccctttgctttaactgctcctcagaaaccggcgaatgggaggaaaggagtctaaagacaccggggctgggaaacgatagctgttctttggtatatgtatgtgtgtatccctgtaataatt

SEQ ID NO: 314190 - DNA, 490 bp, Homo sapiens
tggccacacaaatccatctggaaaagacctccattctcattgaaaccacaggccatacacatacattggtctggctagttaagaaggttagatattcaaataacataattttaaaatatttaatttcactgttcttttaaggccataaaactgacttgcttttaagaattcacaaagacactttgaagagataaatttacggaaaaatctggcccacattttccaataaaactggtcctgtgttcctcagagctacaaacaaggctttgatgaaaacacagaaatcagtagcttgcctaggatgaagaacatgaggcttctcctactcattctcagttccccagagaccatcttcttcccatggatatttccctttgctttaactgctcctcagaaaccggcgaatgggaggaaaggagtctaaagacaccggggctgggaaacgatagctgttctttggtatrtgtatgtgtgtatccctgtaataatt

SEQ ID NO: 314191 - DNA, 454 bp, Homo sapiens
tttctgtgtaaaaaatacttagcattaatggcattctttggatttttaagagtgagttactttcattaattagccagttaatatagcatatctgggtagaggactttatcagcttggatttcattttattgatggaagaactaaagcagattgatgcagactcgacccttggaactcttcataaaatgtcttttaccatttatttctttaccactttctcctctgcttattttaccacatcttcccaccccctaaacacctggcttacagactggagtatgtgtgttagggragggggtgcaggggtaaggtggggtggggagaaacagctgtggcacaaaagaaaatgtaccagtaccagggagtaagctagagaagaccctgttctagaggaagagtgttggttgaagcaggggtttatatttccacaggaaagtcacattggtaagcattt

SEQ ID NO: 314192 - DNA, 454 bp, Homo sapiens
tttctgtgtaaaaaatacttagcattaatggcattctttggatttttaagagtgagttactttcattaattagccagttaatatagcatatctgggtagaggactttatcagcttggatttcattttattgatggaagaactaaagcagattgatgcagactcgacccttggaactcttcataaaatgtcttttaccatttatttctttaccactttctcctctgcttattttaccacatcttcccaccccctaaacacctggcttacagactggagtatgtgtgttaggggrgggggtgcaggggtaaggtggggtggggagaaacagctgtggcacaaaagaaaatgtaccagtaccagggagtaagctagagaagaccctgttctagaggaagagtgttggttgaagcaggggtttatatttccacaggaaagtcacattggtaagcattt

SEQ ID NO: 314193 - DNA, 450 bp, Homo sapiens
actctgggtctctcatgctgtgatttcaatcgtggtcttaaactgtggacatggccttttcttgttctggattttatggctttgagacaaaggtaaaccacagagtcagccattactgacttcatgggctgaagggctttcatcatatagctgtcacttagaatcttctctacaatcataagcacataaaatatgtcttattctagattatgtcttaaacagcaacagctgtcttcaaggtggtgatttatcagcatttaggtccaatggcaataagagttgtatcagcagacctagtgaaagttaatcattgaaaaaatattattctacctctacwtctacacataagtattttaatctgggcagttcactaggtgagtatttgattatgaagtaacaatagtcacaggagtaagcaaaataaatgtatttggtagtgttggaaatggc

SEQ ID NO: 314194 - DNA, 502 bp, Homo sapiens
ccatgcactacttattctgttgcctaaaatatccactgttggactgttttacactttttaccattatttaaaaggtgctatgatcaatattcttgtaaacgaatctgcttttacttttttccccttagaacaaatttctagaagtagacttgcaggtcaaaggaatgcacatattttaggcttttgataaatgtcaccaaattatttgtagttgcacagactaaaatgtccccatccattttaactttttatttttaacatgaaaaaggctataatgtagcatatttagcataacaaaataaaaccttgagtttgagtatttcattctgtttttagaatgatgagtttattgaattcaggctgtaccatggkgtcttgagaacatagaatttctcatcctcagggtggtttcagagtatatggaattgtaagtgctggcccctgaatcatgtgctaaagggctaatatggaacgtgttcctccttcctttaagaaatgtttg

SEQ ID NO: 314195 - DNA, 478 bp, Homo sapiens
aagtttatgctgtagacttggagagcatgcatactttcaacagtggtgtctcttttctaccatttaccttggatttttttttttagamcaacagtgttcctaatgctagcttctattgctgctcctttttgatgtcattttgtcatgacaattttttgtttgctttttacaataagctgctcttccagggcagagatgaatttttttttcagtaagtcatgagtgtggtacatccactaaatccagttacacatgtaacagaatgtactattattattggcagtgacctcattgattaattacagcctgaccctcttggcaacttcctactgattttacttcttgagtgattagttccaacattgcttatgcagttgaagtaaaggaggcttacaataatagtcctactttggaacactctctgccctactgacattaattaacaaaacactccacagaggaaaatgggtatttattc

SEQ ID NO: 314196 - DNA, 478 bp, Homo sapiens
aagtttatgctgtagacttggagagcatgcatactttcaacagtggtgtctcttttctaccatttaccttggatttttttttttagaacaacagtgttcctaatgctagcttctattgctgctcctttttgatgtcattttgtcatgacaattttttgtttgctttttacaataagytgctcttccagggcagagatgaatttttttttcagtaagtcatgagtgtggtacatccactaaatccagttacacatgtaacagaatgtactattattattggcagtgacctcattgattaattacagcctgaccctcttggcaacttcctactgattttacttcttgagtgattagttccaacattgcttatgcagttgaagtaaaggaggcttacaataatagtcctactttggaacactctctgccctactgacattaattaacaaaacactccacagaggaaaatgggtatttattc

SEQ ID NO: 314197 - DNA, 478 bp, Homo sapiens
aagtttatgctgtagacttggagagcatgcatactttcaacagtggtgtctcttttctaccatttaccttggatttttttttttagaacaacagtgttcctaatgctagcttctattgctgctcctttttgatgtcattttgtcatgacaattttttgtttgctttttacaataagctgctsttccagggcagagatgaatttttttttcagtaagtcatgagtgtggtacatccactaaatccagttacacatgtaacagaatgtactattattattggcagtgacctcattgattaattacagcctgaccctcttggcaacttcctactgattttacttcttgagtgattagttccaacattgcttatgcagttgaagtaaaggaggcttacaataatagtcctactttggaacactctctgccctactgacattaattaacaaaacactccacagaggaaaatgggtatttattc

SEQ ID NO: 314198 - DNA, 590 bp, Homo sapiens
aagtcgattacaagaaaaaatggattagaaatggatgagccaacacagacccattttcaccactggacagacaattcaaacacaagcctgatcagtctgacctctgtgtgtgttctcagtcaaataaaaaatagggcaaactaatggcctggagggtttatgatggggtctcaaaaatgctagctcaaataaaggactctttgaaataattctatttccaagccaaatataaatttacctgccttaggaacaaagcaataaaacccatttaaagtacttaagatggccctctggctttgaaaatgtggctttgrtgacctcatctcctcttaggctgaagtttaatatccctcttctctgaagtaagaccaggatagctgatggttcttaatgggtccctgcatctgccacaaatgagctttctgcattggattggtttcctcggtacagtccttacttatatgtagcactgtgagaaaagaacactgagggagagatgattttggaagtatttaggaacactgtgggatgtatttatatatttctgttaatccaaagagtatattagtttaacataaacaaccacatca

SEQ ID NO: 314199 - DNA, 619 bp, Homo sapiens
tacttaagatggccctctggctttgaaaatgtggctttgatgacctcatctcctcttaggctgaagtttaatatccctcttctctgaagtaagaccaggatagctgatggttcttaatgggtccctgcatctgccacaaatgagctttctgcattggattggtttcctcggtacagtccttacttatatgtagcactgtgagaaaagaacactgagggagagatgattttggaagtatttaggaacactgtgggatgtatttatatatttctgttaatccaaagagtatattagtttaacataaacaaccacatcactcacagcagaaccatagcaaataggacacttagtgtgttaattactaaactcttaatctccttattttacctgtaatgttttctttcagaaaatgttttcatgtctaatgcagtttcactattgcagagactaggaggaataccaagtcaatttttgctraactataagcataccagctattttacaaagctcatgacagaagcttaaaatatttttactcccaaaaaggcatagaattttatcattttagctgcaggcagaatagcaagaatctagcttttgacatacgaattgttgcaaa

SEQ ID NO: 314200 - DNA, 555 bp, Homo sapiens
ttgagggatatagaataaataagacacatagtggatacatgactttgtgcatttgtcaaaacccaaaacactgtataacacgaagaatgaactctaatgtaaaccatggactttagttaaaaataatatatcaatattggttcatagttgtgacacatgttaataaaacgagaaacgatgaggtgggagtggtggatggagtatataggaactctgtaacttatgctcagtttttctgtaaacctagaagtgttctcaaaaatgagggatrgtattaggggaatgaaaaaaaggcacagtctcattaggtttgcaaacatgtaacagttttaaacttatctaatcactaactcttttgtaaacaaagatgttgcccaacaatgtataggaaatctcctaattgtctttttttttttttttttttttttgagatagagtctcgctctgtcacccaggctggaatgccatggcacaatcttggcttactgcaacctccacctcccaggttcaagcaattctcctgcctcagcctcctgagtagctaggattacaagc

SEQ ID NO: 314201 - DNA, 560 bp, Homo sapiens
tttttgtgtcctgtgaacaaagaatttggtggaatcaggattggtaaatttttatttcatgtatttgttargcctaccagatatcagccaaaaactaaagtagtcatcctcgcagcttctacatgcttctcaacaaagatttaatagcctcatgcatatggaaggttcatattgcaaagacttcattactttcagtatgcatactgtgagatagggtgataaatcatttaacccaaactttactaatcagaataaatgtacagaagtcatgtggtgatggcttatgttttctcagtaattcctgaagtttggtaagcttcactgggcttccaagtcattagagagaattacagaatttcttcaactctctgccactgccccctctacactgtggctgctattcctgtcatgtgttgccctaagaaaagcatttctaggggcgtgcaatttcatagtaacttctgcttcttttggagaaactagattgtatatgaataaggcccaaagccttaactcaccaaagcatagatgagggaagaataatgaattgtgttcatctg

SEQ ID NO: 314202 - DNA, 560 bp, Homo sapiens
tttttgtgtcctgtgaacaaagaatttggtggaatcaggattggtaaatttttatttcatgtatttgttaagcctaccagatatcagccaaaaactaaagtagtcatcctcrcagcttctacatgcttctcaacaaagatttaatagcctcatgcatatggaaggttcatattgcaaagacttcattactttcagtatgcatactgtgagatagggtgataaatcatttaacccaaactttactaatcagaataaatgtacagaagtcatgtggtgatggcttatgttttctcagtaattcctgaagtttggtaagcttcactgggcttccaagtcattagagagaattacagaatttcttcaactctctgccactgccccctctacactgtggctgctattcctgtcatgtgttgccctaagaaaagcatttctaggggcgtgcaatttcatagtaacttctgcttcttttggagaaactagattgtatatgaataaggcccaaagccttaactcaccaaagcatagatgagggaagaataatgaattgtgttcatctg

SEQ ID NO: 314203 - DNA, 576 bp, Homo sapiens
tagatgtgtattacgtattaggtttattccaagaagaataaagtagggcaagctttttgtgtcctgtgaacaaagaatttggtggaatcaggattggtaaatttttatttcatgtatttgttaagcctaccagatatcagccaaaaactaaagtagtcatcctcgcagcttmtacatgcttctcaacaaagatttaatagcctcatgcatatggaaggttcatattgcaaagacttcattactttcagtatgcatactgtgagatagggtgataaatcatttaacccaaactttactaatcagaataaatgtacagaagtcatgtggtgatggcttatgttttctcagtaattcctgaagtttggtaagcttcactgggcttccaagtcattagagagaattacagaatttcttcaactctctgccactgccccctctacactgtggctgctattcctgtcatgtgttgccctaagaaaagcatttctaggggcgtgcaatttcatagtaacttctgcttcttttggagaaactagattgtatatgaataaggcccaaagccttaactcaccaaag

SEQ ID NO: 314204 - DNA, 613 bp, Homo sapiens
  misc_feature (1)...(613): n = A,T,C or G
gcttttcattgcataagaagtcaattcaatatcaggtcaaatggagatattgacctgatactatactggtttcccatgaaacatgggaagtgctttgacccctggcccaacctcttctcattcctctatatcatctattctgtgtgtgtgcatctgagctcaggtttgtttgagagatatctatctccaaaattcaaataaggtatttgtaaatgtaattatactctataaacagnngaagaactatttaatctggtcctgctgaaaatcattttcttatgtaaagagtgacatcttaatttaaccttatgttatggattkgggtgtttttcataggccaagattatttagtgtagtcctttggaatttgagattatttatttaatgtcttccctttctctgtgacagtaacacttctcttttttgtctcaggggtcatcactgccgcagacattcttgatcgggagacaatggggtcatactggctaacagtgtatgccacagacaggggcgttgttccactctactccaccattgaggtctacattgaagttgaagatgtgaatgacaatgccccgctgacctcagaacctatatattatcctgttgtcat

SEQ ID NO: 314205 - DNA, 570 bp, Homo sapiens
acaaaaacaaaaacaaacaatgtcacagtaaagaagttgaggccacagrtatcttcacatttcacaacccagtggagcctgaaataccccagtcagattctgcttcttccatcttgatcccattgctacttgagtcattaatggtaggcccagcaccctttttttaaagaatttaataaaaagctgcaaaagggaagttttctctgttctcatcctttacttaggaatgaatagaaaaaataactgtcacagggaagagggaagaatttgggttggatgtgaagttcagagaagaacatgctcattcatgtaactaaagctttcttttatatggcttttaaaagtttgaacataatttttcagaaagccctgttttatcactatttggcctacgttgctaataagatccttaagcatgttcataatttctctcttcttgccatagatttttaaaaagcatttttgccaggaatgacatttttgtccaactgatctaattgtctaaagaaatatatagcataccttgtagtttccagacacatgataagaaaatactgcttttttatccat

SEQ ID NO: 314206 - DNA, 648 bp, Homo sapiens
cactcaatatagggttggtgggagtgatggtcagggagggcttcatggaggaagtcacatttggagttagaagtcctgagtttcaaatgcttgctctgtgctttctaactacgaaacaccatagaacacagtgggggaaacagactgtattgcacagttttcaccagcttcatgaacttaccagcttcatgaccttggggaaattattgaacctctcttaaatgtagtttttagtgagtaaaaatagttgcaaggartataggagtcctcaccagaaatcctttgcacagtgcctggtgcattgaaatcccacaaaaaaagctgataccccattctaactactttactgtagttacagtcatttaatctctttggacctcacttacttatctggaaaatgaaaatgaccttgcttactctgcaagggttgctcatgaagtctgaatgtcatcatgatgtgtttgaaggctgttggtaaactacagagttctgtaagagtcatgttatgcctatttctaatgagattcacagaactccaagtctggtgaaattcttgttaatggtgttgctctaagtatcatgctgcctagggggcaaccttcagccagctcaaggaactctctaatagaagtcttaatttttggcatt

SEQ ID NO: 314207 - DNA, 594 bp, Homo sapiens
cccagctcacacctttctactcttagtttccatcccagagacagcttagttccctgtcacttgtctgttctatgacttgcagagctccagcctacctgggtggcacctcatggcactgactgctatgagagttccacaaaactgtccatggtgtctgtgatgtgctggtgtcctgtactcacagatgtgctcacacctgttcaggtatccaaccctcagagccctccttctctggttcttaatgtcatgttgacaattgactctgtctgagagaccaaaatagatggtcctttatcaactaagatgaatcctaaggttaaaaaacagagtagcttctgggttgacggttcagggcccagctggcatggcagatttctaaattcctacaggaaaaaccacactcctactagactctctaacartaagtgctaccaggcaaattgtcctaactttgatttacaacccagaccactaaaactctggttggacagaggatttgtctcacaaacattactttctgataagctactgcagacctaagccagtatcagctggcttatgaagcctgtgcacaaactgtctttgtgtcctata

SEQ ID NO: 314208 - DNA, 530 bp, Homo sapiens
aaatcatgttatctacacatggaaatagtgctagtttttcctttccaacttgattttttttttctttttcttatttaattgccctagatagaacttccaatagaaatctgagtcaaagcagcaagagcatacacccttttcttattcttgatctcaggaacaatggattaagtattttaccactaagtataatttagctgtgcgttttttatggatgccctttttcaagttgagaaagttctcttctattctgatttgtttcatgttttaatcmtgaaagggttgttagatttcatcaaactttttctgagtctatcaggatggtcatgcggttttgtcttttattctattgaaatcatgcatcatattaattgatttgtagatgttaagccaactttgtatttgtgggagaaagcccaattaaccatgtggtataaccgttttaatcctttgcgggattcagtttgctagtatttgttgataacttgtgcatagatattcataagagatataacttttgcatatatatt

SEQ ID NO: 314209 - DNA, 640 bp, Homo sapiens
catacaatactgtgtttgtacaagcaaatagagagacagagggtgagatcattgttgagtaagatttgattgtgaatccatcattgctgcttcctcagccttgacttctggggagcatctgaggttttcccttatgataagaaacaagattgctatgtatatttatatatcaactgtctagctgaagcatcacacatcagaagtcatgcatgacctgttttcatgacattttaggaagaagtagtggaaaaccagctaaaagattaggaaagagggcttttcaattgcacggtcacagagagttctcatttgtgctctagtactttcttcgtaaagccccaaaagttaattaaaaagaatttaaatcttctgcctgaaatgwtgctcttcttccctgagactccctataagacacttggctgccaaaggagcctcatgtctacctatgctgtgtgaacaagcttcctcttaaagaattatgaccctactcctgggtggttccatgacaatatatcagcccctgaccacgagatcccccagagaagcatcccagcaagcttggattcaaggcacttcccataacaaggctgactccagtgatgtctctgaatgtcttttaccctctgctcttgaaatcctt

SEQ ID NO: 314210 - DNA, 555 bp, Homo sapiens
gagttcatttataaaagagcccagtggcatctcttcctgatagttgcatgggtcttttcggggggcacttattgtgttccagaagacactcaagtgtatccagaatgaactgggggagtaatcttagaattttgtcttgatggagaaatggagagggttttcatgaggaacttgaataattgtggagaggtttagattttctccctaaaccaacmaagagttaaggaaagcctagagtaagtgagatggctgtcacagggctgtcagggcagatatcctccgctccattggatctgccagctattaagcttgcttattccacttctcatgaactatgcatggtgcttgttctgctatggagggagcccccatcattaatactctccaacccagtaagagccatttgatataatgacactgaatttacccagtgatatccttaagaaaaaatgagtgaattctattaatggagctgtaacattgttgaaataggcatagacttcctcattctgtgaattttaatcagcctacaaatccccatttattagttatgag

SEQ ID NO: 314211 - DNA, 570 bp, Homo sapiens
ggcagtcttttgtgaaagtgtttcctgggatttaaacttttatcatataatatggctcctaaatcttttggaatttatagttggatggggtagagagaggggaagggagagggatagagatgtccccttaggaaaataatttattaataataaataaaaggatgaagtcataaaagatgtgagctgaggagaagctgtggtttgagagccagggaaagacagtgattctagtctcaccttgtaaaagaatttactctctttagacgttccttagcaataacatgagacacttgggcaggttcccttgaaaggcccgcttcctctaacagtcagtgattaccgtgtagaaagcagagtgcatgccattgataaatagggtgatggcattaaaaggatgagttgacattaatcatgaagggattacaggaaaaggtacaatatgaacatctttgtgagtgagcaaggctgtgcagaggtgacagagcccatgactggagcgtggggctttgaagccaggagacaggtcygagtcagagcttgacacctactgtgcgacctcagaaatgttga

SEQ ID NO: 314212 - DNA, 617 bp, Homo sapiens
tacatttcccatagtgattcatattattycccattttatcaatgaagaaatggaagtcctgcaaggttaagccccaggttcagaggcacacagcagaggccacgcaagacacagggctccctccactagagtctgctgccaggttaaggcatttggagccacagaaagatttggagggggtggattcatgggagaagatacttctgtcatctctggcaggcaccatggacacatttcagtctcttgtatgtttggtgtggggttggggagtttaaggtgggatttttatttcctgaagctgttgctacagtattttcacagacatttgtatttaactttgtccaccaaagaccataacgcttctaaacagatgtgtggggctgactgtgacaaccagcttcatccatggctacactattttcaactagcatgaagacataaatcaaatttctcttccctcttgaggcccttgtgatatttcgatgcatgtcagccttgacaaaatatgtttgctcttttattcaatttgccttcagaggaacacgccagttataagttgtggctgaatggcgaaccttcatttaggtgatttcaattttctttattcattttttaaa

SEQ ID NO: 314213 - DNA, 617 bp, Homo sapiens
tacatttcccatagtgattcatattattccccattttatcaatgaagaaatggaagtcctgcaaggttaagccccaggttcagaggcacacagcagaggccacrcaagacacagggctccctccactagagtctgctgccaggttaaggcatttggagccacagaaagatttggagggggtggattcatgggagaagatacttctgtcatctctggcaggcaccatggacacatttcagtctcttgtatgtttggtgtggggttggggagtttaaggtgggatttttatttcctgaagctgttgctacagtattttcacagacatttgtatttaactttgtccaccaaagaccataacgcttctaaacagatgtgtggggctgactgtgacaaccagcttcatccatggctacactattttcaactagcatgaagacataaatcaaatttctcttccctcttgaggcccttgtgatatttcgatgcatgtcagccttgacaaaatatgtttgctcttttattcaatttgccttcagaggaacacgccagttataagttgtggctgaatggcgaaccttcatttaggtgatttcaattttctttattcattttttaaa

SEQ ID NO: 314214 - DNA, 601 bp, Homo sapiens
ctacccccatcacagggttgctataaggtatgcagccaaaaatatatattacatacttggtacagtgcctgcagtgcaggaatgctccacaaatattagccatcaatactaaaaatagcaatcaatacatagtccatgaagatgagtgtcaaaggtccagaatgtttactagaagctcaccatgatttggcttgacctcaaacccattaaggtaagagccaaaacgatgtttcctaattgacaggttgtatcagaagaaaacaaagcaaccacggaagagaaataaagctgcttcctccccatgttatggggactggtgagtacatttcccatagtgattcatattattccccattttatcaatgaagaaatggaagtcctgcaaggttaagccccaggttcagaggcacacagcagaggccacgcaagacacarggctccctccactagagtctgctgccaggttaaggcatttggagccacagaaagatttggagggggtggattcatgggagaagatacttctgtcatctctggcaggcaccatggacacatttcagtctcttgtatgtttggtgtggggttggggagtttaaggtgg

SEQ ID NO: 314215 - DNA, 617 bp, Homo sapiens
tacatttcccatagtgattcatattattccccattttatcaatgaagaaatggaagtcctgcaaggttaagccccaggttcagaggcacacagcagaggccacgcaagacacagggctccctccactagagtctgctgccaggttaaggcatttggagccacagaaagatttggagggggtggattcatgggagaagatacttctgtcatctctggcaggcaccatggacacatttcagtctcttgtatgtttggtgtggggttggggagtttaaggtgggatttttatttcctgaagctgttgctacagtattttcacagacatttgtatttaactttgtccaccaaagaccataacgcttctaaacagatgtgtggggctgactgtgacaaccagcttcatccatggctacactattttcaactagcatgaagacataaatcaaatttctcttccctcttgaggcccttgtgatatttcgatgcatgtcagccttgacaaaatatgtttgctcttttattcaatttgccttcagaggaacacgccagttayaagttgtggctgaatggcgaaccttcatttaggtgatttcaattttctttattcattttttaaa

SEQ ID NO: 314216 - DNA, 617 bp, Homo sapiens
tacatttcccatagtgattcatattattccccattttatcaatgaagaaatggaagtcctgcaaggttaagccccaggttcagaggcacacagcagaggccacgcaagacacagggctccctccactagagtctgctgccaggttaaggcatttggagccacagaaagatttggagggggtggattcatgggagaagatacttctgtcatctctggcaggcaccatggacacatttcagtctcttgtatgtttggtgtggggttggggagtttaaggtgggatttttatttcctgaagctgttgctacagtattttcacagacatttgtatttaactttgtccaccaaagaccataacgcttctaaacagatgtgtggggctgactgtgacaaccagcttcatccatggctacactattttcaactagcatgaagacataaatcaaatttctcttccctcttgaggcccttgtgatatttcgatgcatgtcagccttgacaaaatatgtttgctcttttattcaatttgccttcagaggaacacgccagttataagttgtggctgaatggcraaccttcatttaggtgatttcaattttctttattcattttttaaa

SEQ ID NO: 314217 - DNA, 596 bp, Homo sapiens
gagagtacatgccatccttaagaagcagggaaaggaatcccaccagagcctcactctaaccatatgtatcttgtccatccagttcccttttctaggctcctattccttacctctttcctcctaattcattcttcatatttaggctctctttaggatctctaaaatgatcatatttctagacaaagagttttagaaaaagactaagaaaaggtttggattttaaatttttgtttgtttgtttttgatttttaatcttaggacccagcacggtctttggtacagaataatcataaaatggtaataacttttactgaccactcattagatgacaggcatttcatccccacagcaattccatggggagacatgttcttacacatgtttactgaatgaaggaacgaaggaacaaatgagcaagcttccacactttgacactgaaatsatatcttgctcatagtttagttccacaagctattaagcaatgagaatcttgagaaaccctgaaaacgactggttctttgtggtcaaaacagtgtgcaaacagatagggatggtgcctttttcaatctgaggcatgaaaaatgctgtatagagct

SEQ ID NO: 314218 - DNA, 596 bp, Homo sapiens
gagagtacatgccatccttaagaagcagggaaaggaatcccaccagagcctcactctaaccatatgtatcttgtccatccagttcccttttctaggctcctattccttacctctttcctcctaattcattcttcatatttaggctctctttaggatctctaaaatgatcatatttctagacaaagagttttagaaaaagactaagaaaaggtttggattttaaatttttgtttgtttgtttttgatttttaatcttaggacccagcacggtctttggtacagaataatcataaaatggtaataacttttactgaccactcattagatgacaggcatttcatccccacagcaattccatggggagacatgttcttacacatgtttactgaatgaaggaacgaaggaacaaatgagcaagcttccacactttgacactgaaatgatatcttgctcatagtttagttccacaagctaytaagcaatgagaatcttgagaaaccctgaaaacgactggttctttgtggtcaaaacagtgtgcaaacagatagggatggtgcctttttcaatctgaggcatgaaaaatgctgtatagagct

SEQ ID NO: 314219 - DNA, 594 bp, Homo sapiens
agctctactaaatatgcaaaatgatacaagtaaaggggggacattaatgcagtggggttcccactacatttctcatgaatacggtgggatatatagcaaagttaacaatttctcttggagaaaacaacaatagaaagaacaagaacaaaaattacatgagtgccagtgtttctgctcaatttcccaccagtacaactggaaatctaccaaactcaccgatttctcttgggaaaactgaggcaatagtgtttttgaggccttgttctcaactttcgttacttttctttctgagttaacattccttccctctgtccccctcatcaggcttcctcaaaacaaacaaaagcctgatatgtcatttatactttggctgaaggctaggcatacttatgtgtgattgcatagactatgcattttaacaacagtagctagcatttactgaatrttctgagggctttgcatgcacttccacatcattcccacctcacagcaatgctataaaataggtatgcttgttatcttcattttactgagaaggaaatgaaggcacaaagaggttaagtaacataagatcacggagctagtatgcagtag

SEQ ID NO: 314220 - DNA, 594 bp, Homo sapiens
agctctactaaatatgcaaaatgatacaagtaaaggggggacattaatgcagtggggttcccactacatttctcatgaatacggtgggatatatagcaaagttaacaatttctcttggagaaaacaacaatagaaagaacaagaacaaaaattacatgagtgccagtgtttctgctcaatttcccaccagtacaactggaaatctaccaaactcaccgatttctcttgggaaaactgaggcaatagtgtttttgaggccttgttctcaactttcgttacttttctttctgagttaacattccttccctctgtccccctcatcaggcttcctcaaaacaaacaaaagcctgatatgtcatttatactttggctgaaggctaggcatacttatgtgtgattgcatagactatgcattttaacaacagtagctagcatttactgaatgttctgagggctttgcatgcacttccacatcattcccacctcacagcaatgctataaaataggtaygcttgttatcttcattttactgagaaggaaatgaaggcacaaagaggttaagtaacataagatcacggagctagtatgcagtag

SEQ ID NO: 314221 - DNA, 559 bp, Homo sapiens
cttcatgacttctgaaaattattggtgctgacatttcctatgagacgtgcttcaagtgtccaattcaattgtaaaattcagtgggtccagatgtgtagcaaaaagtaggggaaccacatttcagaactcgtattcatttagatttaaatacaactccaagcaatgctttccccatttatgaaatctgggctccaaaagtccaaattcacaatacagcttattttaattcacttacaggtaaataaagaataagagagatgctataaaaatcracaatcacagtggaatacactggagatcttagctaaggcaaactcatgtggaaacaagagtaaagaatgcccaagacacaaaggtcctaaaaggcctctgactgctttactgcatttggttcaagatcacgttcaatagattatgaaaagacgtatgagttcagggttagatacatacttgcatatacatgcctgtctgctctccacattacttaatgtagcttaaatttaatacgcaaatggtcaccctatcacccagtccaatgagtacctctcaacctttctga

SEQ ID NO: 314222 - DNA, 661 bp, Homo sapiens
aaatacaactccaagcaatgctttccccatttatgaaatctgggctccaaaagtccaaattcacaatacagcttattttaattcacttacaggtaaataaagaataagagagatgctataaaaatcaacaatcacagtggaatacactggagatcttagctaaggcaaactcatgtggaaacaagagtaaagaatgcccaagacacaaaggtcctaaaaggcctctgactgctttactgcatttggttcaagatcacgttcaatagattatgaaaagacgtatgagttcagggttagatacatacttgcatatacatgcctgtctgctctccacattacttaatgtagcttaaatttaataygcaaatggtcaccctatcacccagtccaatgagtacctctcaacctttctgaaaggcatctgacagagttctatttattgaaggtaaagtcaataaaatgcatatagtgacattcagacttccacatgactgtgatccatcccagagtatgcaccaaacataacatgaagtacatggacctcccaaacctcaagagtatctgtcacctgaaggagggatatgcagtatattaaggtaaaaaacgcaatatccaaacagcatgcggcttttgctgagattctaatttatttccaggaact

SEQ ID NO: 314223 - DNA, 591 bp, Homo sapiens
tatgatagagtcagaatcatttacatagtatataggatacatattcaaaagctcagcaaggaaagacaaaccccattattcatagttaccttgctcttatttccttgggagatcttcataaccacacagaggcacacagtcatgaagttactatagttcttaacgtatgttcctgtcagcctgtaggttagctgactacttagtggaaatgaaaggtgcattgctatttgccaagcccttctctgagaaaggcatttgtgacttcagtgccattaatgacagagagattctgcagttattgccattctttggaatgattcattgcaaaastgagagaatttaatcttttcaacaagctggaggcagtttacattgtctttattttgttactgaaacaaatggtgcaaaaatgaaaattcatccttcctgaccccctcttagccattctctcttttgagccatcctctcttctaagataacaggacaatagggctagacacctgtaaatcacatctggggctctgagaagaaagagtatgcaagaagtctcatgcttcttctctaaccaatactcaatggggcagtgggttt

SEQ ID NO: 314224 - DNA, 637 bp, Homo sapiens
ttctgcatacggaacttagtgtttttgtttaaacattgttttagagttgctcagtaagtatgcctttcccttcaactagctggtatgaaacattaaagatggctgcaatttcttttgtacttctctcatggagaagaagagtctaattatcctcccattgaatctgggctggccttggtgacttgcttgaccaatagaatatggtagaagtaatgtcatggcaattcaggcttatcttctcagacaactagcacattctctctggacttcttagaaccctgatgtgccatgtygtagaaattctaagccatgagaaaaagccacatgcaggtacttttgttaacagtcgcaactgagcctagccttccatccatctattttatgaactaggcctatgctgaagctgtcctgggctctctagacagtccatcaaccagctgaccaccaccaagtgacctccatcaatgccatccggaactaaagaattctcatccaattcctgcctgaattcctatagaatcttgaaatcgaatgaaatgttgattgttgtaagacattaaatcttgggattatttgttatgtaacaattgatagcaaatcagtcataagcatccagaggctatttgttgaagcgatt

SEQ ID NO: 314225 - DNA, 552 bp, Homo sapiens
aatatccaaattgccagggacagcgctaactatagaaagtagtgactaatgaaggctgcatttctatgcacacacaacacagctaaatgtgtcattcccaactttacctaaaaaaaagcaaacaaagaaacttaactgaatccaagcatttagtagactaagttactaacaagacaagtcagataagccagagaggtttataaacaacacatttytagtacaaatgggtataatgaaaagatgtttacctgttttttttttttttttctgaaaagcagtgtcttctttgcctttggagtcctaaaacttttattaggaaaaaagggggcaaacccccagcttttcagaaatgtaggttattccctaaccagcgtagaatgtattgctccataaaatgtcaacatcaaaacagtatagaaaaaataattacagacagtattagtgttgtaagctgataaggaccagatggtcttttgtatttatggttttccttgtgcatacaaatgctttggggatctaattagccttctacaaaactcaaactgggtaatt

SEQ ID NO: 314226 - DNA, 612 bp, Homo sapiens
ggacagaatgaaaaagctgcacatatggagcccattgaatacttgaacatgatctataggaaactctgatcttagaatccaagaaggttttaaagaacttaaatgattccaaatttaggatacattttcagtgaggtagaaaaagaagggttactctatgatcccgtcctacctattatgctgcattactcagtcttttcctcccaacactggcatagcacacatgcatactgaattagctatcaccatttcccacacatcttcccacccttgtgcctttgctcaccccattccctgtgcctgaagtatcctttcagggttctacctccacatgtcaaaactgcatccatccttccagacctgtcctgaatgccactatctttcargaagcttctcctgattcctccatccactgccatcgttcccacctgcaaacttcacacagcacttccttgaaacgtattttatttaattatatgttgcagtacagtataaactgtccccacactagaatttaagtgagcaagaggtttggctccagcagagagaacaccatcatttttctccagcacaatttgtgttacttctattcaatcaatctttatcaattca

SEQ ID NO: 314227 - DNA, 524 bp, Homo sapiens
taggtaggtcctactgttctcccctcatttggaaggtcaagaaactgaagcacaaaaaggttaagaaacttactaaaggggtatgcggtgaaaacaaatgtgcttgtcaagttttcttccacagtatcaactaacttctccattcttctttcttataagttgtatagatgtttggyctttttggcctttttagaatattttctgaataacctccattgagatcattgcaatttgatttcctctctccccctataattcctataccactggagtatatcaagaaatagaagggtgggccagggtacagtggttcatgcctgcaatcccagcactttgggagtttaaagcagacagatctcttgaggccaggagttcaagaccagcctggctaacatggcaaaaccctgtctctactaaaaatacaaaagttagctgggcccgtggttccaccaacttgggatgctgaggcacaagaaacgcttgaacccgggaggtggaggttgcagtgggccaaggtcacacca

SEQ ID NO: 314228 - DNA, 524 bp, Homo sapiens
taggtaggtcctactgttctcccctcatttggaaggtcaagaaactgaagcacaaaaaggttaagaaacttactaaaggggtatgcggtgaaaacaaatgtgcttgtcaagttttcttccacagtatcaactaacttctccattcttctttcttataagttgtatagatgtttggtctttttggcctttttagaatattttctgaataacctccattgagatcattgcaatttgatttcctctctccccctataattcctataccactggagtatatcaagaaatagaagggtgggccagggtacagtggttcatgcctgcaatcccagcactttgggagtttaaagcagacrgatctcttgaggccaggagttcaagaccagcctggctaacatggcaaaaccctgtctctactaaaaatacaaaagttagctgggcccgtggttccaccaacttgggatgctgaggcacaagaaacgcttgaacccgggaggtggaggttgcagtgggccaaggtcacacca

SEQ ID NO: 314229 - DNA, 571 bp, Homo sapiens
tagcccattctaaaagctatatcttgtttcattgtgcggttgagaaagagtgcctgaagaaattctggagcatgatgcaagaagaagaaacaagcagaaaatatataacctgcaaactcacatatttcacacccaagcaggtttttccatttagttttmtattaaaaactgagtaattgcaatatgaaagcatgaacacaaggttgaaaagtaacaactaacagcatatcattccataaggagttgaaaacgaaaagtaaattaactgagcattgacaagtatcaatatcctcgtaacataaaacccatcagaactcatgtgtgtaatattgcctcaaacaactcactagaaatggaaataaaatgcattaaattaatgtttgaagattctaaggttagagaattgatacttgttcacaacaaaaaggcagtgatgactcagctctttcagatacatgtgaaacttgttacacttatccgtgtatcataatcttatggttcctgcagggatcctagcttttaatttcctgaacatacttaaaccctcaaccacagtgttagatgtcatggt

SEQ ID NO: 314230 - DNA, 571 bp, Homo sapiens
tagcccattctaaaagctatatcttgtttcattgtgcggttgagaaagagtgcctgaagaaattctggagcatgatgcaagaagaagaaacaagcagaaaatatataacctgcaaactcacatatttcacacccaagcaggtttttccatttagttttctattaaaaactgagtaattgcaatatgaaagcatgaacacaaggttgaaaagtaacaactaacagcatawcattccataaggagttgaaaacgaaaagtaaattaactgagcattgacaagtatcaatatcctcgtaacataaaacccatcagaactcatgtgtgtaatattgcctcaaacaactcactagaaatggaaataaaatgcattaaattaatgtttgaagattctaaggttagagaattgatacttgttcacaacaaaaaggcagtgatgactcagctctttcagatacatgtgaaacttgttacacttatccgtgtatcataatcttatggttcctgcagggatcctagcttttaatttcctgaacatacttaaaccctcaaccacagtgttagatgtcatggt

SEQ ID NO: 314231 - DNA, 571 bp, Homo sapiens
tagcccattctaaaagctatatcttgtttcattgtgcggttgagaaagagtgcctgaagaaattctggagcatgatgcaagaagaagaaacaagcagaaaatatataacctgcaaactcacatatttcacacccaagcaggtttttccatttagttttctattaaaaactgagtaattgcaatatgaaagcatgaacacaaggttgaaaagtaacaactaacagcatatcattccataaggagttgaaaacgaaaagtaaattamctgagcattgacaagtatcaatatcctcgtaacataaaacccatcagaactcatgtgtgtaatattgcctcaaacaactcactagaaatggaaataaaatgcattaaattaatgtttgaagattctaaggttagagaattgatacttgttcacaacaaaaaggcagtgatgactcagctctttcagatacatgtgaaacttgttacacttatccgtgtatcataatcttatggttcctgcagggatcctagcttttaatttcctgaacatacttaaaccctcaaccacagtgttagatgtcatggt

SEQ ID NO: 314232 - DNA, 526 bp, Homo sapiens
tgactaaataatgtgactcatgtggaaagaacagattataatatcatatagcacataaaatatggggacaattttaattacatggtattcacaaggatgctcagcatttgaattgtttatcctactacaaaatacacgtttaaagtatagttctacttggttaatttgttktacaactgaacagcaaaacaacaattatcccttcatatatttaagaaactgccaaacatttgctttaaagctagtttaaagcagtgggggaaggcagataaagtcccctcagaaggcaaaattttctgttattaaccaaatgctatattaaaatttgtctaaaagttcatttaaaaaaatcaatgtaattgttgtcatgtttctttaatcagatggattacagatgaagtccactaactgcatgactttgggcaactcatttccccccaccccccttccttagtctcctctttcagcagccaggctactttacctatcagggtgatgcatgaagagatgagaggctacaagggaa

SEQ ID NO: 314233 - DNA, 492 bp, Homo sapiens
acataaaatatggggacaattttaattacatggtattcacaaggatgctcagcatttgaattgtttatcctactacaaaatacacgtttaaagtatagttctacttggttaatttgttgtacaactgaacagcaaaacaacaattatcccttcatatatttaagaaactgccaaacatttgctttaaagctagtttaaagcagtgrgggaaggcagataaagtcccctcagaaggcaaaattttctgttattaaccaaatgctatattaaaatttgtctaaaagttcatttaaaaaaatcaatgtaattgttgtcatgtttctttaatcagatggattacagatgaagtccactaactgcatgactttgggcaactcatttccccccaccccccttccttagtctcctctttcagcagccaggctactttacctatcagggtgatgcatgaagagatgagaggctacaagggaaatcatatcataaggtaga

SEQ ID NO: 314234 - DNA, 526 bp, Homo sapiens
tgactaaataatgtgactcatgtggaaagaacagattataatatcatatagcacataaaatatggggacaattttaattacatggtattcacaaggatgctcagcatttgaattgtttatcctactacaaaatacacgtttaaagtatagttctacttggttaatttgttgtacaactgaacagcaaaacaacaattatcccttcatatatttaagaaactgccaaacatttgctttaaagctagtttaaagcagtgggggaaggcagataaagtcccctcagaaggcaaaattttctgttattaaccaaatgctatattaaaatttgtctaaaagttcatttaaaaaaatcaatgtaattgttgtcatgtttctttaatcagatggattacagatgaagtccactaactgcatgactttgggcaastcatttccccccaccccccttccttagtctcctctttcagcagccaggctactttacctatcagggtgatgcatgaagagatgagaggctacaagggaa

SEQ ID NO: 314235 - DNA, 649 bp, Homo sapiens
aggaagtaatccagagatactttgcagtattccggtgtgatccatactcgtttctggacagcttccgactgcagtgtcttcacaggccttatttaaatgtggatcttcatgcctggcaccagtccaaggcaatgagcatggccgtcacaatggtttgttgaatcctggttctgggacacaattttatagatggtccatgtcttgggctcagatcctccaggaagcaaaactgaggtggagatgagcatgtagcttaaagtgtcacagctgtggggctgtaaagggagtaggattgggcagaggcagaaaaygaatgacagaaggcattagtggatccaggaggagctctggagctgggaaggtactgcagtgttgttctgctctgagggaggcaggccaggcatttggacctatccctggagagggcaaaggggctctcttcacctgaacgctattcctagaatcagctgagagtcatcaactgccaaaacttccagaagcaggaggaattggtgacttagtcctggaggggcctgcacagcacacccccaaaggtaagagtggtcaaaggtgccacttatatgcaaaactattaaagcacttcctctgattttcagtggggtcaatgactatagtttttcttcaagta

SEQ ID NO: 314236 - DNA, 562 bp, Homo sapiens
tataccattttgtattctgtttacatgtttttttctgtcaatagactgtgacttctccagggcaaccatatttttattcacttaatgttcattaaaggaataccttttaagagcccaggctactcattgtatcttttgtgcttagcacagggcctggcatatgaagggcatcaataaatattggtctattgactaaataaactataataataataataaatgattaaatatataatatatagtaaacacaatcaaataaatatataataatgaaatgtgtatgtacgcgtgtgcacacacacacatgcttccatccaaagcaggtaatggtctatacatatgggaatattcatttagcatttatattatggcttgtaaagactttttsggaaaagtttccaaattcagaacgaattatgtgctgcgatgattattgctatgggtttttaacataaaatgttacaggttcataaaaagccatgttttttggtgtcatgtcagagtctgcagtctgtttggttaattgaggttaatggagggaaatggcagattgccagtgcta

SEQ ID NO: 314237 - DNA, 602 bp, Homo sapiens
tatagaaaagatgagctaggtggcattttagtttcttgttcagaaaagaaaaagaaatgtaaatcaaatgagagaatcattgaaagagtcaggaagaatcagatagctgcaaataccggctctatgggataggggctagtatgggggtgtggggagaggcaggaagcaccaaagactgccataagcatctatatctagcttgtttattccatagttatccacaggataaatayaactacatatcatttgttgagtgttacatcactaagtagctagatctgttcgactcctaaatttgtgccctgaactggtatactgtaattacagtatttgcttggctttactggttcccttggtagaagtggaagaaggttgttcagattttcctcctgtttcagaaacaagaacagtggtggcagacctgaaatgtgcacaccccatggcaaatttaaaactaagagctgcaactggcagtgggtctgctgggcactcatgtccagggtcccgggactttctttcctttcaccattacttttcatcccaagattgatctccattccacccatgcagttcagcaatggtcccaggagaataggtgcaaa

SEQ ID NO: 314238 - DNA, 559 bp, Homo sapiens
ttggtagaagtggaagaaggttgttcagattttcctcctgtttcagaaacaagaacagtggtggcagacctgaaatgtgcacaccccatggcaaatttaaaactaagagctgcaactggcagtgggtctgctgggcactcatgtccagggtcccgggactttctttcctttcaccattacttttcatcccaagattgatctccattccacccatgcagttcagcaatggtcccaggagaataggtgcaaaatgtttcttctacattttcagccatttagcagtctttctttgggactaagggtttgtaatgggtaggtacacaagaggtacccatttaaaaaccaactagtcaaatgaacatgccacccagattaaaagacattttcatctyctttgttcgcactctgaaaaattcagtatcttctgaacaaatggctgtgcattgagcctgagagtggatttttaaaccattcacagctctgtgtcagtccttcattcttagggaaaaccagctcaatgctactgtggttgtaattagtggataattagtacttgtac

SEQ ID NO: 314239 - DNA, 567 bp, Homo sapiens
actggaatattaatttttcccagcattattgtaaaaggccataaggtggtgatattactccttgaaaaacctgttttgtttttttggcttaggaatgagaagaagctgaaaagtgctcttgtttttctgtctctcaatttcttttttttctttctgtctctatmttcctctatttccttccatatttcctctatttccttccatatttccaattcttttttcttttcttttttttttttgtttgaacgtgtctcactctgtcacccaggctggagtgcagtggcacgatctcggctcactgcaacttccacctctggggttcaagcgattctcctgcctcagactcccctgtagctgggattacaggcacgtgccatcatgcctggctaacaattcttttttttttctttttactgtaagtttttaagatattatgaaagtgtcagggaccatgttagatagtgctaaacataaacagtaggcattacagcaaaaatgtcaacaaatcctgagactttaagattaaaggctttgttatttatcttgtaaatagcagaccatgaactt

SEQ ID NO: 314240 - DNA, 567 bp, Homo sapiens
actggaatattaatttttcccagcattattgtaaaaggccataaggtggtgatattactccttgaaaaacctgttttgtttttttggcttaggaatgagaagaagctgaaaagtgctcttgtttttctgtctctcaatttcttttttttctttctgtctctatattcctctatttccttccatatttcctctatttccttccatatttccaattcttttttcttttcttttttttttttgtttgaaygtgtctcactctgtcacccaggctggagtgcagtggcacgatctcggctcactgcaacttccacctctggggttcaagcgattctcctgcctcagactcccctgtagctgggattacaggcacgtgccatcatgcctggctaacaattcttttttttttctttttactgtaagtttttaagatattatgaaagtgtcagggaccatgttagatagtgctaaacataaacagtaggcattacagcaaaaatgtcaacaaatcctgagactttaagattaaaggctttgttatttatcttgtaaatagcagaccatgaactt

SEQ ID NO: 314241 - DNA, 567 bp, Homo sapiens
actggaatattaatttttcccagcattattgtaaaaggccataaggtggtgatattactccttgaaaaacctgttttgtttttttggcttaggaatgagaagaagctgaaaagtgctcttgtttttctgtctctcaatttcttttttttctttctgtctctatattcctctatttccttccatatttcctctatttccttccatatttccaattcttttttcttttcttttttttttttgtttgaacgtgtctcactctgtcacccaggctggagtgcagtggcacgatctcggctcactgcaacttccacctctggggttcaagcrattctcctgcctcagactcccctgtagctgggattacaggcacgtgccatcatgcctggctaacaattcttttttttttctttttactgtaagtttttaagatattatgaaagtgtcagggaccatgttagatagtgctaaacataaacagtaggcattacagcaaaaatgtcaacaaatcctgagactttaagattaaaggctttgttatttatcttgtaaatagcagaccatgaactt

SEQ ID NO: 314242 - DNA, 637 bp, Homo sapiens
ttaaaatctacttttgtatttcaaggattatttctaattacatgcacaattgctgatccatctgcctactacatagatgtctgtggttatatatgcttgaataattattgaaaattaaataacatcataaacagtcaaattaatttatctgagcataccaaaggcaggaagcctgctctagtataaaacattatttgcctggagaaacataaagacagatttatcttatacaccaaatttctcacattctattctaacytgatggagttttctttgtttttgtttttgttttcttaaagaaacccgaaagttgaaacacaaaacacttgagaagtattatggaatagcaacacaccttagctagatgagtaatttaaaattttagtctaaatatatttcactgtcaaaataagtccatagtgtgtctcctctaataacataaccaagtacagctgtttcagtaagaaatggtttctttgaatgttttaagataatacagaattgtaaaaggaaagattcctcacttgtcttctatttctacaatagcaggagtcattgtaaaatacagaaggttgaactgcagggtctatgaaaattgagttaatccaaatttcagcagaaggcttgaagaaaagtt

SEQ ID NO: 314243 - DNA, 545 bp, Homo sapiens
aatactcccagtggtcatcatagtctaatgcaatgaagtcacaagacagcagttttagaatgaggacaactatgaaaatttccctggaaaagattctgcatcttgagccagtatatatatttaaatctgcagatagatatatcctctgcaaaataaattacaaaataatatcaataattatccactctaatcactgaacatttacaacatcacagtgagcagcttsctggctcttctctcttggctggtgttctatttctttaaactgagtggtaatacagtacacaatgctcatatatgtgaaaaaaagaacccttttggaaattttgcttggggaactcaaatacatacaccttgacatttcttttacagcctaatttcttagcattatctgtgaaataccatttaaagtgatttaaaacaaaaattggcttttaattcttgaaagtttttcccttttcaggtcaagagacaatgcagactctacaagctctagagtatatcagaagtgggattaatcctaactcttccatttacaggctgtg

SEQ ID NO: 314244 - DNA, 545 bp, Homo sapiens
aatactcccagtggtcatcatagtctaatgcaatgaagtcacaagacagcagttttagaatgaggacaactatgaaaatttccctggaaaagattctgcatcttgagccagtatatatatttaaatctgcagatagatatatcctctgcaaaataaattacaaaataatatcaataattatccactctaatcactgaacatttacaacatcacagtgagcagcttgctggctcttctctcttggctggtgttctatttctttaaactgagtggtaatacagtacacaatgctcatatatgtgaaaaaaagamcccttttggaaattttgcttggggaactcaaatacatacaccttgacatttcttttacagcctaatttcttagcattatctgtgaaataccatttaaagtgatttaaaacaaaaattggcttttaattcttgaaagtttttcccttttcaggtcaagagacaatgcagactctacaagctctagagtatatcagaagtgggattaatcctaactcttccatttacaggctgtg

SEQ ID NO: 314245 - DNA, 571 bp, Homo sapiens
gatactatccaggacaagaaaaaatgtgaatgagtctgtaaggaagtggatatccaatagtatctattacctttctcagaagaaggggggacaattatgacatttttcagcatttagaaccatttggcacccagaagaagtaatctataaaggtgttttcaggcttatacagctttagaatctgacagttaacattaagatcttggcagtctaattagccaggytttctgcttttaatcaattgacttaatatactaaataagagaatataagcttgatgccaacaatacatggttgacactgttggtcaataaaaactgcaaatgccaacttgtctcacttgtttattaaattttaaattgcacacaaataaccagggttatgacttcagataagctttggtttaaattacatttaaaatatgtttttcacttagtggggaaaataccccctctctcacttcttccctaccttcccaagtcaaaaacaaagcaaaacaaaagactttttcagaaagatcttttactgaggtgattcataaaagttacactgctataggtttctagggaaa

SEQ ID NO: 314246 - DNA, 621 bp, Homo sapiens
acttgtctcacttgtttattaaattttaaattgcacacaaataaccagggttatgacttcagataagctttggtttaaattacatttaaaatatgtttttcacttagtggggaaaataccccctctctcacttcttccctaccttcccaagtcaaaaacaaagcaaaacaaaagactttttcagaaagatcttttactgaggtgattcataaaagttacactgctataggtttctagggaaacttagccaataatctatgtgccaagtactttgtayaaattaatttttaaaattacaaaatgctttgaaaattgttataagtgccctaaaagttgaaaagttatcatcatcagttcagggaaaaggcatgaactttttgaggtttaagcaacatcattttgcgaatttcctttctttgctgctcccttttcttatgaaaaataaaaagataattcaaggactgaaagggaagcctaagaatgtccttgtatttaatcagaagagcttaagcaaacaactgtgcctgagagagagtcacatggaatagaccttccctagggagggtattctgtcaggatgacccactgttcaaaggtctcaagagcataacgggtgataaa

SEQ ID NO: 314247 - DNA, 621 bp, Homo sapiens
acttgtctcacttgtttattaaattttaaattgcacacaaataaccagggttatgacttcagataagctttggtttaaattacatttaaaatatgtttttcacttagtggggaaaataccccctctctcacttcttccctaccttcccaagtcaaaaacaaagcaaaacaaaagactttttcagaaagatcttttactgaggtgattcataaaagttacactgctataggtttctagggaaacttagccaataatctatgtgccaagtactttgtacaaattaatttttaaaattacaaaatgctttgaaaattgttataagtgccctaaaakttgaaaagttatcatcatcagttcagggaaaaggcatgaactttttgaggtttaagcaacatcattttgcgaatttcctttctttgctgctcccttttcttatgaaaaataaaaagataattcaaggactgaaagggaagcctaagaatgtccttgtatttaatcagaagagcttaagcaaacaactgtgcctgagagagagtcacatggaatagaccttccctagggagggtattctgtcaggatgacccactgttcaaaggtctcaagagcataacgggtgataaa

SEQ ID NO: 314248 - DNA, 562 bp, Homo sapiens
ccaaggccgaagatgtctacctgtctcctttaccatgcctctccacacagggccaggagcccaagaagccaaggagatgtgccccccagagcctctgcacagccctccacacatcagctaaatctagattctagaccaaactctagttccaggaattctgaaattatctgctcaaatgcccacctactctgtttcagggccaagtgggtctcttcacatgatccattatctctagggcagcccgtgcctcatamtacccagggcagaaggttggcagaaggatggctgttgatgagggacagagcagagtgtgggcctggggtctctacatacatgcatgtggtacacagctgggggtgagaaggggagagggcagaagcaggggaggtagggcctgctctcctccctctacctcgtgctggtactcagagggctgaaacaactaaaaatttcaaacctggtctttcaggtttgaacatctgtcaaagttggaagacagaacatattttattagttttatttattacattttacagttttacacttgccgtatgtagcctcc

SEQ ID NO: 314249 - DNA, 605 bp, Homo sapiens
actacctggcccttggcttggaagattaatgcatagcctgtagactgactatacatttgaaccacattacttgttatctttgagagagaaaattctagcaaatttattctatcactaatttagctattcattcatttattcattcaacaaatatttagtaaatacctactattggctagtcacagttcaagaaactatatccactggtgaacaaaaggacaaaaagctctgtatccctggctcttccagtctgtgaaaaaataaragatcaacaaaataaataggtcacatatataccttgttagatagtgatgagcgataaaaagaaataaagcagggaaggggcacatgaagaaatgagaattgcaatgttggattgggtaaccaaggaagatcttgttagaggtgacactgaggaaggccttgaagagaactaggggaccagttacatggatatcaagaagaagagaggttcaggcagcaggaacagcaacagccttggggcaagagtgtgcctgagtgcttggggacatgaggagggcaaagaggagtgagcaagaggacagagaggtaatgaatggttgcacggaggaggaaggaaggca

SEQ ID NO: 314250 - DNA, 605 bp, Homo sapiens
actacctggcccttggcttggaagattaatgcatagcctgtagactgactatacatttgaaccacattacttgttatctttgagagagaaaattctagcaaatttattctatcactaatttagctattcattcatttattcattcaacaaatatttagtaaatacctactattggctagtcacagttcaagaaactatatccactggtgaacaaaaggacaaaaagctctgtatccctggctcttccagtctgtgaaaaaataaaagatcaacaaaataaataggtcacatatataccttgttagatagtgatgagcgataaaaagaaataaagcagggaaggggcacatgaagaaatgagaattgcaatgttggattgggtaaccaaggaagatcttgttagaggtgacactgaggaaggccttgaagagaactaggggaccagttacatggayatcaagaagaagagaggttcaggcagcaggaacagcaacagccttggggcaagagtgtgcctgagtgcttggggacatgaggagggcaaagaggagtgagcaagaggacagagaggtaatgaatggttgcacggaggaggaaggaaggca

SEQ ID NO: 314251 - DNA, 563 bp, Homo sapiens
  misc_feature (1)...(563): n = A,T,C or G
acagatcaaacccataaggcatacagtgcactatgctanntttgcatagctttacaaatattttgcttataataaggtttacagacatctagccctagttttaccaccactcctctccctttaactattaaaaccatgatttggctgcatcaaaaatttaaggatctacatcaggtggtttagtcacctagatttctctgctgcttaaaaagaaacttacatacattaattgtacctatttagtgggaacagtatgatgtgttgatacaagaatacattgtgtaaaaataaaattgagcaattggcatatctatcacataatatacttaccttttttgtgtggtgagaacactcaaaatcctgtcttctagctattttgaaatatataatgcaatactggcaaccaaagtcaccccaatgtgcaataaaacactagaacttattgcttctatctaagtgtaactttatacatgttgattaatctctwtctatcctctcctttcctctattatcctaagcctctgacaaccactattctactctctatttctatgggatcaact

SEQ ID NO: 314252 - DNA, 563 bp, Homo sapiens
  misc_feature (1)...(563): n = A,T,C or G
acagatcaaacccataaggcatacagtgcactatgctanntttgcatagctttacaaatattttgcttataataaggtttacagacatctagccctagttttaccaccactcctctccctttaactattaaaaccatgatttggctgcatcaaaaatttaaggatctacatcaggtggtttagtcacctagatttctctgctgcttaaaaagaaacttacatacattaattgtacctatttagtgggaacagtatgatgtgttgatacaagaatacattgtgtaaaaataaaattgagcaattggcatatctatcacataatatacttaccttttttgtgtggtgagaacactcaaaatcctgtcttctagctattttgaaatatataatgcaatactggcaaccaaagtcaccccaatgtgcaataaaacactagaacttattgcttctatctaagtgtaactttatacatgttgattaatctctayctatcctctcctttcctctattatcctaagcctctgacaaccactattctactctctatttctatgggatcaact

SEQ ID NO: 314253 - DNA, 636 bp, Homo sapiens
aggcatgcctagcatgcctcagatctaaagtcaaaacaggctgggcaaggtgactcacacgtagaatcccagcactttgggaggctgaggccagaggctcaccttgaggccaggaatttgagaccaggaattagagaccacatctctaccaaaaaaaaaaaaaawtttttttaactagctggggatgatggtgcaccggtagtctcagctacttgggaggctgagtgaggagtattgcctgagcccaggaatttcagcctgtagagctatgatcatgccactgcactcagcctggatgacagagcgagaccctgtctttaaatattaattaattaattaataagtaaagtcaaaacaaacatggtaaccacatagtttagtcctttgctggaaggattcggatcagaacgttgtggaattcagatgatgacatacgggaggctgttcctggtgcctctattttattgtcctgtaaattattttatttcataaagttgagtgttgttcatgttagaaaaactagatatttagataagccaataaaagtaattactataaccccatcatccagaagataacaactagatatacagtcattctcacccctagctgaacattagaatcacctaggagaat

SEQ ID NO: 314254 - DNA, 636 bp, Homo sapiens
aggcatgcctagcatgcctcagatctaaagtcaaaacaggctgggcaaggtgactcacacgtagaatcccagcactttgggaggctgaggccagaggctcaccttgaggccaggaatttgagaccaggaattagagaccacatctctaccaaaaaaaaaaaaaattttttttaactagctggggatgatrgtgcaccggtagtctcagctacttgggaggctgagtgaggagtattgcctgagcccaggaatttcagcctgtagagctatgatcatgccactgcactcagcctggatgacagagcgagaccctgtctttaaatattaattaattaattaataagtaaagtcaaaacaaacatggtaaccacatagtttagtcctttgctggaaggattcggatcagaacgttgtggaattcagatgatgacatacgggaggctgttcctggtgcctctattttattgtcctgtaaattattttatttcataaagttgagtgttgttcatgttagaaaaactagatatttagataagccaataaaagtaattactataaccccatcatccagaagataacaactagatatacagtcattctcacccctagctgaacattagaatcacctaggagaat

SEQ ID NO: 314255 - DNA, 536 bp, Homo sapiens
tgatcattgttctttctgctataaccccaaaaatcatatattcaccaagaactctcatktggcctaaatcagagttatcaaaatagaatttccatttgtaaaatttattttttgtttgcatcaactaattaattaaaagaatggtctatggtcataccatactctatctgccctggatactcccaccggataccatactctatctaccctgaatgcacccagtctcatccaattaaaggaatagtatgtatttaatttaaaaagtaacataaggccagttgcggtggctcacgcctgtaattccagcacttcgggaggccaaggcggatggatcacttgaggccaggagtttaagaccagtctggccaacatagtgaaaccccatctctactaaaaatacaaaattagccaggcatggtggtgcatgcctgtgatcccagctactcaggaggctgaggtggggggatcacttgaacccaggagatgaaggttgcagtgatctgagatcgtgccactgcactttagcctgggcaatg

SEQ ID NO: 314256 - DNA, 603 bp, Homo sapiens
attatagcctagcattctttattttttcttcrtagcagtaagcacaatttgaaatcattttatttttaactgaggcataatttacacacagtaaaatgcacaggtcagttttggcaaatgtaaaaccaaatagccattaccctaattatgattagaccattaaaaagaccatttttaatcatcccagtaagttcctatgtgacttattccagttagtggtcatgtatttgtctatgtactcattaactgcttactggccatcaggctaagctccatgaaaccagagagttcatcttgtttgttgtctgacctcagtgcagagcctgacacttagagaggagaagggtcagtcaatatttgttgaatgaatgaaaaaaattttttgagtaggtaagatgtagaaggtgagacagagaaggagggcaaagagggagaaggagctgctgttaaatatatatatattttaaattagagacatttatttatttatttatttatttaaaaataggtattgctttgctgcccaggctggtctcaaactcctggcttcaagcaatccttctgccttggcctcccaaagtgctgggattacaggcatgagcc

SEQ ID NO: 314257 - DNA, 603 bp, Homo sapiens
attatagcctagcattctttattttttcttcgtagcagtaagcacaatttgaaatcattttatttttaactgaggcataatttacacacagtaaaatgcacaggtcagttttggcaaatgtaaaaccaaatagccattaccctaattatgattagaccattaaaaagaccatttttaatcatcccagtaagttcctatgtgacttattccagttagtggtcatgtatttgtctatgtastcattaactgcttactggccatcaggctaagctccatgaaaccagagagttcatcttgtttgttgtctgacctcagtgcagagcctgacacttagagaggagaagggtcagtcaatatttgttgaatgaatgaaaaaaattttttgagtaggtaagatgtagaaggtgagacagagaaggagggcaaagagggagaaggagctgctgttaaatatatatatattttaaattagagacatttatttatttatttatttatttaaaaataggtattgctttgctgcccaggctggtctcaaactcctggcttcaagcaatccttctgccttggcctcccaaagtgctgggattacaggcatgagcc

SEQ ID NO: 314258 - DNA, 587 bp, Homo sapiens
atagtgacatatttctcctatagatgacattgcagttattaactgctcattattctagaacatgtgtgaaccctcacccttcaggggtgcttgtttttcacccttgaagttcttcagttcaaaaaaggttaaagatctatacyttaacaaaagagagacagcctcagtttgctctataatatgtactaaacttaaatattcttgttataatatgctagttggaaagagatttatcctcttaaataatgccaagactttccttaaccccatttctgtggatattgtttgcttttcagcatttcaattcttgctaatcttatttcagcatcccacataattagaactgtacagattctaactattcaatcatctcttccctcccctataaaatgtgctaacaggatgtgaaatggaggtgggctccctgtgttcttgctttgagtctaagggaagttaaatataaaaactcaggaagtgtctgaacacacctccatttcaatgtgatcctcagttagtacatttcccttgaggtaggcagaaaaatgtgaatacattttttttaacctatccaatttcaacttaaaact

SEQ ID NO: 314259 - DNA, 630 bp, Homo sapiens
ttaattgaacaaatggcaaagatcttgccaaaatctgagaagatgtcctctgacgttgtaagtagttttaagtgtaatttcatttaaatagcccaaagcttttagccaaatacaacttggcagttcaataatatttggggagggtaaaagcaggtactgtgtcaaagagccaagtgaataaattttttatggaagtcagtcatattaattgtattgttcaaagatgatactgttcacatcggtatttatatatctgttaaaatgtttgggtttatctaatccatgatttcctttatcatatgttaatactggatgtatttaaaacttcaaagtgaggtgatctgcaagcagaggggccctgaatgtgtctaaatggaatagtgacatatttctcctatagatgacattgcagttattaactgctcattattctagaacatgtgtgaaccctcacccttcaggggtgcttgtttttcacccttgaagttcttcagttcaaaaaaggttaaagatctataccttaacaaaagagagacagcctcagtttgctctatartatgtactaaacttaaatattcttgttataatatgctagttggaaagagatttatcctcttaaataatgccaag

SEQ ID NO: 314260 - DNA, 624 bp, Homo sapiens
tggcttcattgtgagggtgctctacagctcatttcacgaccagtgaaaatactgatgctaatgacaactataagaatrctgtgccaaatatcacagagaaagaaagcaaaggttgggggtggagattataattgtttctagcactgtgtttaaaactcttggaacttgtgttttcatagtgaaagaaaacaatttttaatagcaagctaggtgtgtcatccacaacatcccagtcatgtttaatttgtattttctgaaaagttgcatttctgagaaacacaatgagaagaaaccaatggaagttataattccagaccaaaagttctgactcaaatgttgacaaagatcaggtaggaaacatagagacttatagtaggccaggtataaaatagaacaaagtttgtgagatgaccagggtcacaaggattggattgtaagtgaaaataatagctgtgtagccaataagaattttgcagtctgcccgttagaaagactgttatgcctggacttgtgaccttcctgatcttacatggatacaaaccaatgtccttgtttctttgctttctcagctaatagatttttagaaaagggtttctggagccaaacacaatgtccatggtttga

SEQ ID NO: 314261 - DNA, 624 bp, Homo sapiens
tggcttcattgtgagggtgctctacagctcatttcacgaccagtgaaaatactgatgctaatgacaactataagaatgctgtgccaaatatcacagagaaagaaagcaaaggttgggggtggagattataattgtttctagcactgtgtttaaaactcttggaacttgtgttttcatagtgaaagamaacaatttttaatagcaagctaggtgtgtcatccacaacatcccagtcatgtttaatttgtattttctgaaaagttgcatttctgagaaacacaatgagaagaaaccaatggaagttataattccagaccaaaagttctgactcaaatgttgacaaagatcaggtaggaaacatagagacttatagtaggccaggtataaaatagaacaaagtttgtgagatgaccagggtcacaaggattggattgtaagtgaaaataatagctgtgtagccaataagaattttgcagtctgcccgttagaaagactgttatgcctggacttgtgaccttcctgatcttacatggatacaaaccaatgtccttgtttctttgctttctcagctaatagatttttagaaaagggtttctggagccaaacacaatgtccatggtttga

SEQ ID NO: 314262 - DNA, 624 bp, Homo sapiens
tggcttcattgtgagggtgctctacagctcatttcacgaccagtgaaaatactgatgctaatgacaactataagaatgctgtgccaaatatcacagagaaagaaagcaaaggttgggggtggagattataattgtttctagcactgtgtttaaaactcttggaacttgtgttttcatagtgaaagaaaacaatttttaatagcaagctaggtgtgtcatccacaacatcccagtcrtgtttaatttgtattttctgaaaagttgcatttctgagaaacacaatgagaagaaaccaatggaagttataattccagaccaaaagttctgactcaaatgttgacaaagatcaggtaggaaacatagagacttatagtaggccaggtataaaatagaacaaagtttgtgagatgaccagggtcacaaggattggattgtaagtgaaaataatagctgtgtagccaataagaattttgcagtctgcccgttagaaagactgttatgcctggacttgtgaccttcctgatcttacatggatacaaaccaatgtccttgtttctttgctttctcagctaatagatttttagaaaagggtttctggagccaaacacaatgtccatggtttga

SEQ ID NO: 314263 - DNA, 624 bp, Homo sapiens
tggcttcattgtgagggtgctctacagctcatttcacgaccagtgaaaatactgatgctaatgacaactataagaatgctgtgccaaatatcacagagaaagaaagcaaaggttgggggtggagattataattgtttctagcactgtgtttaaaactcttggaacttgtgttttcatagtgaaagaaaacaatttttaatagcaagctaggtgtgtcatccacaacatcccagtcatgtttaatttgtattttctgaaaagttgcatttctgagaaacacaatgagaagaaaccaatggaagttataattccagaccaaaagttctgactcaaatgttgacaaagatcaggtaggaaacatagagacttatagtaggccaggtataaaatagaacaaagtttgtgagatgaccagggtcacaaggattggaktgtaagtgaaaataatagctgtgtagccaataagaattttgcagtctgcccgttagaaagactgttatgcctggacttgtgaccttcctgatcttacatggatacaaaccaatgtccttgtttctttgctttctcagctaatagatttttagaaaagggtttctggagccaaacacaatgtccatggtttga

SEQ ID NO: 314264 - DNA, 625 bp, Homo sapiens
gcttgtggttctcatagccaaggcacctgcccagtatttacacaagagcatcattagatatttataatttattaaaatgcccatgtatgttctttttgaataattggctaataacttcattcataagggacatttgtgtgagttctaatttaatttatagaaagcctaacaacatttaatgtatttttaaagctatcacagtacaaatagtacagatatttgttttagtagtagtaatcctttttggtgtttgtttttattattaattttgaaggtataaaaatcatgaaagtaaagtaagatggaaatcattcttaataatgtgagctattgagttgaatattcaaatatattgaattgtttttaaatttattattgtagctttttgaggcagataaaatgaatattatgcctatgtcatagatgacaaaaggaaacctaaakattgtgacttttttaaggtcaccaaattggttagtgttaggagaataagataccagaaccaccacctcctagtgctgtggtgtgtgatacagcagccactagtcatgaaggtattgagcattcaaaatgtgaatactctgagatgagatacactgtgagagtcagaaaaacactggattcc

SEQ ID NO: 314265 - DNA, 466 bp, Homo sapiens
ttcaaatactgacgaaaaatgagaactgatatctaaatgatgacttaatggcccagagatctcttaagaaatactaaattatgtctggtaagtaattctgaagaatgtagaccattacttttttttttttttttttttttttaagacagagtctcactctgtcttctaggctggagtgctgtggtgcaatctcaacatactgcaacctctgcctcctgagttcaagtgattctcctgcctcagcctccccagtagctgggactataggcatgcacctccacattgggctaatttttgtatttttagtagagatggggtttcaccatgttgcccaggctggactcctggactccagcaatatggcccgcctcgcctcccaaagtgctgggaacaaaggtgtgagccactgtgcccagcctgaccattacmttttaaaatgattttcatcagaaagttaaaatatttt

SEQ ID NO: 314266 - DNA, 545 bp, Homo sapiens
ctagttattatttctagtctggttgctgtcctggttttcaaaatatttcagtgctttcttaggtctttttgttttgttttttkcttttaaaatatgcaagagtatgtcattttaaaagaaataaaagcactactattaatgttcgtaaaaacctgttttgaatatgcatctcctatgctcagaaaggtttgatatctcccactgctcacaatataaaacccaacaatttaccttggtactcaatccctttgactatttggcccttcctacctttccatcgtaattttctaattctgttctacaaacacacatgcagtttgccatctctgtgaatacttacaatatgctttttttacccatgatattgctcctttttctcataattggaagtactatgcatactttttgtcctatgcatctcatgttctctccaaaattttttcatccttcctactactgtaggtgagcagtgcaatacgatgattagagtcactgccatgatttgaatatttagccgctatactatcttttgtacattactaagt

SEQ ID NO: 314267 - DNA, 545 bp, Homo sapiens
ctagttattatttctagtctggttgctgtcctggttttcaaaatatttcagtgctttcttaggtctttttgttttgttttttgcttttaaaatatgcaagagtatgtcattttaaaagaaataaaagcactactattaatgttygtaaaaacctgttttgaatatgcatctcctatgctcagaaaggtttgatatctcccactgctcacaatataaaacccaacaatttaccttggtactcaatccctttgactatttggcccttcctacctttccatcgtaattttctaattctgttctacaaacacacatgcagtttgccatctctgtgaatacttacaatatgctttttttacccatgatattgctcctttttctcataattggaagtactatgcatactttttgtcctatgcatctcatgttctctccaaaattttttcatccttcctactactgtaggtgagcagtgcaatacgatgattagagtcactgccatgatttgaatatttagccgctatactatcttttgtacattactaagt

SEQ ID NO: 314268 - DNA, 545 bp, Homo sapiens
ctagttattatttctagtctggttgctgtcctggttttcaaaatatttcagtgctttcttaggtctttttgttttgttttttgcttttaaaatatgcaagagtatgtcattttaaaagaaataaaagcactactattaatgttcgtaaaaayctgttttgaatatgcatctcctatgctcagaaaggtttgatatctcccactgctcacaatataaaacccaacaatttaccttggtactcaatccctttgactatttggcccttcctacctttccatcgtaattttctaattctgttctacaaacacacatgcagtttgccatctctgtgaatacttacaatatgctttttttacccatgatattgctcctttttctcataattggaagtactatgcatactttttgtcctatgcatctcatgttctctccaaaattttttcatccttcctactactgtaggtgagcagtgcaatacgatgattagagtcactgccatgatttgaatatttagccgctatactatcttttgtacattactaagt

SEQ ID NO: 314269 - DNA, 533 bp, Homo sapiens
aagataagaagtttgcttatctgaaaatatccaaaggttcttcttcaaatgtcacttttttctctgttttaaaaaaatagttctgagaatatcttttacttttaaatgttcacttttagtagtcaaatcccagaagrcaatgttatttttaggagtatgtttaaataaaaaagctcatttaccatctaagcttaagaaggtaagcaaattaatattgcatgataaagtccccatcaagcatctcatacttaagcaaagaacccaactcatagtttgtggctgtattagtctgttcccacactgctataaagatactacctgaggctgggtaatttataaacaaaggaggtttaattgagtcacagtttcacatggctggggaagcctcaggaaacttacaatcacggtggaaggggaagcaggcatcttcttcacgagatggcaggagagactgagtgacagagagaaggcagaagacccccttataaaaaaccatcagatctcatgagaactcactcactatcatgagaaca

SEQ ID NO: 314270 - DNA, 533 bp, Homo sapiens
aagataagaagtttgcttatctgaaaatatccaaaggttcttcttcaaatgtcacttttttctctgttttaaaaaaatagttctgagaatatcttttacttttaaatgttcacttttagtagtcaaatcccagaaggcaatgttatttttaggagtatrtttaaataaaaaagctcatttaccatctaagcttaagaaggtaagcaaattaatattgcatgataaagtccccatcaagcatctcatacttaagcaaagaacccaactcatagtttgtggctgtattagtctgttcccacactgctataaagatactacctgaggctgggtaatttataaacaaaggaggtttaattgagtcacagtttcacatggctggggaagcctcaggaaacttacaatcacggtggaaggggaagcaggcatcttcttcacgagatggcaggagagactgagtgacagagagaaggcagaagacccccttataaaaaaccatcagatctcatgagaactcactcactatcatgagaaca

SEQ ID NO: 314271 - DNA, 630 bp, Homo sapiens
gaagagcatattttagttaaaatatagagtatgtcaatctttcagggttgaatgatatgagataacctcattgtatagggcaccattgacataagtaactccatcttaggaaaagactcaatcttacatttcaaaaggcaccttgccaaccgggactagatgttttgcttgatcaataaagactggacccaaccagataaggacaaagtacactcttccactgtcagtcctcaccagagsattctagggaaataaaagagcatgacttcagcagctcaaaatggctgtcttaacagacactctctttctagcattcatgataagcaaccagcatctgctgccaaagactctgtccacatcaaagactcttctgtgaaagaccagcaaccacctgggccagaccaggatattcttttggcctacatcactctctacgaactggtctgttaacctgtttttgctatctcttttctcttgatgttaaatgtcacttagtttgttgtggaatgtttaatctataacatgtattgtttaagtatactatcatgtatggttggcaatattgactgacttgtggagtggcttgagccagtgtgcctacagctctaattaccagtgagtgggaattac

SEQ ID NO: 314272 - DNA, 636 bp, Homo sapiens
ctatgtatgtttcctgttaaattaggtacatatattccctaaaaatatttcattaagaagtttaggactcactcagttattcacctttaaattatatatggcttatatctatttatatatttattgttttgttttattgtgctttgttttagatacatgaatttgtgatttccagaaaaattatgttgcttttcatgtcttcattatttttcatgtttatatttatttctataagcgagatttcaaaatgctgaaataattggccatccaacagttaaaatcctatagtagtaaaaccgtggaaatcctggataactgtgactattcttwatgacacagctttttcttaaaattgatattaacaaaatgccttgattcagaattagcatgaagctatacataagcttttcccctgtctttcagtaacttaatggtttaaattaatgtcatattgaaggacaaaatttccacaagagacactttgaatacagaaaattctcaaaaatgcctctctcagtcaagttccatcttgtgatacttttgtgagttattttgaagcaaagtcactattatttacatttattgttaagctgttagtttcctaaatattttgatatgcacaattaatttaatttt

SEQ ID NO: 314273 - DNA, 558 bp, Homo sapiens
ggtaaaagccctgtatcaacagagagtgtcagagaaatgtagtgaaggccagggyggttgatgcctcaggaatgagagagaagagtaatgtgtagtgcaactggggatgctagcaggagtttgaacatgtagggccttttagaccatattatggattccgtttttttaaaattaatatttttgagaagcccctgaataattttaagaagaacgaaatgttggtgatggtgacataagtatgttgtattttgaactctggttacaatgtaaacaagatggggggatgggatggatcttgcaataggctaagtgagggctgagggcaccttgggttagggagacagtagagaggaggggaagaagttaatagcactgagaaggtcaaatcaatatatatatatattaggtataattgttattgctatggttcttaatgccatgtgatcagactattgacattcttccttttgagttggagccagttgcttttccatgcttagtgatatggtttgaccatgtgtccccacccaaatcgcatctcaaattgtaatccccatg

SEQ ID NO: 314274 - DNA, 534 bp, Homo sapiens
tgaggttaaaacattatatttatttatataaatatttgcatgccaaatatttatttattctacagatatttattaagcatatattaagtgcctgaaactgtttactaaagtaaacatatacgaaaacaaaatatatctgctgttttggtatttgtactctgattaggatgggatggagtggggttgagacttcaatctcttcctaaaattccccagccagcccatgccytggccctcacaaataagaggaacgcactctggcctgatctggcacatctctcactactggtcaaggagtctgaatggccacttgctcttctctggagatcatgatctaggcaactggcacttgaattccctgcccaaacaacttcaagcctatacttttagggagtgcacaggactatttcctgggtccatatgcacaaggcaaagtataccactgttgtacccctttctacatctgaggagtggccaggggcattatagtttgcctggggtatgagatggacactgtagatggaccatggttat

SEQ ID NO: 314275 - DNA, 534 bp, Homo sapiens
tgaggttaaaacattatatttatttatataaatatttgcatgccaaatatttatttattctacagatatttattaagcatatattaagtgcctgaaactgtttactaaagtaaacatatacgaaaacaaaatatatctgctgttttggtatttgtactctgattaggatgggatggagtggggttgagacttcaatctcttcctaaaattccccagccagcccatgccctggccctcacaaataagaggaacgcactctggcctgatctggcacatctctcactactggtcaaggagtctgaatggccacttgctcttctctggagatcatgatctaggcaactggcacttgaattccctgcccaaacaacttcaagcctatacttttagggagtgcacaggactatttcctgggtccatatgcacaaggcaaagtataccactgttgtacccctttctacrtctgaggagtggccaggggcattatagtttgcctggggtatgagatggacactgtagatggaccatggttat

SEQ ID NO: 314276 - DNA, 556 bp, Homo sapiens
attttacttggcagttttatcacttgatttctaaacttctaaatatttaagcatacattagtgggycttaaaaatcttagaaggtttattggggaggtgtttaatcaatagataaatacttgaagacaatcattgtagacagtgataaatgtatgaacataataagtcagggagatgtgaccgtgacctccggaaatagcagctctgttagactggttgctgaaggaacttgtctttgaacaagcagcagagaaatgacatgaataagaaggcattcattagaaagatcttagtgcaggtcatttccggcaaaggaaaaaacagatgcaaaggctctaaagaagagaggcacttggtgcatccaatagaaatagagccaataaaaaggacagtgtgattggagtatagtaaactcaaatacctagtataacttggagttagagaagtcagcaggagacagatcctatagggcctcgaaaatcacagtttagaatatggattgattccaaatgcagtttaaaccactagaacattttacacaacagagcagtgtgat

SEQ ID NO: 314277 - DNA, 564 bp, Homo sapiens
cacatgccataagcattgtctcctaacatttctttgtgcacctttataatcctttctccttccagacccgctttcctcaggtaaccatggatctatttcctttagcgatagctttgcattttctataattttataaacaatggaataatacagtatgtaatttcttctaggttcttttactctgcatagttattttgaatttcatgcagttttgcaactactaggagttaattcctttattttgctaagtagtattccattgtatgcctgtatcacagtttattttcatctggtwatggaaaatgggttgtatctggtttttggctgctacaaacaaaagctgctgtgatcatttgtgtacttttctttgtatgaatatgctttcagtgctgttgggttggattggaatgtcgagattatatgtcgggtgtatattttgcttttccagaaaccatcaaactacttctactctgttgacacattttacattcctatcagtagtatgtgagagttccaactgctccaaacccttaccaacacttgatatagtcagtctttttaatt

SEQ ID NO: 314278 - DNA, 564 bp, Homo sapiens
cacatgccataagcattgtctcctaacatttctttgtgcacctttataatcctttctccttccagacccgctttcctcaggtaaccatggatctatttcctttagcgatagctttgcattttctataattttataaacaatggaataatacagtatgtaatttcttctaggttcttttactctgcatagttattttgaatttcatgcagttttgcaactactaggagttaattcctttattttgctaagtagtattccattgtatgcctgtatcacagtttattttcatctggttatggaaaatgrgttgtatctggtttttggctgctacaaacaaaagctgctgtgatcatttgtgtacttttctttgtatgaatatgctttcagtgctgttgggttggattggaatgtcgagattatatgtcgggtgtatattttgcttttccagaaaccatcaaactacttctactctgttgacacattttacattcctatcagtagtatgtgagagttccaactgctccaaacccttaccaacacttgatatagtcagtctttttaatt

SEQ ID NO: 314279 - DNA, 564 bp, Homo sapiens
cacatgccataagcattgtctcctaacatttctttgtgcacctttataatcctttctccttccagacccgctttcctcaggtaaccatggatctatttcctttagcgatagctttgcattttctataattttataaacaatggaataatacagtatgtaatttcttctaggttcttttactctgcatagttattttgaatttcatgcagttttgcaactactaggagttaattcctttattttgctaagtagtattccattgtatgcctgtatcacagtttattttcatctggttatggaaaatgggttgtatctggtttttggctgytacaaacaaaagctgctgtgatcatttgtgtacttttctttgtatgaatatgctttcagtgctgttgggttggattggaatgtcgagattatatgtcgggtgtatattttgcttttccagaaaccatcaaactacttctactctgttgacacattttacattcctatcagtagtatgtgagagttccaactgctccaaacccttaccaacacttgatatagtcagtctttttaatt

SEQ ID NO: 314280 - DNA, 485 bp, Homo sapiens
cacataacctacatacactctctcatatacttgattactcataataccttatgcaatataaatgctatgtaagtagttgtattgtttaggaaataatgacaagaaaaaagtctgtatgttgagtacagacacattatttaatttttttctgtatattattgatctgtgatatggaacccactgatactaagggccaactatgtgtatatgcatgaggtcagtattgatctgatcactggaggtcacatactcatcttgttcaggctctccctaggttatctattttctggttctcaactccagatgcctatgctgttctccagatatccctcagtttcacaacagagaaagcttcacaccacttttcttagtccctccaccatactctgccaaagcctgaggctttatgtatacccatcarcaccatcaactctttggctcaggaagtatgaaaagcctagagttgaaatagacacaagagagct

SEQ ID NO: 314281 - DNA, 601 bp, Homo sapiens
aaaattaattccatatatataggcaattatatcacagtagtcatggagtacatttcatagtggatctcaggtgttttaataaaattaatcactttttacatttcttaaatatttgaaattctgaaaaggtaaaattcataaggtatataaatatgacattaagttaatagtcttgttaaaaatgaagctatttgaattgaattgataactgatatatctattgtaaacattattcatgccttaaaagttcttaaacattcaataagtctggaaaaactagaatgaaatgctatctttgctgatgaattacatttctataaaatgcctgaaacagaaaaataaactatgtatacatttataaagayttatacaatttatcagtaaattggataatataatggagataagaaaagtaaattaatacctttttctactatggcaatacttaaaatatagctaaacttattgtggaaataattaactatagtaaatatatactgaaaagtacttagtaatgagttcaggaaaaaggcacacgcaatttacatgagtttttttttgaaactcgtaaaacaagatcttattaaatggaaaagaaaat

SEQ ID NO: 314282 - DNA, 472 bp, Homo sapiens
ccaataatgtgaatatttaattttaaataaaatgcatacaaaattaaacatcacaaaatgaaaaagcctggaaaagatgatacactgaaatctttctcattttcttttgaagataaggtactaataaaaggagtcttcaaagatgtatctcaccacttgacagcaatattcaaggacatcaattatacctttatcaagtagagaaataagaaatattcccaggtttatagaatgaggcwtatttgattgtctaaattttactaaataaattcttagacaaataacattatacatgagaactcagcaacattaattgaaaaaaatttctttaagtaaatcatattgtgaatttaagggagtgaagtttggtaaaaatactgaccttgcctctaacttgggactctagtattcatataggacattttgaacacggattttaaaccaagactgctactattataacaccttaagc

SEQ ID NO: 314283 - DNA, 532 bp, Homo sapiens
tacattacttagaacagtagtctccaatctcattcaggttgctgcaaatgccattaattcattcctttttatgtctgagtagtattccatygtatatatatataccacagtttctttatctacttgtccaatacaatacaattttattaactatagctctcatgctgcacattagattgctaaacttattcattaatttgtatcctttgacctatatctttgtatcctttggcctatatctttgtttttgagcattttctctctctctctttgctttatgttgtatttttctattactaaatttcagtgcttttaaatttcagtgattttatacactaaaatctacttagtctacaggatctaaactgctatttatcccatgcggtgatttttttcctccttcaaatgtcatatgttccattttcaaaaatcccatttggctcttctttatataatacatttctcttctcatattagtgatttcctagaatgtttgaacatattaagcatatttctaacagacgctttaaaa

SEQ ID NO: 314284 - DNA, 532 bp, Homo sapiens
tacattacttagaacagtagtctccaatctcattcaggttgctgcaaatgccattaattcattcctttttatgtctgagtagtattccattgtatatatatataccacagtttctttatctacttgtccaatacaatacaattttattaactatagctctcatgctgcacattagattgctaaacttattcattaatttgtatcmtttgacctatatctttgtatcctttggcctatatctttgtttttgagcattttctctctctctctttgctttatgttgtatttttctattactaaatttcagtgcttttaaatttcagtgattttatacactaaaatctacttagtctacaggatctaaactgctatttatcccatgcggtgatttttttcctccttcaaatgtcatatgttccattttcaaaaatcccatttggctcttctttatataatacatttctcttctcatattagtgatttcctagaatgtttgaacatattaagcatatttctaacagacgctttaaaa

SEQ ID NO: 314285 - DNA, 532 bp, Homo sapiens
tacattacttagaacagtagtctccaatctcattcaggttgctgcaaatgccattaattcattcctttttatgtctgagtagtattccattgtatatatatataccacagtttctttatctacttgtccaatacaatacaattttattaactatagctctcatgctgcacattagattgctaaacttattcattaatttgtatcctttgacctatatctttgtatcctttggcctatatctttgtttttgagcattttctctctctctctttgctttatgttgtatttttctattactaaatttcagtgcttttaaatttcagtgattttatacactaaaatctacttagtctacaggatctaaactgctatttatcccatgcggtgatttttttcctccttcaaatgtcatatgttccattttcaaaartcccatttggctcttctttatataatacatttctcttctcatattagtgatttcctagaatgtttgaacatattaagcatatttctaacagacgctttaaaa

SEQ ID NO: 314286 - DNA, 601 bp, Homo sapiens
ctgctcaatacatatttgatcagaattaatgaatgaattcattaggcatcggtgattttgagatgccccttgagaaccatgaacatcttctctcaggtagtcatagttactagggtattaaaatgagttttcaagcaatctaattgaaattatatacatcaataaaacctttgttaatgtctagcttatatttacattaatatttaacacttttgaatattaaagttttaagagtaaacacgactgtgggtactttttcaaaccttaaagtatcctattttgctctcttttaaatacctattgtacagaaaatcaagaggctttcaaaatcacttttaaaaataaaattccaaggcataatttacaactrtgggaatgaaaacagtttatagacactcgagttaaaccaaaatcttcactatccatgccgatttcaaagtattaaagtgttaagcatgacaaattgcctcaaaatgtagtgccttaaaacaataaatatgtattgtgctatgacttgaatatttgtcccctccaaagctcatagaaatttaatccccaatatggcagtattgagttgtacagccttgaagaggtgattgca

SEQ ID NO: 314287 - DNA, 565 bp, Homo sapiens
agagtaaacacgactgtgggtactttttcaaaccttaaagtatcctattttgctctcttttaaatacctattgtacagaaaatcaagaggctttcaaaatcacttttaaaaataaaattccaaggcataatttacaactatgggaatgaaaacagtttatagacactcragttaaaccaaaatcttcactatccatgccgatttcaaagtattaaagtgttaagcatgacaaattgcctcaaaatgtagtgccttaaaacaataaatatgtattgtgctatgacttgaatatttgtcccctccaaagctcatagaaatttaatccccaatatggcagtattgagttgtacagccttgaagaggtgattgcatcttgagggccctccctcttgaatggattgatctattcatggataataggttaaggaattaatgggttatgatgggaagggactgctgactttataagaagtagagaatcctgagctaccaccctcagccctctctccatgtgaggccctgtgctgcctcaggactctgaagactttctactagcaagaaggcc

SEQ ID NO: 314288 - DNA, 549 bp, Homo sapiens
ttaccatatttcaggtgttttattgtaagcaacagataaatggactaagacattacttcacattttctgcggatgggatgtggagctacttagcccagtgattctggctcagggtttcacactgctgtcatgacatcaattgaagatacacttttataaaagtttgaatggygctggagaatctgcttaagatggctcattcacataggtgagaagttggtgctatctcttggcagaaggccaagtttcttgatgcacagacctctccatagcactgcttgagtgtcctcatgacaagggggccaacttccaccagaagaagtgaatgatcaaaagagatgaaggtggatgctccaatgtcttcatgaacactcttggaagtgacacaacattacttctatcgcattttattcattagaggcaaaacacaaagtccagcccatactgaagaggaaggaagttaagctctgctatggtttggtttggtgtccccacccaaatctcatcttgaattgtaatcccaccatctgcacttgtctcatgggaggc

SEQ ID NO: 314289 - DNA, 610 bp, Homo sapiens
tggctcagggtttcacactgctgtcatgacatcaattgaagatacacttttataaaagtttgaatggcgctggagaatctgcttaagatggctcattcacataggtgagaagttggtgctatctcttggcagaaggccaagtttcttgatgcacagacctctccatagcactgcttgagtgtcctcatgacaagggggccaacttccaccagaagaagtgaatgatcaaaagagatgaaggtggatgctccaatgtcttcatgaacactcttggaagtgacacaacattacttctatcrcattttattcattagaggcaaaacacaaagtccagcccatactgaagaggaaggaagttaagctctgctatggtttggtttggtgtccccacccaaatctcatcttgaattgtaatcccaccatctgcacttgtctcatgggaggcacccagtgggaggtaactgaatcatgggggcagtttcccccaggcttttcttgtgatagtgagtgagttctctggagatatgatggttttataagcgtctggaatttcccctgctggcacgcattctctctcctggtgccctgtgaagaggtgataattataagt

SEQ ID NO: 314290 - DNA, 610 bp, Homo sapiens
tggctcagggtttcacactgctgtcatgacatcaattgaagatacacttttataaaagtttgaatggcgctggagaatctgcttaagatggctcattcacataggtgagaagttggtgctatctcttggcagaaggccaagtttcttgatgcacagacctctccatagcactgcttgagtgtcctcatgacaagggggccaacttccaccagaagaagtgaatgatcaaaagagatgaaggtggatgctccaatgtcttcatgaacactcttggaagtgacacaacattacttctatcgcattttattcattagaggcaaaacacaaagtccagcccatactgaagaggaaggaagttaagctctgctatggtttggtttggtgyccccacccaaatctcatcttgaattgtaatcccaccatctgcacttgtctcatgggaggcacccagtgggaggtaactgaatcatgggggcagtttcccccaggcttttcttgtgatagtgagtgagttctctggagatatgatggttttataagcgtctggaatttcccctgctggcacgcattctctctcctggtgccctgtgaagaggtgataattataagt

SEQ ID NO: 314291 - DNA, 565 bp, Homo sapiens
ggtggaagaaatttctaagcagccaagccttcaagagaaagcagagcataaaagtttggaaaatttgcagcctgttgatgcagtaaaaaagaaaaaatgtagtttctggagagaaattcaagcygattgcagaaatttgcataagtaacaaggagccaaatgtaaataaaacaaggggtaaaattgtctccagggcacatcagaggtctttaaggcagcccctcccacacagcccctcccctcacagagtaggaggcttaagaggaaaaaatggtttcatgggcctggccctggccatgctgttttgtgcagtctcagaacttggtgccctgcattctagccatggctaaaagtggccaaagtacagctcataccattgcttcagagggtacaagccccaagccttggtgtctcacatgtggtgttgggactgcaggtgcacagaagtcaagaattgatatttgggagcctctgccaagatttcagaggacatatgtaaatgcctggatggctaggcaaaagttagctgctggccaggtgcagtggctcatgcctgtaatcccag

SEQ ID NO: 314292 - DNA, 565 bp, Homo sapiens
ggtggaagaaatttctaagcagccaagccttcaagagaaagcagagcataaaagtttggaaaatttgcagcctgttgatgcagtaaaaaagaaaaaatgtagtttctggagagaaattcaagctgattgcagaaatttgcataagtaacaaggagccaaatgtaaataaaacaaggggtaaaattgtctccagggcacatcagaggtctttaaggcagcccctcccacacagcccctcccctcacagagtaggaggcttaagaggaaaaaatggtttcatgggcctggccctggccatgctgttttgtgcagtctcagaacttggtgccctgcattctagccatggctaaaagtggccaaagtacagctcataccattgcttcagagggtacaagccccaagccttggtgtctcacatgtggtgttgggactgcaggtgcacagaagtcaagaattgatatttgggagcctctgccaagatttcagaggacatatgtaaatgcctggatggctaggcaaaagttagctgytggccaggtgcagtggctcatgcctgtaatcccag

SEQ ID NO: 314293 - DNA, 633 bp, Homo sapiens
acagggtcactgcttggtggagctgtgtgaagagggtcgccatcctctaggccccagaatggtagatctacctacagttcrtactgtgtgcctggaaaagtcacagacattcaatgccagcctgtggaaacagctgggaagggggctgtaccctgcaaagccacaaatgcagagctgcccaaggccatgggagcccacctcttgcatcagcatgacctggatgtgaaacatggagtcaaaggagatcacttcggaactttaaggtttaatgactgttctactagattttggacttgcatggggcctctgcgtttgttttggccagtatctcccatttggaatgggtgtatttacccaatgcttgtaccccattgtatctaggaagtaactaacttgcttttaattttatagactcatagtcagaagggacttgccttgtctcagaagagactttggatttggacttttgagttaatgctggaatgagttaagactttggaggactgttagaagggtatgatcatggtttgaaatgtgaggacatgaaatttgagaggggccaggggaggaattatatggcttagttttgtggacccacctaaatctcatcttgaattttaatcccataatccc

SEQ ID NO: 314294 - DNA, 633 bp, Homo sapiens
acagggtcactgcttggtggagctgtgtgaagagggtcgccatcctctaggccccagaatggtagatctacctacagttcgtactgtgtgcctggaaaagtcacagacattcaatgccagcctgtggaarcagctgggaagggggctgtaccctgcaaagccacaaatgcagagctgcccaaggccatgggagcccacctcttgcatcagcatgacctggatgtgaaacatggagtcaaaggagatcacttcggaactttaaggtttaatgactgttctactagattttggacttgcatggggcctctgcgtttgttttggccagtatctcccatttggaatgggtgtatttacccaatgcttgtaccccattgtatctaggaagtaactaacttgcttttaattttatagactcatagtcagaagggacttgccttgtctcagaagagactttggatttggacttttgagttaatgctggaatgagttaagactttggaggactgttagaagggtatgatcatggtttgaaatgtgaggacatgaaatttgagaggggccaggggaggaattatatggcttagttttgtggacccacctaaatctcatcttgaattttaatcccataatccc

SEQ ID NO: 314295 - DNA, 397 bp, Homo sapiens
aattccatcactgatatcactaatatcaccactgtggtaaaaaagttgtccatttctccatttcttccttagtaacagttgttgttctccatttcttccttagtaacagttgcttgaattgtggaaatggggtagggaagtagcatgatctacacaaaacaaaactgcaagtcccagcctcttctgcaaataaaaatcactaatgtaatgtaagcagaagtcgtttggtaaggactccatgaaaattttataaaggaatcaccttggcacagagatgtttcctgtttatcctccsactcttctattcttccttcctataatggtgatgtgataactggagctgcttctgcctttttttggttgagtttaggaattcaaacttgaaaacgaaagtcat

SEQ ID NO: 314296 - DNA, 581 bp, Homo sapiens
ccttcctgggagctttactttcatttataccataaatacatgagcatatataaagtatcccatagaaggcttggtttttgtcaggctagtagcttttatttcatttgttggtagctatagcttgatttcaaagggcaaccacccgtcctatattcttagttcttaaggtttaaatgaactcaccagatgttttgtcaccatagttaggcaaatgacccaggactggtcaaacagcctatttcatgtttccacaatgactggttcaggaatcagcgatgtgacacaagccaataggatataatcttagtaaagtctggaatagaagagctcatgttttgctagctgtgaggagcctggaaacttggagctgcctataaatatctcaaaagagaacctgcctgaagatgatgccaacataatagagcagagttgagagatagagaggaatgcatttctgatgaaattgctttaaacaagttatctggctgatttttgtacaaattgtccaacgcaccastttggaaaacactgtttcatattttaaccttaccaaagaggctagctagaggaataccctcaaa

SEQ ID NO: 314297 - DNA, 600 bp, Homo sapiens
catttgcaaaatatcatctttttaatcttgtgcatcattggcttgtggatagtgcctgtctaatttgaggactgcaaaggtaaaagtaattagtactatatgggtgacatcccagtgtgttgaaacttcccatgatatgagagaaatcaagcaagtgcctgttttctcaaaatgccatctaggagaggagattcatgacagaaagaggccaaattgcacatctagaatgaaatggatactgactgtcaggaggaagagacactttaattrgcgatgataaagttaaagtttgccagtagctgtcaccgtgggagtgacccctcccaaggaatgttaggtgaaatgaaggaagaaaagtatgtccttctcagattattgtctttttggagccttgcagtttatcaggtaaaataagagttttgtgatgtgaaagtcagtatcaatatctatctttaactttggagaaaaaatagattttctttcttagtgtctctttaaacaagtgatttatgtttgaacctagtcatccactgtagaagcacaaaattacagcattagataagaggtctagaaaaccccacatggattattgtaagaagt

SEQ ID NO: 314298 - DNA, 590 bp, Homo sapiens
taagctgaaattccttatgaaaagttttaccaaagcaaagtgaaaaaagagcctatgtggtcaattactaatcttgtcacttttaggtaagtaatcaggccaagtttaatgagactataagcaaattagtcttactctaattatatttgacataagctgggtgactgtggagagagaacaatgtttccacgaaaaattataggaaacatatatggataataaaatctagtcctgttcactgtaaagttttgttatctacctataaatgggactgaatctttaattcttaatagttttctccaatatctggttacaactccccaaataaatgttcttaaattttctcccttctgacttggaattattgagaatgaaaactgcctttttcttgaggacctgcaggctgatgctggaggatttgatacaaacttaagagaaatcttcacaacatatcatgtatagacaatcttcattccttttgccatgtgggcgactcagaaaattcactggaacacccrgtgacataaccaaagatattcaaactataaatcaggaaaatctataaaattgctaccactatcttcactcca

SEQ ID NO: 314299 - DNA, 599 bp, Homo sapiens
caaagcaaatcatgtcataggacttattttccaaaaggaggacctcatatgtaacaagaccaagccagaaacaaaaatacgaatttaatctagtgttatgtttgcaagttttcataactggaatcttactgaaagtaaacaattctggtttaacctacctttttagcatttttgccattattaaatggatactttatagttaaattgtaccttttgctttgcaatttgagatgcatatttgataatatgtatttaaggtaacaacagaaaataatattacccaagattgatccataataacaattcataattaatattttctcaaaaagaacattaaataagtaataagctatataattatcatgaaatgcctattcctaatacaagaacaaaatcgccatagtaatttactcttacaaagattttyaaatttataatagctaatactcttcttaatattaacaaacctaaaaaagtggagtgatttggatgttcaagtacaggataaatataaacattgatgattttaagaaacacgctaacttgatatccaatcttttttattaaacatccagtttttaaaagtgtgtgaacacact

SEQ ID NO: 314300 - DNA, 602 bp, Homo sapiens
ataattatttgtttatattttgaatttgggattatgcgaggcacaacagtgacactccaaagatgtccatrccctaagccaagaacccatgaatatgctacattgtgtagcaaatgggactttattcacaaagttaagtgtacagaccagatcttaaaataaggagattgtcctagatctcccagttgaagtgggcccaatctaatcacattaacatttaaaaataaaaaattttacttaccttgaaggcacacagatgtggtatcagggaaggtctgagttatccaaagcattaaagagagattgaaagtaccattgcccaagggaggtcatatgcaaagcatgggaaggattgaaggtaactttgagtagcaaagactatccccagagagaaaatagggacttagtcctacaaccaacaggaattgaattttgtaaaacttgaatgaaattagaagaaaattcatcctaggagcctcgaaaaaggaatataacttgccaatatcttgatttcagacctgaaagactctcagcaaaggactcagtcctgctgtaccaggacttctgacctacagaactgtgagatagtaaaggagtgttat

SEQ ID NO: 314301 - DNA, 602 bp, Homo sapiens
ataattatttgtttatattttgaatttgggattatgcgaggcacaacagtgacactccaaagatgtccatgccctaagccaagaacccatgaatatgctacattgtgtagcaaatgggactttattcacaaagttaagtgtacagaccagatcttaaaataaggagattgtcctagatctcccagttgaagtgggcccaatctaatcacattaacatttaaaaataaaaaattttacttaccttgaaggcacacagatgtggyatcagggaaggtctgagttatccaaagcattaaagagagattgaaagtaccattgcccaagggaggtcatatgcaaagcatgggaaggattgaaggtaactttgagtagcaaagactatccccagagagaaaatagggacttagtcctacaaccaacaggaattgaattttgtaaaacttgaatgaaattagaagaaaattcatcctaggagcctcgaaaaaggaatataacttgccaatatcttgatttcagacctgaaagactctcagcaaaggactcagtcctgctgtaccaggacttctgacctacagaactgtgagatagtaaaggagtgttat

SEQ ID NO: 314302 - DNA, 594 bp, Homo sapiens
tctaggagctacccaggtaggagtgggtccagctctgtccaggctgtcttaagagcactgatgaggtctggtattctctagtggcccaggaccataagagcagtgatagtgctgtgggttggtggttaccatagcccctgtttttggcttatcacagagaaagtggatgaaaactcccagattctaggttctcctggcagaggtaatacattggacaaaacatcaagtgactcaacttttctggaggattcttgaggaattgactttggtattgcttttctcagagtgctggtggacctggcactctagacagggtcactaagaacaaagaaagcagacttgactagcatgaaggtttgaggggcccctatgaatctctggccaggctgataggggagggtcttctgtgaagccagtttgtgaacactaggacaggtgggtggtttttctaatgcccagccaccaacacagagagtcaaacaaaataagaaacaaaakaaatatgttccaaacaaagaacaaatataaatttctagaaattgaccttagtgaaatggagatatatgatgtagcagatagagaattaaaaataac

SEQ ID NO: 314303 - DNA, 543 bp, Homo sapiens
actgggcaaaaataaatgaaagaaaacaaaggccatgcaatctagcaataatgtttctaggtattatttattcaattattttgaaaactgtgtccacacaaaacccttgatacaaatgtttatagcagttttattcataattaccccaaactggaagcggccaagtaacagtaatacactttgcatggaaataaacactgatgcatggacatcaatacaattgtttggaaataaacattgatggatggacatcartacaatgacatgttattcagcaataaaaagaaatgagctatcaagcctcaaaatatcatggatgaatccgaaatgcatattgctaagtaaatgaagctagtctaaaaacctacacagcatctgattccaattatacaaccattctggaaaaggcaaaatgacagagatcattaaaaaaattactagctgccaagagtttgtgaggagcggggcagggttgaaaagttaatgcacagggacttcttaggttggtaaactgtgtatagcactgtaatggtgaacacatga

SEQ ID NO: 314304 - DNA, 580 bp, Homo sapiens
agaggagactgcctgacctgttctgattcccactggaagccactggaagaggaagataacctcaagggccatggagagtttgttgttggttttgtactcttttccttaatttgaagtagtctgctctgaacagaaaacaaagggtgaatcggtatgttctacgtcagagagagcaggggcagcctactgaccagatttcactatacattgaagacatatatgaattggttgccactatttacaaatcaaaagacttttgattaaaaatataggttctaatttcttttgaaaaactggcaaatgtgctagcaatcagcctgtgatcctacacgacaatgattagccagaataartcacagttgtcccttcagagagtgcacactggccccagtatgcccctggtccggcaggccccagggtggcccagctctcaaattttttgctacaatcttgtacctcctctgagccagagcctcatgactggggtagggaaagaactgcactttttacaaggagataaatatctccaacaaaaagcaaacaaggcgtaaagggtacccggtacaaaaggcaacacaag

SEQ ID NO: 314305 - DNA, 598 bp, Homo sapiens
ggttccacattttgcgtaaccaatcggcttgtgccatccccaccccgcctcttcagccggacggaaataaacagttccgctcctggcaggggcgcgatcttggggastccggcagcgcgttaagggaagtcctgctggtcgaatgcgacctggacatggcgtgggagcgccgagctgtccccttgtggatggggagctttcgttcactcagcagacgtttatggggcgcatgcgtgactctggggcgtttagctgagccggaggccccggctcttggggacgcggtgggctggcggcgtcggatcaccccgccatccatctcaccactcccagcgctgagcccggggcggggggagagtccctcatgggaaggggaggccgtgtgcccgcctggctcccaccacgttcgcaggccggccgggcgcccctcgcagccccctctccggcctcgcggtggcgccgctccccccttagcgcccagcgggtcccggccggaagactgaaggctgagtgggactgggcacggcgcgaaaccggcatcctgataactaggatttacagaataaggctgactcctgtcagctcgtgacccagccct

SEQ ID NO: 314306 - DNA, 611 bp, Homo sapiens
cccctggtagctacagtggaggtgaagtggttttcaaacactgtccctgtctattggttttcactgatacttggtaacatgagaaaaataagaagaagatagtgtttgtgtagcagaagttttttgatttataagaactttttttctgactttttaaagacaggatctcactgtgttgcctaggatggggggcagtggcaaaatcctagctcagtgcagcctcaaattcctggcctcaagagatcctcctgcctcagcctcccaagtagctaggggtccaggtgtatgccaccatgcccagctaattttttgtagagatggggtctcgccatgttgcccaggctggtctcgaacttctagtctcaagcgatcctccaccttggcctgcaaaatgtttggattactggtgtgagccaccatatcaagcctgttttctgatttatacagaactrttacatggttctttctagtttttggtgttaaaatctccttgctttttcaccatgatagtaaaagtagatagttttgtttctttttttttttcttgaacatccatacctggcaaaatgtataattggtaattctatataagttacacccccccctagttt

SEQ ID NO: 314307 - DNA, 620 bp, Homo sapiens
atctcatgatcttttactgctatgaaatgcatgaccttcccctgatatattcctttcttcaggttttgtagcaccacttagctatccagtaacaaaatcttgggggtcattcttaaaaccttcccacctcacccctgctggacatccaccactaagttcagttgatttttttgctcctaaatatttcttggttcagctttcatttttagatttatcctgcatacccctgtacaatctcatcatctctttcctggactgttacagtagtcttatattaggatgatcatagtcttgatttgcctagagaaaacatgctttatrtcattgcctcagagtgactaatagtcccacctttcacttgtaacactatgcaggttattgggttaaataatactgtcatccaaacctaatctctcctcattcatttcttctctcctatgcatcttagctgtgtgaaaattcaaaatataaatttgatgacagacagaactctgtttaaaatgctccagtaccttaccatttatctcaaaataaaaatttcaaaaaaagaaatgatatcccacaggatcttgtatagtgtgaccctttccatttcatcatccttataccagatactgtga

SEQ ID NO: 314308 - DNA, 424 bp, Homo sapiens
agataactttaggaaaatcctaatgtactggctcacccccagtcaattatatcagagtctcttaaagggaggggctgcagtggacacgggaatatgctactcagagcccccttcaaagaaagactcttgttctagatgatggaaatgatgtcagtagacattcttcaactgtcagtcccttcagggactgcctgagctgcagagagctgccttgtccaagttcatgcctttccccaggcagccctcattcagtgactgatgaaggtgaaagtatagaggcctaatttggctcaaagcaggacaagtttgaagggctacttcagctgcagagctccccgtggcatraggcaagcctgtatatggccagtggtgtgctggtagatgtatatcaactggatctctgatctcagggtgtttaaaaaca

SEQ ID NO: 314309 - DNA, 620 bp, Homo sapiens
atctcatgatcttttactgctatgaaatgcatgaccttcccctgatatattcctttcttcaggttttgtagcaccacttagctatccagtaacaaaatcttgggggtcattcttaaaaccttcccacctcacccctgctggacatccaccactaagttcagttgatttttttgctcctaaatatttcttggttcagctttcatttttagatttatcctgcatacccctgtacaatctcatcatctctttcctggactgttacagtagtcttatattaggatgatcatagtcttgatttgcctagagaaaacatgctttatgtcattgcctcagagtgactaatagtcccacctttcacttgtaacactatgcaggttattgggttaaataatactgtcatccaaacctaatctctcctcattcatttcttctctcctatgcatcttagctgtgtgaaaattcaaaatataaatttgatgacagacagaactctgtttaaaatgctccagtaccttaccatttatctcaaaataaaaatttcaaaaaaaraaatgatatcccacaggatcttgtatagtgtgaccctttccatttcatcatccttataccagatactgtga

SEQ ID NO: 314310 - DNA, 241 bp, Homo sapiens
tatagttcatatgtagaacacctaaccaaggtgtaatttaccagtccccatcatttttttttttaatctgaagcaatgttgcctgctcacacatttgacattccaactttatcagttttctagggagaagggagctagaaagttgatcaaagtacaaattctcatacagatggacaaagggtgtttttaaccctttactcacartaatatctgttagtttcatttattttatatttaaaga

SEQ ID NO: 314311 - DNA, 605 bp, Homo sapiens
tgccctgggccaaaaagaaaaaatcacgtgctcctcaatttcaagcagagattcaatacagtgttacctaaagtgaggaaaatataaatatgttaagtttttgccctctgaaactgagggctacattttaaatctggtcccagacatgttttggcgttagaactttgtttgattaatgatttgaatgcctttaggtggggcatgaaagcattcaatcattctgtaaaggcatttgaattggtggctcttgttttaaagaaaactgttgttacaaagtacagaacagaactttgcaaagcgaataggttttagtttgctaaaataaatgttagctctctctacgttcaaggatttatttaatccttctcgccttctaactcattcatgagaacttcaggacaaatagaaaacatttaagggctgtgtttttctctccatttacttagatttgcaaagaaaacaaattggcctttccctgataaaaaggcatcttgtccacagctgtacttgttttcttattragtgatcctggttatagaacatgtgacttcaggcataaaattctttctacatgattactagcatgcctctgaacacattaaatg

SEQ ID NO: 314312 - DNA, 586 bp, Homo sapiens
ctacccatttgggaaataaattgatataatcttaccaaaacaaggtatttttttctggatttttttattcaagagtgagagaatagataaaatagtctttcccagtactgtatattaattatttaaatatgatattttaaaataaagttatcatactttatctactatggtatcagcacctgtagacataatttactaccatatttgcattagtacatattactaaagttttycagagatatggccatatatagtgggtaaaagataccaaaaatcataaataacattttattctttctcaagtaacattattcagctcctctaatataatttcagagcttttgttaatggtatttttctacatactagttttgaataaattcatgtctaccatgaactatctagggagaaatgttgttaaaaatgctgttacaagttccataaacttagtttacttgatatcttataaacatgctgccttttgcaaaatacagattactactgaaatcaggaaagcttagaattattaagacagacgtattgtagggaaataagggaaaattgctctaattttgttctgacattc

SEQ ID NO: 314313 - DNA, 554 bp, Homo sapiens
tttaatatttttgtttgctcattttgttcatttgtttgataaaaattcaaggaaaactaagtcatgatctgtacagttttacccaagcaacaagaaccataacaaataacaataacttgatatttatttaggccctgaggtgtctgttaaaatttggtttcttaatagaatttaaaaaaaaaaaacagtctccttctttttacttttatataaatcactgtacttcagaatatggatttcagggggggaaagaaagggaaaactacaccacataatcacgtatcctcaaattcagaagtttcatttaagaaacaatttagctggggatggtggtgcmtgcctataatcctagcactttgggaggccgaggaaggaggactgcttgagcccaggagttggataccagcctgggaggcaacatagtgagattgttgtttcaaaaaaaacaaaacaaaaaaaaaaagaagaagaaagaaagaaagaaaaaagaaaaacaaagcaatttatcaaaatgtaactttaaatttaaatgtattaaacttaaatacaattta

SEQ ID NO: 314314 - DNA, 554 bp, Homo sapiens
tttaatatttttgtttgctcattttgttcatttgtttgataaaaattcaaggaaaactaagtcatgatctgtacagttttacccaagcaacaagaaccataacaaataacaataacttgatatttatttaggccctgaggtgtctgttaaaatttggtttcttaatagaatttaaaaaaaaaaaacagtctccttctttttacttttatataaatcactgtacttcagaatatggatttcagggggggaaagaaagggaaaactacaccacataatcacgtatcctcaaattcagaagtttcatttaagaaacaatttagctggggatggtggtgcctgcctataatcctagcactttgggaggccgaggaaggaggactgcttgagcccaggagttggataccagcctgggaggcaacatagtgagattgttgtttcaaaaaaaacaaaacaaaaaaaaaaagaagaagaaagaaagaaagaaaaaagaaaaacaaagcaatttatcaaaawgtaactttaaatttaaatgtattaaacttaaatacaattta

SEQ ID NO: 314315 - DNA, 554 bp, Homo sapiens
tttaatatttttgtttgctcattttgttcatttgtttgataaaaattcaaggaaaactaagtcatgatctgtacagttttacccaagcaacaagaaccataacaaataacaataacttgatatttatttaggccctgaggtgtctgttaaaatttggtttcttaatagaatttaaaaaaaaaaaacagtctccttctttttacttttatataaatcactgtacttcagaatatggatttcagggggggaaagaaagggaaaactacaccacataatcacgtatcctcaaattcagaagtttcatttaagaaacaatttagctggggatggtggtgcctgcctataatcctagcactttgggaggccgaggaaggaggactgcttgagcccaggagttggataccagcctgggaggcaacatagtgagattgttgtttcaaaaaaaacaaaacaaaaaaaaaaagaagaagaaagaaagaaagaaaaaagaaaaacaaagcaatttatcaaaatrtaactttaaatttaaatgtattaaacttaaatacaattta

SEQ ID NO: 314316 - DNA, 576 bp, Homo sapiens
agttggaaggtgggaaggcctgcaaaattttttttattaatttaaaataggacgatawacattccatacagcgattatttattttcttaaccataacagtcttaactagagcacacagcagaatcaattgggtaggagtttttgttttattttgttttaatatgtatatccaagctccataccagagaatctaattccataagtttgtaatggagtcgcgatagctcaacctaatttttctatttataatatagaaatagatgcttagatcccagtggtacaaacatccctgctagagcccacacaaactgcaatgcctattagtagtaagaaaatgagactgcttctctttttaacattttgttctcattctcaatctgcatttacctcagatttactaagtctaaaactcaagtcaagtgtagtgcagtaaaacaagtaagttaagagctggaaggactcggtgtaacagtgtgcattatgacttatgtgcctttggattttagttttggggggaaccactttaagcccatttcttcttttgtagaacagagagttaattctcacagtatctat

SEQ ID NO: 314317 - DNA, 576 bp, Homo sapiens
agttggaaggtgggaaggcctgcaaaattttttttattaatttaaaataggacgatatacattccatacagcgattatttattttcttaaccataacagtcttaactagagcacacagcagaatcaattgggtaggagtttttgttttattttgttttaatatgtatatccaagctccataccagagaatctaattccataagtttgtaatggagtcgcgatagctcaacctaatttttctatttataatwtagaaatagatgcttagatcccagtggtacaaacatccctgctagagcccacacaaactgcaatgcctattagtagtaagaaaatgagactgcttctctttttaacattttgttctcattctcaatctgcatttacctcagatttactaagtctaaaactcaagtcaagtgtagtgcagtaaaacaagtaagttaagagctggaaggactcggtgtaacagtgtgcattatgacttatgtgcctttggattttagttttggggggaaccactttaagcccatttcttcttttgtagaacagagagttaattctcacagtatctat

SEQ ID NO: 314318 - DNA, 607 bp, Homo sapiens
aaaggtacccagttaatatttgttcaacgaacctataggaagacaatattatctgcaagctatttataaactaaatgacaacgagaagtatttttagaaaagttaatcatatacaatttagtcattcacattgggaggctcttcctaaatttcgtttctgatccttatcttgatctttgacgcaatcatatcttggcctccatctaaaagccagtagaagcctctggccattttttaaacaattggtttaacaacattaattggaatctatatagctcaacttaaaaaaaaaaaaaagaggaactagcttatcataatacaatattgtcaaggcaagtgatacttccatgcagctattcagcatttggtgtattcttggtttctgcagacctaataaaaagagattatctcagcgtcctctaggtttaattttaaaaaacaagaaaccatgaacaatgaaaatgatttcaaaacatcttcactcacatctaaamtatgaaatagctagatcagaggttcttaataatttaatcggtgaagcataactgaaggatttagaaaaagtgcctaaactattaaaagattcttcagctgctgcttaatgttg

SEQ ID NO: 314319 - DNA, 507 bp, Homo sapiens
ttattggacttatgcttgcatatattcattcagttttcctatatgataagagcctgttcaaagtctgttctgggacacgtaaagttacattctcccctctgtctattctcttttaaattcatttatacatttattcgcttatttttacaaatgtttatgatttattgtttttaatttttgtagggacatagtaagtgtatgtacttgtagggtacgtgagatattttgatacacgcatgcartgagaaataagcacatccactgttcattcctgggacactgggagcagggtctgtttttaacctatcccgaatataacatctgatctagaagtacttctgccttatctgactgggaagatgaatgctatttacttcagctgagagtatattttgttgtctcatatattttggggaaactactagtttaataaatcaagagatctggagctcggggagagaggaaagctggaaataaggactttagtcattagcaatcagttggcag

SEQ ID NO: 314320 - DNA, 640 bp, Homo sapiens
tccagtgtatggatggatgtctttgaggaagacctactgaccttatgtttatcttctgtcagcatggtgtgactatgtggagagacagtgctatttgctaaatactttgtttttcaaataaaaagatttcacagattatgcattgtagaatttataagtattcttttatgtctttgaatgtgccaatacaatttttatgaagttggaactattktatctattttaatgaaattgtaagccttctgtgaattcttttattaattttattctgaagaaaatctgaccaggttagggaaatcaggtcaggttacgacgtgatcccagtggaaaagctgaactgtggactgtgatttaaaatagggaagaggtactgaagtgttgtttttatttttgtttacaaatcagcctttctaactattatgtactcccatccttctatctttttctccaccagaacgtattaacaggcatgcatataattaatgcttttcttgagataatattaaaattaacttcatctgtcaggccgtctgggctaaaagtacacagtcagatctgggtaacatttgagttgatgtaaatatgcccacacatactgacaatgcttaccatttattgtgtgaatgaaaagcagtgtaaa

SEQ ID NO: 314321 - DNA, 562 bp, Homo sapiens
tacatttccctaaactttctacactctcccaagagattggctggctttgtattgtagatttttggtgatcacagaggacaatgcattatcataagaccaataagatttatttttaccttggtaaagaattttaatttatttctagtttcattttcatttatatccatctcttctcaccctctgctctacaaaagtatatatgactatataaattgaaaaaaatatcaagtgcaaaattacrgaaataaataattaggttattttagtggaggaaggtttgttgtgggtggaggaggagaggagtgagccaagaaaaacgagggaccatacgtgatcatatttttgcagctattttaaattgtttgtgtatatactttaaaatattataaaataaaattttaagtgcaatgcatatttggagccaatgatgagggataacttcagaaacgtagcatcatcatctagtgctttcatagtcctttcaacatttccagatagttttaatggcctgctcatggaggcaatgccctaattttaacatatctcttcacaactctgattt

SEQ ID NO: 314322 - DNA, 651 bp, Homo sapiens
gggaggctctgttctcaggatgatgtgcttaggacatttattccaataaggtgtaagactcaatcactcactggaggagaggccttcctcagactgagaccagggctggaaggaagagctccaggaractgaacacaaagacataacatagcctagatggtcactcaagatggtaccaagcacgtggaaggaggctgggacccaggaagtgagggacccagggatccctatgcaacaggctggaccagccaagaggagatctcatagcctttgctttgcaggccacagatttattcatcttggctttagtgattttcctttggaattcagagacacttaatgttgttttaagcctcagccagtcttatagtacagaaaggatgtgtcctctcttacgcccaagcattaagcttccctggtaacagagtcaacagttggaactgcagtgtttgaccaactatgcagggtggggtgagtctctggggtaacgggttgggcttgttttgggaaggcagagactcagcttattcctctcggttctctccttctccccagcaaattgcccaggaagtctctgagcagcatctgtcccaggggagactctacccaccactcagcaccatccgagacgtgtctttgagaattgccatc

SEQ ID NO: 314323 - DNA, 572 bp, Homo sapiens
aggagaaaatggaatcgtaaaatgctcagtggaaaataaagatgggtacaaaaaacaagggcaaaaagtagaaaacaataacaaatatggtaggtattaatctagctatatcagtaatcactttgaacataggctaagtgtaccaattaaaagacaaagattgctggagtggaccaaaaaacaaaaccccactatatcttgtctaaaagaaacccaatctaaatctaaaaacatatagattaaaagtagatggatggaggaaaatacagcatgataatacttatcaaaagaaagtaggggtagctatattaattttagaacagacttcaaatcaaggagagttgtcagaaataaagagcattacataataatagaggggtcaatctttcaagaagwcctaagaatttttaatatgtatgcacctaaaaatagtatgtcaaattacattaagcaaaaactagtagaactgcaagaagagataaatgaatccattatcatacttgaagacttcagtactcacctatcagaaatgaacagatccagctggcagaaaattagtaaaggcatagttg

SEQ ID NO: 314324 - DNA, 523 bp, Homo sapiens
ttttttaatcctctaactcggagtgaaaattttacagactcactaaccactacatgcccttcagcaccagccaaatttgcacttcctatagtagtccctattttgaataatggtgccatcttctcccagttacctaagccaaaatctggggtcatctttgacatctccttcttaacctcccttaactaatccccaacaaasgtaaagctttccatctgatctttgtttcatacccttattacctttccccaaacgagttatactcaactgttaaacaatgaaagtcctatccttcttagtttaaacaaatgttactcaaatcccaataatataaaacagaaaaacagcacacatcctccagtggaagtgaggaaatagagcccagagtcccacccatattacctcactctcagcctttgatatgctcttaagccctctgaggccttagggtcatttgttggaaacagattgcctagactactgccttgatctgctaaattgtgctacacttttccattttatt

SEQ ID NO: 314325 - DNA, 523 bp, Homo sapiens
ttttttaatcctctaactcggagtgaaaattttacagactcactaaccactacatgcccttcagcaccagccaaatttgcacttcctatagtagtccctattttgaataatggtgccatcttctcccagttacctaagccaaaatctggggtcatctttgacatctccttcttaacctcccttaactaatccccaacaaacstaaagctttccatctgatctttgtttcatacccttattacctttccccaaacgagttatactcaactgttaaacaatgaaagtcctatccttcttagtttaaacaaatgttactcaaatcccaataatataaaacagaaaaacagcacacatcctccagtggaagtgaggaaatagagcccagagtcccacccatattacctcactctcagcctttgatatgctcttaagccctctgaggccttagggtcatttgttggaaacagattgcctagactactgccttgatctgctaaattgtgctacacttttccattttatt

SEQ ID NO: 314326 - DNA, 659 bp, Homo sapiens
taacttcctttgtagtctggatgctatatgcctagggatttttctttgcatatgttgtgttaaaaccaacaggagaagcttggagctacagaacctcagctaagcttttggcaggacgctcagttctaacatcctgtcttgtacagacctccacacttgaccttgcctgctgtggacctatctgsaggcctgaatgatgagatggaaacagccctgaaaatgaaaggacattcaaggctgggaaaatagcgagcacgaaggctctgcctctgtaacagagacaacacatttaaggagcggcaggaacaggggtgggagttggagccatcaaaggcatccttccagctctgagggcaaagtacaaggcttctatatgtggagcctctgaataggtcagtatcagtgggtgatctcagagcaattttgcagctttctcttgggcaagcttctgtttctcatttctgtacagagaactgtgtctcatgaaaagatgtttggttacttgagcgggtgactgactctgagtggtgagtttgaaaggcccaagtaacactcagcttcaaacagctgcaaaaaaatataagaacacctcaccctcaggaacacacggaccatactgctcccctctatgtacacatgaatctacacaacaccgtcca

SEQ ID NO: 314327 - DNA, 659 bp, Homo sapiens
taacttcctttgtagtctggatgctatatgcctagggatttttctttgcatatgttgtgttaaaaccaacaggagaagcttggagctacagaacctcagctaagcttttggcaggacgctcagttctaacatcctgtcttgtacagacctccacacttgaccttgcctgctgtggacctatctggaggcctgaatgatgagatggaaacagccctgaaaatgaaaggacattcaaggctgggaaaatagcgagcacgaaggctctgcctctgtaacagagacaacacatttaaggagcggcaggaacaggggtgggagttggagccatcaaaggcatccttccagctctgagggcaaagtacaaggcttctatatgtggagcctctgaataggtcagtatcagtgggtgatctcagagcaattttgcagctttctcttgggcaagcttctgtttctcatttctgtacagagaactgtgtctcatgaaaagatgtttggttacttgagsgggtgactgactctgagtggtgagtttgaaaggcccaagtaacactcagcttcaaacagctgcaaaaaaatataagaacacctcaccctcaggaacacacggaccatactgctcccctctatgtacacatgaatctacacaacaccgtcca

SEQ ID NO: 314328 - DNA, 531 bp, Homo sapiens
aattcacaaatccatttcaccccatgtccctgcaaggactctagccctgagactgatgcacatagactcctgcagatacctgttgctgatttcattcactttaggaatgtgtttgctttcttgtggttgtttggggagagggagcatatttatggggacacacataattcagaaatgctgagttttaacaatataggattgagggatttcaatatggaacaaggaaagacgttggaatagaatagattcaggtttgaatactgctacttgcttgtcatatggccttaggcaagtctctgcctcctctgaaccgcttgtctaaggacaataatgcactctcacctcctaggactgttgtaygattcaaagataataaagacaactttattatcttttactgagtactggccactcagtaaaagtaggtggtagtagttgttttaatcattgttccatttctggagcccaagctcaacttcccacaaccgtcagtccaccacaacacagttcacaatctgacaattcttcctc

SEQ ID NO: 314329 - DNA, 534 bp, Homo sapiens
acatggctgcttgggaggattcaatgagattccaaatgtaaagggcctggcccttgtaggagctcagcagctgtgatctgtttgacccaggaccccaggagttgtcatcyactcagtcaccccacccaagaatacacactgtaaacctgctgaggccaccccagtcctctgaagtaccgccacactctgttgtttgattcagacctgaaatcatctgtacttgcacttaactagcaaatcattagcaagtatgtgtgaggaatcagagatcgcgctgtgatgagttagaaaggtgaggctgggaagtgggacttggttttatgtagtcggaagctctgtggaaagtacctgaagatgtatttggacaaagccagcagcccttggccctgagccaagctgctgtctttcttatctgcaaataggtggtcttctgcacactggccaataacatacatacaggatattaagagttaccatttattgaatgcatgtacttcccatggtgggccctggtctagctattttgtgtgcatt

SEQ ID NO: 314330 - DNA, 606 bp, Homo sapiens
aagtgttccaaaaattcagattcccctttattggacaccaagcaaaggctttctacattacttcagtgcaattttgtgtcataagggaattttctggagctcctggactctctagagggcacttctctggccaatggagaagatagggttaggcctgttttgccacaatttggaaagaaccagaaggaatgatgatcatcttcttggcttctctggaggttcggctgttgcaacagctaaaaggggagatctcggaggagccagatacatgagatccacatgaacttcaggactaggaacagccctggaagtgaagaacagcctcagaatacaggacttagtgaaaaggaaggctttgggaacagaggagagaaaaggttaaagagaccaggggaagtttcayggcagggggagagatcaaggaaaggcctagaactgctactcagtgtgtgtagtggtggtggtgggtgagagagagggcagttgacccccgacagctggaaataatccctggcatcttgtaaacaagacaaacgagctgcacggtcttcagagatgagccagccattcctgcctgtctgcctcttccctattgtggcatctgaa

SEQ ID NO: 314331 - DNA, 516 bp, Homo sapiens
aacaatgccttgtgggtgaagacaatggccattaagatgcttgatrtgccttatttaaaatccatgctagcattgcctcctagatttcatggccttcccttaaaaatgactgagtttgttcgagttttgtaacctatttttccttttaacattgcctgtaaggaagctgagagtgaagtttttgctcatttgctacaggccccctcagcttctgtgggcttctgcacacagatttcccctttactccattcttgctctttgatgctggtgtttgatagttttgtttgtgtctttagcctttctgtaagcaagtgtagtatggattattaaaaactacttaatacatggataaaaataggtttcacctcatgggtcaatttgtggctgagtaacagcatctgaggtcatgtcattgagaaaaaatgtcctgattgatccataagaggtgtcagggcatgtaacaggtagaagtggcctgcccttccaacctggtgacctacaggcttgggagcagct

SEQ ID NO: 314332 - DNA, 589 bp, Homo sapiens
gtggcacatccaatcaatggaatgttattcagagacaaaaagaaatgagctaacaagccatgagaagacactgaaggaatcttaaatgcatactgtggatacatttaacaccatataatgataatgcaaatgtgacaccatgctctcttgtagtcaaccctcctccccaacctcttgccccagccctgacaatcactgatctaagtagtttcaaaaccacattatcatctctaagggaggccaccattatcaggtgcacatgagaattctgctcagtgaacttcagccatcaccttttcttaaaactgcaactctgctacaagctttgccaaatgtatccgttccatgactaagaagaattgaagacagtaaggaaaagagaaagggaagaacaacccattatttttgtttcttacatatgaaccaaaaaagttcataagctctcaaagaaacaactaaaatatctcccaaatcattatgaatcaacaggaaatatatgcttttaatgaaccagtacacygaagtatcttccaaatgtcaatttacctactgtccaagaactctggaaaatctacctctgcaattatat

SEQ ID NO: 314333 - DNA, 607 bp, Homo sapiens
ggtcttttgaaataacataggcagacaaaaactaaattataaaaatgaagaaagcctgcaggatttatgaaacaccatcatgtgaataawgtattacagatgttccagaaggagaagagaagggaaaggtggggaaaacatgtttaatgaaataatagaagaaaattcccctaagcattgggagagatatggacatccagaaccaggaagctcaaagaaccccaacagattcaacccaaacaggtcctcactgagagacatatattatatatcaaattttcaaaagtcaaagacaaagaaataattttaaaagcagcaagagagaagtgtcaagtcacatacaaaggaaactccactagactaacagtaaatttctcaggagaaaacttacaggccaatagagagtgggatgatatattcaaagtactgaaagaaaaaataaaaattaaaaatggcaatgaggaatattatacccagcaaacctacacattaaaaatgaagaataaataaaatctttcacagacaagaaaaactaagaaaactcatcaccactaaactgatcttgcaagaaatactcaagagagtcttatatctggaagtaaaaaag

SEQ ID NO: 314334 - DNA, 533 bp, Homo sapiens
ccagcagtgggattgctggatcatatagtaactctagttttagttgttggaggaacctccaaactgttctccatagtggttgtactaattgacattcccaccaacagcatrcaagggttcccttttctccacatcctcatcagcatttgttattgtttgtcttttggatataagccattttaactggggtgagatgatatttcattgtagttttggtttgtatttctctgatgatcagtgatgttgagtaccatttcatatgccggttttgcagttggtatattttcttttgagaaatgtgtgttcaaatcttttgcccattttttgatcagattattcgatttttttcctatagagttgtttgagttccttgtatattctagtcattaatattttctcttattctgtgggttgtttgttcatttcgttgattgtttcctttgctgtgaagaagctttttaacttgatgtgatcccgtttgtccattttttcttttgttgcctgtccttttggggcattacttaagaattttt

SEQ ID NO: 314335 - DNA, 568 bp, Homo sapiens
ttcctttggtgtatatgtctatatttatgccaataccatgctcttttggttactatagctctgtagtataatttgaagtcaggtaatgtgattccaccagacttgttctttttcttagggtagctaagaaacagctattctgtttcttttgtggttccaaatatattttaggattgttttttctgtttctgtgaataatgtcattggtattttagtagggatttcattgaatctgtagatttctttgggaagtataaacactttaacagcattgattcatccaatccatgaacatggaatgttttttattttttggcatccctccaatttctttagtcagtgttttatagtttttatgatagaaatctttcacttctttggttacctcatagatttaattttatgtgtggttattgtaaagaaaattactttttgartttcttttttagattgttcattgttggcatatagaaatgctactgatttttgtatgttcattttgttgtctgtgactttactgaatttatcagttctaaaaggtttttttgtgtggagtctttaggttttt

SEQ ID NO: 314336 - DNA, 533 bp, Homo sapiens
tttaacttttgtctcctttgtgtattttcaaatagcctgtcttaaagctcactaattctttcttgtgcttgattcattctgcacaatgagtcattcttgattcaacagactctggtgcattattcagtacatcagttgcatttttcaactccagaattttggcttgattattttaaattatttcgatctctttgctaaatttacctgatagaattctggatttcttttctgtgttatcttgaatttctttgagtttactaaaaacagctattttgagttctctgtctgaaagrtcatatatctctgtttctctagatttggttcctggtgccttatttagtttatttggtaaggccatattttcctggatatggtcttgatacttgtagagttttgtctgtggtaggcattgaagagttagttatttaaggtagtctttgagttagttatttgttgagcttgtttgtctttcttaggaaggccttccagatattcagagggacttggatgttgtgatttaagctgtgtctgct

SEQ ID NO: 314337 - DNA, 383 bp, Homo sapiens
ctagccttcactcacttaagatgaatcacagctgacrgaaagaagactgttgtattaaataatacatttttagaaaaaaacctaagacataacaaaagtttaataaatgttaaaatatcctccttaacatgaatggctcctaatgccaaccagaagacaattacctttaaggccctccatgatcttgtctcttcttcatcatctcatcatctagtcccatctctcaaaaatccctcaaattcacactctacctggttggaactatgggcagtcagctgcctaatggcctgtgctttttcatatctttgtgcctttgcaaatggtgttctgtcctcccaaaatgcccttcccctcatcaccctcattctcactccaatatcctg

SEQ ID NO: 314338 - DNA, 365 bp, Homo sapiens
gtctgtttactctgctgattatttcttttgctgtacaaaagctttttagtttaattaggtcccatctatttatttttatttttgttgcatttgcttttgggctcttggtcaagaactctgcctaagccaatgtttagaagagtttttctgatattacctcatagaaatttttggwttcaggtctttattttttaagagatgggagtcttgctatgttgcccacgctggccacaaactcctgggctccagtgatcctcccaccttagcctctcatctatctagaactatggcaaacatcagcatgcccagcttccagcatccttttgcaataaaaacactgaacaaactaaaatagaattgaactt

SEQ ID NO: 314339 - DNA, 575 bp, Homo sapiens
ggttcggctttcggatgtggatttagtgtccaccaggtgtctgactccacgctggggcctgtggacagacataacaaaactgtaccctggaccttcaggagcttggagaaagcggtcttggagggctttctggccttgatttgctaaaagcagccaaggaagtttcaagaaaagacttcygagctaatttagccaaggactaatgggaaaccaggtagcagcggtagattttctgttgcttttttagcgactttttttttcttcataccaaaaagaatctttgaggtaaaaagactcccagtattcaactgtcccaatgcctttccagtgcgcgaagttcttcaaaaacgtggagcccaaatgctctcctcaccttgccctggagaggacccttccctagggggcagcatagagcaccgtgaggcagctctgcctctccctaatcccacctcactcttcctctttctgccctccaacggcctcacacaagagtctaatctctgctccccaagacaggtatggaaatacggggaccacgtttcctccaaccctccttttttccagcctaaatttcc

SEQ ID NO: 314340 - DNA, 522 bp, Homo sapiens
ctgtctaggaggccggtgttgcttctttgagatacccaaaggttgaggacaaacagcgtaatttactatagtgagtagttattacgtttctgacccagattacttggtgcttcttccagtttatctcattaaatcattacagctgtgttgaaatgtaaagtattattcttcctccttctacagagaggaaactgattctcagaggggataaagacttgtgcaaggggattgtgttagtcattagtgtggttcaccaaacatttttgttttaatttcatagcacagggtgtgattgtacttcstcggggatgaactatgaccaggtactgctttggtcaataacatgtgaacacctcatccccttctactgcccaggcatttctgagggtggagactccatcagccttgattctggaaggagggtatcctggagcagagctttcccaaccagcttgcaatgaacatgtagcataagcaggagttggaccttttttcagtccctaagtcttggggaggtttgct

SEQ ID NO: 314341 - DNA, 644 bp, Homo sapiens
cctgccccttgaaaggtcctgtgcatacttggaaagaccatcagatttagtcgaatgaactctagcacaagtcccaactctcccatttaattattgtgatttttaagcaacaaacaagacctctctgagcacagctctcttcaaaaggaagatgctaatcactccccattgctagaaggtttcatgacacactgcagctccttagctaagggcttctccccagacagtccacctctgcccctactggagaaggagtctgtgaggggattctggccctggaattgcaagacacctgaccccacctcctctgtgtgctcagctgccaagaccttgccatttctgaaaacaatcgaacatttcaggaaaagtgactgtggccargttgctaatgtccagcagccatcagaatctggcaggctctccccacctcctgaatggagatggtttccttcctgccattgctaatgttccctgctctgggtgtgggtaggagaagtgggaaccacataataaggatttgaaaatagctactagcccacagcaagaagtggtttccacttcacagtggaccaattgcctgatagcagggaagggtggttggtagtttctgggtctgagctgggcatctgggtttaaatcctaac

SEQ ID NO: 314342 - DNA, 552 bp, Homo sapiens
gtggctggcagaaaacaggaaagagggaaatgggagaaaaaatatcagagcatgcaaatctcctgcatcattttattctcacccaaaggaaaacaaattgccaaaggaaataaaaatgcttttggacaagttaagtggtggtcttctgtgtgcaaacgtgactctctcctcaaaggctgtttgtcatcctcaaagatggcagggccttgggggaatagccacaaagaggccatgtgtgctcccagcccggtgaacccgcaggcctgtgaagcctccatggggatggcagaggggaaggaaggcagatcctttttgaagacagcaaagtaaccccgaggctggtgatgccaggaacactggggcattgaccgactcggggcckggatttctcccttgccagggaaggaggaaagcgaggggtggatgggagggggcctgtgcttgtcatcccgaggctcgtggtttgggtggcagaacagacctagggattgagcggggccatggcaagtgaagcagcagagtttcaggcaggcgcctctgacacagccccag

SEQ ID NO: 314343 - DNA, 540 bp, Homo sapiens
atgcacatttttagcacacaacagcacaacagccttccacagccacttcctaattgttcagttggaagaacaaagcaaggaatgaagctcacagttgtttctgttggtgaacttcctgaaaggttctcataggttgatccaagctggggtgacaagggctgyagctgggctgagctccaatacggatgaaaccaaagtggcataactcgtcttcagcacttctctagaatccacagctcattcctcccccatattcactgcacagtcagctctgacctgaggttctgcttctcttgggaagatgatagataaagccagagagggctctggggaaatggtccaaagtctgttagcaaagaacactggcaccaggcaaggcctctgaggtcagatctcccttctctcctcaaaagcagagagccagttcccatgacacccgccctggcctacacctcagctgggtgcatacacttgtttgagaccccagtgaggccatgggccttttttgccctgggatggactgcaatgagcaaaagagct

SEQ ID NO: 314344 - DNA, 540 bp, Homo sapiens
atgcacatttttagcacacaacagcacaacagccttccacagccacttcctaattgttcagttggaagaacaaagcaaggaatgaagctcacagttgtttctgttggtgaacttcctgaaaggttctcataggttgatccaagctggggtgacaagggctgcagctggrctgagctccaatacggatgaaaccaaagtggcataactcgtcttcagcacttctctagaatccacagctcattcctcccccatattcactgcacagtcagctctgacctgaggttctgcttctcttgggaagatgatagataaagccagagagggctctggggaaatggtccaaagtctgttagcaaagaacactggcaccaggcaaggcctctgaggtcagatctcccttctctcctcaaaagcagagagccagttcccatgacacccgccctggcctacacctcagctgggtgcatacacttgtttgagaccccagtgaggccatgggccttttttgccctgggatggactgcaatgagcaaaagagct

SEQ ID NO: 314345 - DNA, 540 bp, Homo sapiens
atgcacatttttagcacacaacagcacaacagccttccacagccacttcctaattgttcagttggaagaacaaagcaaggaatgaagctcacagttgtttctgttggtgaacttcctgaaaggttctcataggttgatccaagctggggtgacaagggctgcagctgggctgagctccaatacggatgaaaccaaagtggcataactcgtcttyagcacttctctagaatccacagctcattcctcccccatattcactgcacagtcagctctgacctgaggttctgcttctcttgggaagatgatagataaagccagagagggctctggggaaatggtccaaagtctgttagcaaagaacactggcaccaggcaaggcctctgaggtcagatctcccttctctcctcaaaagcagagagccagttcccatgacacccgccctggcctacacctcagctgggtgcatacacttgtttgagaccccagtgaggccatgggccttttttgccctgggatggactgcaatgagcaaaagagct

SEQ ID NO: 314346 - DNA, 365 bp, Homo sapiens
aaactcatccctgctctttcttcccctcaggaaacaacgacaaagccagactcccttcctgggggacagtgctgcttcctccccacmggaatggcagtggggagaatttttccctcccctccccacatactaaccacaactgggctgctcctccattccctccctcctcctcaggctggcggacgtggtagggtggaggtccctgggaaaactccccagactgagctgaaaagccggcagacattgccctggggccttggcagagggctgggctcaggacacctcctcctgggctcagactctggttaggatgtgctgacgtgatgtctggcggtttgacactggcttggtgggggtgcactttg

SEQ ID NO: 314347 - DNA, 570 bp, Homo sapiens
agaaaaatctaaaaaaagaaaccagagaaaacaaaagagcaaccattagattgttagctgacttcttaatagcattaatgaaagagagaatacagtttagtgatatatttaatgtgataaactaaacaactgtttaaaatcctatacctagcaaaaagatkattgactaatttaagtgaaataaatccattttcaagtaaacaaaagcagagacttcatcattagcaaacctttgctaattcttcagggagatgaaagacaaaaatctcaggtggaagatagagatgcggaaaggagtaaacggccacaaaatataataaagggagccagtagctaaagagggtataaaattataaatcatctagagggtgttttagctagaattgttttatacattttggtgattattaggatttatgttcccaatatacttcatgtaggcaaatactagaattatgtgacttcttggtgtttactgatttgggagtggggaagtgagtgactgtagggtgaaaaaagaaaatgacattaaagctttgttttgcaagtagataatttagtgttgaccat

SEQ ID NO: 314348 - DNA, 555 bp, Homo sapiens
tatcacgagaacagcatgggaaagatctacccccacaattcaattacctcccactgtgtacctcccacaacatgtgggaattcaagatgagatttgggtgggaacacagacaagccatatcattccacccctgacccctcccaaatctcatgtcctcacatttcaaaaccagtcatgccttcccaacagttccccaaaggtttaactcattttggcatccaaagtctcatgtgatacaaggcaagtcccttctacctatgagcctataaaatcaaaagcaagttagttacttcctagataaaatgagggtacaggcattggrtaaatacacccaggtcatgctgatgcaagaggtggattcccatggtcttggacagctccacccctgtggctttgcagggtacagccgtcctcccagctgccttcacgggctggtgttgaatgtctgtggcttttctaggcacatggtgcaagctgtcagtggatctaccattctggggtctggaggatggtagccctcttctcacagctccactaggcggtgccccagtagga

SEQ ID NO: 314349 - DNA, 615 bp, Homo sapiens
gtgtgtatatatatgtaaagcatggacaaagtaacaatgtcctctgattttttactgatccaactaactgaaaatttgagttatcttcagaatagtttttatttgtataaccatctaccatayttgttttaaaaaacagtatctccaattatctaacatgtagttaggaattacttatcaataacatactactgttgcccctctgagatagaattcttaagaaggccaactcctggactgttagaatgcagaaatctttctagaatcgtgctattcaaagagagcaggtccatggaccagttctggtctgtaaattattactaatccataataagaaaagtacagaaaatgagataagaattttaaaacttttacagcaatgtgtaagaataaatctgatgaatctactaataaaagagtcaagccttgtatttcatgtctttttcatttcactcttctagcaattcatttttatattttacaaaagtatcagctggtgaccagctacattttttttaatctgttcttccatcaaagagtttgaaaaacacttttctgaagaatctttagatgctgaaggtccttggatatgaagataagctgctttactttgat

SEQ ID NO: 314350 - DNA, 649 bp, Homo sapiens
tctctgtcgtttgtcaaatatttaaacacacaagcagtgtggatctcaaattctaaatgttgtcttacaagactgctgattgctttgctctgcttttcagaggcgttttcttaatttttagcttctgacctgggctacgccagaattcatcaaagtcttgagaggagctggctgcatgtttgaggtctctcaacactctgccaaaagctccaatggttcctctaagcctcagcagcagttttgtgactgtgcatagcctggattctcagcctccctccygtaccctaaatttgcaaatgtccccagggtaggagcagctgcagacatcagctcctctccttgaggttttctcctcttgattctcagcctcccagttctcatttcttccatagatagcaaatgccttcaaatagatttctatattttatttagctttctagttgttcttattgagagtgctgatctgtacagagctacttcgtcccacctggaagtcctctccattatattttgagaatatataattttaaaatttactttcaaagcaaaagtacaaaagacttcagcagatcataaaatacaatgtacatgtattacaccttggtaagaatacagaattaataaaattaatcaataattaataaaaatg

SEQ ID NO: 314351 - DNA, 610 bp, Homo sapiens
ctccaatggttcctctaagcctcagcagcagttttgtgactgtgcatagcctggattctcagcctccctcctgtaccctaaatttgcaaatgtccccagggtaggagcagctgcagacatcagctcctctccttgaggttttctcctcttgattctcagcctcccagttctcatttcttccatagatagcaaatgccttcaaatagatttctatattttatttagctttctagttgttcttattgagagtgctgatctgtacagagctacttcgtcccacctggaagtcctctccattatattttgagaatatataattttaaaatttactttcaaagcaaaagtacaaaagacttcagcagatcataaaatacaatgtacatgtattacaccttggtaagaatrcagaattaataaaattaatcaataattaataaaaatgtttgatattaataaaatgttcaataacaaattattaaaatgaagataactgtacttcttccttttatatgaaaacctaggtgttcacttccaatatatatattcctaaggtagaaataaagcattgttaacatggcatctctggttctcttgagttgtaatcaaagga

SEQ ID NO: 314352 - DNA, 459 bp, Homo sapiens
aagaaggaaataaatgaatgatttctaaaggacatatgttttcttcctagcatgatgaaaatgctctggaactacattgtgataatgattgcacaaacttgtcaatatactagactttaacatggtgaattttatagtatgcaaattttatctcaatttttaaaaagaggactcttttctctccttatttttattattattattwttttttttttgagatggagtctcgctctcttacccaagctggagtgcagtggcacaatgtcagctcactgcaacctctgcctctgggattcaagaaactcccctgcttcaacctcttgcgtagctgggactacaggcgcctgccaccacgcccagccgatttttgtatttttctagtagagacggggtttcgccacattggccaggctggtcttgaactccctgcctttttatcattagctatcctcccaacta

SEQ ID NO: 314353 - DNA, 531 bp, Homo sapiens
atgatttctgagacacgtgtcaggcagaggctggttttgaactgcacgatgggaacatccttctcttctccgggtcagacaggatgacccggatctttgttatcttttgctgattttttttcccagatagaataaattttgtttctttaattttcattacaaatcatatttttaaatattatatcacttttgtggttctcccctggctaatatcaagcaattctcttcataagataaaatgattatctggagttatatatgtatttaagctttaacctttgaaccaactatgaggaaaaactactatataacaaaacaagcataaattcaatgatgtgtctatagaaacrtgatgtatgtcctttgtctccattttttttctgtttcgcccaagtagtaatttctatgtaaatccagtatgtttgcctttttttattttatttttttgcagtgacgtcttgctctgttgcccaggctgaagtgcagtggtgtgatcaatcctcctgcttcagcctcccaaagttctgggat

SEQ ID NO: 314354 - DNA, 531 bp, Homo sapiens
atgatttctgagacacgtgtcaggcagaggctggttttgaactgcacgatgggaacatccttctcttctccgggtcagacaggatgacccggatctttgttatcttttgctgattttttttcccagatagaataaattttgtttctttaattttcattacaaatcatatttttaaatattatatcacttttgtggttctcccctggctaatatcaagcaattctcttcataagataaaatgattatctggagttatatatgtatttaagctttaacctttgaaccaactatgaggaaaaactactatataacaaaacaagcataaattcaatgatgtgtctatagaaacatgatgtatgtcctttgtctcyattttttttctgtttcgcccaagtagtaatttctatgtaaatccagtatgtttgcctttttttattttatttttttgcagtgacgtcttgctctgttgcccaggctgaagtgcagtggtgtgatcaatcctcctgcttcagcctcccaaagttctgggat

SEQ ID NO: 314355 - DNA, 504 bp, Homo sapiens
attaaaaatctcaaatactttgcatattatacccattttaaatgttcaaaggcagctacttgtttttacaataagacctgtgattctggctacatctttgaaattcttctggatgatggtaccctttagccctttctgtgttcagtgaaaatgaacttcatracttttctttgaaaatctttccatgtgttctccttgctttcttctcaagtatgcccagtggcccagccacagagagagtcaacttcagccaggagccacattccttatacagtcaccagaaatacaagttttgaggcagcaggggaaccgacaaaggctcagtcttagctttcatttcatcagctggaaaaaatgacttgtacatgtttacatggtccagccatgaacatctgatgaaaatgccaagatcactggaaccacagcaggtcctttgggagaacacaaaacaaaaacatacttcatgtttaactgcttaagatggttttctgtttgctgattttt

SEQ ID NO: 314356 - DNA, 558 bp, Homo sapiens
ccacattttgtactgaatatgaaagtgttctcttttaatgaatgtkttcaataacaaaatttgtattttcctataataatagagaactctggatgtccttccatcccaatccttgctgtccacacagaggccctcattccaggcagaaggggaaagcaaactgctcctacttatcagcttgcttttggccaccttacccacagaagtgcttccccttggccactgtacatactgtagggccatgtgctaaacaagtatattagcaaatcccatcctgaaatatatatatatatatattttaaagaggttaacacatgaagacaaagttgggtttatccaaggaagataaggttaatttaagagtagaaaataaatcagtgattaatcaaaagagagaaattatgatgccaagtcgatgcagaaaaacatttcataaaagttgacatcaattcatgataataatgatacattcttggcatctacagaaagaattcctgtaatgtgatgaagggcgtgtaaaacaatactacaccaaacatggtacttcatggtgacaag

SEQ ID NO: 314357 - DNA, 599 bp, Homo sapiens
agatggcactttatgctctgacatttcttatctaccagcctagacaagtagttttcacttacctaacgattcaaacttgctcttaggttaaagagtgggttttacaatggccacagggggagaaaaggcaaaaacagacgcaaacaggctggcaacctgcatctcgtttcttgaacaaaggtcaagaacaaggggtcacygttcaatatctgcagctgtgaaaaaaatgtgagctgcaggcatgctgtttcataactttcacacaaaaaagtcttgaatgtgaggggctttcctgtttcttcattaaatgtgtactgcacttttctaaagttgaaattttaaactctctttggaaaattattttgaagagtggaatttccaaagtatatagaatatagagggcaacaccaagtttctactacatctatacctccattaagcaagaaagccagattaacccaaataacttaaaagcatgtcaagtggccttatgaaacaaataagaatgaagttaacccaacccaagggcaatgtttacgcattttctcattgcttaaaacaagcacttgacattgaggaaaataaaaacattaaatgta

SEQ ID NO: 314358 - DNA, 585 bp, Homo sapiens
atcacctggtttacctgtgcatacttttgcatagtgtgactgctagttactgatttgcagtgtttagaataaatatacagtatacagtatatacaatatacaaataaatatacagtataaagggaaaactatacatctattaaaactgattatataaactaatagtataacttaagagaagttaggaggtaaaggacagtaatggaagggaagtacaaggttggtcatttcctcaatgttatggaaatatatttaaagtcaatggatcaaaaaamttattaactacagttataaaggagaacaaatgaactaaaaacataacaaaaatggtgagaaggaatgaagtgagataaactgtttatcattcatagaataacaaatttggcttaaatgataagaaacagcagcaagaaacgtgctgttaacctctaagaggtgaaattggtgtggatggcagacagaaacacttgtacttttattttctatccatctgaattgtttagaatttttattcaggtacatgctctaaaattaaaattgtttttaatcctaaaaaacattaggggctgggcatagtggctcacg

SEQ ID NO: 314359 - DNA, 588 bp, Homo sapiens
ttgctatgagctgagattgtgccattgtactccagcctgggcaataagagcgaaactacgtctcaaaaaaaaaaaaaaaaaaaaagcttaccatactcttaagtctctcttttgtcttctcttccctctcatccaaacctctctctctctctcacacacacaaatgcacacacagcacacacaggcacacacacacacacacaccacatgctgtacatgctgtaaattgagaaactacacccttacttaaatcccagagtgaggcagagtatattttatatggaaggcgggaacaatgttgagcacctatgtgccatacactattccaggaactttcctcatactaatcctgcggtgtattcctmatacaccaattttagagatgaggctcagagaagttacatagttttttcaagtcacatcactagccagtgttgatacagtgaaaactgaaacccatgtctgacacactaaatctaggttctatccaccctgtcatgctacacaaagtaatccagggtttgatcagaaaaaatacagcagacaaatcttttcccctctcccttccacatatgatatatggtctgc

SEQ ID NO: 314360 - DNA, 533 bp, Homo sapiens
aaaaactgttcaggaaagtatataaaacataaaaacacttagggtcaagctaaagagatctcaacttaaaaatgagtattgtcatgtaataaaaccacacactaaaattctggctcagtatttaccaaatcttaaactcagccactagatatgaaacaatgaaccctttttcataccttttgaataattgatttgttggcttatcccaattgagaaatgctggcaccggtaaatataagaaagcaaaaaccaaaaccatgatatttrcaagagcatacactttaattggctataataatgccaaattgtgataacgcctttatgaatctgccactcattaggtcaaagaaatgaagtattcaagattagcgtttgttttcttctaataagctaaggctctttaagtatctggattaggaaaaagaataaagtaagcaaagaaatgaactctggatctgccccactgatattcctttctcactttgtccctgccccaaggtctgaaaaattaatagatatagcagagaaagcat

SEQ ID NO: 314361 - DNA, 607 bp, Homo sapiens
gggaaaatggcaaaatataattatttartgactttgagcattgctccgtgactgtctgttcataattcagcttatgtctctcgtacccatatggggaaaaattgggtatgatgccatttatttaaacattgtgtggactgcaatgtgttctattctaattcacatagtttctttgagtttatatgtggaggtatgcataggatgggcaataagcttactttgaggtatgggaaatcaggtattttgcttttaaacaatggtctgtgagaatatactctctggagtgggataatgggtagtactacttaaatctactctgacccaaaagttttaaacacagaaaaagtgtgaggagaaaagggagagagggagaagaataagaggcaaaaacaggagaaacactagcagcagggaaactataaacagaaaggactgacctatccttcataaatgagaactacaagtggttttggtaggatgaaggaggataacataaaggatttaaaaaaaaaacagctcaaagcaactgtgtggtggagcaagcatatatcagcttgcaaagctaactgtgtgcatttctttccatctctcccttctgaggtatcat

SEQ ID NO: 314362 - DNA, 607 bp, Homo sapiens
gggaaaatggcaaaatataattatttaatgactttgagcattgctccgtgactgtctgttcataattcagcttatgtctctcrtacccatatggggaaaaattgggtatgatgccatttatttaaacattgtgtggactgcaatgtgttctattctaattcacatagtttctttgagtttatatgtggaggtatgcataggatgggcaataagcttactttgaggtatgggaaatcaggtattttgcttttaaacaatggtctgtgagaatatactctctggagtgggataatgggtagtactacttaaatctactctgacccaaaagttttaaacacagaaaaagtgtgaggagaaaagggagagagggagaagaataagaggcaaaaacaggagaaacactagcagcagggaaactataaacagaaaggactgacctatccttcataaatgagaactacaagtggttttggtaggatgaaggaggataacataaaggatttaaaaaaaaaacagctcaaagcaactgtgtggtggagcaagcatatatcagcttgcaaagctaactgtgtgcatttctttccatctctcccttctgaggtatcat

SEQ ID NO: 314363 - DNA, 607 bp, Homo sapiens
gggaaaatggcaaaatataattatttaatgactttgagcattgctccgtgactgtctgttcataattcagcttatgtctctcgtacccatatggggaaaaattgggtatgatgccatttatttaaacattgtgtggactgcaatgtgttctattctaattcacatagtttctttgagtttatatgtggaggtatgcataggatgggcaataagcttactttgaggtatgggaaatcaggtattttgcttttaaacaatggtctgtgagaatatactctctggagtgggataatgggtagtactacttaaatctactctgacccaaaagttttaaacacakaaaaagtgtgaggagaaaagggagagagggagaagaataagaggcaaaaacaggagaaacactagcagcagggaaactataaacagaaaggactgacctatccttcataaatgagaactacaagtggttttggtaggatgaaggaggataacataaaggatttaaaaaaaaaacagctcaaagcaactgtgtggtggagcaagcatatatcagcttgcaaagctaactgtgtgcatttctttccatctctcccttctgaggtatcat

SEQ ID NO: 314364 - DNA, 543 bp, Homo sapiens
  misc_feature (1)...(543): n = A,T,C or G
tagtggtnntggtttacctctagagattatttacaataggtacacatatgaaattctttatgaatgaatcacattcttactctttagatccatttctatttattttgctcactcagtaaaatatcttttagaaaataattttaggacttaccccctaatcaacataattttaatcaatttcmtcatattttttcattactacatggttaatttattaaacactatcatagtcaaagttatagggataattgcatttgcattaaataatgttaaggaaattatacaattagaactatgttaagctttatttttagtgcattagagagtcagcgtgctttaactatcacaagtagttggtttcatccatctcttttattttccctgattcactattagagaacaaattttatgtgtccttgctgaaacgcctgcagaagaaattaaccatggcatgtatcacagacagctttaatgttttctgacatttacccactattgttgggaaattcctgtatttctatacataatttagttatgttaata

SEQ ID NO: 314365 - DNA, 537 bp, Homo sapiens
aaaatgaggaccacagaaacacaagtcatagaaatatgagtcatatgttcccattctacagaaaacatgagcattacatttggaagatataatacaaacctaaaactgttcatacaatatcattattgtatgcttaacaaataaagtcagtcccctgacacaaacctataattgacctcaaattcctgggctcaagcaatccttctgcctcggcctcccaagtagctgggactagaagcacataccatcatgcacatagttcaaactatatttttaaattttcattctgatttattctttgacgtatacattacatagaagtgcactgtattgtggttagagaattgtttcttaaggaaaytgagattccagtttaattgtgccaattgtgttaagagaaatatattgcaaattttaaggctttatcacattcttcctaagacttttagactatatgtttccaagttttgtggttagttgcatcaaggttcgtggttattacaccttatttatgcagtggaattttattaatatgaa

SEQ ID NO: 314366 - DNA, 625 bp, Homo sapiens
atctattttgtctagtttggtgtactaatactttttagctctttaggtattgtattataatttttaaacattttgctaaatgagcctttttctattctgtaatttgcaatttctctgtgtcagcagtgtatgatggaattttttagtttagcaatctgaagtttgagatatttaatagaaaaataagtacattgatgtttagttttgctattgatgttttgtcataattctatcttattttgttttctactttcaatttatttttgttttctttcttgatatctttctgatcacatttgatatrctagaatatttgttttgctagaatattatatacttttagtagtatataagataaaaataaatttttttattatagatatttagtccagtgatgagtcctaagtaatatgcatatttacaattattattttttatgaatggctaaaaccaattgatatatatacacccttactttgattccttcttcccatttggctggagcttaccttttcataagtacttcaaaaatgtcataaatgttctcagttcttacttaaggattaatatcattgttttgtgattctaaattcaaatttattttctgtcagaacattgaaaatat

SEQ ID NO: 314367 - DNA, 597 bp, Homo sapiens
gatttcttcacatccttgacatttgtaattttttgtttatttgttgttgatatatatatacatacatatatatatatataaaatggccatgtaaatgggtgtgaggtggtatcttattatagttttaatttgcattaccctaattacctctgatgttgagcatcttttcatgtgtttattggccattcctatatcttctttgaagaaatatctcctcaggtcttttgccaatattttcattgggttgtttgtttgttgttgttgttgttgaggctggaaactttttacctctgtttttctgcaagggtagaattcttctttacctttgcttgtttttgtacttgatatggtttggctgtatccccacccaaatctcaaattgtagcccccataattcccacgtgttgtgggagggacccygtggcaggtaattgaatcatgaaggcgagtctttcctgtgctgttcttataatagtgaataagtctgagaggtctgatggttttacaaaggggagttctgctgcacatgctctgtctcttgtctgctgccaagtaagatgtgacttttctcctcctttgccttccgccatgatggtg

SEQ ID NO: 314368 - DNA, 535 bp, Homo sapiens
cccaactgacttctagctttacttacagcaatgggtttatagaagatcggaaattaggactcctggttgcctctaaatgagtatatgcaatatattatttctctttaacagtcttttagcatccatctaggaaagaaatagttggagtataagaaaatctggatagatttaagtatcaaagtaagattaagactaatagaaaagtcctttaaactttttcaaaagattttaaaaatgcatgcactctgataagattggtgacttcattttttgcatattcctatggcawctaaatgtcttaaagtggatttttgaaaatattttggatagaacttgcttgagaaactgagaaaaaaatcagtttttcttgactcagcattttagttctacagtttgtaaaactcaaacgataaatgttgcataaatagtcacacttcatttaaaaatgattaaagctatagttaaaagtactgcgtgtttactttgcgtaaaccaaactaattaacaggacataatttgttctctagttaaaagt

SEQ ID NO: 314369 - DNA, 535 bp, Homo sapiens
cccaactgacttctagctttacttacagcaatgggtttatagaagatcggaaattaggactcctggttgcctctaaatgagtatatgcaatatattatttctctttaacagtcttttagcatccatctaggaaagaaatagttggagtataagaaaatctggatagatttaagtatcaaagtaagattaagactaatagaaaagtcctttaaactttttcaaaagattttaaaaatgcatgcactctgataagattggtgacttcattttttgcatattcctatggcatctaaatgtcttaaagtggatttttgaaaatattttggatagaacttgcttgagaaactgagaaaaaaatcagtttttcttgactcagcattttagttctacagtttgtaaaactcaaacgataaatgttgcataaatagtcacacttcatttaaaaatgattaaagctatagttaaaagtactgcgtgtttactttgcgtaaaccaaactarttaacaggacataatttgttctctagttaaaagt

SEQ ID NO: 314370 - DNA, 526 bp, Homo sapiens
gaaagaaatagttggagtataagaaaatctggatagatttaagtatcaaagtaagattaagactaatagaaaagtcctttaaactttttcaaaagattttaaaaatgcatgcactctgataagattggtgacttcattttttgcatattcctatggcatctaaatgtcttaaagtggatttttgaaaatattttggatagaacttgcttgagaaactgagaaaaaaatcagtttttcttgactcagcattttagttctacagtttgtaaaactcaaacgataaatgttgcataaatagtcacacttcatttaaaaatgattaaagctatagttaaaagtactgcgtgtttactttgcgtaaaccaaactaattaacaggacataatttgttctctagttaaaagtactgtgtgtttactttgtgtaaactcggctaataagcagtaagcgacttgcaaattttctctagaagatgctgataaatgctraagaaaaccatttaacttaatcttcatatatcacttgt

SEQ ID NO: 314371 - DNA, 571 bp, Homo sapiens
ttttttccttctgttcccatcaaaacaaatcaactatctatcatgtttctcttgttgaaaaaagagttaactaagcatggattttaattgtctacggtctcttaacactattttttttaattccatcccacaccttttgatttcaaattgcttctttgttttgtcacaggaatgatctctggattctggcagaatttcacatggagacatgcatcacatatattttataagataacagaaaagacagtgattcagagatttagagacatgtacacatggcacaaccagcaatcacattccactatgtaaatccataaaaggaaatagggagcagatatgtactattaacatggatttttwaaaaatattttggaagaactataggtgtttcgtggttacaccggtattttacacactgaaattgatataatcctcatcacaaagataatatattgttcgtagagtacattttaaaagtctgatgaattacataactcaaattcataaacttcacaaatttggaatctttataaggctatatataccctggcggtgaaaaacagtcccgtgt

SEQ ID NO: 314372 - DNA, 558 bp, Homo sapiens
ttttcttaaaaataaaaataaataacttctgtagtttttgtcatctctacyattctcccactgtcttctttctctgatactctttaatctggtttcttatttttgacggtgatttttcactctgaagtttttaaaatgaatcttttaaactgaagcttgtaattttccatcatttgacttgctttaatcacaattgtacatggcccacattaattttctccttatagatttgacctgtttttcctcagctatcatacgaacaaggtggcatttctgaatgtccatgaatggaaaaaaattccactcagtttctcttctcatctttcccatccattattgttactcccttcaagcaagcaaatcaggggcaacctttgatcatttttctttcatcttatttggctaaaaatttacttttcccttcaagaaacttctataatttatccctttttccctgaagctattactagaaaaatttcacccatattttaatattaccattttggttcttgcaaattcccttctcatgctatcctatcaaacttcagtgtggacaaa

SEQ ID NO: 314373 - DNA, 496 bp, Homo sapiens
attgagagtccaacattttgaaggggtggagcatgtcccttttttttgttttacctactaagtctaacatagtaccatatattaagtttacaatcatttgttaaatcagtgaataaagagaattataaagtgatgatcaaagagccaatacacttgtgagacagtagaactggaagaaaactgtgggggctggtttgcagactctggtttagtgtcatgtcaatttgaacattaggagctgcttacatgcaagcatgtctctggtaaaatgattatagacatatacactgaaattgtgaaaaatcaagyatattttgattacaatgagacttaggaaacacttgccagcagaaaaatcatttgacgtattttaaaactttaatgtattttttttccattttcaagttttcatgctttgcttaaaagtagtcagactccctacaaagtgtacagtgtttttggtagctatgtccaaggcctttgctacattgagcaa

SEQ ID NO: 314374 - DNA, 595 bp, Homo sapiens
aataggctcaattaattatatattaagttaaagaaaaccctgcaattttgatagagtttcctgtgtacatagtaagaaagatgataatgtatcaaacataaactgggatatagctttgagtttgataatatcagctgttcctctggttaaacattatttctgatacaagacttaacgagtttaagagccccttatgggaacctcacctagatagccgttaatataaagaggagtcattttctccattctaactacaagcattgtaatctttgaacagacattctattttctttttgatccagtctaacaatgattttcactacaattttttcatataaaatgtaaaatttatatgtaaaatttattcatataattttttatataaatttcacttataaatagctaatgagaaaattatagagaaaattatgaayactcatacctgaataacatagtaaaacttattagatgtacaccaaataatacttgaaagtaaaatttgatcttaagaacaatttattaaaaacttattaaacatctaaaaataataaaaataaatttatgctattaccctagcttacacggtggatcctga

SEQ ID NO: 314375 - DNA, 548 bp, Homo sapiens
ccaaaatcatggcattggcatcttgtgtgggccttcttgctgtatcctcccatggcagaaggtggaaagacaaaaagcatgaactgattctcataagcccttttaatagtggccttaattcatttatgaaagcaagaccctcatgacctatacacttcccaaaaagtcccacctaccaacactcttgcattgagaaataagtttttagggcatgaattttgagggacacatccagaccacataacatataggggcctgaatttcagtcaccagctgagctgttgtggagagctaggccctacaccctgaatccagagtcattgtagctctgcacatgctcctgttcccawctccagctccctggatgcttcacaagcactaaatcttacacatcattaacaacccaaaagcaggaatgcctgcaccccaggcactagtgccatcaccactccagactacagagctatagtccctaagtacatgcccatgttttagacctcagctctgtggctgcaccatgggtgcaactcataagacatttgtaccac

SEQ ID NO: 314376 - DNA, 601 bp, Homo sapiens
aaaatagctaaaaattaccaaaatctgaggatagatattaatatttagatacaggaaggtcaaaggtctctcatcagattcaatgcaaataggactacaacaaggcacatatcaaaccrtcaaaaattaaagacaaaaataggctcctgaaacagcaagagaaaagaatatcacacatgacggaattttaatatcatctcatttatcagcagaaaccgcacaggccaggagagagtaggatggtatattcaaagtcctttaggaagaaacaaaaccagaaaactgttaaccaagaatgctttagctgaaatagctgtgtttcagaaatgaagagctaaagactttcccagaaaaacaaaaaccaaaggaattaggtaaagaacaaactaagctcaaagcccaggaccccacggcttctctgctgagttctactaaacatttaaaaaagaattaataccaattcttctcaaactgttacaggagggaatagtatagccattatgaaaaacagtttggaggctcccccaaaaatcaaaaatagacttaccatatgattcaccaagcccactactgagtatatatccaaatgaatgaacttagt

SEQ ID NO: 314377 - DNA, 601 bp, Homo sapiens
aaaatagctaaaaattaccaaaatctgaggatagatattaatatttagatacaggaaggtcaaaggtctctcatcagattcaatgcaaataggactacaacaaggcacatatcaaaccatcaaaaattaaagacaaaaataggctcctgaaacagcaagagaaaagaatatcacacatgacggaattttaatatcatctcatttatcagcagaaaccgcacaggccaggagagagtaggatggtatattcaaagtcctttaggaagaaacaaaaccagaaaactgttaaccaagaatgctttagctgaaatagctgtgtttcagaaatgaagagctaaagactttcccagaaaaacaaaaaccaaaggaattaggtaaagaacaaactaagctcaaagcccaggaccccayggcttctctgctgagttctactaaacatttaaaaaagaattaataccaattcttctcaaactgttacaggagggaatagtatagccattatgaaaaacagtttggaggctcccccaaaaatcaaaaatagacttaccatatgattcaccaagcccactactgagtatatatccaaatgaatgaacttagt

SEQ ID NO: 314378 - DNA, 591 bp, Homo sapiens
ctctatgctatatatatgttatcacataaaatacatctttacctagaattctattaaatatctctaaaatttaatgacattctttgatagacaactgagtataccacataacttgaaaaaagaagcagaaatttaaaaaagtttcaacaagtaatttcacaacatgatgtcttagtatggtgctatgaaattagaaaatagaaagactggcagcaagatgaaatattttaagatttactaataatatttaataagatcctygaatttcatgtatcttcattaatttaatagtatttgtttctaagtatgttttttaaaaagagtctcaactatctctgctatgcaactgaataggacaactgtaaagacagactagtatttaggaagtagtatgttgttatctcaaatatcatcagcagtgataatgctgttggtcatatgattttatgaaactaaaaactctgaaaattcagaaccaaacaagtgcaaaggaatgttgatttgcacagcagtcacattcctgaaaattttacaatatatcagaaaacaaattgttaaccttactggaattaactccagtaggacagtcga

SEQ ID NO: 314379 - DNA, 530 bp, Homo sapiens
gaaaaaccccactagcaacttactattttcctcaaaataaaagccattatattttaagacctgtaggattggccccttccctcaccactttgacctcatcttacaccattctctctacctaatttattcctcttcagctacactggctactttgctgttccttgatcatgctgaatatgctcctgcctcaaggcctgtgcactagctgttcccattttttggactaattccttcagatgactttgtggctagctctctcatttcctgcaggcctttactcaaatacaagttcatcagttttttttcactaccttatgtaagaaaccaaacacygcatgttctcactcataggtgggaattgaacaatgagaacacatggacacaggaaggggaacatcacactctggggactgttgtggggtgggggtaggggtgagggatagcattaggagatatgcctaatgctaaatgacgagttaatgggtgcagcacaccagcatggcacatgtatacatatgtaactaatctgc

SEQ ID NO: 314380 - DNA, 486 bp, Homo sapiens
tgagggcaatacaatttctcagttcccaagaggtgaagattatacaaaatatatactttttgtaatgttttatgtaagtttctatacatatataaaggatgtttaatttttatcccagagtacatrttcaacaaataaatcttcctgttggcttgagagaaagaaagagaaagagagaggagagagagagagacagagagagagagagagagaactcccttaaagtgatagagaatcatgaatcctgtggtctttgttgcagatgtttttaaaaagctcgtgcctaaaaaagataaacaatatctctaacaaaacaaaaatttattttttctaggtatactatgtatcacattgctcttaaatatatcttttataaatttcttgtgtaaaaaataacaagaaaatcaggttttcattttcagagaaataaaaaatttattaaaatttcaatttctattgcgtgaataagtttttttttcatttttt

SEQ ID NO: 314381 - DNA, 486 bp, Homo sapiens
tgagggcaatacaatttctcagttcccaagaggtgaagattatacaaaatatatactttttgtaatgttttatgtaagtttctatacatatataaaggatgtttaatttttatcccagagtacatattcaacaaataaatcttcctgttggcttgagagaaagaaagagaaagagagagragagagagagagacagagagagagagagagagaactcccttaaagtgatagagaatcatgaatcctgtggtctttgttgcagatgtttttaaaaagctcgtgcctaaaaaagataaacaatatctctaacaaaacaaaaatttattttttctaggtatactatgtatcacattgctcttaaatatatcttttataaatttcttgtgtaaaaaataacaagaaaatcaggttttcattttcagagaaataaaaaatttattaaaatttcaatttctattgcgtgaataagtttttttttcatttttt

SEQ ID NO: 314382 - DNA, 486 bp, Homo sapiens
tgagggcaatacaatttctcagttcccaagaggtgaagattatacaaaatatatactttttgtaatgttttatgtaagtttctatacatatataaaggatgtttaatttttatcccagagtacatattcaacaaataaatcttcctgttggcttgagagaaagaaagagaaagagagaggrgagagagagagacagagagagagagagagagaactcccttaaagtgatagagaatcatgaatcctgtggtctttgttgcagatgtttttaaaaagctcgtgcctaaaaaagataaacaatatctctaacaaaacaaaaatttattttttctaggtatactatgtatcacattgctcttaaatatatcttttataaatttcttgtgtaaaaaataacaagaaaatcaggttttcattttcagagaaataaaaaatttattaaaatttcaatttctattgcgtgaataagtttttttttcatttttt

SEQ ID NO: 314383 - DNA, 525 bp, Homo sapiens
tatacatatataaaggatgtttaatttttatcccagagtacatattcaacaaataaatcttcctgttggcttgagagaaagaaagagaaagagagaggagagagagagagacagagagagagagagagagaactcccttaaagtgatagagaatcatgaatcctgtggtctttgttgcagatgtttttaaaaagctcgtgcctaaaaaagataaacaatatctctaacaaaacaaaaatttattttttctaggtayactatgtatcacattgctcttaaatatatcttttataaatttcttgtgtaaaaaataacaagaaaatcaggttttcattttcagagaaataaaaaatttattaaaatttcaatttctattgcgtgaataagtttttttttcattttttccaagcaaacacaaaataactatatatttacattgtgggtatgttcaacattttttgtatcctttattctcctaagcagaatagtctagggcatacatttttctcagatttttcaagtcac

SEQ ID NO: 314384 - DNA, 525 bp, Homo sapiens
tatacatatataaaggatgtttaatttttatcccagagtacatattcaacaaataaatcttcctgttggcttgagagaaagaaagagaaagagagaggagagagagagagacagagagagagagagagagaactcccttaaagtgatagagaatcatgaatcctgtggtctttgttgcagatgtttttaaaaagctcgtgcctaaaaaagataaacaatatctctaacaaaacaaaaatttattttttctaggtatactatgtatcacattgctcttaaatatatcttttataaatttcttgtgtaaaaaataacaagaaaatcaggttttcattttcagagaaataaaaaatttattaaaatttcaatttctattgcgtgaataagtttttttttcattttttccaagcaaacacaaaataactatatatttacwttgtgggtatgttcaacattttttgtatcctttattctcctaagcagaatagtctagggcatacatttttctcagatttttcaagtcac

SEQ ID NO: 314385 - DNA, 525 bp, Homo sapiens
tatacatatataaaggatgtttaatttttatcccagagtacatattcaacaaataaatcttcctgttggcttgagagaaagaaagagaaagagagaggagagagagagagacagagagagagagagagagaactcccttaaagtgatagagaatcatgaatcctgtggtctttgttgcagatgtttttaaaaagctcgtgcctaaaaaagataaacaatatctctaacaaaacaaaaatttattttttctaggtatactatgtatcacattgctcttaaatatatcttttataaatttcttgtgtaaaaaataacaagaaaatcaggttttcattttcagagaaataaaaaatttattaaaatttcaatttctattgcgtgaataagtttttttttcattttttccaagcaaacacaaaataactatatatttacattgtgggtatgttcaayattttttgtatcctttattctcctaagcagaatagtctagggcatacatttttctcagatttttcaagtcac

SEQ ID NO: 314386 - DNA, 577 bp, Homo sapiens
tcggtacaaaacactgttgccctcacaagatttaaaataagatgtgttttaagttagatacccttgaccaactaattcctacctgaaggagtggctatgacatggctctgaattttctaccaacaggagaactaaattgcttttaaggtagagttcagagaaggaaagtgtagttctcaaagcttactgttttccaaataacagaggcccaattcaaataagttaaagcaaaaccaacttctcttttctgacataactgaaataaacgcagggttccaggtgctcaaattatgtcactgatattcttctcccctcccttaattatgatttcctgcatgtagcttcactctcatgaagaaaagctgttccattattgtgacacgtctactagcaactccatgctgacatttccacaattccaccccatgaaaacaaagtgtgggcccctttcactcaataatttcagcagaggtaagccacatatgtatcagtgacctcttcattgtttccagagagataaaatatgctgacggstgaatttgtgccgcatgtccattcctgcagtcggggctggaga

SEQ ID NO: 314387 - DNA, 533 bp, Homo sapiens
atgaagaaaagctgttccattattgtgacacgtctactagcaactccatgctgacatttccacaattccaccccatgaaaacaaagtgtgggcccctttcactcaataatttcagcagaggtaagccacatatgtatcagtgacctcttcattgtttccagagagataaaatatgctgacggctgaatttgtgccgcatgtccattcctgcagtcggggctggagaagatactttagaaagaatggggcatagcgtcatgccaacctaaatgataaggactaagtgtggaaaagagatagtttgcaaagaagaccaaggggaaatgggcaggtgaaaaccatcatatgtccactactttcctttaacattgcttcacatttagaaagagcagasattttttaaaaaaaaaggattggaaagagaatagtaaaagaaaaatgatgagagagaaaacctagattttctatataatgggcaggagttgtcggggaaaatagggtgatactagttcagcaacaagaagagagggaga

SEQ ID NO: 314388 - DNA, 533 bp, Homo sapiens
atgaagaaaagctgttccattattgtgacacgtctactagcaactccatgctgacatttccacaattccaccccatgaaaacaaagtgtgggcccctttcactcaataatttcagcagaggtaagccacatatgtatcagtgacctcttcattgtttccagagagataaaatatgctgacggctgaatttgtgccgcatgtccattcctgcagtcggggctggagaagatactttagaaagaatggggcatagcgtcatgccaacctaaatgataaggactaagtgtggaaaagagatagtttgcaaagaagaccaaggggaaatgggcaggtgaaaaccatcatatgtccactactttcctttaacattgcttcacatttagaaagagcagagattttttaaaaraaaaggattggaaagagaatagtaaaagaaaaatgatgagagagaaaacctagattttctatataatgggcaggagttgtcggggaaaatagggtgatactagttcagcaacaagaagagagggaga

SEQ ID NO: 314389 - DNA, 351 bp, Homo sapiens
ccatttcaatgcaatcttaccttaaatagttatattggtgacaaccttatttccagataaggtcatattctaagataatggggattgaaactttggcatgtctttttgaggggatgcaattccattcataacaagcagaaaagaaaaggtatgttttgttacagagtctgggtcaaaatctaaatgtagaatgtgtgtcagacccctattgacttaccatattagagaagccaaagaagagatctggagccagtgaamaagacaaactgtttattgagggacttacatatagggcagtccattggcagcaggctgggcaagagaactgctaccatttataaaaagcatgca

SEQ ID NO: 314390 - DNA, 596 bp, Homo sapiens
tgcatatttcagccaaggtttttataatttcttaaaatatatagtcytaaaccacatacaaaactcgagtctttcttctttcctaaagattgttcaaacttagactgacaatatctagacttccctgtaacaaagcgaccctcttctttgtccccatgtaaggtaatgcctcatttctcaatcatctccacaggcttatgttgggcaaaaacatagtgcaactaaaaaggtcaatgtatgtgatatgtcatttttggtgcttatgtatcttcgaagtatgggtaaaacttgtgagactcatcaaggtgataagtagaatggccatcttttcctcatattctggacctcaaactgttctcagtttaagttctaattctgttgtaagtattgttctatagaaggctaaagccaagtgataatttatttcataagaaactcataagaataaagactttatagagcaatagtgtatgctaatcattttttctggaatttttcacattctgatacaaagcaagtattaaggagagttgctacacagtttgttgagttaaaactaatctatactttgtattcaattccccaagcattagatc

SEQ ID NO: 314391 - DNA, 513 bp, Homo sapiens
agaatattttactaatgtaaagtagcttttagctgttttctgatatgagacattgtggaaaggtgtttggggagaacattttctagaagtcctatggaataatgaactcagtaataagcctgatgaaactttatcccaataactaaatgtgaatttgatactaatgtatatagactcataaaagagcagacaaagcaacaggaaaattgaattttaagtctctctgaattttgacaaccaacataaacatgatgccaaatatttcatcaaaacrtatgtttactttgtgaaatcaataacagttgttaaaaatatttaaaacaaagaggggggtgtaggagaggaaaacaagagaaggaagaggaggaggaaaagaaagagtaggagaataaatcaaaatgaaattatgagtgagagttctaagagagttttcctaatagaagctcctattgtattgctaagagaattttaataatagaagcccctgtcatgttattttagtcacatgttcca

SEQ ID NO: 314392 - DNA, 599 bp, Homo sapiens
ggagtattaaacttacatgatcacaagatcccataataggccatctgcaagctgtggagcaaagaagccagtccaagtcccaaagctgaagaacttagagtctgatgtttgagggtaggaagcttccagcatgggagaagaatgtaggctgggaagctaagccagtctatccttttcatgtttttctgcctgttttatatcctggccacgctgacaactaattagattgtgcccacccagattaagggtgggtctgctttcccagtccactgactcaaatgttaatctcctttggcaacaccttcacagatatatccaggatcgatactttgcatccttcaatccaatcaagtcagcactcagtattaaccatcacaacrcccaacacataataagatactaaaaaaaaatctatagatggaattaatagctcagtgaatttggtgataactagctgagaagttaaagttggagatctaaggactgggtgtattctttgaagaactgtataaatagaaaggataattttgctattgaataaggtgcccttttttagcaagacaactatagttgaagcatttgaattgaagaaatataaa

SEQ ID NO: 314393 - DNA, 560 bp, Homo sapiens
tctccattatatttcccattatctgatgactgaataggttacttatcactttccagtagaacataacctctatgaaggcagaaaaaaaaaaaagctttaatgttttgtttgctattgtctccccttggccttacttggtgtcttatgtaccataaacacccattaaataaataattgagttaggcattactaatagccgcattttagtagctgaattttagaggagaggaaacrgaattaattagttagatagtaagttaggtcagtaaggaaccttcctaaggtcttacaactagtctgttacagagctagctatgtcttgattctagaacccacattttttaccattttgcagacactactccatcaaggtgaggagcaggcatgacatttggaatcaggcagagctgagttcaaatgacgattttcctacttattttctgtatgatttaaaacaagtttcttaacctctacactttatttttcttagctaaaaatagaatagcaattaaacctacttctttgggtttctgtgaagaccaagtcagctagagcttgtc

SEQ ID NO: 314394 - DNA, 560 bp, Homo sapiens
tctccattatatttcccattatctgatgactgaataggttacttatcactttccagtagaacataacctctatgaaggcagaaaaaaaaaaaagctttaatgttttgtttgctattgtctccccttggccttacttggtgtcttatgtaccataaacacccattaaataaataattgagttaggcattactaatagccgcattttagtagctgaattttagaggagaggaaacagaattaattagttagatagtaagttaggtcagtaaggaaccttcctaaggtcttacaactagtctgttacagagctagctatgtcttgattctagaacccacattttttaccattttgcagacactactccatcaaggtgaggagcaggcatgacatttggaatcaggcagagctgagttcaaatgacgattttcctacttawtttctgtatgatttaaaacaagtttcttaacctctacactttatttttcttagctaaaaatagaatagcaattaaacctacttctttgggtttctgtgaagaccaagtcagctagagcttgtc

SEQ ID NO: 314395 - DNA, 582 bp, Homo sapiens
gggtttctgtgaagaccaagtcagctagagcttgtctatcaatcagggattacattttatgtcagcacatttgacataaaattcaaatacagtggtttaaaggagtttatttttctcctataacaagcaagatgagcttatatttatcacagacctaattaattactttcacaagaaaaacagcccaaactgtgcatgtaaccagaaaagcactctttgcttccacaacttctcaattgaagtgataactgcacactccagaagctgttttcaccatcaggcttgggatctcatgcaagctccccaaaagaggcattcagttcacatcctgccctttctataaatgattttatctacttccatggtattactggctgatgacctttaaaccaatgacattgaccttgtttcaagcactagtctcctatcaacaactgcctatgcaatccttctctcagaatgtcccctgagacttagaattaccatgtcccaatccaatgaactgaytatttgccccctactctcaccttccccaccaacgaatcctgcttttctctgttaatagcatcatccatcctcagt

SEQ ID NO: 314396 - DNA, 582 bp, Homo sapiens
gggtttctgtgaagaccaagtcagctagagcttgtctatcaatcagggattacattttatgtcagcacatttgacataaaattcaaatacagtggtttaaaggagtttatttttctcctataacaagcaagatgagcttatatttatcacagacctaattaattactttcacaagaaaaacagcccaaactgtgcatgtaaccagaaaagcactctttgcttccacaacttctcaattgaagtgataactgcacactccagaagctgttttcaccatcaggcttgggatctcatgcaagctccccaaaagaggcattcagttcacatcctgccctttctataaatgattttatctacttccatggtattactggctgatgacctttaaaccaatgacattgaccttgtttcaagcactagtctcctatcaacaactgcctatgcaatccttctctcagaatgtcccctgagacttagaattaccatgtcccaatccaatgaactgactatttgccccctactctcaccttccccaccaacgmatcctgcttttctctgttaatagcatcatccatcctcagt

SEQ ID NO: 314397 - DNA, 570 bp, Homo sapiens
tcaaagatggcagattagagctaaaggtcacgctcttcttttgaaaaaagggtctgcttatgtaccatagttaaaagggattatcaaaataaatttaccttgcaaggatgtgtgagaacccacctgaattaaatatttaaattaagatattaaaatatttaaatttggaccaggacagataaaaagacactaattttattattattgacaatttagcatttttgttcaatgtactttaactaacatttgttgagtactggactggccacctcagtggccatgaagataagtaaaacacaattcctcayttcaagctaatttccacagcagctagaatacaaccagattattttaagtatcgtaagaaatatatttacaatatgctatgtatattttaaggaggaagagtgaaaattcaattaggaaattagaacctactttatcaaggatacagcacttgggatgaatcttgaagaaatcctgaatatagttcatagaaagagaagggaaagagccatgacactaaatcaggatggaaaaaaatgcaatgacactgttttttttttttga

SEQ ID NO: 314398 - DNA, 461 bp, Homo sapiens
aatttaccttgcaaggatgtgtgagaacccacctgaattaaatatttaaattaagatattaaaatatttaaatttggaccaggacagataaaaagacactaattttattattattgacaatttagcatttttgttcaatgtactttaactaacatttgttgagtactggactggccacctcagtggccatgaagataagtaaaacacaattcctcacttcaagctaatttccacagcagctagaatacaaccagattattttaagtatcrtaagaaatatatttacaatatgctatgtatattttaaggaggaagagtgaaaattcaattaggaaattagaacctactttatcaaggatacagcacttgggatgaatcttgaagaaatcctgaatatagttcatagaaagagaagggaaagagccatgacactaaatcaggatggaaaaaaatgcaatgac

SEQ ID NO: 314399 - DNA, 570 bp, Homo sapiens
tcaaagatggcagattagagctaaaggtcacgctcttcttttgaaaaaagggtctgcttatgtaccatagttaaaagggattatcaaaataaatttaccttgcaaggatgtgtgagaacccacctgaattaaatatttaaattaagatattaaaatatttaaatttggaccaggacagataaaaagacactaattttattattattgacaatttagcatttttgttcaatgtactttaactaacatttgttgagtactggactggccacctcagtggccatgaagataagtaaaacacaattcctcacttcaagctaatttccacagcagctagaatacaaccagattattttaagtatcgtaagaaatatatttacaawatgctatgtatattttaaggaggaagagtgaaaattcaattaggaaattagaacctactttatcaaggatacagcacttgggatgaatcttgaagaaatcctgaatatagttcatagaaagagaagggaaagagccatgacactaaatcaggatggaaaaaaatgcaatgacactgttttttttttttga

SEQ ID NO: 314400 - DNA, 616 bp, Homo sapiens
ttgttaaggaccatcaagataggtctagggaccactgcaatgggattttagtcaagcataggcaagtgggaatttatagccagggagaagggtgggagttaatggatgaaaaattcctgagaagaaacatcaggggtgaggaggattctgggtaaaccaacctaacaggattcttgctgaaaacaggccagaaagatgagatattacctgagggatggtaaaggatgagaaactctatgaaatattaagcgtggaccattttggctaaactgacttagcagacttcttactacaactggattttataggaagggcacagatgagcctagaaggtttaaggaacctgactaaaatttgatcaagcatagaacctttctaaatatatttagagaatagcaagtcaactagtcctacaaagaygcaggagactaggttacatgaagcttctattaatgatttacttcttactttcatatgtctcaaaaccacacaatgtcccctccttcaaacagatccacccattaacacatgaactaaaaatatgaaattatgtaaagatttagtgggtagatgcagaagagtcttcatagcacacaagtcagagaagtgatcaaat

SEQ ID NO: 314401 - DNA, 511 bp, Homo sapiens
ggaacaataagtcagcttatgtgtatccagtaataataactttctattatcttaaaagactgagggtattcattatggttaattactaattttatattcagacctatacattgtgtttctcttggctcttttcaaagcagtctcctaaattttcaaagtatgctcaaaattcttaacacttgaaattgctggagaccsagttaatgaattgtaatttaccttagggtgggtatccactcaattacatcttagttcttcctttctctgatgattccaccttataaatcctcacagcccagttgtgacctagcttgaccacaaagaaattctctgctgaagcttgcaatgaaataatttgaaatcctacatcaattttctatttgaacatcttctgctttgttacgttttgctttgttgtaagagatgtgttccctttatttcaggcagtttctatttatacccattgcttcagtggcaagttgatggaccaacaaacttctggtcgtataac

SEQ ID NO: 314402 - DNA, 584 bp, Homo sapiens
ggagtaattctgtgttttcccagtcatgaacccatggattaaaacaacttgtaaggcatgatgaagtataagaatgttatgactgcaggttaaatgcataagttctttaggttcttaagctagccttgaaagccccaaaggctgaggaaatcgatgtattaccactcatgcgatctctagcacacgagtatcagaaagcttttacctagagcatgctactggttaggcaaagcttgatttgttttgatgaacatttctcacatttatttggttcagatcaggatcgtataacttgaataataattacagagcaaattttcttgctgccaaatcataacaaagttcttaagtagacaaactgatcccctggaaagttgaatagtggcataattatccaattgctctcaggggtattttaaaactgtttgagaagctgcatggtaaaatacttttaaagacttgaatatttggccacaagcaccataatggagcrcacaaagaatctcaatgtgattgtttcattttgttggctagaagtgttagaagggaaatttggttccagttgttccctaggaaaaattagt

SEQ ID NO: 314403 - DNA, 584 bp, Homo sapiens
ggagtaattctgtgttttcccagtcatgaacccatggattaaaacaacttgtaaggcatgatgaagtataagaatgttatgactgcaggttaaatgcataagttctttaggttcttaagctagccttgaaagccccaaaggctgaggaaatcgatgtattaccactcatgcgatctctagcacacgagtatcagaaagcttttacctagagcatgctactggttaggcaaagcttgatttgttttgatgaacatttctcacatttatttggttcagatcaggatcgtataacttgaataataattacagagcaaattttcttgctgccaaatcataacaaagttcttaagtagacaaactgatcccctggaaagttgaatagtggcataattatccaattgctctcaggggtattttaaaactgtttgagaagctgcatggtaaaatacttttaaagacttgaatatttggccacaagcaccataatggagcgcacaaagaatctcaatgtgattgtttcattttgttggctagaagtgttasaagggaaatttggttccagttgttccctaggaaaaattagt

SEQ ID NO: 314404 - DNA, 635 bp, Homo sapiens
tgttcatttataaagttagaaatttttttctttttcttccactggtagtcatctattgtgccttcattttattcctagcgcccttttctcagtctaaagtcagctccttgatctgtcatggcactaggaaactctctggcctgtttcctgtctctcccagctagattcctaactgttggatrtgagatctgggttgtatacttctgtatcccaaggtgaagaacatggcatggcacacaaatatttatccttcagtaaatacatggtgaagaaaggaatgaaaattagttatcattagtttgtacttagagtaaaaactgaattctctttttttgtattctactgcccagcaaatcttacttaaacattgatttaattatctactcatttgaaaaattaaatcccttctattattattctgctgcacaaaataaatatgtatgtttgtgcacatctatgtacacatatacatatatatacatacacacatacatatgtatgtatatattcatctctttatgattttgtcctcattgcacttagccaacttaattttccactgccttcaatatgaaacttccttttttaaaaaaaaaaaaaaaacactggtctccccactgtccagagaatacatc

SEQ ID NO: 314405 - DNA, 635 bp, Homo sapiens
tgttcatttataaagttagaaatttttttctttttcttccactggtagtcatctattgtgccttcattttattcctagcgcccttttctcagtctaaagtcagctccttgatctgtcatggcactaggaaactctctggcctgtttcctgtctctcccagctagattcctaactgttggatatgagatctgggttgtatacttctgtatcccaaggtgaagaacatggcatggcacacaaatatttatccttcagtaaatacatggtgaagaaaggaatgaaaattagttatcattagtttrtacttagagtaaaaactgaattctctttttttgtattctactgcccagcaaatcttacttaaacattgatttaattatctactcatttgaaaaattaaatcccttctattattattctgctgcacaaaataaatatgtatgtttgtgcacatctatgtacacatatacatatatatacatacacacatacatatgtatgtatatattcatctctttatgattttgtcctcattgcacttagccaacttaattttccactgccttcaatatgaaacttccttttttaaaaaaaaaaaaaaaacactggtctccccactgtccagagaatacatc

SEQ ID NO: 314406 - DNA, 565 bp, Homo sapiens
accaacatacagatatttaataaataaacattttcagtcattagtgttctcttaaaattcagatctgtatattgaagtactactggatgtttgtgcataggtacttgattaacatgtacacaaaataatttattatatactatgtcatttcttcatttattcaatctctttctcgtcctttaagatcagaatcttttaactatactgctattcatccrccaggtactcaacaagaaatttccagggatacctttgatttttcaaatttctttttctgtaaccagttgcttcacaaattccatcattctgctttgtgaatcacacttgatcgtattccttctttctcctttactgtgctggttcaggttgtataatgtgtttctctggtgtcaactttcttcctcacttagagtccaaacttcgaagattgcaaagggcccaccctatatcttcagaccttctctgtcctcatccttttaggttaggctacttttgtaggaatatatatacctcattctcaagtaggattcccatgcctttgtttatgcttttctatcctccagtt

SEQ ID NO: 314407 - DNA, 565 bp, Homo sapiens
accaacatacagatatttaataaataaacattttcagtcattagtgttctcttaaaattcagatctgtatattgaagtactactggatgtttgtgcataggtacttgattaacatgtacacaaaataatttattatatactatgtcatttcttcatttattcaatctctttctcgtcctttaagatcagaatcttttaactatactgctattcatccgccaggtactcaacaagaaatttccagggatacctttgatttttcaaatttctttttcygtaaccagttgcttcacaaattccatcattctgctttgtgaatcacacttgatcgtattccttctttctcctttactgtgctggttcaggttgtataatgtgtttctctggtgtcaactttcttcctcacttagagtccaaacttcgaagattgcaaagggcccaccctatatcttcagaccttctctgtcctcatccttttaggttaggctacttttgtaggaatatatatacctcattctcaagtaggattcccatgcctttgtttatgcttttctatcctccagtt

SEQ ID NO: 314408 - DNA, 565 bp, Homo sapiens
accaacatacagatatttaataaataaacattttcagtcattagtgttctcttaaaattcagatctgtatattgaagtactactggatgtttgtgcataggtacttgattaacatgtacacaaaataatttattatatactatgtcatttcttcatttattcaatctctttctcgtcctttaagatcagaatcttttaactatactgctattcatccgccaggtactcaacaagaaatttccagggatacctttgatttttcaaatttctttttctgtaaccagttgcttcacaaattccatcattctgctttgtgaatcacacttgatcrtattccttctttctcctttactgtgctggttcaggttgtataatgtgtttctctggtgtcaactttcttcctcacttagagtccaaacttcgaagattgcaaagggcccaccctatatcttcagaccttctctgtcctcatccttttaggttaggctacttttgtaggaatatatatacctcattctcaagtaggattcccatgcctttgtttatgcttttctatcctccagtt

SEQ ID NO: 314409 - DNA, 625 bp, Homo sapiens
ttcttcctcacttagagtccaaacttcgaagattgcaaagggcccaccctatatcttcagaccttctctgtcctcatccttttaggttaggctacttttgtaggaatatatatacctcattctcaagtaggattcccatgcctttgtttatgcttttctatcctccagttacctctttcaccttttaaaaacataatgtatatctgacttaagatttatctgaaacasgctgggcacagtggctcgcacttgtaatcccagcactttgggaggccaaggtgggtgatcacctgaagtcaggagttcaagaccagcctggccaacatggtgaaactctgtctctactaaaaatacaaaaaaattagccaggcatggtggtgtgcacctgtaatcccagctactcgggaggctgaggcaggagaattgcttgaacccaggaggtggaggttgcagtgagttaagattgtgccactgtactccagcctgggcgacagagccagactccgtatgagaaatacattttttcgaatcccctcatattccaagcattgttcctttcttcttttcatgtttcatattacatcactatattgatatatagctctcatcatattttattatagtc

SEQ ID NO: 314410 - DNA, 625 bp, Homo sapiens
ttcttcctcacttagagtccaaacttcgaagattgcaaagggcccaccctatatcttcagaccttctctgtcctcatccttttaggttaggctacttttgtaggaatatatatacctcattctcaagtaggattcccatgcctttgtttatgcttttctatcctccagttacctctttcaccttttaaaaacataatgtatatctgacttaagatttatctgaaacacgctgggcacagtggctcgcacttgtaatcccagcactttgggaggccaaggtgggtgatcacctgaagtcaggagttcaagaccagcctggccaacatggtgaaactctgtctytactaaaaatacaaaaaaattagccaggcatggtggtgtgcacctgtaatcccagctactcgggaggctgaggcaggagaattgcttgaacccaggaggtggaggttgcagtgagttaagattgtgccactgtactccagcctgggcgacagagccagactccgtatgagaaatacattttttcgaatcccctcatattccaagcattgttcctttcttcttttcatgtttcatattacatcactatattgatatatagctctcatcatattttattatagtc

SEQ ID NO: 314411 - DNA, 625 bp, Homo sapiens
ttcttcctcacttagagtccaaacttcgaagattgcaaagggcccaccctatatcttcagaccttctctgtcctcatccttttaggttaggctacttttgtaggaatatatatacctcattctcaagtaggattcccatgcctttgtttatgcttttctatcctccagttacctctttcaccttttaaaaacataatgtatatctgacttaagatttatctgaaacacgctgggcacagtggctcgcacttgtaatcccagcactttgggaggccaaggtgggtgatcacctgaagtcaggagttcaagaccagcctggccaacatggtgaaactctgtctctactaaaaatacaaaaaaattagccaggcatggtggtgtgcacctgtaatcccagctactcgggaggctgaggcaggagaattgcttgaacccaggaggtggaggttgcagtgagttaagattgtgccactgtactccagcctgggcgacagagccagactccgtatgagaaatacattttttcgaatcccctcatattccaagcattgttcctttcttcttttcatgtttcatattacaycactatattgatatatagctctcatcatattttattatagtc

SEQ ID NO: 314412 - DNA, 642 bp, Homo sapiens
ttgtatacaaagagccagatataaattttgattttggtaaatctttttgttttgtatcagaaaatgacggttataattttagttgttcttcattatatatgtattatgtgtaatataatatctatgtgtaattcacaattatctcaaaactgattttacaaaataatttcaacatcttcaaagattttagagatattgcctttaagcattagaaaaatcaaagtagtgtattctaaaaatcatgcatatttttttcaaattttctgaaatatggcaaaagccctagtagtcatcaggttatgtgatttactgatgtatcttgaaatgtaccagatgaggatgtttagaaaaaaagacagaaaatcttttatagcattgtaattatgctactaaggtttttgctaagtgtaatagtatagcttacaaagcatgagaaaaagctcaattaaataactatgacggcggtctagacttaggmagtccttattttcagtgtttgtcatttaaattacaaaatccagggagttataacaactgggagctttccatttttaaaataaatgcaaagaaagatcaaaatatgagatctagtagagtctctaccatctaagtctcacatattcaagctgtaaataaaaaaaa

SEQ ID NO: 314413 - DNA, 541 bp, Homo sapiens
tatgacggcggtctagacttaggcagtccttattttcagtgtttgtcatttaaattacaaaatccagggagttataacaactgggagctttccatttttaaaataaatgcaaagaaagatcaaaatatgagatctagtagagtctctaccatctragtctcacatattcaagctgtaaataaaaaaaaggaaataaaaaaatcattagagtgacatgaagcacagttattgactccttttcttctgactagaagacttatcatcttctttagatggaatggttttgtgtagcatgctttctaccaaatcctggcatgccttttacttcttatagagaaacaatggaagctatttgtggcttatttctgaacatctaaattttccattatctacaatattctcagacctgtttacttttgataaaaaaaaagctcctctcctctccagctgacacctgagtaagttcctgagagttaggttgtctctttattctggatagaactttctgggggctgccaggggtaaggatttggtgttttcc

SEQ ID NO: 314414 - DNA, 551 bp, Homo sapiens
tataaccatacattctccctcataagtcttggcactgatcttgaaaatgctccagtacagctgtaaattgtacaactgtacagttgtacaattgaacaaactttctttttttaaaaaaaatcagtgagttgttcaactttttcagcttttgtttctcttgttctattctgyaaagattagaaacccgaccattttctagttatagtggggatatctatttggaatctttatcttgggaatcctggtgagccaggtcatgctgccagatgctgtcactacaaaggacaacacagaaagcatactgtgttgctcactcttcaataaacctgtgatgaaaagtctcaaaacgtaagtcaaaagataataaacaatctcattaaaacagacataaggaacaaggggaggcagaaggctcattttcaaggaggagaagttgatgttttatgttctgtgattaaccactggctggtgtttcatacagaaggcagcatttggtgtgccatgggcattcagttttctttgaatcagccaagtgcaaacgtgtgccagtg

SEQ ID NO: 314415 - DNA, 551 bp, Homo sapiens
tataaccatacattctccctcataagtcttggcactgatcttgaaaatgctccagtacagctgtaaattgtacaactgtacagttgtacaattgaacaaactttctttttttaaaaaaaatcagtgagttgttcaactttttcagcttttgtttctcttgttctattctgtaaagattagaaacccgaccattttctagttatagtggggatatctatttggaatctttwtcttgggaatcctggtgagccaggtcatgctgccagatgctgtcactacaaaggacaacacagaaagcatactgtgttgctcactcttcaataaacctgtgatgaaaagtctcaaaacgtaagtcaaaagataataaacaatctcattaaaacagacataaggaacaaggggaggcagaaggctcattttcaaggaggagaagttgatgttttatgttctgtgattaaccactggctggtgtttcatacagaaggcagcatttggtgtgccatgggcattcagttttctttgaatcagccaagtgcaaacgtgtgccagtg

SEQ ID NO: 314416 - DNA, 551 bp, Homo sapiens
tataaccatacattctccctcataagtcttggcactgatcttgaaaatgctccagtacagctgtaaattgtacaactgtacagttgtacaattgaacaaactttctttttttaaaaaaaatcagtgagttgttcaactttttcagcttttgtttctcttgttctattctgtaaagattagaaacccgaccattttctagttatagtggggatatctatttggaatctttatcttgggaatcctggtgagccaggtcatgctgccagatgctgtcactacaaaggacaacacagaaagcatactgtgwtgctcactcttcaataaacctgtgatgaaaagtctcaaaacgtaagtcaaaagataataaacaatctcattaaaacagacataaggaacaaggggaggcagaaggctcattttcaaggaggagaagttgatgttttatgttctgtgattaaccactggctggtgtttcatacagaaggcagcatttggtgtgccatgggcattcagttttctttgaatcagccaagtgcaaacgtgtgccagtg

SEQ ID NO: 314417 - DNA, 551 bp, Homo sapiens
tataaccatacattctccctcataagtcttggcactgatcttgaaaatgctccagtacagctgtaaattgtacaactgtacagttgtacaattgaacaaactttctttttttaaaaaaaatcagtgagttgttcaactttttcagcttttgtttctcttgttctattctgtaaagattagaaacccgaccattttctagttatagtggggatatctatttggaatctttatcttgggaatcctggtgagccaggtcatgctgccagatgctgtcactacaaaggacaacacagaaagcatactgtgttgctcactcttcaataaacctgtgatgaaaagtctcaaaacgtaagtcaaaagataataaacaatctcattaaaacagacataaggaacaaggggaggcagaaggctcattttcaaggaggagaagttgatgttttatgttctgtgattaaccactggctggtgtttcatacagaaggcagcatttggtgtgccatgggcattcagtkttctttgaatcagccaagtgcaaacgtgtgccagtg

SEQ ID NO: 314418 - DNA, 557 bp, Homo sapiens
tgacagctctgagtgcttggattaatagtcctgtgcattttaacacatgctgagtattgcaaataatatgttttagtttgctttaggaaagtttattggcctgatgaccatgtatgttttgtcctgcccccattttctcctattactgagtttcagtctctgtttatgatgccaagggcagagcaacctgtcaatgagcatcttctggctgagtctgggtctaatggttgcttgkgaaaggcaacctctggtaagatgtgatctaaggaaattccaaagacttcctcgtatctttgggaccttctaagccattgactgtcttttgtcagaccacagttctgtggacacacagctaaaggatgtgtttagagaagtcactacccatgtcacttttctaaaaccactactgccttctgctaaatgccctcatatccacattttcagagtctctctgttagcattgcttttccctttttattgtccctatttcttatatcctcctttctccatttaacttatagcagacctaggatagcaacaaaaggttagaaatataa

SEQ ID NO: 314419 - DNA, 602 bp, Homo sapiens
atcacctagttgagccagcccaaagtaatgatccaaagaaatgtgagcaaataaaatgttttgctgtattaactcactaaattttagggtgacttsttactgagagggtggtgcttccatgggaaaaaatctacgactggtggcattaacaaaagaactgttagtagagggtggagatgcagtgaagaggctgctatatgtatctcaaaaaagagtgagttatatagtgccagaaacttcggcaaagctgtcacttggagtaacttggaagatagaaaatgtaaccaatgtagacttaatatggttaaaatgggctttttccacaaattgagctacagagtcattgcaatatcagtaaaaattctagcaggtgttttgaagaaattggcaagctaattctgaaattgtgagtaaaggcaaaagaactaaaataatcaaatcatttcaaaaagaataacaagattggaagatttcaagacattttatacaactacatagcagggtggtgagctattggaataatgacagtcatttagatcaatggaaagtcaaggaatagacccacccttataaggtcacctgatttggcatagggatgtcaa

SEQ ID NO: 314420 - DNA, 375 bp, Homo sapiens
gtaataagactttaggatccttaggaggccattactatataaaggatgatttaaatggaaaatgatggctaagactgaaaaggctctggttgttggcaaatgttctgtctactcaaaaggaagataattctatgtaataaaaaggcagggcgtttttattcagcctgagttggtatcccagcaccaccatgtatcagctgtatgaatttgagaacgttaacttgcttctcagaaaagcagtggtattatgaagttagggttaartgagttaatatgtataaatgtttagcatgatgcctgacacattgaaagtgttctgccaaatcctatgaagagacaacctaaaatataatactctagtggtttataaggttt

SEQ ID NO: 314421 - DNA, 535 bp, Homo sapiens
tggtatttcaattaagctgagaactctttatcaattttgcatttctataatcaaaattaagtgcattttctttatccactacccttcatatttgagatcttccttaaattttacttatttctactttgttcctaatcctgttctctaagatacatttacagccctcagaaattcatgtttattccaaggtccatgatggatacaacaatcttttcatttstgtgtatttaaattagcacattaaactctgccctgccatatccagttgatattgtggtatttaatggaaaagaaccttgtgctgtgctagagtaataacttcatcaggtaggaatttaaattaacaaagacttattgaacacctacaatgggagaagcttcattctatgtcacctggaatacataaatgaacagaatccagacacagtgtgtgccctcatggagcttagagtctagcaatgaaaatggtctttctttcagaagaacattctgaggttagaattcagttcatggatggggccagagatgagctgca

SEQ ID NO: 314422 - DNA, 534 bp, Homo sapiens
gcaaaatgttagaaagtgacctattgtctcaagaaatggagttttaaaaatatctttagtaactgatttttctcaattaactccttattttgaaactatagaggaactcagttctttggtcaatagaatgagaatatttaaagaagtaaacaatttcaagtccaaagtcacagcatattattaacagggtaacttcaatcaaacatgctaaacacaaaaattttccttcaacccttcctacacctctggtttgtggtaacaactttcatttgataaaagagagaatgatgcccaacccataatagttaatacrttcaatgtcagagaaggattggtgacaggtaagaacatgagcctaatctctctgcttcaaagcagtggatttttctgaacaattcaattcacatttattggggtgcttttataaagagtgaaactcattactttctccaaaatttttttgagcacttccctatcagttgagctaggagccaaggatacaaagtaaatgttactctatccctgccttcaagg

SEQ ID NO: 314423 - DNA, 219 bp, Homo sapiens
gtgttaagaataaggtactggcattgagtagttgagggcagaacataamcacatacataatggttcactgtaagaaatgtcacaatgtaatacatgattaactgccaaataaatagcactacagacaatacatattataatagtttggaggaatttggtgcagagagccatcatatggtcagatacatgtatgtgaccatgtattattgaagatattca

SEQ ID NO: 314424 - DNA, 581 bp, Homo sapiens
gtttctcttgaaacagatttttattaaatgtgcatgttgagtatgtgcagttatttttttccataaactctaggatcaaattacagttgatacttgctcagctcattgtagggtagcttgtgagaaatgtaatggatcagaagtgcagatcagcttagttgratgttaactctttcactgcagggccagatgtcatctgaacttagctttcaaaaaaatttatttcttaatttttaaatttatgttatgtctttgacatgaaaaaatgtgtcatttaagacatgtttgattaaagtgcagcctggttaaaatgacagcaagttatgctttttaattgaataaggaaaaagagcactgtattgactttgataaaaaaattttttaatggctctggcaatttgttaggctaataaaatgtttggaggtaatattaggcttcaaaatgtatttcatttttcttttgagagagctatggctatggatccatgacactttgctagcatttaagatattacatctttcctttagcttttaggaaactatttctgtttacctagaaagaacatcctcatttctagcca

SEQ ID NO: 314425 - DNA, 528 bp, Homo sapiens
tcattcagcaattatttattgtgtgccacctctattccagtcattctttaggcacacgggctacatcactggatgaaacaaagatcacttccacatggaactcacatttcagtaggttcagtaggagagaaatcataagcaaataggtatataaataattacatatcatactatgtaatgataagtactatggtaaatggataaaaggattgtcttttcatcactaaaaatgtgcaccatctcaagacttgattcctaaactctggtctccctgtggagtgctgtagatgtttgtcgtatagaataacataggcatggatttttattttattttattttgtagtggaagaaatcttagagattaagttcaaggtttgcttgaatttgcactgatctcaatatattctttaatttgttttttgcctataggtttgatggggtctaatttttcgatttctytttatttcctccaaaattggagttttgacacttttcaattcattatgctttctggcattttgaattcat

SEQ ID NO: 314426 - DNA, 609 bp, Homo sapiens
aatctaaaatccatactataagagcctggggttgacagaactaaagccactagcactcagaacagtttaagagagtttaaatttcaatatcaacacataaaacagtacgaaaacatttctctttgttagagtagagggttttgcctctattctactccactctgcttacttaattacaaattggaaatcttacaactgctaactctattttgccttctcagtttccttcttgattgcctgttgcctggaagcctcaagatccacatgaccacctcccttcttttccctgcattccagaggtggctgtagatctgggctggtagacagagctgattccaggaagtgcaccacactgggtgtgacaggagaagcgtaagctccttatgtcatgcaagtgtctggcaacttggtgtgttaggccattcttgcattgctrtaaagaaatacttgagactgggtaatttataaagaaaagaagtttaattggctcacagttctgcaggctttactgaaagcattgtgctgtcatctgctaagtgtctggtgaaggctcagggaactttcaatcacagtggaaggtgaagttgggagcaagtgcatcacatggtg

SEQ ID NO: 314427 - DNA, 609 bp, Homo sapiens
aatctaaaatccatactataagagcctggggttgacagaactaaagccactagcactcagaacagtttaagagagtttaaatttcaatatcaacacataaaacagtacgaaaacatttctctttgttagagtagagggttttgcctctattctactccactctgcttacttaattacaaattggaaatcttacaactgctaactctattttgccttctcagtttccttcttgattgcctgttgcctggaagcctcaagatccacatgaccacctcccttcttttccctgcattccagaggtggctgtagatctgggctggtagacagagctgattccaggaagtgcaccacactgggtgtgacaggagaagcgtaagctccttatgtcatgcaagtgtctggcaacttggtgtgttaggccattcttgcattgctgtaaagaaatacttgagactgggtaatttataaagaaaagaagtttaattggctcacagttctgcaggctttactgaaagcattgtgctgtcatctgctaagtgtctggtgaagsctcagggaactttcaatcacagtggaaggtgaagttgggagcaagtgcatcacatggtg

SEQ ID NO: 314428 - DNA, 657 bp, Homo sapiens
gaccccaaaaaatacctcaaaataatttagatactcaaaaaaataaagtcaaaaaaagctcccaaaatgtggatcaaaaaagtgttttaaaaagtaaaatatgaaagaaaaaacagtagacaagcaggaagagagtgggcaatgatgtagtgttactttctgatctttcatagtcaataattctctccagctgatgataacaagaaacagaagggcgagtatattttctaaagttgagtggttaccagtaaaattaaaaacacagcctgtcaatagtgactgctttcaggacatgaaactgggaagctgtctttgggatgaaagagttcattctatggactcacgttttcgttggggaaaaaaataccacattacatttattttaatgtttttcataaagttatcattagaaattataaaccawtgaaagaattgagacaccatttccacattctccaaatcctcaccacccatgagaattacctaaggaaggcaaaaatcaatctattctctgccaaacaaggggtcttttgtaacaaaagaaatcccggaaagaagagcatatcctgctgtgtgtcaggggcttttccaggtgctctggataaaacagttaataaacaacaaaaatcctgccctcatagagcttaccttcttccc

SEQ ID NO: 314429 - DNA, 625 bp, Homo sapiens
tgtttctttcctctggaaagcaaatttgctcaattggtttgcactttttcataaaacatagatcaaaagagtcagattaggtctggagtgcacctttcttatcctcatttgaaaagtcttattatttggacacaccagttgtccataattttaaaaaaaccattgataggccagtggcaggtcctgagttactgtccttgccaggagttggcagtggtacagtagcacacaagggacattaaagtgccacttgaagtatctcccgcaatattcacaggaaggctgtaagtccatttagccctttagtctgagagcttcataataaaaggagtttcaaggcaccagaagttccaattatcccaaacaggtgaatgttcctctaatttcccagaggttttctgtccagtgakctgatctgctatctccagatatcttggttgttgagttctgaatgaaagggagtaaagtgagcaagagcttcagaaagcactcaagaatactgaagcatgagaaggttatgtcagcacatttgatttttttcacctatttccataggctatgcaacaagagtagcttcaaaagctacaggtaaagctgttggcatacagcaaaccattaacaaatg

SEQ ID NO: 314430 - DNA, 603 bp, Homo sapiens
aggattgtgggcagagtttaaggaaaccaacaaaggatggtgcagtattcctgggcttgccttattggagagactttactaccctacaccctgagggcacaaagggagggagctgtcactagaacccagagaaggtagctgcatattgacagccacttaacaggagccctcagaaggtaaggacagtgtgcagcaacccaagggggaggaagcaacaagaataaataccccaaacttacttttctccctccctctgatcacttgccaaaacataccagtgaccaaaccaaataggaaaacaggggacaaagtaaccacggtgatgaagtccacatgggtcagcctcccaggacagaatggagtagggtaaagatcgratgggggagtgcaaacaggccctctctccacttcttggtttatagaccttcaaaatagacatggtcacatagctgatccagccccactaacctaggccaaggaggaaagatgaaaatatttcattttgggattggattcacataagcttttaggattcaaacggccttattctaccagtctggccactactttgccaaattggaattttgtgttaaaattaaaaga

SEQ ID NO: 314431 - DNA, 566 bp, Homo sapiens
tatacaaaagtagatcttttgcaaatacactaccatccatgtccttagattttgaaggcctatttcacttaataatagcattttaggtataagtgagaactatcctctaatcatgtggatttttattcttgcaccaaatgcccatgaagsttaaacattcttcaagtactgggcttccctgtattttgttattaagagaaaggggtggtgggacctggactgtggtttcccacttatgtgatattcctcaacatatggaatcctttctcttcttcttgttcatttgaaacacaagaaacagtttcatcatatggtgtattgatctgaagagtcccagaaagggtgagagttccccgtggaattgtaaccaggaacagaatttagtgggtcggcagtcatagtccccgagggttctagtgtgctaaaagaaacaaagtgagaggagaaactctggtattaaataattaaatacaagaaaaaggccaaaggaggaaaatactttaggaatgagtggctgagactacaccaagccagatatgaattacgagtagaactgagatgaattg

SEQ ID NO: 314432 - DNA, 566 bp, Homo sapiens
tatacaaaagtagatcttttgcaaatacactaccatccatgtccttagattttgaaggcctatttcacttaataatagcattttaggtataagtgagaactatcctctaatcatgtggatttttattcttgcaccaaatgcccatgaaggttaaacattcttcaagtactgggcttccctgtattttgttattaagagaaaggggtggtgggacctggactgtggtttcccacttatgtgatattcctcaacatatggaatcctttctcttcttcttgttcatttgaaacacaagaaacagtttcatcatatggtgtrttgatctgaagagtcccagaaagggtgagagttccccgtggaattgtaaccaggaacagaatttagtgggtcggcagtcatagtccccgagggttctagtgtgctaaaagaaacaaagtgagaggagaaactctggtattaaataattaaatacaagaaaaaggccaaaggaggaaaatactttaggaatgagtggctgagactacaccaagccagatatgaattacgagtagaactgagatgaattg

SEQ ID NO: 314433 - DNA, 566 bp, Homo sapiens
tatacaaaagtagatcttttgcaaatacactaccatccatgtccttagattttgaaggcctatttcacttaataatagcattttaggtataagtgagaactatcctctaatcatgtggatttttattcttgcaccaaatgcccatgaaggttaaacattcttcaagtactgggcttccctgtattttgttattaagagaaaggggtggtgggacctggactgtggtttcccacttatgtgatattcctcaacatatggaatcctttctcttcttcttgttcatttgaaacacaagaaacagtttcatcatatggtgtattgatctgaagagtcccagaaagggtgagagttccccgtggaattgtaaccaggaacagaatttagtgggtcggcagtcatagtccccgagggttctagtgtgctaaaagaaacaaagtgagaggagaaactctggtattaaataattaaatacaagaaaaaggccaaaggaggaaaatactttaggaatgagtggctgagactacaccaagccasatatgaattacgagtagaactgagatgaattg

SEQ ID NO: 314434 - DNA, 623 bp, Homo sapiens
gcgtcagattgactggctgggcatcaaattccagctccactacttcttgctatgtgacccgaggcaacttgcttaatttttcccaacctccatttccttctctgttgattaggctcatgattccttttcacaggattttccttcccttacataaagctgaaggctgcctgtgttggaaaaagactgagttaagatattatgtgcaagtttgtacaaggcagcctcttctcaattgtggcagcactgtgcttgctctaagccctggatttgagagagagagaagcaaagctcttggagggagaagttaaagccccagttggttaatttccagcagtaaagccaagtctccctgagcccctttcctgtctaggaaaaggcgatcctaacacctttcctaggggtgctttgggtattcactgagattgtgcatataaaagmcctctgtggattttaaataatcatatagatgttcattctcactatcagaataatctcattatttccaaatcaggcctctcagcttagacttttctaagtccacatgaggtctccattttctcctctactaggagcagcagattaccaaagaaagaaaaggtagagatatgaacgtgcttcccatt

SEQ ID NO: 314435 - DNA, 623 bp, Homo sapiens
gcgtcagattgactggctgggcatcaaattccagctccactacttcttgctatgtgacccgaggcaacttgcttaatttttcccaacctccatttccttctctgttgattaggctcatgattccttttcacaggattttccttcccttacataaagctgaaggctgcctgtgttggaaaaagactgagttaagatattatgtgcaagtttgtacaaggcagcctcttctcaattgtggcagcactgtgcttgctctaagccctggatttgagagagagagaagcaaagctcttggagggagaagttaaagccccagttggttaatttccagcagtaaagccaagtctccctgagcccctttcctgtctaggaaaaggcgatcctaacacctttcctaggggtgctttgggtattcactgagattgtgcatataaaagccctctgtggattttaaataatcatatagatgttcattctcaytatcagaataatctcattatttccaaatcaggcctctcagcttagacttttctaagtccacatgaggtctccattttctcctctactaggagcagcagattaccaaagaaagaaaaggtagagatatgaacgtgcttcccatt

SEQ ID NO: 314436 - DNA, 588 bp, Homo sapiens
tctcattcaaaatatttagggagagtgtatataccttgaactagtcccagggatggattgaaaggaaaagacatggtcctgctctcaagrtacttataattcctataaaaattagtataaataaaattcactcatttgtttggtaccaagcatgtgcccatacaaaaaaggtaaagaaagacagtttattgtagtagaaaaagtcctgactttggagtcatacagcttactgcttatcaactacttaacctcagggaatttatctgaacactcagagaatcagttttctcatttgtaaaatggaaatcttatgctttgcaggattattgtatggaaaagaaataaatgttatcatctagcacataggcagtacccattaaattgcttaacacacgatttccatttgtgaaaagccacatcctaatgaagcatggaataaacaaataattacaacatgagattttgatattgcacaaaactgacattgagcaaaggagaagaagttcagagaagagcaaggagctaactgcctcttcccaagcaattagggaagtctccccaaaggaggctacttcagaggtaggtctg

SEQ ID NO: 314437 - DNA, 538 bp, Homo sapiens
atctcattcaaaatatttagggagagtgtatataccttgaactagtcccagggatggattgaaaggaaaagacatggtcctgctctcaaggtacttataattcctataaaaattagtataaataaaattcactcatttgtttggtaccaagcatgtgcccatacaaaaaaggtaaagaaagacagtttattrtagtagaaaaagtcctgactttggagtcatacagcttactgcttatcaactacttaacctcagggaatttatctgaacactcagagaatcagttttctcatttgtaaaatggaaatcttatgctttgcaggattattgtatggaaaagaaataaatgttatcatctagcacataggcagtacccattaaattgcttaacacacgatttccatttgtgaaaagccacatcctaatgaagcatggaataaacaaataattacaacatgagattttgatattgcacaaaactgacattgagcaaaggagaagaagttcagagaagagcaaggagctaactgcctcttcc

SEQ ID NO: 314438 - DNA, 606 bp, Homo sapiens
ctatttacctgtggaagaatcttgtggttgttttccacttttgttaatgaagagcaaagctactaaaacattttaaggaggtatgtgtgtgtgtgtgtgtgtgcacacaaattttcaattctctgggcaaatatctgggagtgaaattactgagtcatctgtcaaatgtatttttttaaattttactttacattctgggatatatgtgcagaaggtgcaggtttattacataggtatacatatgtcatggtggtttgctgcacctatcaacccatcatctaagttttaagcctactgaattatgttccaaagtggctacatgattttacattccctccaccaatgtctgagggttccaatttctctacttccccaccaaaaacttgatactgtcaattttttattacagccatcctattagatgtgtacctatattatattgtagttttaatttgaacttttctaatgcaataaagtaataaaaatatataataagtaaataaatgggataaaatggtgctctaattaaaggtatataagccgtcctttaacaagaaaaaaatwaagcttttcaaagccctgggtggatatgggagcaaggaattc

SEQ ID NO: 314439 - DNA, 545 bp, Homo sapiens
ttacgagagttagaaaaattacaggcatgatattttcatctttcaggacatttacatatttactttcaaaataatttgtaatcttttaagggcagatttagaaaatttttgtttgtttgttggtatgtttatttgtgttgtgtatgtgtgtgtgtgagtgtgagtgtgtggtagaacatctaggcaaataattcttagttttctgttttgaataaacaaataacccaataaatttatttagttattctcatatttaaggattaaaaaagtattatatcacacttttaatgtataatttcaacttcttttgtcaaaacatgagaataattttactcccaaaattattacaaaatgtgacagaagcaaaaccttcttcttctatctaaatctaaaaacatkccaactttcttggaattttgcccaactttcttctgctactttctattttccccctttctctatgtgactgttaattttaaagcctttaaaacatctatataataattcaattcgcgtaatatttaggctgaaataatattgaaata

SEQ ID NO: 314440 - DNA, 545 bp, Homo sapiens
ttacgagagttagaaaaattacaggcatgatattttcatctttcaggacatttacatatttactttcaaaataatttgtaatcttttaagggcagatttagaaaatttttgtttgtttgttggtatgtttatttgtgttgtgtatgtgtgtgtgtgagtgtgagtgtgtggtagaacatctaggcaaataattcttagttttctgttttgaataaacaaataacccaataaatttatttagttattctcatatttaaggattaaaaaagtattatatcacacttttaatgtataatttcaacttcttttgtcaaaacatgagaataattttactcccaaaattattacaaaatgtgacagaagcaaaaccttcttcttctatctaaatctaaaaacatgccaactttcttggaattttgcccaactttcttctgctactttctattttccccctttctctatgtgactgttaattttaaagcctttaaaacatctatataataattcaattcrcgtaatatttaggctgaaataatattgaaata

SEQ ID NO: 314441 - DNA, 614 bp, Homo sapiens
tcccttggggtgtgtgtgtgtaaaatatttcctatatacatatataataataaaatggctcacatgattatggatgctgacaaatacaaaatctacatagctcatgtctcagtttgagtctgaagggtggcaagctgctayagaaccaggaagagctctgttacagttctcagctctcaggcagaattctctcttacttggggcagggtcagccttttgtttaatcaggacttcaaccaattagatgaggcctactcacctcatgatgggcaataagctttatttagtttattgttgtaaatattaatatcatctgaaaacactctgtcacagaaacattcagaataatgtttggtcaaatatctgggaactccatggtccaagcaagttgatacataaaattaacgaccataaatgttatcttcattccttctacacaggtctcaaatagtgaagcccaaagaagaatgataaacacaggggatgacttccatttgaaacttagaaaatttctttgaaataattgtatagttccttttttcagaaaatgccaaggatattctgatcccataaagctcataacttcttaaaaactttgaaagcaatacatattt

SEQ ID NO: 314442 - DNA, 711 bp, Homo sapiens
acgttaaaatacattatgaaacagacttattgtaacaatggcaaaaacatatttacctgaaatattctcttttcatcatttgatcatttgtgctccakattcaaatgtgatactaacatatattattcaaaacagtgaactaaaaatgttatgagaaacctatacccatttgcacaagtagtataaatataacccagtaggaagtcagaaattgtggatttgtttttaaaggctaggcactttgctgcctctgtcttttgaattcaatagctgtatgagactgttatgagcactggataagaaatctgattttatgaaaagtgattacttaattgccagagagctatggcagtgtacacaaataattgagtagttaacaaaactttgtacctctgtttttaaaattgagggctctgcataaaatgaatttaaaaactaaaacataatacaaacattaagtatatcacacaatcagatttttctaaatgaaacttattaaatgggtttttgtgtattcttactatttcagcatataaaatgtgttgtctattatgcactgcaataaaaaaatgtttgaagccacagatgtgcagtgctcagaatgctgttattcacatctaattattgtatataactgactttggtatagattcctttgaaatctttataataataattaatatgtattgagcatctactgtattacaagga

SEQ ID NO: 314443 - DNA, 627 bp, Homo sapiens
cattttgttattattattgtacatcacaatatggctgataatcgcagttgagggatttgttacttgccacaaataatttcactggttacaccattaaacaattattacygatcttaagtgccagaacactttatatcagcaaaacgttctgttaaaagatgtttaaacttttcatttcctttatttcttccacttttgtgtttctttcccaattagaagtaattctgttgagaaacctcaaggtagaatgcaaatgtttattaaatgtgtattcaaaccctgcagtcataggtaaactagtgcagttctcacacattgcagcttggctagtaggtggctttttatttgaaactacttttcctagggaatgacaaaaaatgaagaagtcaatgatctgtaaatttcaactaaaatgttgaagatgattttgtagataaatacttttgattgtagtccacaatatctagagttcaacatctgtttagccaatgaccctacatcttgttgttcttgttattgttttgttgcattgttattaaggattttatgtaaactttcaaaaaggtggatataaagaaaagaaagcttgattttttttatttctaattcaacatacacagaagccaa

SEQ ID NO: 314444 - DNA, 627 bp, Homo sapiens
cattttgttattattattgtacatcacaatatggctgataatcgcagttgagggatttgttacttgccacaaataatttcactggttacaccattaaacaattattaccgatcttaagtgccagaacactttatatcagcaaaacgttctgttaaaakatgtttaaacttttcatttcctttatttcttccacttttgtgtttctttcccaattagaagtaattctgttgagaaacctcaaggtagaatgcaaatgtttattaaatgtgtattcaaaccctgcagtcataggtaaactagtgcagttctcacacattgcagcttggctagtaggtggctttttatttgaaactacttttcctagggaatgacaaaaaatgaagaagtcaatgatctgtaaatttcaactaaaatgttgaagatgattttgtagataaatacttttgattgtagtccacaatatctagagttcaacatctgtttagccaatgaccctacatcttgttgttcttgttattgttttgttgcattgttattaaggattttatgtaaactttcaaaaaggtggatataaagaaaagaaagcttgattttttttatttctaattcaacatacacagaagccaa

SEQ ID NO: 314445 - DNA, 627 bp, Homo sapiens
cattttgttattattattgtacatcacaatatggctgataatcgcagttgagggatttgttacttgccacaaataatttcactggttacaccattaaacaattattaccgatcttaagtgccagaacactttatatcagcaaaacgttctgttaaaagatgtttaaacttttcatttcctttatttcttccacttttgtgtttctttcccaattagaagtaattctgttgagaaacctcaaggtagaatgcaaatgtttattaaatgtgtattcaaaccctgcagtcataggtaaactagtgcagttctcacacattgcagcttggctagtaggtggctttttatttgaaactacttttcctagggaatgacaaaaaatgaagaagtcaatgatctgtaaatttcaactaaaatgttgaagatgattttgtagataaatacttttgattrtagtccacaatatctagagttcaacatctgtttagccaatgaccctacatcttgttgttcttgttattgttttgttgcattgttattaaggattttatgtaaactttcaaaaaggtggatataaagaaaagaaagcttgattttttttatttctaattcaacatacacagaagccaa

SEQ ID NO: 314446 - DNA, 580 bp, Homo sapiens
atgaaaagcatttagaacaatttctggtccataaagtaraggcaatagtgacacatacctacactcaccgcctcttgtgtactcattaccttgtgcaattattatcaaaatttgggcattttctttcaactctacacctgcacactttattcccttcactagaatgttctaaagccaactccaaatgtcagctttttatccacaatgatttgggatgtgtaaatgtgtatctctaatggatcagatctgtctctcaacctctctctcttccctacagtaacattatcaaaactaacaatattaataaaaaggccttaatcacatataatatcacatcaacattccaactttcagcaatttttcaagacatgttttttccttctatatcaagatccaaacaagttgcaaatgtttgattgacataactttttaagtctcctttaaaataacagtagattaaaatttggcatcatagcattaaaaattggttgcaaagtgctcaatatttcagataaattctttaaaaatcaacaaaaaacaaattttcagaatgtgccttgtgcatcagtataattttcct

SEQ ID NO: 314447 - DNA, 460 bp, Homo sapiens
aatgacaacaatgccaacaggggtgggagggaggaattggaaataacctgctatamtgtccctacattagaaaggaaacattatagtgtgatttgatggtgtatgtggattagttcaaaatgtatctttcaatctccagagcaacaattagaacaaataaaaacataaattaaacttacataagagagggaataaaacggatttatataatgctcaattaaaaccacagaacacaaaagagaggaaataaatagtaagtgtggtaaacagaaagtagttatggacatgtaagatatcacaactaaatcaataactgccttaggtgtggatggtcaaataaaccaaactaaagagaatttgagagttaaagaaaaacagaatacttcactttaggttgactacaataaaccatctttaaatataaagattctggttaaaaataaagggatggtggcttgta

SEQ ID NO: 314448 - DNA, 460 bp, Homo sapiens
aatgacaacaatgccaacaggggtgggagggaggaattggaaataacctgctataatgtccctacattagaaaggaaacattatagygtgatttgatggtgtatgtggattagttcaaaatgtatctttcaatctccagagcaacaattagaacaaataaaaacataaattaaacttacataagagagggaataaaacggatttatataatgctcaattaaaaccacagaacacaaaagagaggaaataaatagtaagtgtggtaaacagaaagtagttatggacatgtaagatatcacaactaaatcaataactgccttaggtgtggatggtcaaataaaccaaactaaagagaatttgagagttaaagaaaaacagaatacttcactttaggttgactacaataaaccatctttaaatataaagattctggttaaaaataaagggatggtggcttgta

SEQ ID NO: 314449 - DNA, 569 bp, Homo sapiens
tttctgtgtaaatctgttaactatataccaaacaaagttgaaaatttgtctactaaaaaagtatgagaagaagtttggaacagactagttgaagttataacctcatgcaggacagcgagttatctgctacttttgacagtaaaatcattataatatcctcatatggaaaaattcattttagtgttttctgtatctagatgattggggcaacagtccattcatccaaaggaatgtgagtgaggaagtagggatctaagaacaagttaccatgtagttcagtaaagaatactaattaatcaacttcctatttttctttaatattaactcagtaatacattgtaaaagkctgtgaatcactcaatattttattttatttttaattattattgttttcaaaactttggtgcaaaactacaaagtatatgaatgtatcagtgatcacatcgtaaattttatttctatgtcatttagaattttggtttgataatttaagccttgagtttttctgtaaaaataaaagtagcacacattttacttagataagccaaaatgcttagcacttggaagac

SEQ ID NO: 314450 - DNA, 601 bp, Homo sapiens
gaaatatacttaagtttggatcccctggtctctcttaactattagtttgtgcttcaaggagcatttagaatactattattcttcaaataggttgatgcaaaagtaattgcggttttggcttgtgaayttttaatcattataactaggattaaacacatctttattaaccaaaatagaaaccattacaatcaacacgtttttgccaacaaaaaatgtttgtttatccctggagtgtaagaatccatgctttgggattcaatgaactcttgaaaagcacctttttttttttttttttttttttttgcatcctgctggttgtggaagtgtttttcctgcaaaaagttgtgaaggtgctttaagaagtagtcattggttggttggcaagaggccaggtgaatatggcagatgaagcaacactttgtagcccaattcgttcaacttttgaagtgttggttgtatgacttgcggtttgggcgttgtcatggagaagaattgggacctttctgttgaccaatgctggctgcaggcattgcagtttttggttcatctcatcgatttgctgagcatacttctctgatgtaatggttttactgggattaga

SEQ ID NO: 314451 - DNA, 626 bp, Homo sapiens
aatagacaagaggttaaattttaaacatgtggaggtctattagccataacttccctggagaatgtccaacttcctctgtattcagttttcttatttcttcattatctcattgtcttattcacagacagactcagaccagcagatacacatttggaagacactgagctagaacatagcatcaattccacacaatgtattctctacacaggcaaattagtctgctctcttgtgtgttgaattaaagcctaaaaataagatgactttaaaagaaatcatatcataggccaatagaacataattgttaattgtgttctagtaaattaactagtggaagtggggtgcttgtttgtagtatctgctgatatctctggsataaatacttctacaatggctgattttcaacaaccaatggtttaaccactgatttgcagaattcctgaatatttaatagtctgctctcattagtccatgtcagctgtctagcatcccactagatttaatcatctttcataaatatgcagaaatagtattccatttcgtagaactttaagaaatgtattacttattgggtaatgacaagtcaacataaaaggctggtgaaaatttaagtcatggggagatatttg

SEQ ID NO: 314452 - DNA, 630 bp, Homo sapiens
agctgagagagagtctcaaacccaaggaaatccacgctaataaattgtatagtattgacaagaaaagtaaagacaagaaaattttgaaatcagccagagagaaataatgcattaaatatgaggaaactccacttcaaatgatagtgactttctcatctatgacaatggaggtcagagggaagtgacatcttacctctctctctctctmtatatatatataactcagctattgttacaggcacatactccaaagttagtataaatatatatggtcatatatttatatagaatatatattatatacatatcatgatatatatttgagatataagtgtatgtatttatatataaattgatttatattataatatataaacaatatataattaagattggtgacagcgtaattgccgtttttgcctttgaaagtaatggcaaaaaccacaatcactttgcacgaaccttatatatatatatatgaatatataaaaatgtaattatatataatatataatatgtacatgtcacaaatatattatttataaataatttatacataatatataattacacatattttatatataattattatatttatggactagtatatggtcaaacttaatataa

SEQ ID NO: 314453 - DNA, 630 bp, Homo sapiens
agctgagagagagtctcaaacccaaggaaatccacgctaataaattgtatagtattgacaagaaaagtaaagacaagaaaattttgaaatcagccagagagaaataatgcattaaatatgaggaaactccacttcaaatgatagtgactttctcatctatgacaatggaggtcagagggaagtgacatcttacctctctctctctctctatatatatataactcagctattgttacaggcacatactccaaagttagtataaatatatatggtcatatatttatatagaatatatattatatacatatyatgatatatatttgagatataagtgtatgtatttatatataaattgatttatattataatatataaacaatatataattaagattggtgacagcgtaattgccgtttttgcctttgaaagtaatggcaaaaaccacaatcactttgcacgaaccttatatatatatatatgaatatataaaaatgtaattatatataatatataatatgtacatgtcacaaatatattatttataaataatttatacataatatataattacacatattttatatataattattatatttatggactagtatatggtcaaacttaatataa

SEQ ID NO: 314454 - DNA, 630 bp, Homo sapiens
agctgagagagagtctcaaacccaaggaaatccacgctaataaattgtatagtattgacaagaaaagtaaagacaagaaaattttgaaatcagccagagagaaataatgcattaaatatgaggaaactccacttcaaatgatagtgactttctcatctatgacaatggaggtcagagggaagtgacatcttacctctctctctctctctatatatatataactcagctattgttacaggcacatactccaaagttagtataaatatatatggtcatatatttatatagaatatatattatatacatatcatgatatatatttgagatataagtktatgtatttatatataaattgatttatattataatatataaacaatatataattaagattggtgacagcgtaattgccgtttttgcctttgaaagtaatggcaaaaaccacaatcactttgcacgaaccttatatatatatatatgaatatataaaaatgtaattatatataatatataatatgtacatgtcacaaatatattatttataaataatttatacataatatataattacacatattttatatataattattatatttatggactagtatatggtcaaacttaatataa

SEQ ID NO: 314455 - DNA, 554 bp, Homo sapiens
aatcgcagacatgcttatttctttcatactatgcctgtgatgatctttggacatcataagacatctttgatctcacattgatacagaagatgatatgaattggaaaatgtaacctgaagtatatattcatatgtrttatatattcaaatgtataattatatatttgtataaatgtataattatatattatacaaaaatgtataattatatattagagattcgggcgtataatacatatattcatatgtattatacatttatcatgttcttggctggacagagtttaacatcctgtttagaataccaagatatatagaaaggagaacccaaactttatagaaataaaatgcagcagatattctgccatgatcatatgaactaatggtacattcaaattgaaatcattctgcttaactatttgaatcagcaggaagtattaaataggtgtaaaactaagttctaggatgtataaaaaggctgtagcaattgtgagaccctgtggcacagtgacaaacacctgctggtgactgcaccagaaacagtgtcctaagctt

SEQ ID NO: 314456 - DNA, 580 bp, Homo sapiens
aatgtgatgtctcaatgcatgtttacatagtataatgaacaaagcagggtaattatcgcattcaacacttttacatttatcacttctttatggtgacaacattcaaaatcttctagctatttcgaaatatatactacattgttacttgctgtggtcaccctactgtgcaacagaacacaacacttattcttcctaactgtaattttataactactgaccaaactgtcctattacctgcctcctcctcctccttcccagcctctggtaaccactattctactctctacttctatgaagcctacttatttagattgtacaaatgagtgagatgacgccatatttgttttattgtacctagattagttcacttaacataatgtcctcatctgtgttgctgcaaataacaggatttcattcagttttatggccgaatagtattccattatgtgtatatgtgtatatcacattttctttatccaytcatttgtagatgacttttagatcgatttctatatcttggctattgtgaatactgctgtagtaaacatgggtgtgcatatatatatatatatatatatat

SEQ ID NO: 314457 - DNA, 588 bp, Homo sapiens
aacccctgtgatctgtcattttttgataatggccatcctaacaagtctgaagtgatagctcattgtatttttcacttttgaattgcattgatggtttgtgatgttgagcatctttttatctacttgttgaccatttttatgccttctttggagaaatgtctattcaagtattttgctcatttattaatctagatatttgtttttttgctcttgagttgtaggatttccttacatatttttggtatcaaccccttatcagatatatggttttctaatatttcctctcactccataggctgccttttcactctgtttattgtttccattgctttgcagtaacttttttactttgataaaatgccacttacctatttttgcttttgtactgtgtttttggtgtcatagccaagaaatyattgcaaagaccaatctcaaggagctcttcctttatgcttttatctaaaagtcttacaattttaggtattacatttaaatttttaatctattttgggttgatttttgtgtatgatgtaaaacaaggatccagtgtcattattttggctgtggatgtacagttttcccagcacc

SEQ ID NO: 314458 - DNA, 575 bp, Homo sapiens
tagcatgattctgggatggagttttcagccctttgacatcaaaaggtaaagcagaggacatgaaaccctcactgcacatcccccatagactggcagaaccactctgtggccagtggtctcttattgggaaggaatactggacagtttattgaaatcacaaatgggaggggcagaatcaggcagctggttgatatagtagtgtagtgagcctttccaaagggctggtttcaggttaacccttagggaagaaagggtaawggtggttagtgaggaagggggtataatgacctcccatactgtcatggccacaaagtctgttttcaaggttttgctagggtcccctaggccaagaggaggtccattcagtcagctggaggccttaagatttcatttttatttctcattgttcaagagtatattgttcgttttccacatatttgtgggttttttttttcattttccttctcttactgatttttggttttattttatggtagtcaggaaacatacttggcatgatttaaatcttcctaaatgtgttaagatttcctttgtgaaccagcctgtgatatatc

SEQ ID NO: 314459 - DNA, 550 bp, Homo sapiens
catattcttctagttactgttatataatatatgaatgcaattcatgaattctaactatgagaaaatcacacttgtaaaaaaagatgtatttttcctgaaaatgagaatttattttccaatttcccagttattctgaataactgaagagaaaacctgtattagtctacttaccctgctatgacaaaataccacaagcttagtggcataaacaacagactgttattttctcacacttctggacactrgaaatccaaggtcaaggttcagcaaggtcagtttctggtaagggttctctttctggcttgcagatggtaaccttctcactgtgtactcacatgacttttcttctgtccacatgagatagaggcagagagagagagagagaagcagagaaacagagcactccccagagtctggtcctcctcttatacagacaccaatcccattagatcagagccccacccttattatctcatttaactttgattaccttcctaaaggtcctttctccaaataccattacattggggattgggacttagattttctt

SEQ ID NO: 314460 - DNA, 603 bp, Homo sapiens
gtacactcctgccttgctgagagaaatataaattatataatcttcctggaagacaaatgaacaacatatatcaacaaccttgaaaacatccagttctaggaagtaatctagagtaaataacctgatgacaactatttagttattaggatcttaattacagcattaaatataactaccaaaaatgaaaatgtcatcaatctccaataacagagtgatgtaagtaaataatgttatataaaggtatggaaaacagacactaaaaataaatactaattacatgagatgttaataggtaactaaacagaatatgagcaatgttttctaaatttaaaaatgtgtatcgcttgatatctctgctaaaaatatggtcatttctggggcttgcaaccatgcatgaattttaacttcttttaatcatttctgtatttttgaattttcaatgagcatgcactacttttgaaaacaaacaaatctcaaatttaaaggcragaaaatgtaagtatggctgatcaaaatctgtgtaatctacattccatgatgaatgacctttgttaactttaagtcatgcattcagctaattaatgaacttcaccccaaaataaa

SEQ ID NO: 314461 - DNA, 594 bp, Homo sapiens
tttcctttcaggcaaagggaacttaattaatgtaacactgctggcctctctccagcttttcactttctctgcctctgaagaataaagaagcagcttgccttgctgcttctctcttcctctggagatcatcctccctgcagagagcaaggcttggctctgccagctcagaaaaagctctgtccctgtggggagggaggagggaaagaaggcagaggacctgggatgtaattcaactgccacaccaagctatgtctaatcaaaactgatatttttgcccatggcagccaattatttatctttttcccttccaatatcccaacatgctgagatggggagtggggaggaggagagcttgatatttatttgattccttaaagacaccaacaacccacattcctgcacattttgtaattcttaaagtaactatatacctttctgtggtttatgtaattgcatatttaaatgcaaagagataatacaataaagcakttgtacattataaggaggtttctaaaccaaaagaaagaactgcataaaacatgcacaaaatgcagttttcttaaaatttctaatgacagttgtgataatcacatc

SEQ ID NO: 314462 - DNA, 608 bp, Homo sapiens
ttgtgaaagatgtaaagtggatagaaatactgtaatttgacagtgtatgacttttattacgaacaatgaaaacattagtgacatctataatgactgggttatacaactacacaaacgtacaccaaattaaataactcctttccgcaagactatgacaattttattagggcaacaacctcacgtacttaccacaattgccattcaatcagataatatcattttcaatccacaatataacataaaacccacatatacagtatatgtagtttttcacatgcccatcggccgctctgggtacacacacaggcacagagcagtatcaactagtcctttaaaaatcatgtttaagaatgaaacactaggctcaaaasgaaaaaagaaaaggaaacgagacatgtatgctacttcatctattgcttttgaaagaaattttatattaaaacaatgcagtgggcataacggtgtgttcaaagtgctctcggaaagttccctgaatgtgaataaggtgaaactaaagcaatattgctaaagactaatcacagtattcaatcaacttgagccgtatagaccttgccagtcctcctgcaacactgacttgtgattagtgt

SEQ ID NO: 314463 - DNA, 515 bp, Homo sapiens
caactttgggcattttggaagtaactgttatttgtgacacacacacacacaccccaaaaattcccaagtctgttttcctaccacaaacaccagggaggctgcatcacctttctagtgacttaattctgaaagcagaggctcaacctgccgagtggcaatcgaagaaaacacactacacaccagaataagatgagggtcgggaaaaaaagaaaaaagcagcttcgctttcagccattaattacggatcacmccaattttgcatcgctcatctcccatacacacgcacagccttccaaacctggctttcaggcggcgctttctggagcctggctgtctattgtcagcacgcagaagcccccgaaacctgtgaagccggctgcaaaggcttgctgggaagccgctaaatatagaccaagggggctcagggtctggcaagccgcgggagcctgaagacacggccatggacgcatatgactaagtctttccattttgttctagccaaacatcgtaatgac

SEQ ID NO: 314464 - DNA, 536 bp, Homo sapiens
ggggacagaattccaggttcagagttataggaactggggcttacattgaaaacgagtcacttagaaactagactatgaggcaaaaatcatcaatctttgaaggggaagagtttgcttaattataaagagaaactaccacagcagcctccttaccatctcacagtggaattttatccttgtggcatcaggcctagatagtttccaatgtagtctgccatcttggatttctctctggattcctccctctattttccagacacatttatttatacttacttttctttcattattatttktaataatttttgaatgcttacatgtgttcaatacttttactcattgagacacaagcccagtaaagttcatgcttgtggtggtacctgtggataagctatccagacccctctcgaaaaagcacttatttacacagatgctggaagtatttttggcatggataaattattccagttagccaccaatttagttgatggctaaacacctctccaaagtgcattttaatcaggagattttgaagc

SEQ ID NO: 314465 - DNA, 564 bp, Homo sapiens
aatgtccatctgtaccactgtccttacttggacagctaataaatcataaaaaggctgagattcatttaaggagagagctagacgcctctgaatttttacaaaattgtgcagatgacarattcctcctcaaaattttcatatttaagcatgctagcctgaattcgataaatcatataatattacatcattctaccactttatttccacaatatttattgagctgttgggttacttcttctaactttgagttagagaataattttcttttcttgatgtctttgctgttgtttttcaccaaatctaagaaaacttgattgtaagaagcaccattatgttaggtgctaatgtggaagaaaagatgctgacaaataattttaagatgtcatagattttaagatatgacacaatatcaaagacattgaaatgtgaaaaaatttatctcttaaattgatgcaatgtaatatttaatgatgatagtatcatactctagcaaagaatatctcagaaattcaggataggcttgagggaggagtcataagttgggtgaacctgatgcagggcctg

SEQ ID NO: 314466 - DNA, 589 bp, Homo sapiens
tgaggttaaactatgttgtatcatacatcacagtacattaaaaaaatactgagtagtattcattgtggctttgtcacaatttgtttatccactctccagttaatggactttgacattgttttcagtcattagttattatgaataaatttgctacaaacatttgcttaaaatatcaaacatgtttttgtttctcasgtaaatgcctaggaatggaatagatattcttaattgcatgcttagctttttaaaaacaccaaactcttacagaattgccatccacttttccatttccaagattccaggtataagggttctactttctccacaactttgtcagctctgtgtagcactgtgtggaatatatataattttttttctttcctgtgtttatttatttagagacagggtctcactctgttgcccaggctggagtgcagtggcacaatcaccgctcacagcagccttgaccttctgggctcaagcagtcctcctgcctcagcctcctgagtagcaggaactacaggcatacaccaccatgacccactaattttcctattttttgtagagataaggtttcaccatattgctc

SEQ ID NO: 314467 - DNA, 500 bp, Homo sapiens
tactgttctggcaatgactatatatctagattttggtatgagtaaagagmctcataaaatgatttaagaagtgttcagttccttctatattttgcaaatcttatatacaattggtataatttcttttaaatattcacctttgaagcaaattgtgtgttttctttgggtgaaggattttacctatgaattaaatcttctataagagggagaaagttatacttgttgtgcaattccccttgagtgagatttagatatttgtgtctctcaaggagtttgtggttttatctgtgttatcaaagataactggcataaaattgttaataataattccttattttccttttaatgtctttagttcttgtagtgatgttctgtttttccctgacttcagtattttatgttttctctatctttttcttgcttgatgtgtctactgatgtatcaattttattgttttcagagaacaggcttttctatttcatggatttgtttctattatt

SEQ ID NO: 314468 - DNA, 583 bp, Homo sapiens
tcaaactaaacaattattattgtatagtggcttatttggaatccacctatagatttatcttttggtactttagataggattataaccttggtaaagactcgtttggcataatgatctactagataatttcttttaacttccatattgccccttyttgcatggacctaaaccattatcatagtcatctgtctaagaagtaggagtgcctctaaaagttccttaactatagtctattttttttggtcggtgttgtcagctacctagaaacccctttgtttccaaagcatctcctaatcatgtattactccagaagcgtgtttgttatcagtatatatccctctctgaacttcggtgaatggaaaagctctagcaagtgcagtaagttctcccatctgggctgattttctctcaggtataagattgtattctaaaggagagcttaaattagtgagagtgtatcctgtttaatcccctccagtttcagttttgaggtatgatattagatgaagttgctcaatgtaagcctctaatacatctgggtgagatagtgaaggttacctaaccatggtaaggtgatcttgag

SEQ ID NO: 314469 - DNA, 614 bp, Homo sapiens
atgattatggcaaaaattatgtgctctagtacgatagcggtcaatttctacagtgaaaatgttgaatggagtttggatttgatgtaaatatttaatgaattataggattttttttttttacataggaataacacaaaaccccatgctaagaagaggagataatttcaggaaagtttttgatgtgcagttacaatgagcatytttatctagttagataacagggaatcttgagtatcattggaattcatccctatttctcctctcttctctccctttcttctagtgtcgaaacaggtacaagaaaaatcaatgctgtggagaatagaccataaattaagtgtcccaataatttgaacatatgatttaaatttaaatattttgtactacagttgataaaatgtagtactaaagttctaaaaaataactgtagctctgcagctatgaaaagagaataaagcaggatagaagtatgttttccctgcacttaagttcaacaaaagagtaaaagcttgtttactgtggaaagtattgtgaaaaagagatttcacattataacttcagagtttttctgattagatccacattttactttggcataagtgaaatatttatga

SEQ ID NO: 314470 - DNA, 582 bp, Homo sapiens
ctttgcacacaataggcactacctatgtttcctatgcataaatttccaagtgttaattcttgagatttctctcacaactctccaaaatgccatttatatcgatataatcagtataggtttgctcatatatttatggtgtgcattttcagatattgttttattaattttacacatcgtatttacttgactattccaaggcaaactgtcttgaatgtcctatctttatttcacaaatggccattattaaactattttttctttrtatattgtgatggctggtcccttaaggcagatgtgtcaggagctcatgtgtttaaggaggtctaagattatgaacaatcctcagagggaaaatgggataatggaccaataattgctgctgattgcaaaaatagattttcaccctttcatgagataaaaagaagcgttgtgtaattgctgtaaatgtgtcctatgccttcaggaattggattcagaagatattgcgacgttacacctgggagtctaaatatggttttgtactgattgctgattattatttttaggtatttgcaatctcttgtcttaatgtgctactatatg

SEQ ID NO: 314471 - DNA, 582 bp, Homo sapiens
ctttgcacacaataggcactacctatgtttcctatgcataaatttccaagtgttaattcttgagatttctctcacaactctccaaaatgccatttatatcgatataatcagtataggtttgctcatatatttatggtgtgcattttcagatattgttttattaattttacacatcgtatttacttgactattccaaggcaaactgtcttgaatgtcctatctttatttcacaaatggccattattaaactattttttctttatatattgtgatggctggtcccttaaggcagatgtgtcaggagctcatgtgtttaaggaggtctaagattatgaacaaycctcagagggaaaatgggataatggaccaataattgctgctgattgcaaaaatagattttcaccctttcatgagataaaaagaagcgttgtgtaattgctgtaaatgtgtcctatgccttcaggaattggattcagaagatattgcgacgttacacctgggagtctaaatatggttttgtactgattgctgattattatttttaggtatttgcaatctcttgtcttaatgtgctactatatg

SEQ ID NO: 314472 - DNA, 540 bp, Homo sapiens
taaattccatgtcattttgatgtttccacatcatgaccaactctactcaattgttgctacacttggccaggggacaccatttttagattcctgggcaagtratatattttttaagattcatagctcataaatctgaaaatagtttctttctcatataataaaatgaccacaaatagcatatagaatagaatgtatcataggcatcttctcatctcatgacaatattgttcatttatttgttttcttgagaaaataaaaaatatatataaattaaaaatcaaaccagtagattaaaaatgcagtagagtaattataaattggccagagctatttttaaagtatgagtcttttatgtacacttagccctattatttcaggttatctgtgggaaaaaaagttagctatttaaagggaagtgcttttttgttgttgttttcctaatcatgagttttatttttcacaaataatttaaaaatttaaaattatattgaaaaataatttttcaaaagtaatattcacatggttaggaaaactgaacat

SEQ ID NO: 314473 - DNA, 599 bp, Homo sapiens
acaatgtgataaaaaataaaaagaccattttctgagaagaaattcaagccagttgcagaaatttgtataataactgggagccaaatgttaatcaccaagacaatgaggaaaatgtcttcagggcatgatggaagtcttcacagcagtccctcccattatatatccagagacctaggaggaaaaaaatggttttgtggactgggcccagggccttgctgctwtgtgcagtctcaggacttcatgccctgcatccaagcaatggctaaaaggagccaacatacagctcaggctgtggcttcagagggggcagtccaaagccttggcagcttacacatggtgttcagcttgcaggtgcacagaagtcaagaattgaggtttgggaacctccacctaaatttcataggatgtatggaaatgcctggatgtccaggcagaagtgtactacagggcagagtcctcatggagaacctctactagggcagtgcagaagggaaatgtggggttggagctctcacacagtccccactgggcactgcctagtagagctatgagaagagagccaccatcctccagaccccagaatggtagatccaccaaca

SEQ ID NO: 314474 - DNA, 599 bp, Homo sapiens
acaatgtgataaaaaataaaaagaccattttctgagaagaaattcaagccagttgcagaaatttgtataataactgggagccaaatgttaatcaccaagacaatgaggaaaatgtcttcagggcatgatggaagtcttcacagcagtccctcccattatatatccagagacctaggaggaaaaaaatggttttgtggactgggcccagggccttgctgctatgtgcagtctcaggacttcatgccctgcatccaagcaatggctaaaaggagccaacatacagctcaggctgtggcttcagagggkgcagtccaaagccttggcagcttacacatggtgttcagcttgcaggtgcacagaagtcaagaattgaggtttgggaacctccacctaaatttcataggatgtatggaaatgcctggatgtccaggcagaagtgtactacagggcagagtcctcatggagaacctctactagggcagtgcagaagggaaatgtggggttggagctctcacacagtccccactgggcactgcctagtagagctatgagaagagagccaccatcctccagaccccagaatggtagatccaccaaca

SEQ ID NO: 314475 - DNA, 570 bp, Homo sapiens
gatattgaaatgtatcgtttttaaatgtgaaatatgcatatttgtaataactgattttcatctttctttcattttactccattgccattattttcctaatttcttgagatgagtacttagttcactaattagcagttattcttttctaataaatttccctctgtgtactaaactagctatattctttgagttttgctatttgctgttttaattggcatccagttataaacagtttctgaaattcattatgatgtctcaaagttaacttttaagagtaaacttcttagaatcatcattataaatcaagcctataagaaataagcataygtaatttttaaaagaaccatattttgaaatataagcacataatttttaagctgtgttaccaatatttgaatacgcttgaagattaactctgatatttaaagtatctaatattgagaagctttcatttcatattactgcctaattcacagcaagaaaatcaaggtttgcaaaaaaaatttcccaccttcaataatgatagttgtcgacagcaccatcaccatcatcatcatcatcatcatattc

SEQ ID NO: 314476 - DNA, 562 bp, Homo sapiens
attttatctctgtctctgtctccatttatctgtctctctgaaaaagaagagggacagatatgacagccacactaaatatgatctgagtttcataacactgaggctctcctcttctgcgtgtgcagggaagatcaggcaatcattgccttgcccctggagaaattaaggaatagggaccagcactaagatctctctgttttctgacccagagagcttgtatttcctatcaggatgaataaatagacattaaaatgtgacaaattccactgtgattcatccgaattaaaatgtccctgaattatcaaactttgaaacttgatacatccaatttaatgaatctggatagaawgtcatgaatggtcatggagggtgcaaaatcttcagaatacattattcgtacttacacaggccatatgtttggtatgagtgagatcatgagtaaaatatgttgggacacatcctgcaaactggaaagtgaagctgtgtagaattccatcaacataatgactatgtagacaagttcatgtactatgcaaaacattcgggagatactggtctttgg

SEQ ID NO: 314477 - DNA, 562 bp, Homo sapiens
attttatctctgtctctgtctccatttatctgtctctctgaaaaagaagagggacagatatgacagccacactaaatatgatctgagtttcataacactgaggctctcctcttctgcgtgtgcagggaagatcaggcaatcattgccttgcccctggagaaattaaggaatagggaccagcactaagatctctctgttttctgacccagagagcttgtatttcctatcaggatgaataaatagacattaaaatgtgacaaattccactgtgattcatccgaattaaaatgtccctgaattatcaaactttgaaacttgatacatccaatttaatgaatctggatagaaagtcatgaatggtcatggagggtgcaaaatcttcagaatacattattcgtacttacacaggccatatgtttggkatgagtgagatcatgagtaaaatatgttgggacacatcctgcaaactggaaagtgaagctgtgtagaattccatcaacataatgactatgtagacaagttcatgtactatgcaaaacattcgggagatactggtctttgg

SEQ ID NO: 314478 - DNA, 587 bp, Homo sapiens
ggtaatctgctacagaggaatagacttcttgcaagagtgattgctcaggagactgacttgtaggggagttggtttccagtgctttgccctgcaaagatttgtttaaaggccacattgggcaggaatacttgtgaggcctatgagtacatcactaaaatatgaccagtgccagagcatatcaacagtattttgaaaataggtttcactgaatggggtcagacaacttgataacgaaactattgtttgtgagcaaarggtattgtatttatggcatccaaactcatagtgagttaatgtatgggaagaggttgtaatgctatcctttatcttagtagaaatattattgggaagctcaaccccatgtgtggatgcagtttttaataccaattctgtataatttggggaatgactttttcagattccaccaatatgaaatatgagcctcctgccttgaaatattatgtgccaatatagtaaacactatatgggttaccaagatgatttagaagtacaaagtcatgtttctcttacataaccatggaaattaaattttcctttgagcaaaccaaattttttatcaaatttgt

SEQ ID NO: 314479 - DNA, 586 bp, Homo sapiens
agcaggctttttataagtagtgtcaatatgtcaatgggagctccaagtttatatgctagttgttgagcaaccataggaagaatgtactttttcctgatggttccaagagactgttaaggattcactctgcctgatctagcctggatctcatgggaatcatcctggacaagagaaagaaatattctgacctaggaggtttgggtcaggatttgactcacatgatacacaatccacatataccatatgcctccctcagagctatgtgtatagaagctctctacgagaagctctgggtgtggaagacatagcctgaactaacagtgtgaagcatggcatgatacaggcttaggacattcatgaagggtttgtgcaaagtgaagggcaacatgtccttaggaagtaaacattgccattgtgtaaataaggtagggggaaaatttagtcattctgtgacacaccaaatttcaaaagatctacaccattaccagtcagtcccaaawtcacgttatgggtagtaattaattttcccatgctacaacatcaaacgcactatattaatgttgttattttgaattttatttatttt

SEQ ID NO: 314480 - DNA, 548 bp, Homo sapiens
ataaattgcgcatgtatttgtgctgcgtagttacctataagtttttaagggtagacatattcaacatatgcagtgtctcgcacatgtatgttttgttgtaaatcgtaaaaaaagttcattctttgaataagtaaatgtaagtctatacaatattacagagaagaaaactcctttaggaaaatacactgctgtagaggaatctattacaagaatagttttatctcatctttggaaaacggacagtgaagacggcaaaaatgttaaaaatgttcagaaatcattgactttttgtataaaagaagatcaggccggtcrtgttggctcatgactgtaatcccagcactttgaggccaaggtgggcagatcacaaggtcaggaatttgagaccagcctggccaacatggtaaaaccttgtctctactaaaaaaagaatacaaaaattagctgggtgtggtggcacgtgcctgtaatcccagctactcaggaggctgaggcaggagaatcgcttgaaccagggagtcagaggttgcagtgagccgagattgtgc

SEQ ID NO: 314481 - DNA, 622 bp, Homo sapiens
atccatttagtttattttcatgtgaaataaccttccctctccacatttaataataactttttgaagaatctaagctaacttttctatagagcgtttcaaattttgaatcttattgtttcctcttgatattgttcctcaacccctgctttttctgaaaactgaaagatctaaagatgtaattagattcagattacacatttctgtcaagaaatcttcatagttatattgcatatttcatattgccatatagggttgtcctgtcacaagtgataaaaccatttttttacttaagctgttgactgccagacctctccactgtaaaagttcatgtttgtgtgtgtaatcagtaagtgattgtgctgcaatgcaaatacattattctgcaacaacttttcagccaatagttcaaccagtagtaaatgagatttacttgcatcagtgttttacactggggattggaaaatggcatattctctttatctcatatttccttctacatttattagctgtagttactgttttaaaagtttgtcttctcacccaggccacacacaccttctctctcrgaatactccacaactaacagttatcaaagcctagcaaagtaacaagatacatcatt

SEQ ID NO: 314482 - DNA, 579 bp, Homo sapiens
aggattttaaaagatcttaacacatggaaacatacgatgaaactaagagctaaacctaagagggatatatgtaaattaccatattggttttaacaatctgctgcacaagaacttcatggagattgaacttaatcatagtttatgtaagtaatatcaaagtcttttagaagaaaactcagcatgtattaatcaacagtggtattatgactattttagtagccaacattttgttactaatcatcagtacaattatactcaccagagaaatggatgtaataactttaatgtactttttattcaacaaaattagttctaggcagtagcatagttggaagggggcaagataggaggagatcatacggacaatggaaaagatttttcaaatgaaacaattccttaagaactttcaagataatgtgatggcatgctggtcrctagcattatgaaataaggatgttggagaaaacacggtgaggcaagatcatgaaattggctgagttcactcagaggtctacagttttctatctgtatgtgctttcaccaagcataacacaggccaaaccaacctgagctgggcca

SEQ ID NO: 314483 - DNA, 580 bp, Homo sapiens
ggctagtttgtctgtgattgtgcaatttggtcacaatgtctctttacaatcaactaaaacacagctatggtccttgagcaagtatattaaaacagcagacatttatataatgcacacaacaggaagcataaaaagggaaaaggaaaacattctttgtttagatgtatcttgaaatgtaagtaagaacacagtgtgtatttgatctctttaaaacttcacattactttgtgtagttaccagcttgaattgtaaatgtatttttattcttatggaaaacgtcttagaaaaacaataaatcatgctagacttgaacatgtcactttcttacctgtgtttgtcattttgaatatttgtcatgagtgaggctacagtttcccttatgggactcatatttataaaattctgtgctgttaatgcaggtcctcaaattaaaatgaattagtttttttttttaaataaaatgggggttaaagcaaaatcaccctagtatactcactagatactcactgtacctcaytgcaatgtgaaatctctgtttccccaaaacacatgtatttttctcattagaaaagatattttt

SEQ ID NO: 314484 - DNA, 480 bp, Homo sapiens
taatgtatttttttgttaaaacagtattttgcaaaatgacaattaaaaaaatatacagggtgtggctggcaaaatggccaaataggaacagctccagtctscagctcccagagagatcaacacagaaggcgggtgattttcacatttccaactgaggtacccagttcatctcattgggactggttagagagtgggtgcagcccatggagggcaagcagaagcagagtgggacgtctcctcacccaagaagcacaaggggttggggaatcctcctctagccaagggaagctgtgacggactgtgccgagagaaatggtgtactccagtcaagatactatgcttttcccatggtcttcacaatccaaagaccaggagattccctcgtgtgcctacacatctctagggccctgggtttcaagcacaaaactgggtggccatttgggcagacaccaagctagctgcaggagttttgtttcatac

SEQ ID NO: 314485 - DNA, 621 bp, Homo sapiens
agcgaagttattatataaatataaaaatcaaaatgcctgattttgttttaagaaactctgtataaatgaagatgaaaaaggattttattagaagaaattgtctctggatattgaactttgagccagagcatggcaagtaaaaccctttggtttgtagtgaggcagtctcctgaatgaaaaaaaaaaaaatgttgaaggaaatatcctaagaacaggttttagtacaaggccgaatgatctaaccattactggctacggaatgaaaactacacatcaacattacacaaatgggaaaagttaaagaaagggaattgtcgtgctctggagccaaagggaaatagcagcaraaaacaactcagtctgtatgtagtagcaagcacctctgtgatctctcccatagatggaaaccatagttaacttgcagagatagatagaagccaccttcattccaacttccaaatggctcttgcattgttactaacactctaaatgaaggtacttattgtcttactcctatacacatctttgaaacataaatgtttctatgagtgtaacacataagtctgagtacgtttttcaaggtatctttactctgagacaggaggctaagctaatttagtc

SEQ ID NO: 314486 - DNA, 583 bp, Homo sapiens
cttttttatttttgctgttttcaacttcattttgttttaaatatctatttgaatcagcatgtaattagattttgttttgtaagacaattgatgagactttctgttttagaagataagtttaagccaattacgtttattatcagaactcacaacttctatcatatttttccatgcatttattttttaatgttttcttatgaattcttttttttatttgattatcttggcaactcaatgatacttgttttcttaatttctatgcatgcttattggttttagccattattttacatacggtgttataatyataaaaatttgcatgtaaacttatattctaagtcatctataggaaagatgagggcttcagatatttttcttactctgctgccttatcagttgttgttagtgagatctgtgatttccaatgggaattattgtcatttttcaaatttcattatttatttcaataattattgtttattctttcattgtctttatcatatatagctatttgtctacttctacttatacttctttaaagctttagtataatttttaacccctcaccagttgtcttatgcta

SEQ ID NO: 314487 - DNA, 621 bp, Homo sapiens
tactcattaatcagtaaatatttgtcaaatgaataatgctaaaatattaactggcttaccaaattatgttccagagtcttttttagggagctactggctaaaaatccttacttcttagttttactttctttttctactttcttactatctctttatatctagagaagacatcatagtcccaagagaatacttagaaaatagtgctgactgctctttcctgattacaaaccctcatatttttgccttgaacttgtcatcattgaaggagtcaatgcccaggaatagaaaagacatcttgccacagaagcatagttagagtccagagtaacagytcatgttcttatttctacagttcaccattagaactcttcttaaggcttcccatattctcaaggctttaaacatgtgcacacacacacacacacgtgggcatttatctatgtatctatgtatctatgtatctatctatctatctatctatgtatctatctatctgtctatctatctatctatctatctatctatctatctatctatctatctatctctatctatctaccatctaaagctattcttggttgaaagaaggtacatgacaagtcattttgaagaaatgaccac

SEQ ID NO: 314488 - DNA, 621 bp, Homo sapiens
tactcattaatcagtaaatatttgtcaaatgaataatgctaaaatattaactggcttaccaaattatgttccagagtcttttttagggagctactggctaaaaatccttacttcttagttttactttctttttctactttcttactatctctttatatctagagaagacatcatagtcccaagagaatacttagaaaatagtgctgactgctctttcctgattacaaaccctcatatttttgccttgaacttgtcatcattgaaggagtcaatgcccaggaatagaaaagacatcttgccacagaagcatagttagagtccagagtaacagttcatgttcttatttctacagttcaccattagaactcttcytaaggcttcccatattctcaaggctttaaacatgtgcacacacacacacacacgtgggcatttatctatgtatctatgtatctatgtatctatctatctatctatctatgtatctatctatctgtctatctatctatctatctatctatctatctatctatctatctatctatctctatctatctaccatctaaagctattcttggttgaaagaaggtacatgacaagtcattttgaagaaatgaccac

SEQ ID NO: 314489 - DNA, 621 bp, Homo sapiens
tactcattaatcagtaaatatttgtcaaatgaataatgctaaaatattaactggcttaccaaattatgttccagagtcttttttagggagctactggctaaaaatccttacttcttagttttactttctttttctactttcttactatctctttatatctagagaagacatcatagtcccaagagaatacttagaaaatagtgctgactgctctttcctgattacaaaccctcatatttttgccttgaacttgtcatcattgaaggagtcaatgcccaggaatagaaaagacatcttgccacagaagcatagttagagtccagagtaacagttcatgttcttatttctacagttcaccattagaactcttcttaaggcttcccatattctcaaggctttaaacatgtgcacacacacacacacacgtgggcatttatctatgtatctatgtatctatgtatctatctatctatctatctatstatctatctatctgtctatctatctatctatctatctatctatctatctatctatctatctatctctatctatctaccatctaaagctattcttggttgaaagaaggtacatgacaagtcattttgaagaaatgaccac

SEQ ID NO: 314490 - DNA, 573 bp, Homo sapiens
tgttattagcagaaattatgaaatgaacggtttgtactagtttgacaggaaaagataataaatcctgaattttagatagtagtgagaaccctaattggagatatccaatatgaaggtgaaaattagaagcgaaacctggagaagaaattagaatatgttttcttgttaactatgtagaagtgacccttaagacaaagcaaatgaagccgttcagaaaaggcaattaagagaggagaacagaagacaaaaacctggacatctcaaccactggtcttctgtggtgcaaagggttaaaacttttgacatgagggcaatgcccttcctagattaaaagcatctatcgttaaaacctctttatgttaccacagaccattctttcaaaggcaagaaatgtattacaaagaaagttgaccttttaatagaggtcaataatatattagaatatttctttcaaaggattgmtcttcttaccttatatataataatatgattatttttctcaaatacaaaacatagcatcattaaaatgtataaaattaaacacttaaaatctgtcctcaaaagagcattaac

SEQ ID NO: 314491 - DNA, 581 bp, Homo sapiens
ctaagtaatgtttaaattatatcattcaatctagtcataagaaaatgttcataaattcaaataatgaaattcatggattttttgagggaatatcagacttgtgtttcttccaaaagtttcaccttgctaayatttgccttaagacaacaaaatttttactgaaagagcaatcgtattaatctacattactactcagtggtggccctctttgccttctttgtaaataagaaaatattccatggtcccttattttatccatggaccaggaaacctgccatccatttaacaaactcactccatcttctgcatgtccaggtgacactgtattttctatacagaaacatcaaatgaggaaaatttacatattaataaagtataaaagaagttaatgtaatattgttctttgtcaacttaacacagaaacatgtttcccagaatctaattttccaggttagcattggctataaaagacacatttcattgtattagaagcacgggaaaaaaagcaggagccatacttcttagctttgaaggttggtaaaaggtgccaggccctgcggcaacttgtgtgtgttgtcact

SEQ ID NO: 314492 - DNA, 469 bp, Homo sapiens
agccaggcaccttttagcaagttaattacattggaccatttccatcataggaagcacaccatttcattcttattccagataaagattttmcctccttgtctgcatttttttcttgcaaaatcatcattcttaaacttatagaataccttaatcgctgtcaccttattgcatacaggattgcttctgaccaagaaatttattatctgaccaaagaatgctgaataaaaaatgaaatatagcaatgaactcatattcacaggattaactgatattaccatgttctccatcactctgagaattgtgtaatggacttctaaagactgttaaagcaccatttgggaggcaacaccttgaaagtctagggtatttaggatgttacataacttctaaattaggtcgccccaccaggcaagaaatcatatacacctgggttgcttgctgagcgcagacgtaataagaaatggctagt

SEQ ID NO: 314493 - DNA, 606 bp, Homo sapiens
gtttccccattggccggagtcaggtcgtacaatctaaactaatccctgttggctaaacrtttgattttttttggatagggtggacacgtaaaagaaagtggagaggagggggaaggggtgtctgtaatgagctagaaagttagtcctctttccaagtaaggaaaggaatgtgagctggtattgataacacctggtactgaggcgtgcctgggcatctaacaaggcaaaaaggaaaaaggagaaaaaggcggggcggtactacgaattaaagaataaaagattgatcagattacttgaagaaaaacctcatcatatccgtttcataagaaacttcaaaacgtgtgtgtgtgtgtgtgtgtgtgtgtgtgtgtgtgtgtttgtgtgtttgtttccagagtggctctatagttaaaagggttccttcaggactttggaatatagagtgagatttttacttttatttttatttgtctattctcactgacatttctaaattgtgggctgctctaggacccagggcagaatagatacaaatattactgaagacactgtccacggaaccacccctagacagttcatcttccatttattttttagactattctg

SEQ ID NO: 314494 - DNA, 564 bp, Homo sapiens
aaatttgcaaagaagtgggttatctcaagataaatatataagtstacttccatcctcatatttgttgtttttatctgaacctgttgctaattattggaaatatacaagaaatatacgtgattcacaaagacaaacagatccaagtaaataacacgtcttgcatctacccagtaatctcacatattcaactcaagtttatggaaagggcaatatgttatactggttaggcactggctgctgtgctcagaatagctgtttctaatccagacagccatgtactcactttatgatttcaggcaagctttccaacttcccgatgttttgatttcttcactttgagcagtgatgctgaataaagtttgtgagcaggttaaataagataatcaataggaagagcttaaaatgcagcttgaaatataagaaatggcctatatattgaatattattatatactgaagggagaacaaaaatgacataatatgataacttttttgagtacttgcaatatgctaacaataagtttagcactttttctaaattatatcactacattttcataactct

SEQ ID NO: 314495 - DNA, 605 bp, Homo sapiens
ttttacctttgtaatttaaaaagcaataaatattattaaatatgattatgtacacgtaatgccagtgaggtggaaaaatgctcctacgttgcagatgatgaacttgagatatagctatttagaaactttcccaagactatgtcagcagtaaataatgaaggcaattttaacctctattgtctagcataaagagtagactatttccagttttcaaaactagtagaaatatagcwaaagaaaaaaaatagataattaaaaagtttctacctgtaatgttaatattgaagaccatgaacactgtatgtatgtatatgattctgaatttgtaacgactaaaatggggtgtgtttatttctttatgaatattataattattgagaacaagggaacttcctaacacatatacaatgatacaacacatcatgaggtgtgacagggctcactatctgaggataaatgtatataaagcctaattacttcttaggtttatatgaatttcaaactctaaaagaatactctcaattttttttttacttttttgtttgaaagaatgtaactttaaaatcattttagatgacaaaaataattattcaagcatgataagc

SEQ ID NO: 314496 - DNA, 597 bp, Homo sapiens
gggattctgtatatttacataatttatattacactttcatcatagattccatttttgaaattctagtcattaatcctgaaagacgatatatatctttaaattttttgagacagggtctcactgttgcccaggcgaattataycttgctatttaattttcagaaaaatgatgtgtacagatccttttgtggatcctgtcactgatcaactgtgcgatactagaattctcatctcaaatatgaagtttaatcatcagattaaaacttttcacagaacttctaagtgaccagtaacataaagggaagagaagcgtacaggttacagatattattttgaatactaataaaattctacattgggactatttttttgcaacctcttttctctcttgacttccatttaggtaaatagattcagattcctcacttattttctattgaaaaattagaaaagtatcttacatcaagaattggctttaaatatcaaggaaaatttgaatcacagacaagccaaagcaatggctgactttgtgtatattttgcctctatttgcacttaaagactactcctgcatctacctgtaaaagtagcagcaaatg

SEQ ID NO: 314497 - DNA, 566 bp, Homo sapiens
tagtgggtgaacgagtaaataactattctacacatgatggtttggggttatttttggaagctaatttatgaacttttgactgtaattctaaaatcttgacttttcagaaggaactagacctcagaaatctactctawttaaaatatgctatttgataagtaaaagacaacaatacacaataatacaacctacctgatctagtaacgactctatcgtttatacatttaatcatcacaatgaatttgtgaggttggtccaattattgtttcaattggtagatgatgacactgatatacagaaatcacaagtaacttgcctggagtcccacagtcagtaaaggatagggtttgaataacacacctctctcaattaaacacatacccaaatatttgaagggaaagtttgttctagaataatggtatgaggacacattgttctttcgtacataggggtcctgactttttatataaattcctaaataataagaaggactagaagctaatacacagcattggatgaaagcttgaatgcaaaatagtcaactttattcatcaatacttatttaa

SEQ ID NO: 314498 - DNA, 555 bp, Homo sapiens
ttgaatgatatttctgtctttagatcttttaagaatctccacactgtcttccacaactgggtgaactaattcacacccctaccaacagtgtacaagtgttcccctttctccacaacctcttcagcatctattattatttttttgactttttaataataaccattgagactagtgtgggatgttatctcattatggttttaatttgcatttgtctaatgattagtgatactgaccaggtcagcaatcacttattgcaatcagcccagaagggagagttcgtgctatgagcccaagccaggggctccctgtttgatgatgagcagttgtgggtgtgtgggacytgagagagatggactgacctcctctctttgggttgactgcaacttgttggaggtatggataaggcacttagggtctttgccccttcattagcctgagggtagcaaggacagttccactgcagaggcagtggcagacaggctttcagttgcccctctgaggctctgtccagggagtaacagctgataccggcttgagagctcttgttgggggtgg

SEQ ID NO: 314499 - DNA, 454 bp, Homo sapiens
ggagtcagagcatcagtgaggtaatagaggtagattatgtgaccctgcaggccatggaawataactcttatattccctgcatgagacaggaagcctctggagggttttgagcagagaagctgatatgacttgaatatgattttttaaaggtcactctggattgccatcgagtgtcaagacagcagaaagaccagtttagaaggctactttagccatacagggtgagagataatggacgtggtaggggtagaaatggtaagaaatatttctattctggatgtattttgaatataaatctaacagcaatttcagaagaattgatggtgagaaaaagaattaagtcatggatatctccaggtttgtaggtctaagcaactagaataatagggctgttacttattgtcataagaagattgtgggacaatcagccttgaagggaatgattaatttgttt

SEQ ID NO: 314500 - DNA, 454 bp, Homo sapiens
ggagtcagagcatcagtgaggtaatagaggtagattatgtgaccctgcaggccatggaaaataactcttatattccctgcatgagacaggaagcctctggagggttttgagcagagaagctgatatgacttgaatatgattttttaaaggtcactctggattgccatcgagtgtcaagacagcagaaagaccagtttagaaggctactttagccatacagggtgagagataatggacgtggtaggggtagaaatggtaagaaatatttctattctggatgtattttgaatataaatctaacagcaatttcagaagaattgatggtgagaaaaagaattaagtcatggatatctccaggtttgtaggyctaagcaactagaataatagggctgttacttattgtcataagaagattgtgggacaatcagccttgaagggaatgattaatttgttt

SEQ ID NO: 314501 - DNA, 285 bp, Homo sapiens
tgcagtcaagccaaagagaggaggtcagttcatcttcyctgggtcccacacactcccaatggttcataatcaaggaaacaattcaacccacagagaatagagaaaagcaaggcagaacgacagcccacccaggagaaacatggtgccaaaggaacctcccctgcccagggaagtggtgattgaatttgtgactccgggaacccttgtttcacccacggatatttgcatccttggttcaggagatcccctcatgagcccactccatcagggccttcagtctgacac

SEQ ID NO: 314502 - DNA, 511 bp, Homo sapiens
tctggaattttattttgtagtcaaaaaacagatgaacactaaatgtacaggaaacaaatgtgaacatagtttcttttatattctcacattttttattgggaaaatcaattgttttcatgtttcaaatgggaaccttcatttattacataatagcaataaattgtgagaattagaaaatgcttgggtctaatgtatatgtgtgatagtaacatagttacaggatttataaaatataagatatttaaatcctattgtatttaggattttggktactaatataaactcattagagtctctaatattaggatttgaggtgatggattaacaataccccctttcccctttgattttgtgtcacttgagaagtagaattgggctcaagaagatggagatcaaaatatcagcattagtatgaaggagatttcagacaaaacagattatgtggatggaaatgatgaactgtgtggttactttcagataagttgtggaagcattcaagcataagatgaga

SEQ ID NO: 314503 - DNA, 511 bp, Homo sapiens
tctggaattttattttgtagtcaaaaaacagatgaacactaaatgtacaggaaacaaatgtgaacatagtttcttttatattctcacattttttattgggaaaatcaattgttttcatgtttcaaatgggaaccttcatttattacataatagcaataaattgtgagaattagaaaatgcttgggtctaatgtatatgtgtgatagtaacatagttacaggatttataaaatataagatatttaaatcctattgtatttaggattttgggtactaatataaactcattagagtctctaatattaggatttgaggtgatggattracaataccccctttcccctttgattttgtgtcacttgagaagtagaattgggctcaagaagatggagatcaaaatatcagcattagtatgaaggagatttcagacaaaacagattatgtggatggaaatgatgaactgtgtggttactttcagataagttgtggaagcattcaagcataagatgaga

SEQ ID NO: 314504 - DNA, 285 bp, Homo sapiens
tgcagtcaagccaaagagaggaggtcagttcatcttctctgggtcccacacactcccaatggttcataatcaaggaaacaattcaacccacagagaatagagaaaagcaaggcagaacgacagcccacccaggagaaacatggtgccaaaggaacctcccctgcccagggaagtggtgattgaatttgtgactcygggaacccttgtttcacccacggatatttgcatccttggttcaggagatcccctcatgagcccactccatcagggccttcagtctgacac

SEQ ID NO: 314505 - DNA, 540 bp, Homo sapiens
aagttttctcaccctcagcattagcggcatttgagccagttagggcgtgtggctgtcctatgcatggtagaaagtttagcagcattcctggtttctacttactaaatgctgacagctccccctcgccccagttttgacagctgaaaataactccaaacattgctaaatgtcccatgggagataaaattgacagcaattgagagctactgacctagagagaagagaaattaggcattatcacgagaggggtatggtgtccttttttttcagtttttttgttttgttttgttttgcttaggatgaaggatgcttgtatatatttaaaactggcagagtagtgtccaattatccacataaggttractacctgagattcttttcctcactctcctaaaacattactaaaataacagtggcaataaaggctcaaaagagatacaaactccaaaaggacaaagaaaacagtggaatagacatggacagatgagcaatttaagtagtttttctgaacccagaaaagagacattgtggtgattactg

SEQ ID NO: 314506 - DNA, 371 bp, Homo sapiens
cagccccctcattatgtgatactttgctccacccagggactattgaggagccccacgaacaagaagattctaaccagatgcacccacttgacyttggactttccagcctccagaaatgaaagaaacaaatttcatttcttatacattacccagtttcaaatattctgttacaagcaacagaaaatgaactaagacagatgttcagaaaggtttctctggggaagtgacatttgaacaaagatataaagtataaaaagaaaaatatcatgcaaatatttgaaagaggagaatttcagaaagaaggaacaacaagtttaaaggccttgaagagatagcaaaaatgctctttttaagggagcaaaaatccagac

SEQ ID NO: 314507 - DNA, 371 bp, Homo sapiens
cagccccctcattatgtgatactttgctccacccagggactattgaggagccccacgaacaagaagattctaaccagatgcacccacttgaccttggactttccagcctccagaaatgaaagaaacaaatttcatttcttatacattacccagtttcaaatattctgttacaagcaacagaaaatgaactaagacagatgttcagaaaggtttctctggggaagtgacatttgaacaaagatataaagtataaaaagaaaaatatcatgcaaatatttgaaagaggagaatttcagaaagaaggaacaacaagtttaaaggccttgargagatagcaaaaatgctctttttaagggagcaaaaatccagac

SEQ ID NO: 314508 - DNA, 540 bp, Homo sapiens
ctaacctatgttaccacatgtatctgacctgaaatatctacattggatctgattgyttttaaaaattcatcaaaaatataatgtgactccctcctttcttaaatataagttggtgtatttgcaaagggagggttatatcttgttctcgagtaatctccaaaagtactatttggttttatcataattctcagaaataaagtgaatgcacctacagaaccattagctctaaaataaaaggtataatgctgggttgcaaccctgtgcaatttcagacacccatgcttatattatatatttcattgattaacttaaagttacatgaaatatttcctttgtttatttattcattcacgatcacctggagaaaattttaaatatttctaacttattacagtgtgatgtaaaagccaagtgtgccaagggattttaatattctcaattttttttagaaaagtttaaaactggagaaaataattgtcagtgcatgtttccctccattgttacgtctgccacctgattaaactatgctaatgagacagt

SEQ ID NO: 314509 - DNA, 529 bp, Homo sapiens
acaatgcacctctattagtgagttttgactgtgaaccatgttgtctccacctcccaataaatattatttttaactcattggtagataaataaagtgtctttagaaaatggttattgatgacaatttggggatcagtttaaggtctgtagtgctcggatgcccagcaacagtaamtgcatttttcagtgtttcatgaatgatttcctaatatagtccattcccctcccccccaccaatttaatatgagagtgaagaggaaaagtgagctctgtatgtataatgtattttcataggataattgacttagtagcaattaaaatagtgatgtatagacatcaaaagggtatctgtggattcaaaggggtttccagcaatgcacgggtgaggaattctctgaaagataaatcaaaggtagatgtttaggtagtgatcttaaacttacttggttagaaacataaattatagaaaatcttatgcaagttagagaccattatggtttttgtcactcaaggcagtccttgcatgttag

SEQ ID NO: 314510 - DNA, 584 bp, Homo sapiens
agaatcctattcccacattccttccttgacctatgaaataagaactttgccaattctgccatcgtgttaggcaagtactggggaagaagcttccgccattttctccatcctatgtacttcctcggccccacaggaagatgggtgacttttctaattagtatcctggggcaaaggctacagcttgcaggtgatccacattcttggcttcagttttctctttttcactttccttatcatcagtgtgcccaccagggatttgtgttcactctcaccactcctgcacttamcgcaggaagtctgcatgaattagaatgaggcagcattctctcagccctgtcttgctaaattctagagtggatgaaaggttattctctatgtggttcaacaggtaaatccctgctcaaacaaactcccaacactgctcaacactcccagcaaaaacgctccaaggtcaagttgggaaagctagatgaaataggaagtcttactttgctgtcaaagcccaaactttttcacctaatataatactaacaatatttagaacgtattttaacatttaatatttaaattctcacctcattttt

SEQ ID NO: 314511 - DNA, 609 bp, Homo sapiens
gcttgggtaggggaactcccctttttaaaactgtcagatctcctgagacttatccactatcatgagaacagcatggggaagacctgcccctatgattcaattacttccaccaggtccctcccacgacacatgggaattatggaagctacaattcaagatgagatttgggtggggacacagccaaaccatatcagcctctatggcattttctttttcttgstattactcctgatgattgtatgtgtgtgtgtgttgatgtcctggtctgaagtaaacttggcaataggacatgagatcaagtttataattattctaattattttgaaatatccataaataaattatggggggaaaatatttttggagcagaaacgatttttaatataaatgtatgttttctagggtaattttctcaggtttctttgcataaaatgagctaatcactagaaccaaatcaccatctgccaagttttacaatgtgcaaaatcccaagtactatattagtttctgtggaatatcttaaacatgccctgggaccactgtcataataatatatatgccaattataagcaaatctaccagccaacacagcaatttttcctacatttg

SEQ ID NO: 314512 - DNA, 609 bp, Homo sapiens
gcttgggtaggggaactcccctttttaaaactgtcagatctcctgagacttatccactatcatgagaacagcatggggaagacctgcccctatgattcaattacttccaccaggtccctcccacgacacatgggaattatggaagctacaattcaagatgagatttgggtggggacacagccaaaccatatcagcctctatggcattttctttttcttggtattactcctgatgattgtatgtgtgtgtgtgttgatgtcctggtctgaagtaaacttggcaataggacatgagatcaagtttataattattctaattattttgaaayatccataaataaattatggggggaaaatatttttggagcagaaacgatttttaatataaatgtatgttttctagggtaattttctcaggtttctttgcataaaatgagctaatcactagaaccaaatcaccatctgccaagttttacaatgtgcaaaatcccaagtactatattagtttctgtggaatatcttaaacatgccctgggaccactgtcataataatatatatgccaattataagcaaatctaccagccaacacagcaatttttcctacatttg

SEQ ID NO: 314513 - DNA, 470 bp, Homo sapiens
ttactttctgatgtttatacatttttcataatgctgttcccagtagaactgatttctgtatttcttacagcaatagtatgaagaatcaaccttttaaaaggattgggatttgctgacactgctgatagagtgccttgttagctgagagacaatgatgtggttaaatgcagcaaagtaataactttgagaaatgaggaggtatcaagaaagggagttgtacagccctatatgtctgcayttgtgtgagagaaaaaagagaggaaaatagtgagatagacagaaatgaaataagacagtcagagcagaggattcagacaatgtgccactgaggtcgataaatctatacttattttttacattctgcaaggtcatagatgacgctgacattggtctcctagcaaccaactctactaacctacttttgtccctatcactggagaatgggtttggtgctttgagctgtgtttcta

SEQ ID NO: 314514 - DNA, 476 bp, Homo sapiens
acacaacctaccaatactgaatcataaaaaagaagaaaatctgaaccgatcaaatacaagtaagaagatttaattggtaatcaaaaacctccaaacaaagaaaagggtaggactagatgtattttaccaagcctttaaagaattaastcccatcttcctgaaacttttctgaaatattgatgagaagggaacatttctaggctaagtctatgaagccaacattgtccttatgccaaaaccaggcaaagacactccaaggtagctacagaacaatatctctgaaaagtattaatgcaaaaattctcaacataatactagaaaaccaaattcaacattaaaaggattatataccatgaacaggaggaatttaatcctgaaatgcaaggatggcttaacataacaaagtcaattaatataatgcatcatattaacataatgagggctaaaaaccacctcaattaatgcaaataaagcat

SEQ ID NO: 314515 - DNA, 561 bp, Homo sapiens
attaatggcaaccaaagccattcctaacagatataacattttaattatgaatataattgccttcatagcttacaatttatataggtgttcttggaaattaattatgcmttgttttaacattgtaattattattactctggattagtctctactggtttcagcagtaaaacatgtcacctctgagaaaatgggaagagatcagatgatactagaatgagaattgtttagtaaccatacagatttaaaatgtaaacccaatctgctattgattggttctgtgatagtctgccatattacctaagcttcattttcccagtaacagtgaaggcaacataatatatatcttacacagtagtagctagaattaaatgagataattataaaactgtttgacaaagtacataggacaaagtaaacgccccagaagttcattgctctctggcctgataatggcccttaggaactcatgtggcagtgtccaccccttttctgtctggaaatatagctagttggtgaattatttgctctcttaccttatgtatatctggtagcaagagacgt

SEQ ID NO: 314516 - DNA, 561 bp, Homo sapiens
attaatggcaaccaaagccattcctaacagatataacattttaattatgaatataattgccttcatagcttacaatttatataggtgttcttggaaattaattatgcattgttttaacattgtaattattattactctggattagtctctactggtttcagcagtaaaacatgtcacctctgagaaaaygggaagagatcagatgatactagaatgagaattgtttagtaaccatacagatttaaaatgtaaacccaatctgctattgattggttctgtgatagtctgccatattacctaagcttcattttcccagtaacagtgaaggcaacataatatatatcttacacagtagtagctagaattaaatgagataattataaaactgtttgacaaagtacataggacaaagtaaacgccccagaagttcattgctctctggcctgataatggcccttaggaactcatgtggcagtgtccaccccttttctgtctggaaatatagctagttggtgaattatttgctctcttaccttatgtatatctggtagcaagagacgt

SEQ ID NO: 314517 - DNA, 434 bp, Homo sapiens
caacctagttgttgatgaactttttgattcttcaattaaggaaaccataatttcaatttcagataatttgagcaaggtcataaactatcctatttataccatagcatgacagttaagaatcctgtgtaaagacctcaatgtagctcttttgagatggtgcragattttctaaaatgtattcataaatttttattttagttgtggatttgttgctagataaatgtgtagcatttttcatcataataataatattcagaattctgagaatttgcctaattaaaagttgttcaataatgtattaatttattaattaaataaaaatcacaaaaatactggttaggtaagccctctttgactctaatttgcttacgaatcactgaagatggtgtattactattaactgtgggaccaaataatagttgtttttgtaagca

SEQ ID NO: 314518 - DNA, 577 bp, Homo sapiens
gtataaataaatacaatttaatataattgtaaatactagataaaataattataaatataagatttattcaaagaagagaaggccttgctttaaataattgtatcttagtttcagcaaaaatgaaattacataaataaagagttttgatagtttcaratcttccttacccccacagtacagtaaaaccaacagagaatttcacccaatttgttttctttgatcttcttggctgcctttcagttagagctgtgaagacggaaagtgtttttcttctgaccatttcacgaaagcggtccctctcctgtttccactcttcccctcctggtttggagttttccttttcatgttgaaaagtgttttaattgcagcaatgggagggaatacggagccctttatctaaagcctttctgctagttatatatctttaagttgcaaatatatctggcttgtaatttaaatcataattgtactttctatggaagatactaagatgaaaagcagagggcagcctaccacatacaaacgccactgtgcgcatacacacacacacacacacacacacacacacacaaagaga

SEQ ID NO: 314519 - DNA, 540 bp, Homo sapiens
ataaaataattataaatataagatttattcaaagaagagaaggccttgctttaaataattgtatcttagtttcagcaaaaatgaaattacataaataaagagttttgatagtttcaaatcttccttacccccacagtacagtaaaaccaacagagaatttcacccaatttgttttctttgatcttcttggctgcctttcagttagagctgtgaagacggaaagtgtttttcttctgaccatttcacgaaagcggtccctctcctgtttccactcttcccctcctggtytggagttttccttttcatgttgaaaagtgttttaattgcagcaatgggagggaatacggagccctttatctaaagcctttctgctagttatatatctttaagttgcaaatatatctggcttgtaatttaaatcataattgtactttctatggaagatactaagatgaaaagcagagggcagcctaccacatacaaacgccactgtgcgcatacacacacacacacacacacacacacacacacaaagagaga

SEQ ID NO: 314520 - DNA, 562 bp, Homo sapiens
tttgaaaaaagccagagagaagaacaaggataagaattgcagctgacgtcttatcggaaatcakacaagcaagatatgagtggagtgaaatatttaaattgttaagaagaaaaaccccaagaattctataaccaattaaatttatctttaaaaatgaagaaaaaataaagtctttctcagacctccctccaaaaaaattcttgagagaatgtatcacctgctgatctgccattaaagaaacaattaaagcagctcttcaagaaggaatgtgatataaatcagaaacgtgaatctccgcaagagaaaagagtcagggaagggataaatgaaggtgaaatgtattgggtgattatagtatgtgagtaaatgaaatgacagcaatatcacaagggacaggcaggaataatcaagaattctctgctagaaggcacctgcactccacatggagtggaatagtgttctttgtaggtggatttagattagttaaaatgtatattgtaaattctatggaagccactatattttaaagaagtgtaattgatatggtaagagagaggataaa

SEQ ID NO: 314521 - DNA, 562 bp, Homo sapiens
tttgaaaaaagccagagagaagaacaaggataagaattgcagctgacgtcttatcggaaatcagacaagcaagatatgagtggagtgaaatatttaaattgttaagaagaaaaaccccaagaattctataaccaattaaatttatctttaaaaatgaagaaaaaataaagtctttctcagacctccctccaaaaaaattcttgagagaatgtatcacctgctgatctgccattaaagaaacaattaaagcagctcttcaagaaggaatgtgatataaatcagaaacgtgaatctccgcaagagaaaagagtcagggaagggataaatgaaggtgaaatgtattgggtgattatagtatgtgagtaaatgaaatgacagcaatatcacaagggacaggcrggaataatcaagaattctctgctagaaggcacctgcactccacatggagtggaatagtgttctttgtaggtggatttagattagttaaaatgtatattgtaaattctatggaagccactatattttaaagaagtgtaattgatatggtaagagagaggataaa

SEQ ID NO: 314522 - DNA, 503 bp, Homo sapiens
gaagtgctgcgggacctggcactcagcgctagygttggtctgggatccgcagcctccctcgtcacccctaacagcgtcttcctcatgttctgacagatgaagcatcagatgaatcgatgacctgagacaaccctaagggacgcccacccgcgctgtctttatccaaaaacctctactgcctctattctcccttaaacacaaaatgtgttgaaataaatgccactacataatcatatgcacctatataaaatgtgcgtatattatatgagtatgtgcatatatatttcatactcatgtgtgcatgtagaggcacctgcagagcttcataattacattaatctatgattgatttaattttcattttcagaaacacaaaagttaggtggctcacacctgtcatcccagaactttgggaggctgaggtgggtgggtcacaaggtcatgagttcaagaccagcctggccaagatggtgaaaccccgtctctacaaaaaataaaaaaac

SEQ ID NO: 314523 - DNA, 577 bp, Homo sapiens
cttgaattagctaagtgaggattctttcctttcaaaatttttcaacagggaaaaggctaagggaaaatgtgtgggcaattgtgaagctcacagaggccatcccrgaggctgtgtgagagcaggggcctcctccaaaagcagcaccctcaggcacatttggaagtgaggttggggagaagtagaaaaaaaatcagaatgtggttgtgccacctttccttagttccctttccagatgatcttccccaggtcattattcttattcctgaaggtttctttctttccctatccccacctcccagacttgcttctgtttccttcccagccctctctgatcctctctccctccatttctagtgaaacattttgtgttgttgctttatttttgctgttggaggaattactcctgggacagtgtctatgaatcagaattctagagcattaactaatttcttactattgatagttttgttttattcaaacaatctaatggtctttccttgcagccatttgattagattctgaagggcccttggctgagccatctgggcagggccaccccagcaggccctgtgctgca

SEQ ID NO: 314524 - DNA, 590 bp, Homo sapiens
ggtgctaagggacagcaagattccagcataaaagacaattttttaaaaaaagagacagcaaggaggtcagattctttttggtaattttaaaaatagtattttttttaactttgagatttgtgttgtccttaagccaaatgtgcccatgacttttttattcacaaacacaaattattgagaaatgtatttatacctttcctggctgcaaatcaggacttgaggagactgacagacacatacagcatctgatgagatcaaggcaaccaaacgcgargcaatagaaggcagggcaggtgggcacagtgggaatcctgagcgaggcatggcgccttacaaggcacccagggcacatggtcctcgggaagtggccactcactcggagcagccctgcgtggctggtggacagtggcctccgcaagaacgtggctgatggacagtgacctcaggaatgtcttcccctccctgtaggaggccctccttgtcttcccatccctacaggaggcactcccaacaccttcactcagaacataccctgggctgccaccgagagccaggagctgcaaatgtaagagtcaagaagcagaaaggac

SEQ ID NO: 314525 - DNA, 658 bp, Homo sapiens
agattccctattcaataaatggtgctggcatatctagctagtcatatacagaagattaaaacttgacccctcccttacatcatacacaaaaatcaactcaggatgaattaaagacttaaatgtacaacccaaaattataaaraccttggaagacaacctaggcaataccattctaaacataagaactgggaaagattttatcatgaggatgccacaagcaattgcaaaaaaagcaaaaattaaaaatttagatctaattaagcttaagagcgtctcacagcaaaagaaagtatcaacagagtaaacagacactctacagaatgggagaaaatatttgcaaactatgcacttgacaaaggtctaatatcctgcatctataaagaacttaaacaaattaacaagcaaaaatcaaccaatgccattaaaagtgggcaaaggacataaacagacacttttcaaaagaagacatgcatgccgccaacaagcatatgaaaaagtttaatattattgatcatcagagaaatgcacatcgaaaccataatgagatactatctcacaccagtcagaatggctatcataaaatggcaaaaaaaaaatagccgattctggctaagttgcagagcctatacattgttggtgggagtgtaaattagttcaa

SEQ ID NO: 314526 - DNA, 658 bp, Homo sapiens
agattccctattcaataaatggtgctggcatatctagctagtcatatacagaagattaaaacttgacccctcccttacatcatacacaaaaatcaactcaggatgaattaaagacttaaatgtacaacccaaaattataaaaaccttggaagacaacctaggcaataccattctaaacataagaactgggaaagattttatcatgaggatgccacaagcaattgcaamaaaagcaaaaattaaaaatttagatctaattaagcttaagagcgtctcacagcaaaagaaagtatcaacagagtaaacagacactctacagaatgggagaaaatatttgcaaactatgcacttgacaaaggtctaatatcctgcatctataaagaacttaaacaaattaacaagcaaaaatcaaccaatgccattaaaagtgggcaaaggacataaacagacacttttcaaaagaagacatgcatgccgccaacaagcatatgaaaaagtttaatattattgatcatcagagaaatgcacatcgaaaccataatgagatactatctcacaccagtcagaatggctatcataaaatggcaaaaaaaaaatagccgattctggctaagttgcagagcctatacattgttggtgggagtgtaaattagttcaa

SEQ ID NO: 314527 - DNA, 658 bp, Homo sapiens
agattccctattcaataaatggtgctggcatatctagctagtcatatacagaagattaaaacttgacccctcccttacatcatacacaaaaatcaactcaggatgaattaaagacttaaatgtacaacccaaaattataaaaaccttggaagacaacctaggcaataccattctaaacataagaactgggaaagattttatcatgaggatgccacaagcaattgcaaaaaaagcaaaaattaaaaatttagatctaattaagcttaagagcgtctcacagcaaaagaaagtatcaacagagtaaacagacactctacagaatgggagaaaatatttgcaaactatgcacttgacaaaggtctaatatcctgcatctataaagaacttaaacaaattaacaagcaaaaatcaaccaatgccattaaaagtgggcaaaggacataaacagacacttttcaaaagaagacatgcatgccgccaacaagcatatgaaaaagtttaatattattgatcatcagagaaatgcacatcgaaaccataatgagatacyatctcacaccagtcagaatggctatcataaaatggcaaaaaaaaaatagccgattctggctaagttgcagagcctatacattgttggtgggagtgtaaattagttcaa

SEQ ID NO: 314528 - DNA, 495 bp, Homo sapiens
taacatttttttttctatttgctctcagctgttcaaattgggtggtttctattattctatttacaagtttacaatttctgtttcttctgtgctagtgtcaagtaaactctttttttaaattcttgtatttttagttttaaatttccacttggtatttttttttttttacrtcttctgtttgtttgctgggattttcccattttctacttttgcttcaagtgtgttcgtatgtttccctgaagccccttttgttcatggctgctttgaatttttgtcagacaattttaacatttatgacacctctagtttatggtatcgtgagtgatttttaatggaaatcataatatttttatattctattttgagactcagggtcttctttatactgtttaatttagctgatattttctgacacacttcaacagtggaaggatgtggggctgaatgtccaagttcccaataacctcctttgccatcacaagggaggggttgttc

SEQ ID NO: 314529 - DNA, 340 bp, Homo sapiens
gcttcacctgccacacacggagtccttttggtattcagccattcacaggccagggccttgcctggacatccacagatccactgcttgtgacaggcaggccgggttctgcagtgggctcactttgcagtaggtcctcatggtggcactggccacagggtccttggagcctgtcattracgcctgtgggctctgcctttggactttccaggctgcaccattccacggctctgcaactggtgcaaagctgttggtgacattcttgggctccgccctcggattcttcaggtggcaccactgcacagccctgcaaccaatgcaaagttatccaagtctcatctga

SEQ ID NO: 314530 - DNA, 350 bp, Homo sapiens
gagggagggagggagggagaaaggtaggcattttttgaggtccaggcaaaaataacaagtgatttataaggagagaaaatgataattgtcatttttttcagcaacacattatgccagaagtaaatggagtaacttagttgttatgtttaagaaaataagaaccaatgattttatagccagagaaaggttctgttagttacctattgtctgtcatcaacatgtaaatctctgaaggaatattattgctatgattctttctgagaagtcaggaattggttctgctagagaatcctgtgttyctgttgggttttcaatctgctcccccctcatatctttgtgactttatgggt

SEQ ID NO: 314531 - DNA, 601 bp, Homo sapiens
gtgtgctctgaaaattttctatgtaaaaactctggggttcagacttttagaataactttytcctttctcacagagggaactgaacatattgttctcctactctgtgctactaactatcatgtgccttgtctctgctaggatacagagagggaatatgcaggtgagatggctttgaggaaagagcttgttcgaaccctgagcacttttaaatatgatgagcttggcctctcaagatcccaaggttgcacaatccttttacgtaaatttttttaaaattcaattctgcgacatctctaacatgatgacatacatgtagaaggggaacaatgacaactatcataatatccatatttagagagtattcctgtcgatttaccttatgtttggagaaaccaaacttggaattggtggttacaaaatcacaaaggagcatcctctgataatcataatggtgcatacattaaagctaacaatattgttgtccaaggtcagaggccattgagaaccgttttttggttcagagctgctgggatttggtccatagcttcaatagctgtggcaacagctgtgaggtctcagctttgatagaggccccctaaag

SEQ ID NO: 314532 - DNA, 577 bp, Homo sapiens
gtgattttatttgagtacttaacaaccctgacatatataatcataccattatttccatctcatagcccaggaaattggaggttataagcaaaattctttgccaaaagatactcaagtcttggtctatggtgaaatctatgtcttttgcttcttgtctcatttttcttctgcttctccactattctttatatataaattagagcctgtaatattgaattggtaaaggcatacattacatatttawttacatgtataattacatactttgcagattgaagacttctttcccaacttcataatattaaaatctgtggcagcagagagttaccaaggaatggaactcatcacttcacattgatatcttgtctctttgacatctctcccttgtgttttctttttattctttttttcctaaattatactttaagttctgggatacatgtgtggaacgtgcaggtttcttacataggtatacacatggcatggtggtttgcttcacccatcaacctctcatctacattaggtatttctcctaatgctatccctcccccagcccctcaccccccgacaggccccc

SEQ ID NO: 314533 - DNA, 550 bp, Homo sapiens
gtttggtccgtttttgctatttcactcttccactgtgaaagaacacagcatttctcccctccagggtatatataaggtgccatcttggaaatggagacccagctctcaccaaacaccaaaccagctggtgccttaatcttggacttcccagcctccagaactgtgagaaatagatttaggttctttataaattacctagtcttgggtatttattaatagcagaacaaatgagctaagacaccctatttgtctgctttaccaccagtgccacagatttttattttcaaaggtggctttatattatgttttaatttcatatttctcaaaaaagaaaaaacctaactgaaatgttaatttagttttaattaamtttattgacaacttggaggagattgacatttccttttaaagagctattaaagagcatggaataccttactatttatcaaatcagcttctatgcctttgaaaagagtatttttttttccatagagatcattttgttttctattaattcctgtacagtttgttggttctgcttctattgtga

SEQ ID NO: 314534 - DNA, 468 bp, Homo sapiens
ttatttataatgtagaaaccatagaacttctggcttaattaaatgtgagatacaacagaggtagaagaatcaaattttagactttatcaaccrcaaaaatagtggcatctttttgtgagatggggaatataggaacaataggggagaaacaagtgtttaggatgagataaataatttacttttgagtatgatgaggtataagtttagaggcccagtgtgtaagtgggtatagtggtctgaattttaggaatttggccaacagaagaggcagacattcacttagatatccagaggttttcttccaataatctgttttaaaattagcattagagatctcaagtatcttgaaagtgagatgaagattttcgcttcttgaatgagttctattaatcaaaagcctgtggatgccacatgtaagtattgccttcatatgaaaacatttccagctgataacaatggatatgttgc

SEQ ID NO: 314535 - DNA, 523 bp, Homo sapiens
tgtttaggatgagataaataatttacttttgagtatgatgaggtataagtttagaggcccagtgtgtaagtgggtatagtggtctgaattttaggaatttggccaacagaagaggcagacattcacttagatatccagaggttttcttccaataatctgttttaaaattagcattagagatctcaagtatcttgaaagtgagatgaagattttcgcttcttgaatgagttctattaatcaaaagcctgtggatkccacatgtaagtattgccttcatatgaaaacatttccagctgataacaatggatatgttgccttgtcgtttactcaatctgtttatttctcttggcaacagaatacatatggaaatttacaaaccaatcccaaaagaaaaaaaaatcatttgattgcttactttttaattcttaaatatgattagtatgagtattaaataatgggtgaatgaatggtatgaacaagttgattctcacttggcaaaacttttttgtccatcattgttaat

SEQ ID NO: 314536 - DNA, 550 bp, Homo sapiens
ggttctgtaactttccaaagctcaaataacaagacagagacacatgagaatgagatccacttttcctgacttcctgttgttgagggaaaggaaaattaagaaatggggaaaatctatggacatgttagagagacagttaatgacctcatttggtaaagtatatccytgaacataaattaagaaaaacaggttgtgtttcccaatctccaaaatgttaaattcgtcaaattatctcccgtaccttacaaagatgttaaggctcttgtcattttgggccaggcgcagtggttcacgcctgtaatcacagcactttgggaggccaaggctcttgacccaaggtcaagagtttgagaccagcctggccaacacggtgaaacctcgtctctactaaaaattaaaaaaaaaaaaaaaaattatgtgggcgtggtggcgcgctcctatagtcccagttactcggggaggctgaggcaggagaatcacttgaacccgggaggcggaggttgcagtgaaccgagatcatgccactgcactccagcctgggcgacagagg

SEQ ID NO: 314537 - DNA, 528 bp, Homo sapiens
gtttatgtttgttacatgagtaaattgcatgtcgcagagatttggtgtacagattattttttcacccaggtaatgagcatagtaccccatcagtagtttttcgatcctcactccccccatcctccaccctcaagtagtcctagtgtctgttgttctcttctttgtatccatgtgtactcaaggtttaactcccacttataagtgagaacaggcagtatttgtttttcttttcctgtgctagtttgtttagaactatggccttcagctccatccatgttgctgcaaaggacatgatctcgttcctttttatatgttggatttttgaagtgatgtggctgtggtgttggaagtaacattcaaatacagatatctcagcaaatgtgagataaatgagtagcactattactgatatctgggaggacaaggacggagaaataayaaaagcaatgacaaggacgttgagaacagggttcatgtgtttcgaagcaatttccacaaagtttagtatagaaaaaggcaccaaaaaga

SEQ ID NO: 314538 - DNA, 528 bp, Homo sapiens
gtttatgtttgttacatgagtaaattgcatgtcgcagagatttggtgtacagattattttttcacccaggtaatgagcatagtaccccatcagtagtttttcgatcctcactccccccatcctccaccctcaagtagtcctagtgtctgttgttctcttctttgtatccatgtgtactcaaggtttaactcccacttataagtgagaacaggcagtatttgtttttcttttcctgtgctagtttgtttagaactatggccttcagctccatccatgttgctgcaaaggacatgatctcgttcctttttatatgttggatttttgaagtgatgtggctgtggtgttggaagtaacattcaaatacagatatctcagcaaatgtgagataaatgagtagcactattactgatatctgggaggacaaggacggagaaataataaaagcaatgacaaggaygttgagaacagggttcatgtgtttcgaagcaatttccacaaagtttagtatagaaaaaggcaccaaaaaga

SEQ ID NO: 314539 - DNA, 546 bp, Homo sapiens
attaggtttattttctttccttcacattgttagaagcattttgcattttttcttctctgtaacgcagtaaggatcatccttcctctaacctacaagacatcttgcccattttcttgaaagcatttcctagtagatttctagctgcctttcagtctctgtctagcacttacttcctagccgctgccacacgttttaggtttttgagactacaaacaccctacttctttaagaaaaaaaattcaacttttattttagattcagggggtacatgtgtacgtttgtcacctggttatattgtatgatgctgaggtttagggtacaattgatcccatcacccaggaactgagcatagtacccaatagttagttttgcagcccttgtccccctccttctctttctactctgtcctcagtttttgttgttgtttttttttctttttttcttttttattttactttaagttctagggtrcatgtgcacaaggtgcaagtttgttacatatgtgtatatgtgccatgttgttgtactgcacccattaactcgtca

SEQ ID NO: 314540 - DNA, 510 bp, Homo sapiens
gcatccattttttctgaaaagaacattatttctttcttttttatgtctgtgtagtattctgtggtgtaaatgtaccacattttctttagctaatctgccattgatgggcacctaggttggttccatgtccacgctattgtgaatactgctgcaatgaacatgtgagtgcatgtgtctttttggcagatgatttattttcttttggatctatactcagtaatgggattgctagatcaaatggtagttttaagttttttgagaaatctccaaactgctttccacagcggttgaactaatttacattcccaccgaaagtgtataaccattccattttctccatagactcrccagcgatttgttgcttttgatattttagtaattgccattctgactggtatgaaatgatatctcattgtggttttgatttgcatttctctgatgatgagtgatgtggaacattttttaatatgtttgttggccacgtatatgtctacttttgaaaagggtctg

SEQ ID NO: 314541 - DNA, 582 bp, Homo sapiens
tggcctattcttcttacttgttctaataattctaatattttttctctcctgtcttaacttagattgattttatataatatgtatgtattataattggccctttttatctgtgggttccacatccatggattctatcaactgcagattaaaaatattaagaaagtataaaataacaatacaataataaaatgatacaaattttaagaatatagtataaaaatttttatatagaatttacattgcattagaaattataagtaatttagagatgacttraagaatacaggagggtgtatgtaggttatatgcaaatactatctattttatgtaagggacttaagcattctcgaatttttgtattggcaggggattctggaactaatcctccatggatactggggaataactctatatataaacatatatatttgcatattcaaatactgcattttataccttctttagcttgctagtaatgtcagttttcataatttgggaggattactttagagattttaacacacctccttgacattaaaatctaatagaaattagtacttttactacatccaggcaatccaa

SEQ ID NO: 314542 - DNA, 582 bp, Homo sapiens
tggcctattcttcttacttgttctaataattctaatattttttctctcctgtcttaacttagattgattttatataatatgtatgtattataattggccctttttatctgtgggttccacatccatggattctatcaactgcagattaaaaatattaagaaagtataaaataacaatacaataataaaatgatacaaattttaagaatatagtataaaaatttttatatagaatttacattgcattagaaattataagtaatttagagatgacttgaagwatacaggagggtgtatgtaggttatatgcaaatactatctattttatgtaagggacttaagcattctcgaatttttgtattggcaggggattctggaactaatcctccatggatactggggaataactctatatataaacatatatatttgcatattcaaatactgcattttataccttctttagcttgctagtaatgtcagttttcataatttgggaggattactttagagattttaacacacctccttgacattaaaatctaatagaaattagtacttttactacatccaggcaatccaa

SEQ ID NO: 314543 - DNA, 582 bp, Homo sapiens
tggcctattcttcttacttgttctaataattctaatattttttctctcctgtcttaacttagattgattttatataatatgtatgtattataattggccctttttatctgtgggttccacatccatggattctatcaactgcagattaaaaatattaagaaagtataaaataacaatacaataataaaatgatacaaattttaagaatatagtataaaaatttttatatagaatttacattgcattagaaattataagtaatttagagatgacttgaagaatacaggagggtgtatgtaggttatatgcaaatactatctattttatgtaagggacttaagcatyctcgaatttttgtattggcaggggattctggaactaatcctccatggatactggggaataactctatatataaacatatatatttgcatattcaaatactgcattttataccttctttagcttgctagtaatgtcagttttcataatttgggaggattactttagagattttaacacacctccttgacattaaaatctaatagaaattagtacttttactacatccaggcaatccaa

SEQ ID NO: 314544 - DNA, 566 bp, Homo sapiens
tttttctttctaacaaagtataacaagcccacctgcttgagctgggctgcagtggccagggtaaacatccaaggcaccagtgaaaaatacagagaaggtaaaaggagcaagagttctgaagatggaacctgggatgggggaaagtttcttcaatctttcctaccaacaagaactccaatttttcactcctataaccgtagaagtagaggtaattaggatcatccagcaaatgcttagaggcaaatatccctggatgaggatgccacagcttattttcattatatttcttcrattacagtgtggtaatgcatgttgtatggaactacatattctttcagaatgaaaggatttagaggtggcaagaatatcagcttgaaatttaaagttttttcataaacaataaacaaatgataattgaaaattcactacatattatcaaagacaaaagttgtatgttctaattcatcatcgttgtattaatctgggcttaatttcatgtacatctcctggacagtgtttttatttgttaattgtttctagaaaaactctaggggtcaggtcagaag

SEQ ID NO: 314545 - DNA, 507 bp, Homo sapiens
tcaagcaggtggcctggcaggtaaggtatgacagaaggccatcaaatactttcagtctctggaatgagctttggtgtgaatggcccagggcagtgctgtgacacaggttctgggccagccctcctgtgccaagctcttcagtagttctctttcttccctattccttgttaacattctgagtcttctagggaagcaccccaattttccagaagcttttccacctgtgtagcatgagcttggctatgagcagctgcacatggcagaggcctttggaaagtgcttctcaaagtatggtccatggctagggtaattatgtaacctggtttgcctaggatagtcctagttgtcaactgctgtcccaagatawttatttaaattgccctttctctctcaaaaagtgtctttggttggatagtcaattatataatcaccctatccatggttcccagtgagtgggctcaaaatatcatagcccagtctgtatcaatccctaaaggtgaattactc

SEQ ID NO: 314546 - DNA, 507 bp, Homo sapiens
tcaagcaggtggcctggcaggtaaggtatgacagaaggccatcaaatactttcagtctctggaatgagctttggtgtgaatggcccagggcagtgctgtgacacaggttctgggccagccctcctgtgccaagctcttcagtagttctctttcttccctattccttgttaacattctgagtcttctagggaagcaccccaattttccagaagcttttccacctgtgtagcatgagcttggctatgagcagctgcacatggcagaggcctttggaaagtgcttctcaaagtatggtccatggctagggtaattatgtaacctggtttgcctaggatagtcctagttgtcaactgctgtcccaagatatttatttaaattgccctttctctctcaaaaagtgtctttggttggatagtcaattatataatcaccctatccatggttcccagtgagtgggctcaaaatatcatagcccagtctrtatcaatccctaaaggtgaattactc

SEQ ID NO: 314547 - DNA, 581 bp, Homo sapiens
ggctctgaggcctactcaaagcctcattaatttgcttaggtgagttggcaatatcaagtgcaaagattgaaaatctctaattttattagggatcagtcacagtgtaacacagagacatacatgggcacctgattttaagtgaaacaggtaggagcagatagcaaagttctgtgttcctgaagctgcttaattagacttggagaatgagacacaatgtgaggatgtggtgacccctgggcagtagctggacagttggtaatctgtcattcaggaggtcatcccaacttcttcccacatctcaccctacctgctgctacagaagcaatgccaggtggtcaataaccagtcaaggtcaacaaggaggcctraagctaggactgggctagttcaggagggcctgccatttttctccctgacagccatctccttccgatgatgcccctttttaaaatctgtctctcctccactcccctgctatcaacccctgagtaacccaactgggaggcttgcttgcaaatacagttgaattattgtcatcacgacctcctgttggcatttacattttctaactgctttaccat

SEQ ID NO: 314548 - DNA, 622 bp, Homo sapiens
attgaaaatctctaattttattagggatcagtcacagtgtaacacagagacatacatgggcacctgattttaagtgaaacaggtaggagcagatagcaaagttctgtgttcctgaagctgcttaattagacttggagaatgagacacaatgtgaggatgtggtgacccctgggcagtagctggacagttggtaatctgtcattcaggaggtcatcccaacttcttcccacatctcaccctacctgctgctacagaagcaatgccaggtggtcaataaccagtcaaggtcaacaaggaggcctaaagctaggactgggctagttcaggagggcctgccatttttctccctgacagccatctccttccgatgatgcccctttttaaaatctgtctctcctccactcccctgctatcaacccctgagtaacccaactgggaggcytgcttgcaaatacagttgaattattgtcatcacgacctcctgttggcatttacattttctaactgctttaccatgaactatggggattctatcctggattacccaggattgtcatcagttacaacactcaattatgaaaatatgtatgacaaaattttttcaatattcacaaaaaagtaa

SEQ ID NO: 314549 - DNA, 622 bp, Homo sapiens
attgaaaatctctaattttattagggatcagtcacagtgtaacacagagacatacatgggcacctgattttaagtgaaacaggtaggagcagatagcaaagttctgtgttcctgaagctgcttaattagacttggagaatgagacacaatgtgaggatgtggtgacccctgggcagtagctggacagttggtaatctgtcattcaggaggtcatcccaacttcttcccacatctcaccctacctgctgctacagaagcaatgccaggtggtcaataaccagtcaaggtcaacaaggaggcctaaagctaggactgggctagttcaggagggcctgccatttttctccctgacagccatctccttccgatgatgcccctttttaaaatctgtctctcctccactcccctgctatcaacccctgagtaacccaactgggaggcttgcttgcaaatacagttgaattattgtcatcacgacctcctgttggcatttacrttttctaactgctttaccatgaactatggggattctatcctggattacccaggattgtcatcagttacaacactcaattatgaaaatatgtatgacaaaattttttcaatattcacaaaaaagtaa

SEQ ID NO: 314550 - DNA, 554 bp, Homo sapiens
tcatcacgacctcctgttggcatttacattttctaactgctttaccatgaactatggggattctatcctggattacccaggattgtcatcagttacaacactcaattatgaaaatatgtatgayaaaattttttcaatattcacaaaaaagtaagaaatctgtatacagctacatataaatgtggttgttagctcaagttttaatacctttgtaaggcttctcatatcactttaacaagggtctagaacagggatggagagagattacaccctctgcaatgcctctagacttgtctggagactggcaagacaagctgacagaggccttcttcatgaagaatagggaatgtgaatgggatgggaggtgcagttgaagcctaggcctgttgaattggagagtggggctgtggaccacgattgttccaagtagttgtgaactgagagtcattctgtgaactcccatgtagtatggcagagggaaaggcatttatccagaggagagagccttggcttacatgttggtgtagaaatgacactcaggccggaagtgggaa

SEQ ID NO: 314551 - DNA, 554 bp, Homo sapiens
tcatcacgacctcctgttggcatttacattttctaactgctttaccatgaactatggggattctatcctggattacccaggattgtcatcagttacaacactcaattatgaaaatatgtatgacaaaattttttmaatattcacaaaaaagtaagaaatctgtatacagctacatataaatgtggttgttagctcaagttttaatacctttgtaaggcttctcatatcactttaacaagggtctagaacagggatggagagagattacaccctctgcaatgcctctagacttgtctggagactggcaagacaagctgacagaggccttcttcatgaagaatagggaatgtgaatgggatgggaggtgcagttgaagcctaggcctgttgaattggagagtggggctgtggaccacgattgttccaagtagttgtgaactgagagtcattctgtgaactcccatgtagtatggcagagggaaaggcatttatccagaggagagagccttggcttacatgttggtgtagaaatgacactcaggccggaagtgggaa

SEQ ID NO: 314552 - DNA, 554 bp, Homo sapiens
gctgggattacaggcgtgagccaccataaacaagtttccttactgtaagacttctcagagagttaaatggtgaatgcatcctctaagtatataatggtgtataatatgtggtgcttccaaaattctttatttcatattcccctgacaactgcttaagaactctcataattagagttctgtggaacaacttttgggaagttctgatatggtggaaagagcatgcgccttatctgggttataattttaaccaatatctgggtaaaartttttggattattaactattatgtgaacttatcttctcagagcctcacttttcttctctctaaatcaaagaggataatgcctgtctcagagctttaggagttgcattagacattactaagcaccaagattccctgcctttcccagcaggaggattacatttctctgctctactgataccagacgtgaccatgaacttactttggccaatgaatagtgagtggaagtcatatgtgttatttctgggcagaagcttatgagagccagggcaaggttcgttactctgtatct

SEQ ID NO: 314553 - DNA, 554 bp, Homo sapiens
gctgggattacaggcgtgagccaccataaacaagtttccttactgtaagacttctcagagagttaaatggtgaatgcatcctctaagtatataatggtgtataatatgtggtgcttccaaaattctttatttcatattcccctgacaactgcttaagaactctcataattagagttctgtggaacaacttttgggaagttctgatatggtggaaagagcatgcgccttatctgggttataattttaaccaatatctgggtaaaaatttttggattattaactattatgtgaacttatcttctcagagcctcacttttcttctctctaaatcaaagaggataatgcctgtctcagagctttaggagttgcattagacattacyaagcaccaagattccctgcctttcccagcaggaggattacatttctctgctctactgataccagacgtgaccatgaacttactttggccaatgaatagtgagtggaagtcatatgtgttatttctgggcagaagcttatgagagccagggcaaggttcgttactctgtatct

SEQ ID NO: 314554 - DNA, 554 bp, Homo sapiens
gctgggattacaggcgtgagccaccataaacaagtttccttactgtaagacttctcagagagttaaatggtgaatgcatcctctaagtatataatggtgtataatatgtggtgcttccaaaattctttatttcatattcccctgacaactgcttaagaactctcataattagagttctgtggaacaacttttgggaagttctgatatggtggaaagagcatgcgccttatctgggttataattttaaccaatatctgggtaaaaatttttggattattaactattatgtgaacttatcttctcagagcctcacttttcttctctctaaatcaaagaggataatgcctgtctcagagctttaggagttgcattagacattactragcaccaagattccctgcctttcccagcaggaggattacatttctctgctctactgataccagacgtgaccatgaacttactttggccaatgaatagtgagtggaagtcatatgtgttatttctgggcagaagcttatgagagccagggcaaggttcgttactctgtatct

SEQ ID NO: 314555 - DNA, 554 bp, Homo sapiens
gctgggattacaggcgtgagccaccataaacaagtttccttactgtaagacttctcagagagttaaatggtgaatgcatcctctaagtatataatggtgtataatatgtggtgcttccaaaattctttatttcatattcccctgacaactgcttaagaactctcataattagagttctgtggaacaacttttgggaagttctgatatggtggaaagagcatgcgccttatctgggttataattttaaccaatatctgggtaaaaatttttggattattaactattatgtgaacttatcttctcagagcctcacttttcttctctctaaatcaaagaggataatgcctgtctcagagctttaggagttgcattagacattactaagcaccaagattccctgcctttcccagcaggaggattacatttctctgctcyactgataccagacgtgaccatgaacttactttggccaatgaatagtgagtggaagtcatatgtgttatttctgggcagaagcttatgagagccagggcaaggttcgttactctgtatct

SEQ ID NO: 314556 - DNA, 470 bp, Homo sapiens
gcctttgttgacatggggcttccatcaactggttccctgagagattacaatacacggagtcaccctgttaacctgtgatggacatgggacatgagtaggaaacaaacattaaaatattatgattttaacccactgagaatatccagttatttgtttcctcagcataagcttgcttaacctgattratgaatgaaatgatcaatagaaaagactgagtggcctgatagaattgcattcattacattattctaagttttattttaggctgatagtttctgtgttcttgaatactctttgcattttaatcttaacctagaccaaaaatcctgaaaagggactaaatacattggaaaaggaataaatgtattcttagccaaaagaatatcttctatctgcatgggttgctctgtgttgctaagggttagagtctacaataatacgtgaaagatgagaaacctgcatttgagcac

SEQ ID NO: 314557 - DNA, 481 bp, Homo sapiens
atgaaaaatgtggattttaataatcagcagaaagagaaaacttaatcggggttgggggaagatttttggagcgaagatctagagtaggtaagagrtggtggtgtctaaaacatgagaagatggtttaaccttgtcacatggagagtttactcatacttttcaggtgagaggcaggggatatgaatgctgatattggcagcaaaggtatagagaggccagggagtgaggacattcccttctgttgcttcagctttctcagtggagtagaaacaaagtcatctggttgaggagaggatgaaagaggaggtgctgaaagttagaagagagagaaagtaagaaagagttcagggcagtgcgagatgtaggatgaaatactgctttcttatcctgtgaaaattgcgaatatttaaaaaattctaatgataatttttggagaattcaatgaaccgtaagggaataagcatatggttgctgggtagaa

SEQ ID NO: 314558 - DNA, 584 bp, Homo sapiens
cattattaaatgatccttctcatccctgtctttaatgtgaggcttcacttttttatatagctggagtttatggtgcatatataattttctattctgctttttattcatgttgagatttttttataytattacaattttattgtcaatagtttttaatggaacataatattatttgtgtggatttaccatctattatttaactgttctttcaatgctggatatttaagttgtttacggttttctgttgttataaatagccccgtaatgaaaagctctttgccaaaagctttatcagcagttttagatgacttcctcaggggagagtatcaaaaccttaactactgtttcaaagaaatgaacatttgaaaacactgttttaggatttttgaaactaactaatcaagcactacttttcataagccccattctgttttatctggattctgagcagatagctctcacattttcagctcttatattctactaatcacttaatttattctttggagggaaggcataaggtatgtagaaacagatgtatttccaaacatatattgatgtattcatttattaaggtcagcaaa

SEQ ID NO: 314559 - DNA, 606 bp, Homo sapiens
tatatagctggagtttatggtgcatatataattttctattctgctttttattcatgttgagatttttttatattattacaattttattgtcaatagtttttaatggaacataatattatttgtgtggatttaccatctattatttaactgttctttcaatgctggatatttaagttgtttacggttttctgttgttataaatagccccgtaatgaaaagctctttgccaaaagctttatcagcagttttagatgacttcctcaggggagagtatcaaaaccttaactactgtttcaaagaaatgaacatttgaaaacactgttttaggatttttgaaactaactaatcaagcactacttttcataagccccattctgttttatctggattctgagcagatagctctcacattttcagctcttatattctactaatcacttaatttattctttggagggaaggcataaggtatgtagaaacagatgtatttccaaacatatattgatgtattcatttattaaggtcagcaaaacagaggaggggaagagggctccaggataataaamaagagagatggccctgccaagaatggcacaacaaatttgc

SEQ ID NO: 314560 - DNA, 438 bp, Homo sapiens
tgtgcgattttcttcatgtaagtcatcacaattcttttaaaatttattcatgaccaggcacggtggctcatgtctgtaatcccagcactttgggaggccatgacactcagatcacctgaggtcaagagttccagactagcctggccaacatggtgaaaccccattgctactaaaaaataaacattkagccaggtgtggtgggtgggtgcctgtagtcccagttacttgggagtctgaggcagaagaatcacttgaactggggaggcggaggttgcagtgagttgagatcgtgccattgcactccagcctgggtgacagagcaagactctgtccccaaaacaaacaaaaaagtttgttcatatgcattttgtattttgattgttcttgaatatttaatcttttgttttttaagattgtattttctaattggttattgat

SEQ ID NO: 314561 - DNA, 594 bp, Homo sapiens
tgtttttccattcatctactgaggacattttggttgcttccaagttttggctgttatgaatataactactataaacattcatgtgcagattcttgtgtgggcatgagttgccaattcatttggataaataccaagaagtgtgattgatgaattatatggtaagagtatrtttaattttgtgagaaactgtcaaactgtcttccaaagtgacagtcctatttcgcattcccaccagcagtgaatgagaaatcctgttattccacagccccaccagcatttggtgttgtcagtgttctggatggtggccattctaaaagatgtgtagtgctatgtcattgttgctttaatttgcattccctgatgacatatgatgtggagcatcttttcatatgttcatttgccatctgtgtatctttattggtgaggtgtctgttcaagtcttttacccatttttaattgggctatttgttatcttattgttgagtcttaggaattctgttatattttgtaccatagttgtattagtctgttctcatgctgctaataaagacgtacctgagcctgggtaatttataaaggaaagaggtttaactg

SEQ ID NO: 314562 - DNA, 393 bp, Homo sapiens
agaaagaacaaagctcaaggcatcacacttcctgcttacaaaaatatattatgaagctacagtaatcgaaacagtgttgtactggcatgaaggcagacatatagacagatgaaacagaataaagaagccagaaataaatccatgtwtgtatggtccactgatcttcaacagtgatgccaaaaataaacagtggtgccaaaaataaacaatggggaaaggacagtctcctcaacaaggtgttggaaaactggacatctacatgagaagagtgcaatttaacccttaacttatacaatacagaaaaaaatcaactcaaaacagattaaagacttaaatgtaagaccttaaactataaaattcctagataaaaacaggggaaatgttccttgacat

SEQ ID NO: 314563 - DNA, 409 bp, Homo sapiens
actccttagtgactgtctctgggggtccagsgttctcatttggatcattttccctctcaattgcttctcaaatgcccaagtcttccaccatcttacatttccccctcatctaaccctttagaaaaggagcctgataaattaatttatactgaggtatactgactgataagacttgttatgtggccgggcgcagtggctcacgcctgtaatcccagcactttgggaggctgaggcggcagatcacctgagatcgggagtttgagaccagcatgaccaacatggagaaaccctgtctctattaaaaatacaaaactacttgggggtggtgcacatgcctgtaatcgaagctactcgggaggctgaggcaggagaatcgcttgaacccgggaagtggaggttgcggtgagct

SEQ ID NO: 314564 - DNA, 528 bp, Homo sapiens
atagcctatcttgccatttctgctataaacatctgcacagcttgtacaatctgtaactatagaattgagtacagatgacctgcccacaagaggaaaaatgtcctgatcttggccttagtgcctctgtaattcaaccaagtatattaattaaatggatagatcatacacttgctgtttcccaagtgtagaggttgaaagtggaaaggagaagaaagcaaagaaaactgggaggaggggcactaagactgggcataaggagaaacaagaggtccaatttgcaaaataatgggtgtagtaaggggaattttgaagtattctccaaagataacgattttgcttttctcaattttgtcctcttgattctcacacagtgctttctttagtacagacctacataccccraaaacttctgttctgtgacttaaaaagtcaactctatgattagcatgattcctcttcagtcattactgaaattcttcctaggtggttacatttaagtggtaagaagcttcagtaatataagtcaaa

SEQ ID NO: 314565 - DNA, 592 bp, Homo sapiens
ttgctttgcatttcctcagtggccatctgataaagcaggaaggaaaaaaattaaaaatgaacctccccaggatttcatttctattgtggcttagctgcaaatttgaaaaataaaaataaaaataaaccctgaatgtaagcacttgtacgtttttgttagattctttcacaggactggtcaacatcttgacagatattatttggcgattcactggagacttcacrgcacctgacctggtttgccgagtggtccgctatttgcaggtatgtcacaccttccaaatgtgatgagacaaactgataccagagttagcttttagatttatctaaggaaaatcatataaaaccttgcattcctatgcatcaaactgcccgctttctcctgggtagaagggcaatgaaaatttgatttttaatgtatttcctttgctaaaaatagtatctatataaagaaaacacaaacgagccacaaatgagcaatgctaaggacgtaaagcattcatatttcaaatgttaaataaaatgtctgggtcaatattaaggattttggcatattgtggataatctccaaaaagtttgttaattatatttac

SEQ ID NO: 314566 - DNA, 658 bp, Homo sapiens
gtagaacttctttcaaaattggagtcaattctctcaaatcttgccactgttttatcaaatatgtttatgtactagtttaaattatttgttatcatttcagcaatgttcacagcattatcaccaagagtagattccatttcaaggaatcactttctttgctcatccataataagcaattcctcatccattctagttttattaagaaagtgaagcaattcagtcacatgtacacactccacttctaattctatttctcttgctatttccaccactttcgcagtacctttctccagtgaaatcttgaacccatcaaagtcattcataagagttggaatcaaccttctacactcctgtaaatgttgatacattcaccttctcccakaaatcatgaatgttcttaatgacatctaagtagtgagtccttctggaaggttttcaatttcccttgtcctgatccagcagaggaattactatctatggcagccatggccttacaaaatgtatttcttaaataataacactggaaagtcaaaattactccttgatctatgggatgcaaaatggatgttgtgttagcagaaatgaagacaagtttaatctttttgttcatcgtcatcaaagctcttgggtaacaatgtgcactgtcaatgagcagtga

SEQ ID NO: 314567 - DNA, 516 bp, Homo sapiens
tgttctcagcattcagtgtttaaaaaagaaaagtagaagagggacctttatcaatatcaaaaatagttttttgtgcaaccaaaagcaagcaagctattattatatatacacactcgctttaaaaacaacactaaagacattgagttgagctggaagcattgcatactctgagatacacagttgatattgttacccacagtgtcccttcaggaaagccagaggtcatctgyaacaccacaattaaggataaaaggatcttatattatcagaaatttcaatgtcttcataaaaattgtgtttatattcaatatctcccttatttagtgtgacaaatgttcatgtacgagtcatctcaagaaaaagagttactcagcttgctacgtattcattattctatggctctgctatgcaggggaaagtgcaaacagcaactgagagaaagcaggaatctaagacatgggactcaacttgccctttacacacggtgaatcctacactagtgacctttgtgtttta

SEQ ID NO: 314568 - DNA, 607 bp, Homo sapiens
atatctcccttatttagtgtgacaaatgttcatgtacgagtcatctcaagaaaaagagttactcagcttgctacgtattcattattctatggctctgctatgcaggggaaagtgcaaacagcaactgagagaaagcaggaatctaagacatgggactcaacttgccctttacacasggtgaatcctacactagtgacctttgtgttttaaggaagtttgcaaatatgtttaattggacaacatttcttcctttatctagcaagcactgagtatcttgccaggcactatgaaaaaagataaaactataaacatgagcaaggcacagccactgccaatcagaagcttacaatctagcagagatcttaaaatgcagggagctcttttagaaatctgcttagggatcaaaatttccaatcacacttttccttccagcatctttattctgtaatcattattttaatcttcattgaacgagatgattaatgtggttccatctgctgtatgaaatcacccatgctacagtcagccaatcaagcaacagcagtaataatgtactacttcatttaatggaaatttaccaagctgttactatgtaatatcacagttt

SEQ ID NO: 314569 - DNA, 315 bp, Homo sapiens
cagcttatttttataaataaagttttattggaatacagccaggcccatccagttacagaattgtctatggttgcttccactctacaatggcagatttgagtagctgttacagagactatacgcaagtgtgcaggagagtttagaccacacctacaggaaaggtrtgaaatactaccctccttcctagacacttccccaaacaaaaaacttaagtcagtgtgggaacaaacactgttgccccacagagcactaataaaggcagataaatgactgagaaaaccctatcccttggggacggaggccagaaatggcaac

SEQ ID NO: 314570 - DNA, 540 bp, Homo sapiens
catgagattgagatttaaaaaaagatacaaaaagtcaacaaaacaaaatgttggatctttgaaaagataaatgaaattggcagccttctagctagatgaaacaagaaacaggagagatgattcaattaagtacaatcagaaatgataaagatgattgacatagtttggatgtgtgtcctagaccaaatcgcatgttgaaatacaatccccccgtgttggaggtagggcctggtggaaagtgattatatcatggaggcagatttctcattaatggtttaggaccatcccccttgggcaccagcctactgccctcatgatagtgaatgagcttttgtgagatctggtgttgcacccccctgctctctctctcttgattcttctctggccatgtgatgtgcctgctccctcttcgctttgccttccattatgattgtaagcttcctgagcccctccaagaagccaagcagatgccagcatcatacttcctgyacagcctgcagaactatgagccaattaaacctcttttctttataaattacc

SEQ ID NO: 314571 - DNA, 571 bp, Homo sapiens
agaaatcctgaatagaccaatagcaagtaataaaatcacatcagtaataaaaaatcttccaacaaaaaaaatctcaagaccagacagattcacagctgaattttatcagatgtacaaagaaaagctggtaccaatcttactgaatctattccaaaacatgaatgtgaagcaattcctaactgttcctataaaaccagtatcaccctgataccaaaatcatacaaggacacaacaacaacaayacaaaaaaacccactacaggccaataaccctgatggacatagttgcaaaatttctcatcaagataccagcaaaccaaatccaacagcatgttaaaaagataatacatcacaatcaagtgagttttattccatggatgcaaggatgattcaacatatgcaaatcaataaaatcaatagacatgattcaccacattaacaaaactaaaaacaaaaaccatatgatcatctcaatacaataaggcgtcaataaaatccaacatcttttgataataaaaaccctcaacaaattaggcatctaaggaacatacctcaaaataagagccatctat

SEQ ID NO: 314572 - DNA, 454 bp, Homo sapiens
gatggaagagtttgatggcgcagcagtggtgtcagatgctggggagatgcgaggcaactgagacaatgacaagagggtattggattgcccccctccaagggttagcaggaaaaagcggaggaagagagaacatttgctacatttggggagcacaggattggaagggcgctgaggtccacttactgtgtagggaccagggaagtacagtctcccagattttcccatctatcatgaggtggaarttgtatagcgtaggtggctatgtgggatgagagagggccagagatgctccattttgttttctgcagcccaaagttggtagcagtcaaactttctattcttaggaaggaggcagaagttatcgctgggattgagagacagggattcaagcaccctgtaccaggagagaatgtggccaagggacattaccccagaaagcaatgtgggcctgaca

SEQ ID NO: 314573 - DNA, 517 bp, Homo sapiens
ttggtagcagtcaaactttctattcttaggaaggaggcagaagttatcgctgggattgagagacagggattcaagcaccctgtaccaggagagaatgtggccaagggacattaccccagaaagcaatgtgggcctgacacaggtcggatgggaacccagatgaaagtccagaacgaggatgaccacatctgagggacagacaggtcttgtttcagctgatgccaacttgctcagatccctcagtagatcagactctcttcaccttccgtcctctacccccactcccctccccacacacacatacacacacacacamacacacacacacacagagagagagagagagagagagagagagagagagaaatgcactacagaagcactgcccctggagttagatgccttcccgaagccagaaaatgtgaaaactcttcctgggctgaaaagctctgcaatgactaggtttattctgaattagctaagattatgcttcctgccatcaaatgtattagtaatg

SEQ ID NO: 314574 - DNA, 517 bp, Homo sapiens
ttggtagcagtcaaactttctattcttaggaaggaggcagaagttatcgctgggattgagagacagggattcaagcaccctgtaccaggagagaatgtggccaagggacattaccccagaaagcaatgtgggcctgacacaggtcggatgggaacccagatgaaagtccagaacgaggatgaccacatctgagggacagacaggtcttgtttcagctgatgccaacttgctcagatccctcagtagatcagactctcttcaccttccgtcctctacccccactcccctccccacacacacatacacacacacacacacacacacacacasagagagagagagagagagagagagagagagagagaaatgcactacagaagcactgcccctggagttagatgccttcccgaagccagaaaatgtgaaaactcttcctgggctgaaaagctctgcaatgactaggtttattctgaattagctaagattatgcttcctgccatcaaatgtattagtaatg

SEQ ID NO: 314575 - DNA, 327 bp, Homo sapiens
tgagctggatgtgatcttaaaagcacacaaaactggaaactgtgaagggagccagggtctgagctgagaatcttgaacccaagaccacatagggttagttacacaaggcccatggtggaagatgggatgggtgaacccaccccagacctccctgctcatttccaagagcctcacatgcttaggaaggtagagtaggttagaggggtggaagcagaagccagaattcaaggrtggaggtgggaggaaggaacagactctaagcctgtgaaggaagtgccagtaagatctagacggggtgctttgtctcctcctgaaagagctttgggg

SEQ ID NO: 314576 - DNA, 582 bp, Homo sapiens
gcattctaagctcctggccaaacacaattcctgtctttctgcttttctccttgtccagtggtccagccgttttgctgcaaacatatcaataggaatcagctagagatgctgtgattctctttagtgtctggcgatgatgttgctaggatagagaggacaaacactcatagagagcaaggtgggatttgtttcttcacatattccaaatatccctgtaggtgctatattcaaaaaatggcaaatgagatttcagctgagattgattcttgccagagtctcagaataaccaccttattgctgattttattccctttgcaatggagggcctctcttcattctgcttgctrtcatgttctaagaatatcaaagaggctacacaggcagcaatactgagtggagtcctgtgcttcctgggtgcacaaagcctgccaagacagactctctgggtctgcaggctgatttcataaaggggattattcagtcgacattaagtggcaacaaactctaattttactttctaagctacatcgtggagctgtgcagctgggctgcgtatgtgcatatgcattaggaggtgattcc

SEQ ID NO: 314577 - DNA, 582 bp, Homo sapiens
gcattctaagctcctggccaaacacaattcctgtctttctgcttttctccttgtccagtggtccagccgttttgctgcaaacatatcaataggaatcagctagagatgctgtgattctctttagtgtctggcgatgatgttgctaggatagagaggacaaacactcatagagagcaaggtgggatttgtttcttcacatattccaaatatccctgtaggtgctatattcaaaaaatggcaaatgagatttcagctgagattgattcttgccagagtctcagaataaccaccttattgctgattttattccctttgcaatggagggcctctcttcattctgcttgctgtcatgttctaagaatatcaaagaggctacacaggcagcaatactgagtggagtcctgtgcttcctgggtgcacamagcctgccaagacagactctctgggtctgcaggctgatttcataaaggggattattcagtcgacattaagtggcaacaaactctaattttactttctaagctacatcgtggagctgtgcagctgggctgcgtatgtgcatatgcattaggaggtgattcc

SEQ ID NO: 314578 - DNA, 586 bp, Homo sapiens
ataaaatgttgcaggtgacatgattgtctatgcagacaatctaaaataattaaccaaaaaaactctcccagaactaataggcaattaaagcaagattacagaatatgttaatatacaaaagttcattgctttcctatataaccgcaataaacaagtataatttgatattaaaaaacaatattatctgcattagcacacctgaaaatgaaataattaggtataaatttaataaaatatgtgcaagatctatacaaggaaaactacgaaacttgaatgaaagtaatcaaagaaaaactaaataaagagttattccatgtatacataggaagattcaatattgtcaaggtgtcagatcttctcaacttactctatgtagattcaacacagtcccagtcagtaacccagcaagttattttgtggatatcaacaaactgattctaaactttatgtgaaagacaaaacatgcagaatggtcagcataatattgaaggtgaagaacaaatttgaaggactgatacttcccaaaatcaatatttactataaagctayagtaattaagacagtgtgctattagtgaaagaacaaa

SEQ ID NO: 314579 - DNA, 616 bp, Homo sapiens
aaatgctctccattagacttcaatctacaagttactcttctactccctctggatttgawcctaatgttacaaagtggagatacagccagactcttgatagaaatgaggctccaagttacctgaaaaatgtccaccttgatcatcccttcaaatatatttcatttaatcacattctaaatatgctcttcacataagagaaattaacttcttaaatcccaatttccctttctgctaattatgcaaaaaaagattgtacacagataattaaaaggtgtgggtaaagttaataaaagagacagtgggaaggaagaggagacccagatcctgagcctaatgaagtggatgaaaaaggggagctctctgatggtgtcagtgctgatgatgataaatgattcaacaccgcacataggctccctaaaaccggaacccttctatcatctcttgactcccactgataaaaagcaaatgaacttttgtttctaattattctggaatgtcaattgtggcagaaaaaattagtttagctttaaaagtcaattacaaacaaatgtaccatgcaaatgtcaaggactgatcctgaaatatggagtttccaagaggccaagggaataagtga

SEQ ID NO: 314580 - DNA, 599 bp, Homo sapiens
aagtgaagtaaatgctctccattagacttcaatctacaagttactcttctactccctctggatttgatcctaatgttacaaagtggagatacagccagactcttgatagaaatgaggctccaagttacctraaaaatgtccaccttgatcatcccttcaaatatatttcatttaatcacattctaaatatgctcttcacataagagaaattaacttcttaaatcccaatttccctttctgctaattatgcaaaaaaagattgtacacagataattaaaaggtgtgggtaaagttaataaaagagacagtgggaaggaagaggagacccagatcctgagcctaatgaagtggatgaaaaaggggagctctctgatggtgtcagtgctgatgatgataaatgattcaacaccgcacataggctccctaaaaccggaacccttctatcatctcttgactcccactgataaaaagcaaatgaacttttgtttctaattattctggaatgtcaattgtggcagaaaaaattagtttagctttaaaagtcaattacaaacaaatgtaccatgcaaatgtcaaggactgatcctgaaatatggagt

SEQ ID NO: 314581 - DNA, 582 bp, Homo sapiens
acctctctgaagtcataagcttcctctcatttctgtctttaggttgtgctgctctacgcctctacctacgtcctggtgtccctcrgcatagacagataccatgccatcgtctaccccatgaagttccttcaaggaggtgagctggctttaccaggtgctctttcataaagaactgtccttgagtgagggtaggatcattttcactaatattttactcttaataatagtgatcttcctcctctttccttctctttcttctctcttcattctcctcttccacctctttcctcacttcatgggtctgattgtctaaaaagatgtacaaaagaaaacttagatgcctggaaaaatgccgatggttcccatggacagcccagagccactaaggaaggtgggtggctgacccactttgtgaccattcagcttgatgctgatgcttccatctttttcctctagagcagtgttgacatgcatacctgtccaaagaaatgaactctcccacactaacttctcattttccagaaacaaacaccttgttctccttatccaaaaccatagaaataattggaaagatgtttttaa

SEQ ID NO: 314582 - DNA, 600 bp, Homo sapiens
attgagcattgactatattccaggcattattctaagtgctttatatcattttgtcctataaatgagcctctaagtttgatgttatgttccattgtactagtattgaaactgaggtctaactagagataaaagactgatgctagaataagaagacagattaaaaggaagatggtagtactaaagaaataatttgagtaatttatagtgcktttgcataattgtaactggtattaaaaagaatgaaaaagagaatagagacccaaatctagtgttgatcagatgaagattaaagacatcacagacaatgcagagaaaaaggagaaagagattaaggtgatcagagaatagatgatagatagatacagatgacataaaatgaggaacagagtagggataattagtgttcttggggtgcagaggagaatcaacataaaaatattaaagatattatttaaaatgtctttttagctgaagagaattctaaacataaataatactatcattagcaagaataaatatcaggcaataatgtaccacaactgcactgagcacacatcagctccttgaaccatcacaacaaccctaggaagcatgcactat

SEQ ID NO: 314583 - DNA, 464 bp, Homo sapiens
tataaaaaacaagtttaaatattttgcctataacttttattccaaagcttatgaactcttctcttttagcattacaggaaaatgatgtatttgttcaaggatataaaaattgtggccagggctcccatagtgaatgtatgaagcaggaagctggggggatccatggaaccttgagcattctcttccagaactctccatccctgctaaagctaaaatgcctgtatcatgggcaaagcttgtcacactagaaaggtcaaaacttaaaaatgttcttaccaagtatctcccagtagtatgtggctgatatgagactgaggcaaagcttctcctagcagaaaagaagggactcagtaacctgggaaaggtgaccttcatctagaaaaggaagagacagaatttctacaaatgagttcaggtragaatgtgtattagagttctccagagaaacagaaatagaactaata

SEQ ID NO: 314584 - DNA, 245 bp, Homo sapiens
actcaactttcagttcagtgaaatttggattgtttattggagcttgatgcaattgtaattaaatagaataatataattagataattttcactstaagtgcaatacaaatataggtactcaaaacaccacaggtagtagaaaaagcaggcatgctctcatcgaaccaacatggcaatttttgcgtacaacaggaagcatcaaactcaatgaactatggaggccagctcaggcacaattatagacat

SEQ ID NO: 314585 - DNA, 572 bp, Homo sapiens
ggcatttcttctcactttcaatatgcagaagagggcccctgtgccttactcgctctctggactgtctcttgagaaagtgggtagggtgggttacagatgcccttgcttgtgatgttctccaacctgyagctcctatttcatgccccaaatcctcttcagtgtctgccttagggttaaggtctctctcttagaaatgcctcttttttttttttttttttgtttttttggtggagtcttgctctgtcgccaggctggagtgcagtggcgcagtctcggctcactgcaacctccacctcccaggttcaagtgactcccctgcctcagtctcctgagtagctaggactgcaggtgcgttccaccatgcacagctaatttttgtatttttaatagacacggggtttcaccacgttggccagaatggtctcgatctcttgacctcgtgatccacctgcctcggcctcccaaagtgctgggattacaggcaagagtcaccgcacccagccagaaatgcctccatgtttaagctcttgtctcctcctccctgcatactcctcactctttcccattcttgg

SEQ ID NO: 314586 - DNA, 635 bp, Homo sapiens
ctcatggaattgataattaagcttcaatatcacaacacataagtaccatatttaaaatatatgtctatggaggaaaagctgacagaaaaaaacaaagatctctatatggacaatagatgcagaaaagaaaggaaataacaatcagagatcaatgaaataggaaacaaacatacagtagagaatcaacaaaaataaaagctggttctctgaaagtataattaaaatagacaaatttctagcatgcccaatcaggagcaaaaaagagaaggtctcaaaagagaatactacaaatgaaaagaagtttgtaactacagctagaatattttaaaaataagagttaacattaaaatatgctgataaatttaattgcttaaaatagacaatttcctagaacacttatcaaaacaaattcagaacagaaacgtgaatagacctatatccataaaagaaattgattattaaaagccatttaccaaaaacaaataaaaaacaaaaacatcaaaaacaaataagccaataaacactaccagacccagaaagttttatcagtacgttctaccaaatattaaagcaaytgatagtcccaatcttaaattgtttcagagattagaaaaaagggacttgggtcaggcacg

SEQ ID NO: 314587 - DNA, 553 bp, Homo sapiens
aaggctgagaagtccaagctcaaggtgctatatctggtgagggccttcttgctctaggtggtacagggcatcacatagttagggggctaagtgtgctagttcaaatctctcttcctcttcttcttcttttttttaatttataaagataagaggtttctttggcccacagttctgcaggctgtacaagaagcatagcaccagcatctgcttctggcaagggcgtcaggctgcttccactcatggtggaaaggggaaggggagctggcatgtgcagaggtcacatggcaagagaggacgcaaaagccattaatcctgctcccataataacccattaattcattaacccattaatctattaatccacaaatgaattaatctattcttgagggcagagctcttaaaacccaatcactgcttaaagggcctctcaacactgccactttggggcttaaatttcaacacgacttttggagrggacaaatactcaaaccatagcacttgacaataaagtttgatttaatttgaccacccctgctgcaattcattttcatta

SEQ ID NO: 314588 - DNA, 539 bp, Homo sapiens
tggggttgtaaagagtgatctgtaatctgccagtcatatgtattggaccctggttatgtgcaaagtagcactgttctacatgcgctttcctataagatgcctcagccatgggcctttgctacttcaatttgtaatcatatcagtattgctctctgtcttctgctctccagatcaccaaatctgaccaaatcaactgttgtgagtttgaccccagcacaccaaatgcagttcctccctgtcataatgtagcttcttttatgtgtatcctcatccatcagaaataggaaaatgtgttattatcttgttcccaatatcacagagtccaccaaaattctctaatggttggaaattaatgctaaaaggargggaaatgtgaagttgacagttttattcgttcattcaaaaaatacttattaactatacactgaatactagaatacactgatcaaatatgtttacctctcatgagccttaaagacttcttggagtggtagataatcaataacaaattaaagtaagtactgtggttgaagatgaag

SEQ ID NO: 314589 - DNA, 584 bp, Homo sapiens
gaccctggttatgtgcaaagtagcactgttctacatgcgctttcctataagatgcctcagccatgggcctttgctacttcaatttgtaatcatatcagtattgctctctgtcttctgctctccagatcaccaaatctgaccaaatcaactgttgtgagtttgaccccagcacaccaaatgcagttcctccctgtcataatgtagcttcttttatgtgtatcctcatccatcagaaataggaaaatgtgttattatcttgttcccaatatcacagagtccaccaaaattctctaatggttggaaattaatgctaaaaggaggggaaatgtgaagttgacagttktattcgttcattcaaaaaatacttattaactatacactgaatactagaatacactgatcaaatatgtttacctctcatgagccttaaagacttcttggagtggtagataatcaataacaaattaaagtaagtactgtggttgaagatgaagcctgttaagaagaaaagagcatagttagaggagccactttagataaggttgttaaagatggcctctctgaggaagtgacatgggagctga

SEQ ID NO: 314590 - DNA, 574 bp, Homo sapiens
ttagagaagtgacatcgtctgatttacatgtacaaagcttgtagaaggcaagatgtttgaaataatttaggtgaacaatgatggttatgattggggtgactgtgcacatagggaagagtagaccgatttcagtttattttggagatagtactgactgcacttggcgggttgaatgcaagaggtatgggaaagggaggaatcagggtagattcctaagacattgtcctgagcaactaggtgacatttgctaatttaaggaagactcaaagactgacagttttttttttttcttttttttttgagacggagtctcaccctgtcatccaggctggagtgcaatggcatgatcttggctcactgcaacctcagactgacagaatttttttgctgataatttataagctcaagtttgaacatactaagtgtagagttgccarttaggcaattagatgtaagtaatatgagctcaggagaaacatcagagacagagacacaaatttgggcaacattatatattggtagtatttaaaagccatgaaggtgaatgatttcatatcatttgggaaaagaaggc

SEQ ID NO: 314591 - DNA, 583 bp, Homo sapiens
ggaggtgaggaagtagagaaagtgagtgaagatggctgttttaaaggaatttgctatgaagggaagcaagtaggaccatagctaatgggagatgtaggattaaggaagtatsttttaaaaataaacaaacaaaaatgagaagatatgactgcagagcatgcttgtgattgatgggaatggtcacagtggggaagggagtgacaggagaccgttgaaggagcagcctttggggagatgaaaggagatgagatccactgtgcatatggagggaattgctctttgatacaaccagtcttatctctcattgcaacaacagggaaggcagagaggattgaatgatttcagctaggtttgtagatttgatggtgtggcaatgactagcttctgctccgatgtttctgtttttccaaagaggtattaagcaagaatggaaagaaaggggtttgagaagagagggaaagacaagaaatatcatcttggaaagtggaaaatcaagttacgcaagaagtatagcagaattgctgtacatgagggagggcccatccaaagtttttggtcataaatttaatgtgaaaccaatcaa

SEQ ID NO: 314592 - DNA, 586 bp, Homo sapiens
ttctttcaactcttttggatatatttacccagaagtggatcatgtggtagttctatttttaatttttggaggaatgaggtgaagacatgttatgtagtttttgaccactaatgtgatttttgaaactggactatttattaaattctaattagttagaaaaacagtataatatagattaattctgggtgattgcttttcccaaaataaataaacattagacccttgtgagctacatccctccctccttttcccagagtattagaaataaaactgatccttcatattcactcattccttctttgaacaaacatgcactgagagcctactatatggcagggactatgttctaggcrttggcaccagaaaaactaaactaaattgaagtttcacctgtcctctcttacctttgacctttttcctgctatagtcaaataagtaaagcattagcagaaccatggttaatcctttttgcctggaggttggactatcctaaatatgcccaacagaaagctattttatttttttcatttcatttattacctactttcttattaattaagtctaggatgtaggttcaactaaagtt

SEQ ID NO: 314593 - DNA, 586 bp, Homo sapiens
ttctttcaactcttttggatatatttacccagaagtggatcatgtggtagttctatttttaatttttggaggaatgaggtgaagacatgttatgtagtttttgaccactaatgtgatttttgaaactggactatttattaaattctaattagttagaaaaacagtataatatagattaattctgggtgattgcttttcccaaaataaataaacattagacccttgtgagctacatccctccctccttttcccagagtattagaaataaaactgatccttcatattcactcattccttctttgaacaaacatgcactgagagcctactatatggcagggactatgttctaggcattggcaccagaaaaactaaactaaattgaagtttcacctgtcctctcttacctttgacctttttcctgctatagycaaataagtaaagcattagcagaaccatggttaatcctttttgcctggaggttggactatcctaaatatgcccaacagaaagctattttatttttttcatttcatttattacctactttcttattaattaagtctaggatgtaggttcaactaaagtt

SEQ ID NO: 314594 - DNA, 432 bp, Homo sapiens
ttgttccgaatttcctaaatctcgttcatcctttccttctctttttttgtgaaatatttaagtaatttgtattaaaatccatatagttcatgtgtctctactaatgtgataacattgtgtttgaaatctattaaaaggagactcaaatatcctctgtgacatttttgctgagatttcatttcattttttttttttacttattttttaaattgacaaataataattgtacatatttatgaggtctggtttttactgttgccattcactctctcttctgactcctacctagttaccttctttccctgactctcttctttccctttctctctcttccctctttccctccatttccctaattttctattgttttataattgaatttaatcrtttttataatttttataattgaacttaacctatttttccccattc

SEQ ID NO: 314595 - DNA, 365 bp, Homo sapiens
ttgcccatctttagattcttatggatggctcctggaaaatagtagaggagatgaggctatacaagcaccaaatcattaaaggctttgaatgccatggaaaagaaaatatcactaaataaaggtcttggaaacaagagagagatgatctgagagagagagakatatatatatatgatacataataatcagatatatatcagatatatagatacactatatatatttgatagatgatatatttgatatatctatataatacatatctgatatatctatattttagccttaataaatttcaaaaattgagtattatatagactgatcttcaattagaaagaaattaaaatttaacaaaaagtaaacaa

SEQ ID NO: 314596 - DNA, 347 bp, Homo sapiens
aaggaatttatccaaggtcactatactagatttcyattactgatataacaaattaccacaaacttagtggcttaaaacaacacacatttattatcttggagttctagaggccagaagtccaaagtaggtctcagtaggccaaaaaagtaggtcttaacaggggtcaggtccttcctaggggagaatctgttaccctcactttctagcttctagagatctcctgcattccttagcttgtggcctcctctcacaacacaccttcttatctgactctccggccacctataatggcccttgtgattatattgagcttataatacagtttggattgtccccgcccaaatttc

SEQ ID NO: 314597 - DNA, 586 bp, Homo sapiens
gtcacttaccatataaactgatatatcacagaaacttcctaaaccatttcccatatctttttcatgctcaaaaacattgcatgtgtctccattttcatttagggccacagcctaagcacaattaacttcaacaaatgtttattcacttttttcttatttaatgcaaaactactctgggcaaagctttgtactaagtgctggagagcttcagaaaataaataagacatgtccctgtccttggggraccttacagtctaaaagaaacaaacaaactcagtgtaggaacacaggggcaaaagggagaatagggctttatgctagacattgtgccaaattcttctatatatgtatctcatttactactgacagtaacctcacaagtaattgatcttaatactggtttacagatgaggaaatgtaatgataaattgcttaagatcacacaacagtaaatgacagagctgggttttgaaatcaagaaagtactgattagaggcaaagtagagaaataaccaaaatcttagagatttaactgaggccatcagtgccatgagcttttatatgtgttttcatttaatgagtatgt

SEQ ID NO: 314598 - DNA, 462 bp, Homo sapiens
cgtattgcttccatcataataaaatatcacataaataatactaataasttaaaataacatatgtaacacttgattcatataccaagtcatagttttgaaatgtccatatacatattcactttgcagtttataaaataatgatttccttgaagtatacataatttcatacaaacttccttgatgtaaggttaaatggattttagaaactaatttttattacagttcatatgtattaccaggagatgtaacagaactcctattagttcaattactgtgcataatagtattttctttgcatgattttaattgatttgtaggtttgatgtgtgcctacttcctttaagtttttttttttgttttttttttttttcgataaaggctccctctatcgcccaggctagagtgcagtggcgtgatctcggctcactgcaacctccgcctcccaggttcaagctattctcc

SEQ ID NO: 314599 - DNA, 585 bp, Homo sapiens
ttataagggcactaatcccatccatgatggctctgccttcatgacctaatttcctcccaccagctccatgccctaacaccatcaccattagggtgaaatttcaacatatgaatttgtaaaggacataacatctagtctgcagcagaccttctagattgagagaaaagagtcagttttattgttaaggatgattttggaaccttgctgagaattgtgtcctcagtgggcttcctcaaactctgagtttgactcargcccacaacctccccgagtccctgacatgaatataaagttgtggactttcactgcagggacatgctgcttatagcattgatgctaacaaagcagagataacactcgaggcaagaaaaggagggagggagagacagagaatggatcacaccaagcacgcttagtctcttctctgagtaaacgagccagtgaacacacagagatgcaccagtggcaaatgagtcagtacattactaaccatctattgacaccctcctgttggttccctatagggttgtagtaatgcaacttcaattttcaaaattttctgttttaacatgaacctgttagaat

SEQ ID NO: 314600 - DNA, 585 bp, Homo sapiens
ttataagggcactaatcccatccatgatggctctgccttcatgacctaatttcctcccaccagctccatgccctaacaccatcaccattagggtgaaatttcaacatatgaatttgtaaaggacataacatctagtctgcagcagaccttctagattgagagaaaagagtcagttttattgttaaggatgattttggaaccttgctgagaattgtgtcctcagtgggcttcctcaaactctgagtttgactcaggcccacaacctccccgagtccctgacatgaatataaagttgtggactttcactgcagggacatgctgcttatagcattgatgctaacaaagcagagataacactcgaggcaagaaaaggagggagggagagacagagaatggatcayaccaagcacgcttagtctcttctctgagtaaacgagccagtgaacacacagagatgcaccagtggcaaatgagtcagtacattactaaccatctattgacaccctcctgttggttccctatagggttgtagtaatgcaacttcaattttcaaaattttctgttttaacatgaacctgttagaat

SEQ ID NO: 314601 - DNA, 546 bp, Homo sapiens
aggtcaaaaggaaagaaatggaagtatatattattataagattgttatataatatgtgaaatagtatgctatcacttaaaggcagatggtgataaattaaagatatatattataaactctaaacttacaatcaaaacaaaacaataagttatgtagttaatatagttaatatatagttaataagtcaatgaaatcaaatcaaaaaaagaaatcagaaacattgaattaactcaaaaaaggtagatcgagaggaagatataaacaaagaacaaaatggagaaagagaaaacaaatagcaagatcttatcaataatcacattacatttaaatgttccaaataccaattataaggcagaaattgtagtttgaatcaaaagctaagacgtagctgtgtgctttctacaggagagccaytttagatgataaataagttaaaagtaaaaggaaaaaaccccacatatcaccctaatccaaagaaacctagactgactatgttaatatcagcaaagtaaatttcagagcaataaatgttaccagctccaaaag

SEQ ID NO: 314602 - DNA, 613 bp, Homo sapiens
ccttgtcatggctgatgtggggtgtcaacttgactcaattaagggagactcagatagatggcaatcccttatttattctcagttcttcagtaggtaatgagcctgtccctagtctgctgaaagaaaaacacaggtggttttactctttattaaatgttggtctgccccaggtgtgtttgtgagggtatttctggaggagactggtgtgtgagtcagtggactgagtaggaaagatccaccctcagtgtaatggggcagtatctcaccatctgtgggcactgatggaaccaaaagatgggggaggaatgaactgctytcctggagccaggactcctttcttctgcccttgaatatccaaactccaggttctaccattttggactctgggactcacacgagcagtcctctgggttcttgggccttaggccttgtactgagagttacatcatcagccttccttgtttctgaggtgtttggacttgcactgagccagctgccagcttccctggttctccagcttgcagatggcctgtcatgggatttctagccttcataaacaagtgagctaattcctccagtaagtcctccttgtacatatctctctatatctatc

SEQ ID NO: 314603 - DNA, 415 bp, Homo sapiens
aatctttactattttgttttggaaaggtttataacaatttgtgttaattcttcttcatacatttagtaggatttacaaataagccatctggcttttgtttttactttgtgggaaattaactattaatttaacctctttccatattatagatatatttagatttttwaaaaaaaatatttctgaatcagttttgttagtttgtgtctttctgtgaatttgtccatttcatctaagttttctaatgaattggcatagagttatttataatatccccttatcattctttctgtaaatttctataagcttatgttcccactttcattgctgactttaaaatttgagttttctgtcaattttccttggtcatttagcctagttattttccaattttgtttatcttttcaaagaagcaagt

SEQ ID NO: 314604 - DNA, 572 bp, Homo sapiens
acttctacacagttgctaatcattcctatcaagtaagtctccataccctttctgtctaamtcacacttctacacagttgctaatcatgcctatccagtaagtctccataaaatgcaaaagagggcagggtttggtgcacaaggagggtgtattagtcccttttcacgctgctgataaagacatacctgagactgggaagaagaggcttaatggacttacagttccacatggctggggaggcgtcacaatcatggtggaaggcaaggaggagcaagtcacctcttacatggatggcagcaggcaaagagagagcgcctgtgcaggggaagccctgtttataaaaccatcagatctcatgagacttattcactatcatgagagcagcatgggaaagacttgcttccatgattcaattacctcccactgggtccctcccacaacacatgggaattccagatgagatctgagtggccacagagccaaccatatcagacagcatggaggccctgcatccccttccccatacctcaccctactttatctgtatcctctgtaacatcctttacaataaa

SEQ ID NO: 314605 - DNA, 686 bp, Homo sapiens
gggctgtgcagcctttggaagcagcagagtgactctaacgtcctggttgtgaaaaagcactctgcaactccatgtctatgcactatcaytttgtgtctccttcaagttcatgtctttaatactgtcgtatgttcacagtggataactgtcacaccttacacctctcctctgactgttttaggtctatgtatccaactgtctacatgatactacacgatatattcttttttttaattgcttcagttagactgtattttctctaagaattacaaaaaaacgggaccataaacagtttaaaataaaagactgcaaatcaagaggtaggaacagcttcagggttggcttgattcagcagttcaatagtgacattagacacctagtttctttctgtttcttgctcagctttccatcctaagctggttttctttcatggtccccagataaataccaggaagtaaccatggtgctctgctttgtgtttggggagaaaaatttgagtttattctcttgtagaggatcaggagagtgccaaggttgttgcagcttgactttgttcctatttcaatgaccctgagacaggcttcctgtcttctgatggttgttcttcttggaaaaatgaaagcattgcattcctaaaagagagtatcttctcagtcttacttgctgttaatgatgattttcaagta

SEQ ID NO: 314606 - DNA, 622 bp, Homo sapiens
gacatttaggctttgaggcaggagatagcaggagccatatccacgaaatttgtaaactgtcacattgctcattggagtgtcttttttttttttgagacagggtcttgctgtcacccaggctggagtgtagtggtgcaatctcakctcactgcaacctcctccacctcccaggctcaagtgattctcgtgcctcagtcagctgagtaactgggaccacaggtgtgcaccaccacacctggcttagagatgggggtttcacatgttgcccaggctggtatcaaacttctgaccttaagtattccactagcctcaacctcctaaagtgctggaattacaggcatgagccaccatgcctggccaatttggtgtctttatgttaataagcagtgagggtcactaaaggtcatttttgtcccatcttctgatttccacaggcttcttcactgcaccctgttttgatcaaatcctgctgggatcacaaggttgccaacagggtggggacagtgctggaaaaacaaggcttgctgatcccctacctataaaagcctaatacacctctatctacgaatctatctacatctatctatctatctagctatctatctagctatctatttttttt

SEQ ID NO: 314607 - DNA, 566 bp, Homo sapiens
attatctatttctttgtcagttatcttttttagtttgtgtctttcaatgcattggtgcatttcatctaaattattcaatctgtaggcaattggtttccataatacattcttattgcatttttaatacctgtagaatctgttgtagtgttacctctatccctgatattgcttatttttgtattctatttttatgccttatctagtctgtctacaagtttattgattctattgatcttctcaaataataagttctcagttgtcttgattttctctgttttggttttgtacttcatttatttttctgctttggtttatataattttctttctcttgctttcttcgggtttaattmtctgtttttaatacagctttctaaggaggaagctgaggttattacattttgatatttctttcttcctaacataagtgttaagtgttacaaattttctctaagtcctgctttaatggcttccattgatttctgaaatgttttgttttcatttttcctcagttcaaaatattgtattttctttttcatttttttctttaatctgtgggttattaga

SEQ ID NO: 314608 - DNA, 631 bp, Homo sapiens
catcttgtctatatatatcatgatctagctatatttatagttatatccatgcctttatttagaggtagattcatgtgtattttaataaaaatttacaatctaattttaataaaaacttataaacaaatctatctaattttaatcagtttgaccataaggtaaggtttccataaacttttttataaccttttcaaattttctattacagagcagatcaatgctccataaaaaccctgttattccaacacatgggcccagatgctggccttrcaacagtgtgattttgatataaatatttaatttatagaaaaagtctgaactaatcttatcccccaaaatcagtgtttacaatctcatgcacccacttcttttgcaacagtccttgggcctagagggatttaacgttttaatttctggctttgtgtctcacaaacacagttcattttgattgtcaccttctccgggtccgaagacaaggctttaactgatgtcaatgctcaagatttagcaggggttggtgcctttttcagacccaagagtcaaatgcctgtaacttaaggcacaaagattagttaataggatatttatgttacagaatgtcctatcattctaatatgctacatagcaaaac

SEQ ID NO: 314609 - DNA, 574 bp, Homo sapiens
gttattttgaggcaattaggaacatggttgaggctggctgtggcagaccagagagagaagaaacccaccttcagccaaaattgtgcaggcagctgcttaggagggcttgtgagacaccagggctgtggcagctgagccacaagagcaacacatttgcttgtcagggaaccaaaatgtgttaccacaacaccaggggtgtaggggtgtggtggctcatgcctgtaatcccagaactttgggaggtcgaagcaggcagatcacaaggtcaggagttcaagactagcctggccaatatggtgaaacgctgtctctactaaaaatacagaaaaaattagctgggcatggtagcacgygcctgtaatcccagtcatttgggaggctgaggcacaagaattgcttgaacctgggaggtgtaggttgcagtgagccaagattgcaccactacactccagcctgggtgatagagtgagactccatctcaaaataaaacaaaacaaacaaacaaacaataaaacaccaaggctaggtcctgctgctctcggcacagaaagccaatgactgagataagtcattg

SEQ ID NO: 314610 - DNA, 547 bp, Homo sapiens
gtgcatttataattctatcacttcaaacacttcatctcctacttgaagctgattaaatcaaggctctgctaaaagtgaatgtgttgattgtagccaaggatcacattttcagtgactttctctcagcctactttccaatattaaatctttttgacccttagcaatatattcctttttcagaaacttaagatttctgtttgcttattacaacaggcgtctctgaaaaggaattcaaaatgtcacatttttatatattcctaaactaggttctatctgtaagaattaayaccatagttttatataataaaaccatgataaatgtttcccatattctatttctcatcttatattgctattaacatttctaatatacgtatttttcattcttatggtttcctcatatgctggttcactggtttttattacatgctctataaaaaatattatcaaaaaactgcttgtgtttctaatattttagtttttatggaaaatgaattaattctttttgtttttagaatgatctccaagagctcctactgctttctaa

SEQ ID NO: 314611 - DNA, 493 bp, Homo sapiens
ctgtttactaatatttactgaaatgcttaccttgaccaggcattcttctgtatgatttccatacattgactatttaattttcacagcaactttatgggataggtttttttaattcgtattttgcacataagaaaatcaargttgggagagtttcagaagcttcatcagaaagtggaggaagtggaaaagctaatgttgaaaccagttcatctgaattttggttaatgctctcaacatccatactgttcttaaatgtttctcaagataaaggatggctgtgatcatttgaagtgaaaaagaagcagtattagaaacaaatatatgtaaataaacattgtttaccattatataggaaagtgtagtccaaactgaggatttgtaacttcaagtttatgctgatgtcttgtttagagcccagacaacaaaagaataccgacacattaacgggatctgagtcttgatagtgggtttttgtgctctaaagatggaaccc

SEQ ID NO: 314612 - DNA, 544 bp, Homo sapiens
tcagcactgagaatgtggtgctcgtcctcccatcactgggatgtacttgtgtgggttcgagatgtggaactcagagtggctccttttctcattaccctaaagacctaccagcaatatttttgtatcccatctttgcgattttggactctgctgatttctcccaaagattaaatgcttygaccagaaaatacaatggtttcattaaaagctctggaaggattctagtcagtaggctcctcaggccagtgaaatcaactggcacatataattgctgcataggttagagtgattgttccttggtatcagaaggaagttgaatctctattacacagtaggagtaggaagaagcctggaactcaggaaatccttcttagttctctcaggtcctttgataaatgtaaatgttaaattatattagcccaatacaggcagaacttttaatgaacagacccatcgttgatgaaagctttggttacttctccaggtaaagaaccatgaccagctgatggactttctaaaagtgaagggaatatggataaagaaa

SEQ ID NO: 314613 - DNA, 544 bp, Homo sapiens
tcagcactgagaatgtggtgctcgtcctcccatcactgggatgtacttgtgtgggttcgagatgtggaactcagagtggctccttttctcattaccctaaagacctaccagcaatatttttgtatcccatctttgcgattttggactctgctgatttctcccaaagattaaatgctttgaycagaaaatacaatggtttcattaaaagctctggaaggattctagtcagtaggctcctcaggccagtgaaatcaactggcacatataattgctgcataggttagagtgattgttccttggtatcagaaggaagttgaatctctattacacagtaggagtaggaagaagcctggaactcaggaaatccttcttagttctctcaggtcctttgataaatgtaaatgttaaattatattagcccaatacaggcagaacttttaatgaacagacccatcgttgatgaaagctttggttacttctccaggtaaagaaccatgaccagctgatggactttctaaaagtgaagggaatatggataaagaaa

SEQ ID NO: 314614 - DNA, 595 bp, Homo sapiens
taaactttgtgctgaaggtcctaaccaaggcaataggacatgcaaaataattaagcagtataaagataggcaagaaagcactaaataaatctttatttgtagttgatatggttgttcacatggaaaatacaaatgaatcttaaaaaaactggttatacttaataagcatctataaattcactaaatgagtcaattcagcagaggtactggattcacagtcaatatacaaaaggtaattctaactagcaaaaataatgggaattttaaaaaacactatttatgatagcattaaaattttaaagacctayaattcagcctggcaatgatatgcaaaatttatatattgaaaactacaaaacatcactgggagaatttaaagaagctatcatcttgatggattgcaatattcagtcttgttaggatgtcaagtctccccaaaatgtacttatatattcaatgagatccaaactaaagctccatcataatttggaaatttacaaactgtttctaaaatttgtatggaaatgcaaatggtctagaataacccagaaaatattgaaaaaaatagaaacaataacaaagttgaaggactcac

SEQ ID NO: 314615 - DNA, 595 bp, Homo sapiens
taaactttgtgctgaaggtcctaaccaaggcaataggacatgcaaaataattaagcagtataaagataggcaagaaagcactaaataaatctttatttgtagttgatatggttgttcacatggaaaatacaaatgaatcttaaaaaaactggttatacttaataagcatctataaattcactaaatgagtcaattcagcagaggtactggattcacagtcaatatacaaaaggtaattctaactagcaaaaataatgggaattttaaaaaacactatttatgatagcattaaaattttaaagacctataattcagcctggcaatgatatgcaaaatttatatattgaaaactacaaaacatcactgggagaatttaaagaagctatcatcttgatggattgcaatattcagtcttsttaggatgtcaagtctccccaaaatgtacttatatattcaatgagatccaaactaaagctccatcataatttggaaatttacaaactgtttctaaaatttgtatggaaatgcaaatggtctagaataacccagaaaatattgaaaaaaatagaaacaataacaaagttgaaggactcac

SEQ ID NO: 314616 - DNA, 499 bp, Homo sapiens
tatctcacctacaattttagagggtagaggcaaagggctgattgtcctagcaatttatgaagccaaatggataacattaaactgcaaagagaactcacgaatgtgtacccagatgcaagacagcaaggcatattgctaagaaatgaaaaccctcaggaactggatccatatctatgcttggactcagcctttacctattagatgtttcaatattggggcagttgtttcaaataagaaccctcaaggcagggataaaacaaaaatcaaaaatcatgtgatactcaacaactrtgtgcctttctcattccttaaagttccttagtttaaataattttcaatagtttatacctatgaatataaaatttttgagcatcttaattacagttctatattaaatgataaaataaataaaaaacaaggattactctagaaatggcatgagatatatttgtaactttaaaaattgtaacatgtatttcttttcatataatcatacctt

SEQ ID NO: 314617 - DNA, 499 bp, Homo sapiens
tatctcacctacaattttagagggtagaggcaaagggctgattgtcctagcaatttatgaagccaaatggataacattaaactgcaaagagaactcacgaatgtgtacccagatgcaagacagcaaggcatattgctaagaaatgaaaaccctcaggaactggatccatatctatgcttggactcagcctttacctattagatgtttcaatattggggcagttgtttcaaataagaaccctcaaggcagggataaaacaaaaatcaaaaatcatgtgatactcaacaactgtgtgcctttctcattccttaaagttccttagtttaaataattttcaatagtttatacctatgaatataaaatttttgagcatcttaattacagttctatattaaatgataaaataaataaaaaacaaggattrctctagaaatggcatgagatatatttgtaactttaaaaattgtaacatgtatttcttttcatataatcatacctt

SEQ ID NO: 314618 - DNA, 593 bp, Homo sapiens
atgatgtaaaacttaatatgtttaatattccaggcatctcgaggggaacatcacacaccagggcctgtcgtggggtagggggctaggggagggatagcattaggagaaatacctrttgtagatgacggcttgatgactgcagcaaaccaccatggcacgcttatacctatgtcacaaacctgcacgtcctgcacatgtatcccagaatttaaagtataataatacaaaaaagtgtatataaaaaaaaaatcccaggcctctctttaagataaaatctaaaactctgtagcctaaaatacatatttagaaatataaccttgatcaaaaccaggataaaagcatatatatattatacacagaaaatgatttagtattagatatgtgcctctgatacattagatgtgttatctcatctgtatctataaataaatgtaatctatatttaaaatcttatataatgtattaagaattagctctttgctgaattcaggattttcttaaacacgatatgatatgactgagagacacaggaagatgtgtgtgttactttatggcaggcaaacaataaaataaaactcagagcaggacccaaa

SEQ ID NO: 314619 - DNA, 522 bp, Homo sapiens
ttattttcattgtcctccacaaaagctccatgtcttaattcatgttccctaattcatcatgtgtgcattttttgtttttaaaatttgtaattgacagataactgcataatttaattgtataatttatgatgtataatttatgatgtataatgttttaatgtatttatacattttagaaggaataaatcaagctaattaacatgtccattacstcacctgcttatcattgcttttgtggtcaagctgtttaagatatactcttagcaatttgaaatatgcaatacattattattaattattgtcaccatgctgtgcaatagacagctaaaacttattcctactgtttaaatgaaaccttgtaccgtttgtccaacacgttccttttctgcatcccccacaccccagcctctggtaactgccattttaatctctgcttctacaaggtcaactttttcagattctacatatatgtaagatcatgcagtatttgtccttctgtacatgacatattgcacttagcat

SEQ ID NO: 314620 - DNA, 572 bp, Homo sapiens
cacacacacacacacaagcagacatcattgcaattttgacatattttttctctttaatctggcttgtatgcctaagtgtcccatgtgaaatctacagaagattggtcaagctaaatgcagaattgtacaagcacaataacattcagatgaatgaaagaaggggacagaaaggtactatagtttatatctattctgtgccatttaatgatccaaagataaaaagcaaagcaaaaccaaattaacggatacaaatgtttaatataggtattttcccctactttataggtgagaatgtgtaagcttactagcttaagtaagtaaacaaaggtcwcacaactattaaatagcggctttggaattcaacctaactcacatctgactgcatctcattccttacccttgaataatgcatgattaatctgccttgtctcttttctttgagacacacacatacaaagccatctcataccaaatatggacaacaaccattctccaccgcctgcttgctttcctttcttctcttccatgtgtctctagtttcttgccttccttgctctgaaatcccattttgt

SEQ ID NO: 314621 - DNA, 572 bp, Homo sapiens
cacacacacacacacaagcagacatcattgcaattttgacatattttttctctttaatctggcttgtatgcctaagtgtcccatgtgaaatctacagaagattggtcaagctaaatgcagaattgtacaagcacaataacattcagatgaatgaaagaaggggacagaaaggtactatagtttatatctattctgtgccatttaatgatccaaagataaaaagcaaagcaaaaccaaattaacggatacaaatgtttaatataggtattttcccctactttataggtgagaatgtgtaagcttactagcttaagtaagtaaacaaaggtcacacaactattaaatagcggctttggaattcaacctaactcacatctgactgcatctcattccttacccttgaataatgcatgattaatctgccttgtctcttttctttgagacacacacatacaaagccatctcataccaaatatggacaacaaccattctccaccgcctrcttgctttcctttcttctcttccatgtgtctctagtttcttgccttccttgctctgaaatcccattttgt

SEQ ID NO: 314622 - DNA, 589 bp, Homo sapiens
atttgaagagagcacagaaccatgaaaagattccatgatcatgattggtagaattaatattgttaaaatgacaattcttcccaaagcaatttacagatttgatgaaattcctatcaaattaccaatgacattcttcacagaattagaaaaaaataatcctacaattcatatggaaacacaaaagaccccaaatagtcaaaataattctgagcaaaaataacaaagctagggggtgtcacactccctgacttcaaaatacactttgcaagctccattttcaccctcttggaatacttccctgggcctgccatttgaggaaactgatctagtctgctggagaatgagaggtcatgtggaggagaatggaggtgcctcagcagacagtcagctcaaactaccagacgtgcaaatgagaggatctggcagcttctaggacagccaatcctgctgataaatgcaatgcaagaaggaatccaggtaaaaatagtggagaatctcttaaccacttcacatacttatrataaataattgctgttcgtagccactaagttgtggagtggcttgttagataacaatagttaactgaaac

SEQ ID NO: 314623 - DNA, 609 bp, Homo sapiens
tgtttatcctgttgatagttttgctgtgctgtgcatagtttcttttagtttaattacgtcccacttgttgaactttgttttcattgcaattgctttcagggacttattcataaatcgtttcccaaggccaatgtccagaatggtgtttcctaggtttttttttttttttctcagattcttatagtctgaagtcttacatttaaatatttaatccatcttgagttaatttttacatatagtgaaagtagtggtccagtttcattcttctgcataggactagccagctgttccagctggctatctattgagtagagagtcttttttccccattgattatttttgctgactttgttgaagatcagatggttgtaggtatgtgactttgtttytttatttctgggttctctgctctgtttgttccattgctctatgtgtctgtttttacacctctaccatgctgttttggttaccataactttacagtatatttaaagtcataatattatacctctggctttttttttttttttttttttttttgcttaggattgatttggttatttggtttgcccacattttaagtttttttttttctgtcaaattgtatgt

SEQ ID NO: 314624 - DNA, 604 bp, Homo sapiens
gatgatgatactaataattaattcatcatctgtaagattcagaagctaacacctcttctataggttttctatgaaggataaaatcagagccctcattcaacctttccttcatttattcagctatcattcttcagtgactggaaaggcagacacaaaatatcatatgcagcagaacacacacacaggttattatggctaaaaaaaagataaggtgattggacaggcaagatattctggaaaacttgacccctgagttcaggtttcagataggagaaggtgtagctaaaaggagaaagtccatggaaacaggaaatatcaatcagagcagagggataataaaaggaaatgraaaaaaaattccacagaaaaatacattatggatgtttcacgcaatagttcagaaacagttgcctatagcgagatataaattttgaggcagtgagtagatggccttatgctatttagatgtttatctgtgtgtgttaaatacccaaagacaagaatgatgcctcacacatagtaagtacctaagaaatggtatttctccattttctttctgaggctcccagttttatatgtttatttcttcctttttttcttcttc

SEQ ID NO: 314625 - DNA, 404 bp, Homo sapiens
ctggtacattatttacttcatttggtgaggtcatgttttcctgcatgttcttgatgcttgtggatgttagttagggtctgggcattaaatagttatttatagtagactttgcagcctcrgcttatttgtattcatccttcttcagaaggcttttcagttatttgaaaggacatgggtgttgtgctctaaggcatatctgcattaagtggcactccaagtcctgtaatgctgtggttcttgcagactcatagaggtacttcttggtggtcttgggtaagatgtggaagaattgtttggatttccaggcagaggctcttgtcctcttcccttcctttcacccaaacatacgaagtatctctatgctgaatcacctggggctgaggatgttgtgacacaagcacccc

SEQ ID NO: 314626 - DNA, 635 bp, Homo sapiens
acagggccaatttgacctgagtaggccttggtctgctggtcttccctggaagcccagtcaggctgcacctgcttttagtgcaacccccaggtacctcctgggagtccacatcacagcacttctgctggcagactgcacctgactggcagattgctctagctgagtggtctccacagacacacagcagcctgactacaacctccctctactgaggtctcccccatgccactttgcctgcacacattagcctatagcaatctcccacatcactttgcctgcatgtgtgtgcaagtatggaccttgatttctcttccccactagggtatgtgtgcacatgcgctctactgtgtcattgctgccagcatgagtgcaacctgctcccctccccattgcactaccattgtccttcacacattggcggacagaaacccactagcaccacccctgccagtaccctccccccaatccagccagtgtcctgtcccacacctacactgckgctggaacaaaaataggtacaaagaaaagaaagacatcccctgatctgagaggtaactgctggccacatgaatgcttagaggacgaacatagtcctgtgcccatgaatgccccacccccgtgctaagactacaaca

SEQ ID NO: 314627 - DNA, 606 bp, Homo sapiens
cattttaaaaccaatcatgccttcctaatagtcccccaaagtcttaactctttccagtattaacccaaatgtccaagtccaaagtttcatttgagacaataagttctttttgcttatgagcctgtaaaaacaaacaaaacaaacaaaccaataaacaaccatgttagttacttccaagaaagaataggggtacaggcattaagtaaatgttcccattcgaaatgkgagaaattgaccaaaactaaggggtcacagtccccatgcacgttcaaaacccagcaggctctcattaaactttaaagctccgaaatctcctttgacttcatgtctaacatccagatcatgctgatgcaaggtgtggagtcccattgcgttgggcagctccacccctgttgctctgcaggaacagcatctttaactgctttcatgggctggcattaagtgcctatgtcttttccatgctcgttgtgcaagctgtcagtggatgtacctttctggggtctggagtatggtggccctcttctcacagctccgcgaggcagtgtcacagtggggaatctgtttgggggctccaaccccacattacccccccatactgccctagca

SEQ ID NO: 314628 - DNA, 606 bp, Homo sapiens
cattttaaaaccaatcatgccttcctaatagtcccccaaagtcttaactctttccagtattaacccaaatgtccaagtccaaagtttcatttgagacaataagttctttttgcttatgagcctgtaaaaacaaacaaaacaaacaaaccaataaacaaccatgttagttacttccaagaaagaataggggtacaggcattaagtaaatgttcccattcgaaatgggagaaattgaccaaaactaaggggtcacagtccccatgcacgttcaaaacccagcaggctctcattaaactttaaagctccgaaatctcctttgacttcatgtctaacatccagatcatgctgatgcaaggtgtggagtcccattgcgttgggcagctccacccctgttgctctgcaggaacagcatctttaactgctttcatgggctggcattaagtgcctatgtcttttccatgctcgttgtgcaagctgtcagtggatgtacctttctggggtctggagtatggtggccctcttctcacagctccrcgaggcagtgtcacagtggggaatctgtttgggggctccaaccccacattacccccccatactgccctagca

SEQ ID NO: 314629 - DNA, 603 bp, Homo sapiens
atgttttgaatgtcctttccaaaactcatgttgaaatttaattgccattttgatggtattaagatggggatgtttaagaggagatttgtttatgagggtaaagccctcatgaatagattaatgctgttatcatggaaatgggtttgttatcaccagactgggctcttgacaaaaggattaatactgtccccattttttctctccctatgccttccattatgtggtgaccctcactaggtgctgacactatgctcttagactgcctagcctctagaattgtgarccaaatacacatttttttaaattacccggtctgtgatatttgttatatcagcagaaaatgaataagatacacagtgactgaaccattttatattaccaccagcaataagtgaggtctccaatttctccacatcctcaataacactcgatattttctgttgtgctgtaacagccatcttagtgattgtgaagtaatatcattttggttttgatttgcatttcctttttcactagtcatcaatgaaatgcaagtctaaaccatactgagatgccacttcatacctactgtgatgcctagaataaaaaatgtattaattagca

SEQ ID NO: 314630 - DNA, 603 bp, Homo sapiens
atgttttgaatgtcctttccaaaactcatgttgaaatttaattgccattttgatggtattaagatggggatgtttaagaggagatttgtttatgagggtaaagccctcatgaatagattaatgctgttatcatggaaatgggtttgttatcaccagactgggctcttgacaaaaggattaatactgtccccattttttctctccctatgccttccattatgtggtgaccctcactaggtgctgacactatgctcttagactgcctagcctctagaattgtgagccaaatacacatttttttaaattacccrgtctgtgatatttgttatatcagcagaaaatgaataagatacacagtgactgaaccattttatattaccaccagcaataagtgaggtctccaatttctccacatcctcaataacactcgatattttctgttgtgctgtaacagccatcttagtgattgtgaagtaatatcattttggttttgatttgcatttcctttttcactagtcatcaatgaaatgcaagtctaaaccatactgagatgccacttcatacctactgtgatgcctagaataaaaaatgtattaattagca

SEQ ID NO: 314631 - DNA, 583 bp, Homo sapiens
aatacagctatgtatttatgttttgtgtacacaatgttttattactgaaaatatataaaagagatctaactaattggcttaagaaaataaaagtgcttgaatcaaatactttatcaggaaaaaagaaaagactagtcaaatgcttttttaagtttatgtaacttaagtaaaatcttttataaataagctagctttaaaattacttgttaggtaatattagaaatgtcttaagaattgccagcatacatttttgtttgcatttattaatcaggaaatttcatacttatccctgccaaataataaaaaggtgtcaaaatttggcacgaggggttacaaaactataaacccaaccccaaacaaaatatctttgtttgtgtaatttttataaataaggcattgatattggtttaataataatagctacattttgaatttagtaagattactgtaacttctaacattgtggctttaggygattcagtccacaggcagtaaggtttgttatcctctctgtttcaaagctaaactataaactaaatttctcccaaagttagttcagcctacacccaggactgaacaagga

SEQ ID NO: 314632 - DNA, 638 bp, Homo sapiens
ctaacattgtggctttaggcgattcagtccacaggcagtaaggtttgttatcctctctgtttcaaagctaaactataaactaaatttctcccaaagttagttcagcctacacccaggactgaacaaggacagcttggaggttaaaagcaagatagagtaagttatgtcaaatgtttttcactatctcacttataattttgcaatagtggttcaataacttcaaatgatgactattgcagttttcataaataatctaggtaaacaattaaaataaaataatgaagtaagtgtaatgggataaatacttgtggacaaatgtcataatatattaaattaaatactatacattttatttgagtatttcccaataraaatatatttgtagaaaaacattctttctaaaaaaagtgtgtccttttaaaaaataattcaaaggtttttaaacgtcatgtataaaacaaggtaaaaggaacatggaaataaaagagatgtaaagaaaattataaaaataaacagggtttatttttggtaagaaataatatgaaattatttaaggagaaataatttcatatgagaaagaatcttatatggtaaatttagccctagagtaaaatgactagttgtttaagaaagtggga

SEQ ID NO: 314633 - DNA, 608 bp, Homo sapiens
cagggtggccctggtgtcctaggcataagtaatcatgggaagattgtggttctggggtctggggcacacatggggtttgggagatggttgctccaatcccagggcagcacaatagcattgccttcttgggagggatggacactgcagcattgctctcttaaaggggttccacaacattaatggctattggactgctagtgtcctctacagatcagaccactggatactacggtggcccctaccaggtggctgatattaatagtccttaccctttttctttgtttcttggaatctccaggcatctcaagtataccagtctcctcagcaatcctttctgtgtgcttctttccttttcttttatttttttcacagtgctgctgcarcaaatatctatatctgtatctatatttcaggatatttaaggtaacttttagttatttaatcttgcttaaatgtattttggtcagtgaacacactgttataggtcaaaatgtgtcccttttcaaattaatttgttgatgccctatattcctatacctcagaataagactatatttggtgatagagctttaaaggggatgattaaggtaaaataaggtcatgtcaat

SEQ ID NO: 314634 - DNA, 590 bp, Homo sapiens
gtggtggtgggtatgagcaatcttgtcttgtcccatgtcttaaaatgaatgctttcaatgttttcccattcagtattatgttggctgtcggtttgtcatagatgaatcttattattttgaagtatgatcctttgatacctagttgttgagggttattatcatgaagggattttgaatttcataaaaagctttctccaagtctattgagatggttttatagtctttctttttacttctctgtatgtcgtgtataacatgtattgatttgcatatgttcaatcaaccttgcatctcaggaatgaagcttacttgatcatggtgaattaactcttcgatgtgccactggatttagtttcctagaattttgttgaggagtttttttgtctatgttcatcaggaatattgaacagtagttttcttttttgtcatgtctttggaagctttcttttgacaccagagtgatgctgacattagagaatgaattaggaatgattccttgctctttgatttttcggaagagtttcagtagaattggtactrgctcttctatgtacgtctgatagaattggctgtaaatcctctggtctggg

SEQ ID NO: 314635 - DNA, 524 bp, Homo sapiens
taaaaattattcaggaagcagcttaaaatgaggctgcaacatctagaaattaagttaaaataaggattgaaatagagtttaaaatgtggcttatatgaatactatagaggcaagagataatgggaaagaataacactgagggaaatgaagagctttctagaactgatgaatgagacaaatccacaaatgcaaatagctaatgaatataaagctggaaaaaactatttaaaaagtatagcttcacaaattattgtagaccactcagctmccaaaaaaaaaaaaaaaaatagaagagggagaaataaaaacatattaccgaacaaataaatgaggaacatatttacagatagtggtgtgatagagccagttcatgtcactttgcagctctgatttgtatgaatggacttatagaatgacagagtaaaagttcttcaagaaaaactgcaaaattttttgaagcagaaaaacaactatttaatgtcaatggaaatggtcctaaagacatgctgcaaatgaaacattta

SEQ ID NO: 314636 - DNA, 569 bp, Homo sapiens
acctaaacctgtaaaagttccagaggaaacagaaaacacccttctgaacatcagccttggcaaacaatttatgacaaatacccacaaagcaaactcaacaaaaacaacagtaggtaaatgagacttgatcaaactaaacatgcacaggaaaagaaataatcaacaagagaatcagacaactgatagaatgggagaaaayatttgtaaactgcgcatccaacaaaaggctaatatccagaatctgtaagaaacttaaacaaatcaaaaagaataaaacaaataatcccattaaaatgtgggcaaagaacatgaatagatgtttctcaaaagaagacatacaagcttccaacaaacacgtgaaaaatgctgaacataccaatcatcagagagatgcaaattaagaccccacatagataccatcttataccagtaagaatacctattgttaaaaaaaaagtcagaaaacaacatatgttgtcatggatgtggagaaaagggaatgttcatacaccactagtgggaatgtaagctacttcgaccactatgaaaaacagtatgtagatatctca

SEQ ID NO: 314637 - DNA, 465 bp, Homo sapiens
atacctaggaattaacttaaccaaggaaacgaaacatctctgcaacaaaacctataaaacattgatacaataaatttaagatgacatgaaaatatggaaagttattccatgttcttgtatggggttagtcaatatttttagatgaccgtactacccaaagaaatctacaaactcagtgcaatcactatcaaaattccaatgacattctttttagcaatagaaaaataatcctaaaatttatatggaaccactaaagacccagaatagtaaaagctccaaagcaaaaagaacaaaactggaaaaatcacattacctaactttaaattatgctacagagctttagtaacygaaacagcattgtactggcataaaaatggacacctagaccaatggaacagaatagataacccagaatgttattcacacacctacagtgaactcatttttgacaaaggtaccaagaac

SEQ ID NO: 314638 - DNA, 605 bp, Homo sapiens
gaaactggacagtcataggaatacctttatttgtttctattttcacagggattcctggcatcactaccaattaattaaagtctgaaaatgttcatttaaaatacattgttatttttccagttgtttgcggtgggataatgatacatattattcctgtagctttatcatgccaaaaagaagtaaaaagctgtggttacataccactctgtccaacctgtccattataaacgtctgttatcatattgagggctttatgcgtctatgttatgatagacattaggtcgtaattttcatttttcataatttctttctcagcttatggtgtcagagttgttyccttcctagagtatattgagaaggtttgctgtctatatatattcacagggtatgtgtaaaataaatattatttctttttttacattgcttaataaaattcagagtgaaactacctggatctggagttgtctttgtgggaaagggatgtgaatataaacttaatttattctaataaatataaagtatttaggttatctatttttgagataattgtactatattttgttttgtaagaattttttttacttcaacctagttgttagattaat

SEQ ID NO: 314639 - DNA, 605 bp, Homo sapiens
gaaactggacagtcataggaatacctttatttgtttctattttcacagggattcctggcatcactaccaattaattaaagtctgaaaatgttcatttaaaatacattgttatttttccagttgtttgcggtgggataatgatacatattattcctgtagctttatcatgccaaaaagaagtaaaaagctgtggttacataccactctgtccaacctgtccattataaacgtctgttatcatattgagggctttatgcgtctatgttatgatagacattaggtcgtaattttcatttttcataatttctttctcagcttatggtgtcagagttgtttccttcctagagtatattgagaaggtttgctgtctatatatattcacagggtatgtgtaaaataaatattatttctttttttacattgcttaataaaattcagagtgaaactacctggatctggarttgtctttgtgggaaagggatgtgaatataaacttaatttattctaataaatataaagtatttaggttatctatttttgagataattgtactatattttgttttgtaagaattttttttacttcaacctagttgttagattaat

SEQ ID NO: 314640 - DNA, 641 bp, Homo sapiens
cagttttttttgtaaatgatttttytggagtttaaaaatacacttttgacttatttcagcctagtttaaaatgctattacatcacttcatgggtactgtaagaacattaccatatatatttctatttctcctcctacctatgcagtatttttgccttgtggtactttgaagtatacaatacaataaactccaaaacacaatatttttgctttaaacagtgtataccttctcaagagattcaaaagttaagaacaaactttttatattcctttacatatttccaatttccaaagcccttcgtttatttgtgttcatccaaatttccatttggtattatttttagtctgcctgaaaactcttgtacaatcgatggcctgcccataaattctctcaaccttgatatgcctgaaaaataattaagtctctatttttgacatatattttcaaggtataaaattctgtgttaattttttttttttatttcagtactttagacacgtcactgtgttgtccactggattacatcttactcttacaggaagtcaactgccattattgtatttactattctatacataatgcaacttttctactctgattgcttttgagattttatttttattaccattcttcagcaactt

SEQ ID NO: 314641 - DNA, 579 bp, Homo sapiens
attatcatacaagtgcatgtgtctttttggtataatgatctactttcctttgggtataaaaccactaaygggatgactgagtccaatggtagctctgttttcatttctttgagaaatctccaaactgctttccacaatagttaaactaatttacattttcatcaacggtgtgcaagtgatcctttttctccacagcctcaccagcatcagttgttttttgactttttaataatactcattttgactggtgtgagaaagtatctcattgtggttttcatttgcatttctcaaatgattagtgatgttgagcattttttaatgtgtattggcaccctgtatgtcttcttctgagaagtgtctgtttatgtcttttgccctctttttaatgagtttatttgttttttgcttgttgagttaaattctttatagattctggatatcagacattgttagatgcatagtttgtgactgtttcccccattctgtaggttttctgtttactctatcaatagtttcttttgctgtgcagaagcttttagtttaatttcgtctcacatgtcaatatttgtttttgttgca

SEQ ID NO: 314642 - DNA, 598 bp, Homo sapiens
tggacctatgaaaacagaaaaaagagagaagctccttgtatcatatattaataccctcaagagaacatatacactagaaaaagcactaaacaaccatgtagacaaaatgactaggttagataaactaagctagcctgcagcatcagtcgcctttgtgctggaaacatggatgtaataatagagtagcacaatggcagtgatggaggttaagcacgtgttcaacatcatgagcttccagtcttcaaagatgatggaactaatgccactgtgtaatgttcaacctataattaaaagaaaacactgctgagccttaatacagcactatccttcacagagactwaccagctatttagtgttaagttgattatgttggaccctcttctaccctggaaaggcatgtgatttatcttgattggaagtgacatgtattatgggtatagtggtttgactttcctgtctgaagattcttagcagcaccattatctgagggcttgcacgatatttgttatcctgatatgcaattctcccataacctcactgtagaccaaagggccatctttacaccaaaggaaatttgggagtggacccattaccatag

SEQ ID NO: 314643 - DNA, 598 bp, Homo sapiens
tggacctatgaaaacagaaaaaagagagaagctccttgtatcatatattaataccctcaagagaacatatacactagaaaaagcactaaacaaccatgtagacaaaatgactaggttagataaactaagctagcctgcagcatcagtcgcctttgtgctggaaacatggatgtaataatagagtagcacaatggcagtgatggaggttaagcacgtgttcaacatcatgagcttccagtcttcaaagatgatggaactaatgccactgtgtaatgttcaacctataattaaaagaaaacactgctgagccttaatacagcactatccttcacagagactaaccagctatttagtgttaagttgattatgttggaccctcttctaccctggaaaggcatgtgatttatcttgattggaagtgacatgtattatgggtatagtggtttgactttcctgtctgaagattcttagcagcaccattwtctgagggcttgcacgatatttgttatcctgatatgcaattctcccataacctcactgtagaccaaagggccatctttacaccaaaggaaatttgggagtggacccattaccatag

SEQ ID NO: 314644 - DNA, 543 bp, Homo sapiens
gcactctggtctcccactcagctggctctgcatgaattmaactttctattgcaattccattgtcatgataaatcggctctatataagcagcaggcaaaatgaatctgttgggcccttaaagaacccattacatatgtcaaccttaagcaattgaaaggatcacaatccagtttaaaagagtttattcaagtgcaaagctgagaatagccatcctggtaatacagactccaaagaaatggggtcagtgttcagaagctgaaaagttaaggtcttgcttatataggcaaaaaataaattttacagattataacatgttccataaaaggttggtttatgagttaccgcaatttgactaattacagctgttttcttttccttttccaacttaaaaggttatatttgacattccatcttagatgatgtgacagtcatgaggtctttgtgtaagagaagtaagaggaaagttagtctattatgaagacggacagtgatatggtttggctctctgtcccaacccaaatatcttgaattataatccccaca

SEQ ID NO: 314645 - DNA, 584 bp, Homo sapiens
ttgaaggaatgttagcttttaaaattatttaaattgaaaaatcaattgactattatggttaaaaagtcaatgtttaaagaaaggactttctacttccaggcacagaacagctggaatttaacttaacctctcatcataaacatctagaatactggacaaaatatatgagacatctgttatcagacaatgaacagcaggaaacacaaatctgtagttgctgcaaaaaaakaagcatacaaagtgaacttctgtctgaagcctcttttcagatctcaagcatagcatactgtgcctgttgagttgaggagaccgagactggagatagggaagacagaggcaacttgaatttgcagaacaaagtaggaggtaggagaaagctatgttgagaaaagaaactccagaaatctgcatgggaatcacttagagcttttgcctaaattgtaatctgtgtatgtgtagggtgttgcttaacaggaataataactaaaatatcaaaacagagcaaaaatcaagaacagtggagaatggggctaagggtggtctcctcaataaaagctcataatcctttgttttcttcccaaacc

SEQ ID NO: 314646 - DNA, 323 bp, Homo sapiens
aataacaattttggatgttaaaggacacaagagcaagaactttaaaattctctaggatcattattttcaactctagccaaattatcagttaagtataaaaatagattaaagaaaggttcagatgtgcaaggtctcaaaacatgtacttccatgccccctttctctgtatgctcctagatgatgtgttctaccaaataagggaayaatcccagaaagaaagatacaagatgcagggatcggaaggcagggagtgaatacccagaatgagatgccaggatgacagctgcgcattaggcatagtgggaaaactctggaaaagattt

SEQ ID NO: 314647 - DNA, 583 bp, Homo sapiens
tgttatcccagctgaagcagtcaggcaagaggaattccctcttccttgtaaaagggtcagccttctttctattcaggctttcaactgattgcatggggtccacccacactgaataaagcaatctgctttactcagtctactgttagtttactaagtcaaatggtaatctcatcaaaaagcacactcagagacacactcagaataatgtttgagcaaatatccaggcaccctgtggcccagtcaggttgactcatataaytgacaatcacaagggacataaaagaggaaatgaataaatggagagacatatcatgttcacatattagagaactcattatgatacatttgttgacttttccctcagaagaatatgaaaaagtaagctatgtttaatcaaaatctcaaaaagcgtttctacaaaacttgacaagttcatcttaaaattaatattaaagaactatggacaagtatatttgacatgactaagaagaaagccaaatagaggatttgacctgttaggaagtgagacttatagtacagctagagtaactaaggttgtgtggcacttaattacagggagatt

SEQ ID NO: 314648 - DNA, 616 bp, Homo sapiens
gatgtgtaaactggcaaggctactctgcacagcaatttggcaatatctagaaaagtcaaaggaacatatttctttcaacaggacaattttccacctagctccatttattacaaaatcttgagagtagacaaagacaagaatattctttaaaactttgttagtaacagggaaaaactttcaaaatttcaagtatcaatctagcccattttgtgttgctataacagaatccctgaggctgggtaatttataaagaaaagaggtttatttggttcacagtttggcaggctgggaagttcaagggcatggcactracttttggaaagggctttcctgcttgagcagggcatggaagaaggtcaaaggcaaagtggacacatgcaaacaggccaaacactatcttgcagaaactaatccattcccaagagaactattccagtctcttgagagtgagaactcactaccgtgagaaggtcaccaagccactcatgaggatggagccaccaggacataaaagcttcccattaggccctacctggtaaaggttctacctgtcaacactgttacattggcaactaaatttcaacataagttttgggagagacaaagcgtatgcaaa

SEQ ID NO: 314649 - DNA, 583 bp, Homo sapiens
ttcttgttcatgaacagcatctcaccagagcctggggaagccaacctttagtgcaaagagtccaagagtccactgattagttccatggtctaaacatcttttttttcgtaagctttatttattattctccctgcaaacagttcctactttaaatgaattctgcaagaacagaagtgttaagtgcgatgtcatgttgatgtcctcctacgccccttgcaggcactcagaaccatgtcctaggttgtaatcctctctytactctgccttctagtagcatgagcttagtctttcgatgatcttccttctttcatttaataaatatttaccaaggggctaccatctaccaggcagagggggagacagtggtgaagaagagagatgcacgcttcgctgcatctaatgggggacaaaggataattacaatacagtgaaataagtgatatgtcagtaaggcactttgggtgctctcagtggatggcatgagtgaggagggctggctgccttgaggaaaagatcctaggatgagtaggtgttatctaagcaaaagagttagggctaagggcatacagaaggagccagagga

SEQ ID NO: 314650 - DNA, 417 bp, Homo sapiens
acaagctctatgtgctcttcccatgatcactgatgctctggggattgctaagtcaatgattgctctttgatgcttatctctcatgcctcacaaaagcacctgacattcctgaccactttgcctctcaggcttgcccactgttgatctctgaattgccctcctgccacctggtttttctgccacctctctgactgctctttctcaacctcctttgcaggcttcttttcctcaccaacctataaaacatctgctttacccaaggttacaccttcattcaaaagcattcattgactatgtcttgagcaccaattttgtgacaggtacstgtgcatgcatctgttacatggccctgtgttatttggattggttaccttgtccagttcactcatggtgcttccagtccctaaagctggagcc

SEQ ID NO: 314651 - DNA, 578 bp, Homo sapiens
gcccttggtatatggcacggtgcagaaaagagttaacacagcggaggactgggactgccctccttaaaaaggcttgcttgcaagtttggttcttggctggcatcagtgaacttggatctcagcggtgttcccaccattccctgacaagctatgcctaaactatttgcctcaataatatggtttatgctgaacacctgctttcctttcaggagtctggaatgcctcatgcaagrcagagggcgcttatgtgaccagcttcagtaaagacctgagtactgagcctctaacgagcttcctgggtagacaccatttcacaggtgttgtcccagcttgtcgctggagcaattaagagggctcctggaaacttgcgcctggtttcctctggacttccctttgctgattttactttgtatcctgttgctgtaacaaatctgagccctgagtatgaccatatatgctgggtccttgtgagtccttcttgccaatcagtaaacctggggtgggcttgtgaccctgaatgcaggtgcccagttaatttcttctctgacactattccatatcctgatgcatccattcat

SEQ ID NO: 314652 - DNA, 578 bp, Homo sapiens
gcccttggtatatggcacggtgcagaaaagagttaacacagcggaggactgggactgccctccttaaaaaggcttgcttgcaagtttggttcttggctggcatcagtgaacttggatctcagcggtgttcccaccattccctgacaagctatgcctaaactatttgcctcaataatatggtttatgctgaacacctgctttcctttcaggagtctggaatgcctcatgcaagacagagggcgcttatgtgaccagcttcagtaaagacctgagtactgagcctctaacgagcttcctggrtagacaccatttcacaggtgttgtcccagcttgtcgctggagcaattaagagggctcctggaaacttgcgcctggtttcctctggacttccctttgctgattttactttgtatcctgttgctgtaacaaatctgagccctgagtatgaccatatatgctgggtccttgtgagtccttcttgccaatcagtaaacctggggtgggcttgtgaccctgaatgcaggtgcccagttaatttcttctctgacactattccatatcctgatgcatccattcat

SEQ ID NO: 314653 - DNA, 578 bp, Homo sapiens
gcccttggtatatggcacggtgcagaaaagagttaacacagcggaggactgggactgccctccttaaaaaggcttgcttgcaagtttggttcttggctggcatcagtgaacttggatctcagcggtgttcccaccattccctgacaagctatgcctaaactatttgcctcaataatatggtttatgctgaacacctgctttcctttcaggagtctggaatgcctcatgcaagacagagggcgcttatgtgaccagcttcagtaaagacctgagtactgagcctctaacgagcttcctgggtagacaccatttcacaggtgttgtcccagcttgtcgctggagcaattaagagggctcctggaaacttgcrcctggtttcctctggacttccctttgctgattttactttgtatcctgttgctgtaacaaatctgagccctgagtatgaccatatatgctgggtccttgtgagtccttcttgccaatcagtaaacctggggtgggcttgtgaccctgaatgcaggtgcccagttaatttcttctctgacactattccatatcctgatgcatccattcat

SEQ ID NO: 314654 - DNA, 566 bp, Homo sapiens
gtaagactctcctacaaatattattcttgagatgagaaatctggagctgccagccaggttaaatcaaaatacagtagctccattttgattgacttgtcatgggatagcctgaggagccatggatttggggggatccagtgcycctttgtggtgagtcatgcacatccccactgggcactctgggaggtggcctgctctcccagcagggctgcagcccatgtgagctgtggggccttaggcatttccttggcttctctgagcctcagtttccccacttgaaaaacagcaatgccaatagaagtgtggtgaagacgtaatgagacatggtgacatagaaaggtggctctaaaaatgtgagctcttattttcatcccaattctggaatgaacagctgagagggtgtgagggacttgcacaaggggtctgagccggaaagacaggagaatgaaaagaaggcaatggtagatagtaatttctaacctggctcctgaaatagatctggcccccagagaggggagcagttctccatttctgggcaaaacctaagtgacccagagcaatgacaa

SEQ ID NO: 314655 - DNA, 543 bp, Homo sapiens
taggcctgctatatatttctgtcctcaaagataatcatgtatgcttagtgaggatattgagttttcatggcaattgccattagcctatatggtgtgaggctgggcccttgatggagaaatataggctttatccttgaatccaaatcctatcaacagatattaatggtcctactaaatgaaggaggcaggtttgagtgcatgaaaaatgtcctctgtgtctctttaacttctctatgccccattgtcctcaagtaggtctttggcaccartgattcctgcaacatatacaggtctaaaatcttacgagaaattagtccagacacaaagggcctgataaaggtatacttttcaggtcatttctgccatgattgtgtagtgattatttttagcatccccacctagaccatgagggtaaatacacaactgaatgagtgagggaatgaaggcatggatgaatcccttgcctacaaattacactctagaaggaaaattccagatgtgaaacaaaattttgattatgagattacaaagagggtgaccaaa

SEQ ID NO: 314656 - DNA, 510 bp, Homo sapiens
aatatgcacatgctttttgacaaccaattccatgtctaggagttgatactagggaaatcatgaaggtatgcaaatattaaaccagaagaatgtttataacaaagcttccttatgatcatgaaaaactagaaactaaatacccaatgataggagattatagkagattatagtatgtccacaccaacaaatactagacagtgatgaaaaatgatatagaaatgtctatgatgtaaaaatatgtggcagaaagtattcaatatgtatttatttttcagtgaagaaataataaagtattatagaaaataactcaatttttaatgtaagcaaaactataagtattgaaaggatagacaactatcccattgttggggtaaagttatagataactttgcttattcatatcttctgaagttttttacaatagatatgtattagttttgcaacaaggaaagcaattaaaactatttttaggtaattctgttagtagaaataattatgcagattagttag

SEQ ID NO: 314657 - DNA, 581 bp, Homo sapiens
agcaataatatgaaacataaagaattatgtacaaatattacatatgatacaataacaggtgaaacaaaaaacacagtaaattggataaacagcaagttggatgcagaaaatataaaakaaagctaagagatgtgagggagagaagaattaccaatattttacactatgatttccaacaggacaaaaaaaaaaaagaaaatagaaagggcaaactatgtaatttcccagaattaaagggtgtcaaataggagagataaggtaagtccatcctttaacacagtaaaacttaccgacattaaagacaaagtgaaaattctaaagtctctttagaaagaaagcagattactcaccaaggaactagaatgaaatgatatcaggagtcacagtagcagcactgggtgtaaaaaaagacagtgaaataagattttccaatatctttgaacctataattttatactcagctaaactgtcatctgaatctgaagcaaacctctcatccacaagatctcagttttttcacactaagacaccaaaacacatagaaaaaagtcttcattaaaaagagcagaaaaatcagattg

SEQ ID NO: 314658 - DNA, 581 bp, Homo sapiens
agcaataatatgaaacataaagaattatgtacaaatattacatatgatacaataacaggtgaaacaaaaaacacagtaaattggataaacagcaagttggatgcagaaaatataaaataaagctaagagatgtgagggagagaagaattaccaatattttacactatgatttccaacaggacaaaaaaaaaaaagaaaatagaaagggcaaactatgtaatttcccagaattaaagggtgtcaaataggagagataaggtaagtccatcctttaayacagtaaaacttaccgacattaaagacaaagtgaaaattctaaagtctctttagaaagaaagcagattactcaccaaggaactagaatgaaatgatatcaggagtcacagtagcagcactgggtgtaaaaaaagacagtgaaataagattttccaatatctttgaacctataattttatactcagctaaactgtcatctgaatctgaagcaaacctctcatccacaagatctcagttttttcacactaagacaccaaaacacatagaaaaaagtcttcattaaaaagagcagaaaaatcagattg

SEQ ID NO: 314659 - DNA, 581 bp, Homo sapiens
agcaataatatgaaacataaagaattatgtacaaatattacatatgatacaataacaggtgaaacaaaaaacacagtaaattggataaacagcaagttggatgcagaaaatataaaataaagctaagagatgtgagggagagaagaattaccaatattttacactatgatttccaacaggacaaaaaaaaaaaagaaaatagaaagggcaaactatgtaatttcccagaattaaagggtgtcaaataggagagataaggtaagtccatcctttaacacagtaaaacttaccgacattaaagacaaagtgaaaattctaaagtctcttyagaaagaaagcagattactcaccaaggaactagaatgaaatgatatcaggagtcacagtagcagcactgggtgtaaaaaaagacagtgaaataagattttccaatatctttgaacctataattttatactcagctaaactgtcatctgaatctgaagcaaacctctcatccacaagatctcagttttttcacactaagacaccaaaacacatagaaaaaagtcttcattaaaaagagcagaaaaatcagattg

SEQ ID NO: 314660 - DNA, 528 bp, Homo sapiens
gttgctattgtctgctttttttattctagccattctagcaggtatgaagtggtacctcattgtgttttttttaaaattaattagttttgttcatcaacaattaataattatatatatgtatggggtacaatgtgatgttttgatctatgcatacattgtagaaagattaagtcaagatcgttaacatgcctcattaacttaccattttttgtggtgagaatgtaaagaatctattctttagcaattttgaaatatataatacattaatattaactgtggtcaccattccctgaatagccaaagatatcttgagcaaaaagaacaaagctggaggtatcacactacctaatttcaaaatatattataaagctattgtaatcaaaacagcatggcagctgggtgcaatggctcatgtctataatcccggaacattgggagaccaaggcagaaggataccttgattccaggagttcaagmctagcttgggcaacatagtgagtccttatttctacaaaaaaaaaaaaaaat

SEQ ID NO: 314661 - DNA, 575 bp, Homo sapiens
atagtttgttcatttgagctttaacatatcaaagccaaataaatttacaccaagaagtatttatattgataaacaatatgtaatgggaaactacaaacccatttgtaaacaccatatctaaataataatttctaaccagtgcgccctgaggctgatgcctgtgaatgacgtgctgaaagggatgaaagcaatgcattgaggggctgttttgctgtctttcccaccactgtgccagaacacaagcctccttcatgggcgggagccctccgcatttcaagcagctgccattccacggtgccagggcaccacagagattggccaggatgtgaggagatggcctgtgcwcctgtctaagacagataacaatacaatagcctcttcactcacacatactcaaaggaaaagtaaaaaaccttatgtcagctgaaatgaagagattggggagaggactaggaaaggctgcaatgaggctgcagcaaagacagaagcatcctaaagaagcagcaggaagaaaagggaactaactgctccttgctgaaacaccaatagagaggggcacctgggtggaagagcaa

SEQ ID NO: 314662 - DNA, 578 bp, Homo sapiens
gtcttgtcatcagaatcactgcctactctgagcttgctgtcaatttaccactttgagtgggaaaagcattgtgaggcaggaggcaatgagctttctagtacaaacaacatttgtttttggttttggcttttttttttttttgagatggagtttcrctcttgttgcccaggctggagtgcaatggcgtgatctcggctcaccacaacctccgcctcctgggttcaagcgattctcctgcctcagcctcctgagtagctgggattacaggcatatgtcaccatgcccggctaattttttgtattcttagtagagatggggtttctccatgttggtcaggctggtcttgaactcccaacctcaggtgatctgcctgcctcagcctgccaaagtgctgggattacaggtgtgagccaccgtgcctggccaacaacatttgttaaacaagcaattatcattctcatgaggcattttctctaattgttggtcactgttggtgataaggaatagacacacacacacacacacacacacacacacaattttgtgtgtagagaggagggcaagttatttacaaatag

SEQ ID NO: 314663 - DNA, 537 bp, Homo sapiens
ctctttcttgagcttcagccgctggacttttgaatttgccagcctccacaattggtgagccagttccttaaagtaaatttctctctgtttctgtctctgtctctctctctcattacacacacacatatacatgcacatacacaccctgttggttttgttactgttttctggagaaccagactaatatagggagtgacctcagacctcaccccttccagcctgcaactcaaggttcaggagagacatgcttcctgacatgtgatcatctcaaccaggcagaagaccctagtgatagtgagttcactacctcagagggcagcaggagctgtcagaaagtctcctcttagacttggctggaatacrcttctctgcattttagactctggttctggcagacatgtgctgggcacatcctctgggccaagtcaatctgcttccacctggtcaggttgggacatgtgcctggccaaaggtagcattgctcttctatcttcaaacctctagctgctatttcttgaattatcaatgcaagtcata

SEQ ID NO: 314664 - DNA, 603 bp, Homo sapiens
attaggcttttcactagaccaacttacgacctaattgacttaaagtcagttgaatgtgaaaataaaattaaaacaatccaagaagtgataggttttaaaagaataggaaaacaaataaaaactatagtcatcatctaaggtggtcagaaaagatgtttacataattaaatttggacctggaattttagttaaaacttaaataaataggatagggaaaaagtgtcattcctgcaagacgaaattttctgagcaaagcacagacatgacacatggcttggccaagaccacaaacctagtatttatggaaaaagacatggatagatcctagggcttctttcaccacactcagaygttacagtttccaagctctagccatgaagagaccaaagtaacctagttttcagatatctaaggtacacaacagttagtgatctggaagatatttctggggcaaacattcaaagtttagagtttgaaaggcaatgagtaaatataaaaagtattatagtccaaactacaaatacatttaaatatcagacttaggagtttggacttcactataaaagctaaaattagcaaaattttattgtgtaaaaactaagt

SEQ ID NO: 314665 - DNA, 537 bp, Homo sapiens
atttgtatgtttaagtcatttttccacaagtgattattaagagttaatgaaaaacattctcactaaaggaaatttttatttatatccttcaaggcaaagaaaaattattccagatataagattgaagatggaaaataagaacattggtaaatatgtaggtaaatttaaacaaacattaatcgtataacttaccagtaaaaatgactaatcgtatgttcatttagggtgggaagtaaacagctagaattaaagttctcagaaataataatacataagttgttggaagggccatagagttggagaattctaaggtatttgatttgtttcagggagaagactcaatgcaataaattatgactcaataatttggaagcctcaagtaaggtatgcatatgatgtgtgcaaaggtaatcactagaaaaacagttgtagtacacacaacattcgaaaattagaggcgaattatacaatgacaacataaatttaaawactcaattcacccaaaatgactgggttgggggcgacgtgaaaagcaca

SEQ ID NO: 314666 - DNA, 572 bp, Homo sapiens
aggaaacttggaagggtgggagggtgagaaggggctgaaagataaggatttgcttaatgggtacaaggtatattacttagtgatagctacactaaaagccyagtcttcaccactatgcaatatatccattaacaaaactgcactttgtatcccctaaatctataataataataataataatttttaaatatgtttctgcaaaaaaaaatgaatagcctactgttgactggaagccttaatgatcacaattaacacatcttttatatatgtattatatactgtatccttacaataaagcaagccagagaacagaaatgttattaagaaaaacgtgaaggagagcaaatatatttattattcactaagtggaaggggatcatcataaatgtcttcaccctcattatcttcacattgagtaggctgaggaggaggcagaagacaagaggttggtcttgtctcagggatggcagaggcagaagaggtggaggaggtggaaggggaggcaggagaggcaggcacattctgcgtacttattgaaaaaaaactatgtataaatggacctgcacagttca

SEQ ID NO: 314667 - DNA, 601 bp, Homo sapiens
aactaagaataggaattttttccccaaaagttagtctcaaaacaagctgtaaaaaaatgtcaggaacaagtaagaagaaaaataaacttgcaatcattcaagagaatgaagtcagtacaagcatgrttgtactgagtttcaaccaattaatgcatatttccttagaaatcagtttgtgaatcaagagtaggacaaaatgaagataatttgactttatattagtaaaaattaatatctaatctctattagagttcatgtactacatttgcccactgataacagaaaatgagaaggcttgttaagtctacaggtggccctaactagagagggtgcttagcaagagaaagaacagaagatgaattaatgaattagacattggtcaagcagatgaagagcagcagagcacagttcactaatgacaaggttaaggaagtgcaaaatactgaactaaatgctttagatacagtttatcagtctgtctcacaataaggcttcaaaatggctattatttacaggggatgacaatttgaaatcccaaagaaatgggactgtacatgaatagagagaaaacattgtcatatagaagcataaacaaaagaca

SEQ ID NO: 314668 - DNA, 601 bp, Homo sapiens
aactaagaataggaattttttccccaaaagttagtctcaaaacaagctgtaaaaaaatgtcaggaacaagtaagaagaaaaataaacttgcaatcattcaagagaatgaagtcagtacaagcatggttgtactgagtttcaaccaattaatgcatatttccttagaaatcagtttgtgaatcaagagtaggacaaaatgaagataatttgactttatattagtaaaaattaatatctaatctctattagagttcatgtactacatttgcccactgataacagaaaatgagaaggcttgttaagtctacaggtggccctaactagagagggtgcttagcaagagaaagaacagaagatgaattaatgaattagacattggtcaagcagatgaagagcagcagagcacagttcactaatgacaaggttaaggaagtgcaaaatactgaactaaatgctttagatacagtttatcagtytgtctcacaataaggcttcaaaatggctattatttacaggggatgacaatttgaaatcccaaagaaatgggactgtacatgaatagagagaaaacattgtcatatagaagcataaacaaaagaca

SEQ ID NO: 314669 - DNA, 601 bp, Homo sapiens
aactaagaataggaattttttccccaaaagttagtctcaaaacaagctgtaaaaaaatgtcaggaacaagtaagaagaaaaataaacttgcaatcattcaagagaatgaagtcagtacaagcatggttgtactgagtttcaaccaattaatgcatatttccttagaaatcagtttgtgaatcaagagtaggacaaaatgaagataatttgactttatattagtaaaaattaatatctaatctctattagagttcatgtactacatttgcccactgataacagaaaatgagaaggcttgttaagtctacaggtggccctaactagagagggtgcttagcaagagaaagaacagaagatgaattaatgaattagacattggtcaagcagatgaagagcagcagagcacagttcactaatgacaaggttaaggaagtgcaaaatactgaactaaatgctttagatacagtttatcagtctgtctcacaataaggcttcaaaatggstattatttacaggggatgacaatttgaaatcccaaagaaatgggactgtacatgaatagagagaaaacattgtcatatagaagcataaacaaaagaca

SEQ ID NO: 314670 - DNA, 548 bp, Homo sapiens
gtaggatggtgcatacctcagttgtggtggtatactcagactatactgggttgtactctattggtttagaatcaggacgataaagtttgtcctcagacacatttgggatgttccctaggaaaaaggagagaggatgttgctctattggtttccttgacagaatgaataattagggaagataacatagggcagaattaagggttagaaactgcctgttcagttctaaaggaggcatttgggaaagtggttgcttaggatgacgggtggataccaaactgtttgttttgctcttctccttaagtgtatttttaaaacatttaattagaagagaagtattttattgtatctatttttatgctattaagaatagaactggtttcaagcaatactcaacttagatttacatatcattaattctaagccaattaaactagctgartctttaggcttaatctatgcagtaaaaacttccttgaaaacaattattttttcatgcatgtctcttctgtacctgattttgaagctgaaacttaaagtggcatcttaaa

SEQ ID NO: 314671 - DNA, 558 bp, Homo sapiens
caggaattcaatagcactgatcatgaatattcgtagcattaggaaataggagtgagataaactgagaactggaaacattgtaagggttaggaatggaaacacagagggtaccaaggccagtcctagcatcatggataccgtggtccagagagagctgtatacagacactgtgcaaatggtggctattggaaagttgccctatattggttgcagagggaaatgaaatggggatacaatatagttwcatctgttattaaaaaatgtatagggttaagtcttttgttgattcatactcagagctctcacttaaggaaaaagtattgcaatggaaaaagaaatgaaaagatgtaagctgctaataatcaagagtacaatctcaaggccctctgcaaaacatactatggagcccctctcaaataattcccatatctcttcttacaagaaacacttactaaggtccagcaactgcctttcctgggagggtaattaataatcacatgccaaggagtcttttgtaagagcctctccttgttgccagagtcttccatcaattttagc

SEQ ID NO: 314672 - DNA, 558 bp, Homo sapiens
caggaattcaatagcactgatcatgaatattcgtagcattaggaaataggagtgagataaactgagaactggaaacattgtaagggttaggaatggaaacacagagggtaccaaggccagtcctagcatcatggataccgtggtccagagagagctgtatacagacactgtgcaaatggtggctattggaaagttgccctatattggttgcagagggaaatgaaatggggatacaatatagttacatctgttattaaaaaatgtatagggttaagtcttttgttgattcatactcagagctctcacttaaggaaaaagtattgcaatggaaaaakaaatgaaaagatgtaagctgctaataatcaagagtacaatctcaaggccctctgcaaaacatactatggagcccctctcaaataattcccatatctcttcttacaagaaacacttactaaggtccagcaactgcctttcctgggagggtaattaataatcacatgccaaggagtcttttgtaagagcctctccttgttgccagagtcttccatcaattttagc

SEQ ID NO: 314673 - DNA, 582 bp, Homo sapiens
gcgatcacaagcaattaacatagaagtgtayaatagaggcaaattggaagagttcacaaatagtcagaaattaaacaatacattcctaagtaaccaatggatcaaaaaagatgttataaaagaaattagaaaataccttgcaacaaatgaaaacaaaaaaaacactaaaacttcttagataaatttacagctctccccaaagaaacatttatagctctaaacacatatattgaaaaagaagctctcaaataaataactttccaccctaagaattaggaaaagaagagcaaataagcccaaagcaggcagaagaaagaagttaatacatattagagtagaaataaagaattctaaaaaagagaaaatcaacaaaaccaaaatttagttttttcaaaagattaacaaaacacacaagcctaactgaacttactaaaagaaaagaaaggaaggagactgaaattactaaacttaggaatgagagggtatcactagcaacctcaaacaaacaaaaagaattataagagaatactatgaacaactatatactgacaaattaaataacttcactgaaatagacaaact

SEQ ID NO: 314674 - DNA, 582 bp, Homo sapiens
gcgatcacaagcaattaacatagaagtgtataatagaggcaaattggaagagttcacaaatagtcagaaattaaacaayacattcctaagtaaccaatggatcaaaaaagatgttataaaagaaattagaaaataccttgcaacaaatgaaaacaaaaaaaacactaaaacttcttagataaatttacagctctccccaaagaaacatttatagctctaaacacatatattgaaaaagaagctctcaaataaataactttccaccctaagaattaggaaaagaagagcaaataagcccaaagcaggcagaagaaagaagttaatacatattagagtagaaataaagaattctaaaaaagagaaaatcaacaaaaccaaaatttagttttttcaaaagattaacaaaacacacaagcctaactgaacttactaaaagaaaagaaaggaaggagactgaaattactaaacttaggaatgagagggtatcactagcaacctcaaacaaacaaaaagaattataagagaatactatgaacaactatatactgacaaattaaataacttcactgaaatagacaaact

SEQ ID NO: 314675 - DNA, 415 bp, Homo sapiens
atttaagtgtgcaaaatgataatttattcttttaaaatttatgaaatcaaaagagatataggaagatggttgtataataagattactatgtccctcgggaaaattctctttagctcctacgaaagcaaaaaggaatgtaatttactttttcacttttggtaatgtataatgtcctrtgtattctattttaaaacaaagtaaattttaaaaacctatttcaaaattgtaattcttataaattactatgattgttgttttctttcttttctttccttctcttttttcttagagaaatttgacaaataaagggggaaaatagactcagagaacaagagctattaataaaagataaagtgaattatttgcaaacaagcatctacatctttttctctgctacagtgtcttggaatctctt

SEQ ID NO: 314676 - DNA, 462 bp, Homo sapiens
tagaaaatagagcagctcattattcatatcacactatctgaggtcattgtaatttacaaagggggcaaaatgagcagattttcctggggggattgtcctaacactaagggttaaatcattggcagatatcaataaagcatactctagtttcttgttcttcttgttcctctacagatcatggatgataactatgacacttgaatatctgaataattgtataacctgtacttttagtactttacctccttctactgctaattatttcattatttatagagtaagtgtatggcttactctatcacattgtaaactctgtagatctgctytatctatattttctgatgacctctcagccataggaaagttctatgcttggaaatacatcacatcacatcccctgagaaggtttttaaaatgcaaaaatcttcaccctgagattttgattcagtggtttggtgcaaa

SEQ ID NO: 314677 - DNA, 575 bp, Homo sapiens
tgtcagcataattacatatatcaaattgactctatattgatgaacacttgcatttgaacttgcatactgagtgatttctataaacagattttctgtatctggcattctattagctcactctcgcttttatgaagagttaactctttttttttttttttttttttttttttgagaaggagtctcgctctgtcgcccaggctagagtgcagtggcgtgatctcagctcactgcaacctctgcctccctgggttcaagcgattctcctgcctcagcctcctcagtagctgggattacaggtgcgtgccaccaarcctggctaatttttgtgtttttactagagacgttggtcaggctggtctcaaactcctgacctcgtgatccgcccgccttggcctcccaaagtgctgggattacaggcgtgagccaccgcgtctggccaagagttaattcttccgtcaagagttagttgttcttcatgatagtggccttgtggaattacattattatgaaatgtctgccaaatcagaaaaattttattgggtggggtacagttttagtagaaagcatagtttatt

SEQ ID NO: 314678 - DNA, 494 bp, Homo sapiens
gatctgtccattatcttaaaataaacttgatgaccataagaatcttagaaragagacctaagcaatgtaggacctattcagtgagtaatgtcctttgttagaacacctaagttacgatagcgtaaaacctccaatgtatgttatacagagatacagttaaggggcaaatgagttcattctcactttgtctagtaactctgacaagaaaggaagaggaagagaaagtttagaagtagaaacacatggtatacaggcatcccaaaaggagagtggtattgaaaaaaaaccctaaatattacatatttagtcattctgagttctaccaggaaatccatagttattattgtcacatttccctttctacctcaggactcaaattctcgggatatattcttttgtcatttgtttttgtgctttgtgttattactcttatacctccattatcgtgtgaatatttttaataaaataaaatatattcagcttttcctgggtac

SEQ ID NO: 314679 - DNA, 552 bp, Homo sapiens
gtctctgtagcgaaaaggctgaagtgggctrgaattgtaccaaatgacaagtagcagacctattttcaagatgttattgtccttcagggattaactcaaaggacagttctgcactgaatctggcccctttagcatacagaatctttctctattttttagcagtgtgccagtcacttagcacacattttctttccacgtcattctctctctccccctccgcccaccacacattcacatgtgcatgtgccgtgatgggatatgcctatactagatttaattgttagatagtcattcgagtttttatatgaccactctatgacagcatagccctcagtacataatgcagtgctcaacatgtatcagaattcccatatatttattgacagagattgatggaaactaattatggcttcttaatcttctcatcacagattccttctggaaatagtaatatatgctagccgaggataaaatttacaattttcagaatgcattactatttcctgtaatttatgtactatagccttcctgtaacgctatacactaactata

SEQ ID NO: 314680 - DNA, 570 bp, Homo sapiens
gtgctcaacatgtatcagaattcccatatatttattgacagagattgatggaaactaattatggcttcttaatcttctcatcacagattccttctggaaatagtaatatatgctagccgaggataaaatttacaattttcagaatgcattactatttcctgtaatttatgtactatagccttcctgtaacgctatacactaactatatcctcagtattcatctaacwtattagagatgtttctttagcaatttttttcccaataacctttcaacttcttggaacattattcaaactgaaccaaatcccattctaaataaaagtttatatatcagggctctggcacatcaaaaaattgtaatactcagttaattttgtcacattgaattcctagcaatttggattttgtatatatcaatatgttcgtagtagtataaagtggaggcacaatttaacactgccattcttttttttttctgaactgctactatttaaacattcatttttttttttttttttgcctttgatgcccttgtggctgaagactagctgtataaacacaataaagtat

SEQ ID NO: 314681 - DNA, 570 bp, Homo sapiens
gtgctcaacatgtatcagaattcccatatatttattgacagagattgatggaaactaattatggcttcttaatcttctcatcacagattccttctggaaatagtaatatatgctagccgaggataaaatttacaattttcagaatgcattactatttcctgtaatttatgtactatagccttcctgtaacgctatacactaactatatcctcagtattcatctaacatattagagatgtttctttagcaatttttttcccaataacctttcaacttcttggaacattattcaaactgaaccaaatcccattctaaataaaagtttatatatcagggctctggcacatcaaaaaattgtaatactcagttaattttgtcacattgaattcctagcaatttggattttgtatatatcaatatgttcgtagtagtataaagtggaggcacaatttaacactgccattcttttttttttctgaactgctactatttaaacattcatttttttttttttttttgcctttgawgcccttgtggctgaagactagctgtataaacacaataaagtat

SEQ ID NO: 314682 - DNA, 530 bp, Homo sapiens
ttcagtttctgggttacatgagtcacatttcaagcgctcaacaaacacatatggataatagtcgtcgtattaagcaatgcagatataaaacatttccatcattccagaaagttctactggacagccttgaactatgctttagtggaagctatttccagctttgatttgctctatgtacagtataatggtccagtttaagactttcyaataagctggattaggaaattttgaaaataatatatcatttttattaacaaaccaattgatttgggggtgctcccttataagaagttcaaattatcattccaacagtctagatggcatctctacagtaagtttctacatatcgctaaacacattactttcagaaatgctaaatgtcttccacatattctccaaagcttctgttttcttgcttcccttatcgatgtttacagatctattatcttcttagccacctatctcaaaataaatcttcaaaatcatatttttttactttttcctcttccttctcttcatgcttttaatag

SEQ ID NO: 314683 - DNA, 530 bp, Homo sapiens
ttcagtttctgggttacatgagtcacatttcaagcgctcaacaaacacatatggataatagtcgtcgtattaagcaatgcagatataaaacatttccatcattccagaaagttctactggacagccttgaactatgctttagtggaagctatttccagctttgatttgctctatgtacagtataatggtccagtttaagactttccaataagctggattaggaaattttgaaaataatatatcatttttattaacaaaccaattgatttgggggtgctcccttataagaagttcaaattatcattccaacagtctagatggcatctctacagtaagtttctacatatcgctaaacacattactttcagaaatgctraatgtcttccacatattctccaaagcttctgttttcttgcttcccttatcgatgtttacagatctattatcttcttagccacctatctcaaaataaatcttcaaaatcatatttttttactttttcctcttccttctcttcatgcttttaatag

SEQ ID NO: 314684 - DNA, 569 bp, Homo sapiens
ggcaacaattcataaagtagattaaatttaggaacatcttttagaatctgttctcctttatcacaatgtcaatggtcttagtaatgtcaacttcgcatatgttacaagatcagtttaattccacaaaaagaaaagatttgtcaaaacgtgttcctaccctcatgtggctatggaaaggcaatctctgtaagaagctagaggtcctgcaaacctgattccctgagatgcaacatccctccttgttgaaaataagaaatattcaccactaattgaccacccatgcatcaatgggatattaaaagacccgaagctccattacagcttattcataaatgaagcattaattttgtctagcggtattaatcacaacatattaaaattgaagtacccttaaatttaaaggatttatgaagtggtcaaagatgcttaatttacagttgggccttcatttagatatgctgatcttaacayaatgtgacattgtgcttatttcactaattttgcttcaatttaaatggccaatggcagctaaaactcatgttcacccacagaagattcaaggttttcaa

SEQ ID NO: 314685 - DNA, 527 bp, Homo sapiens
tttaagaattataataaggtataggaacaatttgaatcatatattaagattaaaggaagcaaatgtattaagtcttgttttgtaagagtggttctaattaaaagaattaatggctaaatatagcttattcctcaaatattgttgtcaattatcaaaattttagaaagcacatttattcaatgaatattgattacacagtcactgtagactgaaaactatgaaaagtactgggaatgcatggagaagatataatcctttgccttcaatgagctcacctctctatttgtaataaaacgtttcctaaaggcattatctattaaattaaaaaaaaaacaagattatggcaaataaaattctagaggtgttaaaaatacattttcytaaaaaaaaaaaaactcacataggaatattgcctgacacatgcagtaaaatattccttttagaaatgatgatgttaaggtattattggtctttattttattacaaaatattaggctcttaaattctttatttttctgttttcacaa

SEQ ID NO: 314686 - DNA, 502 bp, Homo sapiens
atgggtaatgttgggcaaaaatactccatgattactgcaattacttgactggccttctttcctgaaagttgatcatgataccaacatcttgctaaactgacatttcctcagtgctgtatgtgtccagaaaatctcatgcagacacttcagtagtgtctccttcattctttgtttgaagcccctggttggtgtgctatcaaatcttagaggtttgccattcttcaacaatatctgactgtgctgtagacatctttaaaaattggagcaaaggccaagatagtstttcttgacagttttttctataatttagtcttagcagtaaaaggtgttttcctttgagttgtctctatgatgagagacctagaaagaaaaagtaatcaacttttggttgcataaattctcttattttacaccaatattttatccaggattttaaaattgtttagtaaataataaaatgcaaagacatcttttataaaatgtcgtgatttaaataatattg

SEQ ID NO: 314687 - DNA, 502 bp, Homo sapiens
atgggtaatgttgggcaaaaatactccatgattactgcaattacttgactggccttctttcctgaaagttgatcatgataccaacatcttgctaaactgacatttcctcagtgctgtatgtgtccagaaaatctcatgcagacacttcagtagtgtctccttcattctttgtttgaagcccctggttggtgtgctatcaaatcttagaggtttgccattcttcaacaatatctgactgtgctgtagacatctttaaaaattggagcaaaggccaagatagtctttcttgacagttttttctataatttagtcttagcagtaaaaggtgttttcctttgagttgtctctatgatgagagacctagaaagaaaaagtaatcaacttttggttgcataaattctcttattttacaccaatattttatccaggattttaaaattgtttagtwaataataaaatgcaaagacatcttttataaaatgtcgtgatttaaataatattg

SEQ ID NO: 314688 - DNA, 622 bp, Homo sapiens
aatatttaaattataagaggtattaagacacaattaatagccctggctttatgcttgctacagaattgatgctctattaataagagtggtggtggtgttttttatttacyttctatcttattgggaaaatagtatcaatctggaagaaacctgtgtatgattctatgtatctatatgcatccattacctataccttcatcctttgattttctcctatttctatgaatgaacttttcctctccctgcaaggtaataatgcctccttttgctcagtaagtcctattcatctcatttccttagtgacacctccccagcagttattcattccctcttggggatcatttctttttagcttaccaccagaataactcttaacagcatagaatcatatggtggttaattctagccaccaccttatttctctgctctcttgtacagaaaaaacttttcaaaagagctgtccatatttcctctccacattccctgtcctccaagtcttacttgaacccaccactctctggtttccaactcccaatttcactgagactgctcttttcaagttcacccatcaccatgacttagctaaaactaaggttaaatcttaaatccttgacaacactga

SEQ ID NO: 314689 - DNA, 622 bp, Homo sapiens
aatatttaaattataagaggtattaagacacaattaatagccctggctttatgcttgctacagaattgatgctctattaataagagtggtggtggtgttttttatttactttctatcttattgggaaaatagtatcaatctggaagaaacctgtgtatgattctatgtatctatatgcatccattacctataccttcatcctttgattttctcctatttctatgaatgaacttttcctctccctgcaaggtaataatgcctccttttgctcagtaagtcctattcatctcatttccttagtgacacctccccagcagttattcattccctcttggggatcatttctttttagcttaccaccrgaataactcttaacagcatagaatcatatggtggttaattctagccaccaccttatttctctgctctcttgtacagaaaaaacttttcaaaagagctgtccatatttcctctccacattccctgtcctccaagtcttacttgaacccaccactctctggtttccaactcccaatttcactgagactgctcttttcaagttcacccatcaccatgacttagctaaaactaaggttaaatcttaaatccttgacaacactga

SEQ ID NO: 314690 - DNA, 622 bp, Homo sapiens
aatatttaaattataagaggtattaagacacaattaatagccctggctttatgcttgctacagaattgatgctctattaataagagtggtggtggtgttttttatttactttctatcttattgggaaaatagtatcaatctggaagaaacctgtgtatgattctatgtatctatatgcatccattacctataccttcatcctttgattttctcctatttctatgaatgaacttttcctctccctgcaaggtaataatgcctccttttgctcagtaagtcctattcatctcatttccttagtgacacctccccagcagttattcattccctcttggggatcatttctttttagcttaccaccagaataactcttaacagcatagaatcatatggtggttaattctagccaccaccttatttctctgctctcttgtacagaaaaaacttttcaaaagagctgtccatatttcctctccacattccctgtcctccaagtcttacttgaacccaccactctctggtttcyaactcccaatttcactgagactgctcttttcaagttcacccatcaccatgacttagctaaaactaaggttaaatcttaaatccttgacaacactga

SEQ ID NO: 314691 - DNA, 565 bp, Homo sapiens
  misc_feature (1)...(565): n = A,T,C or G
ctgacattgtcatggctcgatgatccaggatcatgcaaagcagatgatcctccttctgacgcatcatcagaagatgaatagtagcctaacactcacaccacaatacytacgtcactcacctcactttcactcttcatgtaggcanttatcatcttacatcactgcaanaaggaaggcaagtacagtaccatagatattttgagagagaccatttcacatagcttttattacagcacattgttgtaattgttctgttttgttattattgttgttaatctcttactgtgtctaacttagcattaaacttcatcatagttgtgtatagaaaaaagtgtatatagggttaggtactatttgcagtttcaggcatccatttggagtcttggaacatatcccccaaagataagggggaactactgtatatgagtataaccttgtataatgagcatgggtttttgcactcagatttgtagccccaggtctcctacttgctggctttaagttactaatgtgaaactttattcacctcatctttgctagcaaataagcaaatgaggtaaaagat

SEQ ID NO: 314692 - DNA, 593 bp, Homo sapiens
ttaccttccactaacatgcaggtagggagaggggttaagttacctctctcaaagaatacaaccacaagaaagggaaaaatagaggtttttttgaggatgagtaggcagcaaagagtctgttttctctcttcaaaatctaattcttcacagggcaagcctctttttatgtagctttagcaggcttggttatctgattttaaatttgcatgtgatttaagatgtgacatcagtcagggcaaaaggatgtcatgatggtccaaataccaagacacagcctctgacagtctgacagcaatagaagaaagaacaaaactacagatgtaatctattaatcccaaagccrtatctatcaggtgccatgttgtgtgttggcaaagagtcccacaaacctgaggagaccctgagctgatgactcagtatgtcatagaatgaagtcatgattaggttgaaagcaacaaccctgcccatttagaaacacttaaaaagcagaccttgaaatccatatagcctaaataatttataaataatgaaactaagactgaatattccatcaaagaaactgagttttcaataaattttaggaagatgtttat

SEQ ID NO: 314693 - DNA, 593 bp, Homo sapiens
ttaccttccactaacatgcaggtagggagaggggttaagttacctctctcaaagaatacaaccacaagaaagggaaaaatagaggtttttttgaggatgagtaggcagcaaagagtctgttttctctcttcaaaatctaattcttcacagggcaagcctctttttatgtagctttagcaggcttggttatctgattttaaatttgcatgtgatttaagatgtgacatcagtcagggcaaaaggatgtcatgatggtccaaataccaagacacagcctctgacagtctgacagcaatagaagaaagaacaaaactacagatgtaatctattaatcccaaagccgtatctatcaggtgccatgttgtgtgttggcaaagagtcccacaaacctgaggagaccctgagctgatgactcagtatgtcatagaatgaagtcatgattaggttgaaagcaacaaccctgcccatttagaaacacttaaaaagcagaccttgaaatccatatagcctaaataatttataaataawgaaactaagactgaatattccatcaaagaaactgagttttcaataaattttaggaagatgtttat

SEQ ID NO: 314694 - DNA, 635 bp, Homo sapiens
ggacttaacgatatccagatatattactattgatgcttttaagttggtcacttggtaatcaagtgactgccaaatcttttcatgtatgggtacattttgascattgtaattagtaagtaatctatgatatgattctttaaaaaaccacatgaacatgatttttgcagcatttcatttgttttagcattcattgataatctttgtcctacttaattattttattagttattgcaacatggaatattctagaaataaaaaaagttgctgaaattaagaaattattacatgagtttaacaggacattagacacaaatgatgaaatgattagtgaagtagaagatcaatcaataagtagaaatatcaggactgaaacacatataaggaaaaggaaggaaatatgaagaaaacaattcaggagatacttaggacactgtaagaggtctaatatgagtgtaaaaactctgaggaaaaggagacaaatagttgggcataaataataattgaatagataatggttgacagtattccaaaactaaaaagtcactaagtcacaggttcaagaaatactcccattttccaagccagtttagtaaaataataggcacaccagagtaaaacttctaaagagcagaggc

SEQ ID NO: 314695 - DNA, 517 bp, Homo sapiens
ttgttgcataaaagtgtcccttgaataattgtttcatagtagtgaacattttataataataaccttttttacaacagaaggagatgggttgtacgtaaactataacaatccacatgatagaatattctattctgaaaaatatttatgaaaagagtattagtaacatggaaaaatgcatattctaaaatcttatcatagaaataaatagaaatttgttcctgttagagggcaacactrggaatgccttgagtttgtgcatgctccatgaatcgattgttttgattggagtggtgtgcagaggcacaagatgcatggaagggagagccctgtgtatttcttcaaaatgcaccagatgtttcaagaactccaagaaggcgcctcagagaagccagaaaaaaatttcccaaggtatatgatttgtagactcttttgtattatgtaactgcgctagaattatacctctattttctttatttaattacaataaaatttttatttatttatttatttatttatt

SEQ ID NO: 314696 - DNA, 549 bp, Homo sapiens
ttgaaaatcaaatgtatttgtggaaatatctagctggatgtatattttagctactttgcaatgtattttgcaatgtaccaaaaataagtggattgattaatagaaataaagttagttaaatgaatagatatgtgcaagagcaagcataatatagtgttaatgccagaattgaggccatgggtttatggatgttcactgtaacattctttcaatatttttgyatgcttgacaatttttactataaaactattggaacaaaacaaaattcatgaataccagggattttagggcaaggacacatgttaaggtgaaacatattgttggcaaaattgcaacttttgagaagaaaccttggttgtagtcatagctccttctttggctttctctagcccatctttctctgatttgttaagagaatcaaattatataaaggatgcaaactctcaatacaaaataaagggttttatggtgtattttcttacatgattaataatttttcatagtgatacatttgtatgtcttaaaattgattgattaaatcaaatttaa

SEQ ID NO: 314697 - DNA, 614 bp, Homo sapiens
ggttctaaaagataatctgtttcatgactcagtgctagcttctggtggttgcaattcttggagtttctttgtgtttcttggctgtagatgcatctccatcttcacatgatgatccccttcccctggcctcgccttgccctcagtgtatgggtctctgttttctcttcttatcaggacaatagtcaattggattatggcccactctagcccagcatggctccattttgatttaactaattgttaaattagctaaaatttaattctgaggtttggggtagacatgaattttgagggacactattgaacccagtacccwaatttttccattttgacaacacatttgcaatattcagggaatctttcttattttctggttactcttttttttcatatctgcgtgttgtatcttaatgactataatgtctttgtgaatctttctgaagatactaattggaaaattctttaaattctattttatttctggcattaactctagtccctctatggaatttctttttcatttgctcgtcttggttgttgcattttatactattgaatctcttcagatatcttttactctgaaagagagttgggtgaatatagtgtgttgtggg

SEQ ID NO: 314698 - DNA, 614 bp, Homo sapiens
caaattatttttgtactaatagtaagatgatatgtgccttgttcactgtgttgacattggttatttggcacatatttttctgaaaataaatgacrttaggctgctacttcaagaaaaacagctaatagtctttattgttatgacaaaatttgaacgtttaagagaaaattagaattttggaaagcttttatcagtcattgtgagcttgatattatataataacatttatcaaattttacaggatttatataactcagtgaaccaatatcttttaaatgatcaattataatgtatataattatgcatggctaaaagatccatccaatatgtgagatatatcaattagttatgtataatatgaaaatttattaatattactttagggtaccctttaatactaacattttagaaactacttgaattttggtgtagtttaaaataattaccttaaaaggctattgaaattctcttcttttaccaaatatatacttatgggaagtgatatatttatcatatataacaacccaaacaacatattacaataaattaaaaatagaagtagatatgaaaatccatgtatcttctgctaagatggatattaagtagatttgcag

SEQ ID NO: 314699 - DNA, 614 bp, Homo sapiens
caaattatttttgtactaatagtaagatgatatgtgccttgttcactgtgttgacattggttatttggcacatatttttctgaaaataaatgacgttaggctgctacttcaagaaaaacagctaatagtctttattgttatgacaaaatttgaacgtttaagagaaaattagaattttggaaagcttttatcagtcattgtgagcttgatattatataataacatttatcaaattttacaggatttatataactcagtgaaccaatatcttttaaatgatcaattataatgtatataattatgcatggctaaaagatccatccaatatgtgagatatatcaattagttatgtataatatgaaaatttattaatattactttagggtaccctttaatactaacattttagaaactacttgaattttggtgtagtttaaaataattaccttaaaaggctattgaaattctcttcttttaccaaatatatacttatgggaagtgatatatttatcatatrtaacaacccaaacaacatattacaataaattaaaaatagaagtagatatgaaaatccatgtatcttctgctaagatggatattaagtagatttgcag

SEQ ID NO: 314700 - DNA, 651 bp, Homo sapiens
gtctctaacaggttacatggaattaactaagaaatcggcactaggagaaagcttcttaagtgtagtctttaccttgactctatgattcttacagtatgaaggccagaaacagtgacaccttttgaattgagaagataatatgagaagttgttcaccctttcaagtcctctaacatactgggcagtttacagttttggtatattctgaatgaggaatgaggatctatagaagttaattcagcttgcaatattgtctaactggttcaaatagaaatggggcttacatcctggaaagcattgatgaaaatgaagttccccacaaatgactctatgtaaatcctcaattccaaatttgctttaaaatcaagaaaataattaccttggtcagtgctgtcaggtacatactccttcactgtgttctggcagaaactcagaaaaccaattcagcaacttaattaagtcctcacaggcaagcatgtcccaactaggcaatttctggacastgagatttccttccctgttgggttctaacttacatcaatgtcttaggctaccttagcagcagcaggacaaaaatttggtacttttggcctccatttaagtgttttaggcagacagcaaaataaggtagctatttttaaaaaatcattcc

SEQ ID NO: 314701 - DNA, 573 bp, Homo sapiens
tgaggtgaactgagatcatcccactgcactccagcatgggcaacagagtgagaccctgtccctccccccacgccacacaaaaaagctgctataaacacccgtgtgaatgtttttgtgtagagatgttttcaaatcctttgggaaaataccaagaatttggattgctggatggtgtggtaagcgtatgtttagttttataagaaactgcccaactgtctgtttttcaaagtggctataccattttgcattcccaccagcaaagaatgagcattcctatagtttcacatcctcaccagcatttggygttgtcagtgttctggactttgccattctagaaggtgtgtggtggtattttattgatgttttaattttcattttcctgatgacatatgacaagatgtggagcatctttttcatatgcttatttgacatctgtgtatctgctttcctatgcttatttgacatttgatgatgtgtctgtcgttgctccattttttcttatcactctcatctcaattgttcatttactcacctgtttgttttatcagactgtgaagtcctcatgggcaggga

SEQ ID NO: 314702 - DNA, 356 bp, Homo sapiens
ttttggctccccaatgtttccagcgatcatataatggtgatttccttaaacaaaattgccttytgactgctggaggcaagtcaggctttcttagcgttgcctgttcaaacagagcttccatgaagcaggggtcccatctgggaaaacttcacccagaactcagggccacccacatttaaatgcaattagtgtcttttgataacagtgggggagttttcagagaaaagatcactgattgtctatagttggatcagatttccatttgctttatattgaatagcttctcctgcacctctacagaaaatccatatagtaggagaaaacattaaaagcaaaaaataattgtcagagtggat

SEQ ID NO: 314703 - DNA, 557 bp, Homo sapiens
tgctgtgtgtacacaactattttatggaattttattgtgaaagacagaaaagaatggtagctggaaagggatgtggatcaatatggagtattggttaggacagtaatactggatkatgtttatatgctgatgggaataattgactggagacagtctgacagaagcattgaacttcttgagaaagtgagagagatgggattccaacatgaattgagggatgagcatttgattacaaggagtcacattcagttgcacagagggaagaagacaggttttgtggcaggaggctttcagattttgtggtgggaactcctattctctttaatgaggtacgagatgagcagaaagtaggagtaggaagtggtacctccaagggagaggtgatggtatgagcaaagttttcgaggaagagtagatgttcaccaggcaggtgattgcacgtgggaggggaaatgggtagcgtgagaggggcagagtgaagggcattcctgatgaagaaaagtcagtttcacaaaggcatgaagatgcaaatagtctggtacattaggccatcaagt

SEQ ID NO: 314704 - DNA, 570 bp, Homo sapiens
tgccttcataatagctttacctacttagtcataggatactttccatcatcaacatgccagatcttcaagtatctgaagatgtcaatcatactatctagctttttaaaaaattttaaaatatttcatgtgccaaaaatggttttgagtatatgaacacccatgtacccgctactcagcttaaggaataaaatattgtagattcaattcaaatcttgtaatccttgtgatgccgtttccttttctccctaagggaataaatcctctaaaatttgtctttgycattcttatgcatattttatattttttactgcacaaggatatatccataaaagatatatagcatgtttttgtgtttaaactttatatacatggtattatactgcacctataattctgcaatatgcctttttcttattaaaattctgcattagagatttatccatgttgctatctgtaactcaaatgtgttcgttttttaatctggcatatcccccagtataaatataccacaattttttcattatgttcttggacacttaccctaatgagctgccattcttaaaagagaaa

SEQ ID NO: 314705 - DNA, 634 bp, Homo sapiens
agtcagtcagaacctaattctagctaatttaatcagaaaataaatctagttattatggctaacagacacttcaaaagggccagagaagcagtgtggacattacccagccaatggccacattaccaatcaagacacataactgagcacttgaagccatctctttcatctgcagtggcccaaccagtttgtgtacattgcgaacccatagtcacggagcactgggcatygctgctggagccactaaaattcttgccactggaaatcgggttcagtgtaggacttccactggcattttcaccagagtggtttcccacaaaaatcctctttctttgtatctttagattctggggaaaactggcatgctcacatctgttggtggagactcttctaatgtcagtgtgatagttatcagggaatatgggaaaagtatttggtattttcagtttttatattggaagctggtctcttctttccagcaagactcactcataaggcagggcattcttcaagcatagaaaagggctttagatgctgggctgccaaaaattaggaaaatatatactacctcctctaattttaagtcgttttatatgtaaaatgtgcccaataatagtacctactttgcagggttatt

SEQ ID NO: 314706 - DNA, 586 bp, Homo sapiens
taactttgagttggactttgaaggatggataaaagcaaatccattccaggcaaaggaacaacatgagcaaaggcacaggggtgggatattacacaaaaaaggggaactcaggctgacgctattacttgacttytgttctttaaaagcactctttctggtcaagcgtggtggctcacgcctgtaatctcagcactttgggagaccaaggcaggtggatcacttgagcccaggaggttgagaccagcctagggatcccatctctatcaaaacaagcaaacaaacaaacaaacaaaaagaaacacactcttccttccttccacagttcttacaaaattagaataaagatggcttgtatctcatcaactggctctcagttgggtaagttggtcaaatcagagataactgggttcagaattactaaggatttttttgcatatgcatttaatatgcaataaaaggctttctttgacattaacattttgcataacaagaactaccaccactaacaacaaatgcaatttttgtaacgaattagaaaaaataaattgaagctatgagcatttgtgttcccacaaagaaggcaaaa

SEQ ID NO: 314707 - DNA, 584 bp, Homo sapiens
tttttaattgactgttattactgaaatgatattcaatcacgtaaagtttagaggcactttaagctgaatattaatattcttgcatggaatgtaatagttagtgtagatgtgcagcatttttggagaaaataaaccaattacaataactattgagtatattcctcagttgggctatgctcttcagctaagttagaatccttgggcattattttggcatttggaaccctctttttctagctccagttgcaagatattgtcagaactatttggaaaataattttctttctttttcatcaagttgtatcaacaaataaggacaataatagttactaagcatttttatttatcaattagttttctgggaatgatagactrtgtagaaaaacgtcataactgactaccttcagggaacttcagcaacctacatatgaaaaccactgaccccaaatgccaagtttcacccagagtataatttcgtgttacatataacatttgacatgactggattatttttctctgtgtaaggaaaccaaaagcagaggcaaaaggaaagaacaatcccaatatctcatttagtggtatta

SEQ ID NO: 314708 - DNA, 643 bp, Homo sapiens
tccaaagctacatccaactttatatgttattctttaataacaacttttcatctcataagagtgaaacacagaaaggctcactagtatcaatgaccaggtaattgcascatcaggagctctctgttttacatgaggctctggctttgagaatacttgatagttagcaaatttgcttttgctagaaaaaaaatcaaagtgattcataaaattaaatttggaggggtcatgaagagaggccaacgaggttttgattccctgttttccctctctcaggtatattagcaaagattgttgatgaaaagtgaacacttaaacctaaaaggaaatttaacatgaagctgtcttaggtgcaaagccacaatggctgaataatatctagtgaagtcataagtctttgaatgtagttttctttattaagaagaataaaatattttccccaagaatgtaggtctgtcatgaatactttattttgtggtgcatttaggtcacaccagaaattactgctttattctaaaaatgaaaaccatatgaatcccagctggccatctgtgtatgaagaaaacaaagcatcattgtttatccttttaatggagagctccccaccatcaatctgtctgccgactacatgaagttgtttattact

SEQ ID NO: 314709 - DNA, 522 bp, Homo sapiens
tgaggcaggaactgctttggagattgtgagcatgatggggtactagcctctttaaaatgaaaagtggaaagccgtagttagggaggcaggtgcagtctttagcagccccccagacccccaaacaattataagctgattwcagcaaatgttggtgatggtaggctttatttcttttgaagatagctacatcttttgacatatcttaaatcatgagaagagtttatgtcctagcacatttttttttctgtatctcagtagttctgtaatgccagctctagatataaaaacacttatggctcagtaaaagcaagatttacttttactaataaggtgcagattattctcctgattcatagacacaatttcatatgttctgtttgaactttttacttttattaaagttatatgctaagatatagttttcatcatattaatcataaccctttcttacactgcacttaatgtaacatcacatatctagaagagtaaaatcctagaaactacaaaaatcacgtaatttga

SEQ ID NO: 314710 - DNA, 531 bp, Homo sapiens
acttaatccctaatgcaacaatgttgagaagtgaggacctttaagcatgaatgagtaatgaaggctctactcttatgaatagatcaatgccatgatcaagggagtgggttagttcttgagggaatgggtttctgataaaaggatgaatttagctttctttrtgctctcttgcattctcatatgctctcttgcattctcatgtgctctcttgctcttccacctctgccataggatgacacattatgaaggcccttgtaagacactgagactatgctcttagatttctcagcctctagaaccataagctgaataaatttatgtacattataaatgacccagtctgtggcatcctgtgtggttatagcagtataaaatgaactaagacacaaaatgataaacatttagtgagttctcaatatgtatttgttgaaaaaataattgtgtagttgtgaagttggtagagtgtgaatctggaacttctaggttttgcaccttttgaaaaagcccattctaggaaaaggatgatgaaaa

SEQ ID NO: 314711 - DNA, 605 bp, Homo sapiens
ctgattacaggaaatggtctgagatgtttaagaagcaacctggttttttgttgaacacaggggtatgaccttatcacttagagcttattctttgcataatagcttggagaaaagaaagagccaaatggcatcatctttctccctgtcttactgtcaggggagagctaatactcatatagtataataaaaaagagtattaaactgcatctttgaacaatcaaaaatgatgcactaaatgaatrctgaataaatggccaaaagctttttttttaacaggagatcattttaccatttgcattgtgtcagaataatagaccagacttcccattctacagacacttgattgagtgcctactatgcgccatgtactattaggtgctacagaaaaaatgcagaagtcagtagaagaatgcctttcttccaagcctagtagataagatgaaacgagaaacaatgtaaccaaagtctgcatacggcatcagtaaaagagtttcgagcaaaatttcagagactatatcatcacgggttgtaaatctgggagggtttgatggtggaggatggtaagaaaggaattgtaaagaactggaagggtttgaaatgacaga

SEQ ID NO: 314712 - DNA, 673 bp, Homo sapiens
gcattcaattcaattaagcaaggatttcctgagctgtttcctttaatcttaaactacaccctgcattacacacatctttattttaaagcagcacaacatatactttattgtattcaaatatccccctttacttttatgyacaatgaaacttcataaatccagataacttaaacttggtgatggtgatatagatcttttagttctggaggattctaaattatagaatactattattttctagcagctgtaaaacaatgaagacggcactgggcagctggctattttttgtgcaactagaggaacatgtcagtagcattaaggaagaaacccataaaccacaagagcatttttatccattctacagactgaagaattgcttctggtaactaaggaagagggccgcttagcccactcacatactattttcttttaatcaactttattgaggtataatttaaaaacaataaactgcgctcttcgtaattgctgtttgatgagttctgacaaaaatatactcccatgcatctaacaccacaatcaagataaagaatattgccagaaaatactcatttatgcttttatccatgcagtctcttctcctcacccccgatccaggcagccagggatctacttttcatataacaatttaaaattttctagagtttctcaaaaa

SEQ ID NO: 314713 - DNA, 673 bp, Homo sapiens
gcattcaattcaattaagcaaggatttcctgagctgtttcctttaatcttaaactacaccctgcattacacacatctttattttaaagcagcacaacatatactttattgtattcaaatatccccctttacttttatgcrcaatgaaacttcataaatccagataacttaaacttggtgatggtgatatagatcttttagttctggaggattctaaattatagaatactattattttctagcagctgtaaaacaatgaagacggcactgggcagctggctattttttgtgcaactagaggaacatgtcagtagcattaaggaagaaacccataaaccacaagagcatttttatccattctacagactgaagaattgcttctggtaactaaggaagagggccgcttagcccactcacatactattttcttttaatcaactttattgaggtataatttaaaaacaataaactgcgctcttcgtaattgctgtttgatgagttctgacaaaaatatactcccatgcatctaacaccacaatcaagataaagaatattgccagaaaatactcatttatgcttttatccatgcagtctcttctcctcacccccgatccaggcagccagggatctacttttcatataacaatttaaaattttctagagtttctcaaaaa

SEQ ID NO: 314714 - DNA, 673 bp, Homo sapiens
gcattcaattcaattaagcaaggatttcctgagctgtttcctttaatcttaaactacaccctgcattacacacatctttattttaaagcagcacaacatatactttattgtattcaaatatccccctttacttttatgcacaatgaaacttcataaatccagataacttaaacttggtgatggtgatatagatcttttagttctggaggattctaaattatagaatactattattttctagcagctgtaaaacaatgaagayggcactgggcagctggctattttttgtgcaactagaggaacatgtcagtagcattaaggaagaaacccataaaccacaagagcatttttatccattctacagactgaagaattgcttctggtaactaaggaagagggccgcttagcccactcacatactattttcttttaatcaactttattgaggtataatttaaaaacaataaactgcgctcttcgtaattgctgtttgatgagttctgacaaaaatatactcccatgcatctaacaccacaatcaagataaagaatattgccagaaaatactcatttatgcttttatccatgcagtctcttctcctcacccccgatccaggcagccagggatctacttttcatataacaatttaaaattttctagagtttctcaaaaa

SEQ ID NO: 314715 - DNA, 673 bp, Homo sapiens
gcattcaattcaattaagcaaggatttcctgagctgtttcctttaatcttaaactacaccctgcattacacacatctttattttaaagcagcacaacatatactttattgtattcaaatatccccctttacttttatgcacaatgaaacttcataaatccagataacttaaacttggtgatggtgatatagatcttttagttctggaggattctaaattatagaatactattattttctagcagctgtaaaacaatgaagacggcactgggcagytggctattttttgtgcaactagaggaacatgtcagtagcattaaggaagaaacccataaaccacaagagcatttttatccattctacagactgaagaattgcttctggtaactaaggaagagggccgcttagcccactcacatactattttcttttaatcaactttattgaggtataatttaaaaacaataaactgcgctcttcgtaattgctgtttgatgagttctgacaaaaatatactcccatgcatctaacaccacaatcaagataaagaatattgccagaaaatactcatttatgcttttatccatgcagtctcttctcctcacccccgatccaggcagccagggatctacttttcatataacaatttaaaattttctagagtttctcaaaaa

SEQ ID NO: 314716 - DNA, 579 bp, Homo sapiens
aaaagcctcagtttgttagacctagcagatttctgtggaaaagagtacatcttaacagaaatagtatttcaccattaaatagttcatcactacatggatttctataaactatggcttaaactgaggttctaacacattcaatctttacagtagatcatacacactctgctctaagaaaatagcatctcaaataaaggcagcctatggaatcagcccacaacagataactctattcaagcacttaacacttaagtacacctctgtatatgtcaccaaatttgactaaatgaactgaaatgatcccatctcatacataaggacatagagtagtgaattatactttttatctttggataattgggttcaaattatataatacttcctatataggagatatttagatcagctgtaaaaagattgttttttcttgtcagaggcctcatcttgggaaatagagaagagcttaaargcttaaaactttcctaactttaagaagatatggtagaggtagttttgtgagactttttaaaaggcaatttctataccatatttatcatagtgtattattgttagtggctt

SEQ ID NO: 314717 - DNA, 579 bp, Homo sapiens
aaaagcctcagtttgttagacctagcagatttctgtggaaaagagtacatcttaacagaaatagtatttcaccattaaatagttcatcactacatggatttctataaactatggcttaaactgaggttctaacacattcaatctttacagtagatcatacacactctgctctaagaaaatagcatctcaaataaaggcagcctatggaatcagcccacaacagataactctattcaagcacttaacacttaagtacacctctgtatatgtcaccaaatttgactaaatgaactgaaatgatcccatctcatacataaggacatagagtagtgaattatactttttatctttggataattgggttcaaattatataatacttcctatataggagatatttagatcagctgtaaaaagattgttttttcttgtcagaggcctcatcttgggaaatagagaagagcttaaaagcttaaaactttcctaactttaagaagatatggtagaggtagttttgtgagacttttyaaaaggcaatttctataccatatttatcatagtgtattattgttagtggctt

SEQ ID NO: 314718 - DNA, 530 bp, Homo sapiens
ctggcttgaggaggcagtgtctgttttacatagggcccaaagattggttggaccaggtgtgacatttacatagcactggaagaagctggccayccccatcccccgctaatcttttattatgcaaatcgatttttttacatggccgcgccatgttgtcagctccttagggtatatgggattgataaaagggaagatggagcctccatattgaacatgcctggtccccaggtagccttttcctattagcacagctgctggcattcacccgtgcaagcttccagcttgcttatctacgtttgcaacccaattttacaagttgctttttgttagaaaagaaattatttgggggctgcttttcattaaaagggaaacgttactgaggacttccttaccctcactatctgcctaaataatttctttttaactcctatatcacaaggaacattgaggggatccaaaataaagctcacttgcacacacgcccccaggatttcccaatacccaccacaaccttgccacagggttctttg

SEQ ID NO: 314719 - DNA, 439 bp, Homo sapiens
ctggcttgaggaggcagtgtctgttttacatagggcccaaagattggttggaccaggtgtgacatttacatagcactggaagaagctggccacccccatcccccgctaatcttttattatgcaaatcgatttttttacatggccgcgccatgttgtcagctccttagggtatatgggattgataaaagggaagatggagcctccatattgaacatgcctggtccccaggtagccttttcctattagcacagctgctggcattcacccrtgcaagcttccagcttgcttatctacgtttgcaacccaattttacaagttgctttttgttagaaaagaaattatttgggggctgcttttcattaaaagggaaacgttactgaggacttccttaccctcactatctgcctaaataatttctttttaactcctatatcacaag

SEQ ID NO: 314720 - DNA, 439 bp, Homo sapiens
ctggcttgaggaggcagtgtctgttttacatagggcccaaagattggttggaccaggtgtgacatttacatagcactggaagaagctggccacccccatcccccgctaatcttttattatgcaaatcgatttttttacatggccgcgccatgttgtcagctccttagggtatatgggattgataaaagggaagatggagcctccatattgaacatgcctggtccccaggtagccttttcctattagcacagctgctggcattcacccgtgcaagcttccagcttgcttatctacgtttgcaacccaattttacaagttgctttttgttagaaaagaaattatttgggggctgcttttcattaaaagggaaacrttactgaggacttccttaccctcactatctgcctaaataatttctttttaactcctatatcacaag

SEQ ID NO: 314721 - DNA, 588 bp, Homo sapiens
cagaaactggtaacagtagctgctttctgaaggggaacctgttgactgggggaatgggaagagacacttagttttcaccatgtaccctctttattttttgtaacttggtaccatagccaggtcttgcctattcaaaaaacattttttaacatatgccataagattctgcatattggcaataaaagggctacaaatttggttctgagcatcctgatagccaaagaaacaagagaaacaaaattaaagtcatrtgttcattaagatcaaatcaaaccaactcctgagaacaagcccagcttttcctggttctaaaatatttttttaaagaagctttcctctgggttcttatgaatagagcatgtgtaggggaaatcttcaacaccattcccaaataatttcaacagtgactttcaggctgctgacccttacaacattcctccaataacccaaaagcataactgaaaaagtttggtacagccgttctcccaggagccagtcatctaattgtgatggtttcagatgctccattcaaactggatctcgtaatatggtcagcacaaaaagaaatgaatattttcctctagtaat

SEQ ID NO: 314722 - DNA, 586 bp, Homo sapiens
tggtacagccgttctcccaggagccagtcatctaattgtgatggtttcagatgctccattcaaactggatctcgtaatatggtcagcacaaaaagaaatgaatattttcctctagtaatatatatgaaagaactctgcgcaaataagagttgctaacagtgaaacagtctgattctgaggtaattagaccatcttcactatcagggatattgcagaagagattgctgccttggatagaagtttggaaaaaataacttctaagatcstttcaaatattaagattctacaaggtggtgcatctaagcatcctgaaattgccttttaaagtttcagcacatctctatgtgttaggtgctattatttaaatacatttaagatctgttgtctgctttgctcatagggcttccttgtaactgggaaattccctgaatagaaggagaggcactatcagcatgtgatttaaaggaagtttaaagagctaaatttgtagcttgtgaggcatttaagaagacccatgagctcagattctcagttccacatctaccggctaccttccatgctcaacaaggctaaataattctaccca

SEQ ID NO: 314723 - DNA, 659 bp, Homo sapiens
  misc_feature (1)...(659): n = A,T,C or G
catatcccctagccagccaattacttctttcttccttcagggacttatatgcaattaaaagaaatctggctctttaatgaggatctagcaagaaaggcaaatatttanancaggttgtctttcgcagtccttgcccatagccccaaaagaaaagaaaatgaaacaaacccaagaacaaactacaaagcctacagtaaaactgtacatctcaaaacagcctttcttggggatgaatataggaatcaaattctttttttnnnnaaanaaaatcaaatctgtgttttctgnagcccttgcaaatttgtcaagatttcttgcatctcctttctgtgtcaggtaaattctgcaggataattgaagctgcatggtagttaaatatgccttcagttggtgtttggcatagaatgcctggacaagggtcctaggggatcgccttttcaaattttcatggtggtgggttgggcttcagggagagtagatgggttttatttcacttaccagttccagggattgacagccatggtttggtgtgtttttctgggaaggcatttgaagggagccatttttgattaaatgtcgctgcaagtaggaaggtggagartattggcacatgtgcaagtatttgactctgcatgggttacacaatcattaaggggatt

SEQ ID NO: 314724 - DNA, 540 bp, Homo sapiens
aaacatataattacaaaatgtgtgccaagtgctcaaaaggaaaattgctggctttgaatagaatgtaacatgtgatggtgttttactaccaaaggagagacaagagggaaaaacttttcttcrtaaagaaagttcacaaaacttattatggtagtaggagccttgtactttacccgagaggccttttccttccattttcatgagctcaccttaaaacgtaattcaaagaatctgtaagatgtaacgtattttggtttttactttatgtgttgtaggttgtatctggaaactgaaggcaagctttgaggagacttcttgggccagttgatggacattaaacctggttgagagacagggacatgaacttgtgaccttaagttgtcagtagggaaaaaacttaaaaatagtgttaagttctgtttgcccttgaagacagggaagataatcaggttaatttaatgaatacataataggggtttgctgatctcagctgtcatagagcatttttatttgactaaatttcctgaacatgttgctggt

SEQ ID NO: 314725 - DNA, 542 bp, Homo sapiens
acaaatcctgtaagtgtcttattttattgagttaaacacttgaaagctatttattcatttaaatcagtattttgagtaagtgtttatatgagcccctaatatttgtcaggtatcattttaggtgctaggagtacatccctcatttctctgaacttaaagacatgagcaaataactaagcagtaaggggctgtaattgcagtatkaattgcatgtatgttctatttgtaccatttttacagaattgtatgtattttacaggtggtatttatgaaaattgaaaccatagaaataagagaatctcactgatacagagaacagggataaatagaacctcaaagagttagagttattattaggaccaattttaagttggaagatacttggcaacagtttgtcaaaaatgatggaaccgttttcttccttttcctagtttatgtggacttttgttctagcaaattttggtttgtgcatttgagggccaattactcatgaagcagaatatttgagtccatttgctttattcactaactggttgtcctac

SEQ ID NO: 314726 - DNA, 612 bp, Homo sapiens
gtgattagtttacaaatctaagcaggtccttgacagtttaatatttctctgaaaatctttagggccaggtttcacaacagcacttggttgaatattcattcatatgcactgttttcccattttcttaaaatgccagtagttccaggatttactatacttttatcagattcatatctcaagactaaacttgaattctaccaagtcatcaatgagatattatgagaaaaaaacaaatgaagtacatgctaattcttctcaaaagctaggtttataactgagtatttcagtgaaaaactcacttggcttctaaatttatctatactgctttgaccgagccactgagaaattacttctgatatataggcttgtgggaaatattttgtgtgttcatttgaaaatatctaaaaaggaataaaaatttcaagagcagattgacttaactaatttatratctcctaatttagcaaaaatgctaaagcaaaagcaattctatgaattacagtagcatgtttatgctgtgttctgatactgtagattttatctttttttcaactgaactttgaacatgctctaacacctctgctgtgaagagatgaactgagaaacaagcag

SEQ ID NO: 314727 - DNA, 612 bp, Homo sapiens
gtgattagtttacaaatctaagcaggtccttgacagtttaatatttctctgaaaatctttagggccaggtttcacaacagcacttggttgaatattcattcatatgcactgttttcccattttcttaaaatgccagtagttccaggatttactatacttttatcagattcatatctcaagactaaacttgaattctaccaagtcatcaatgagatattatgagaaaaaaacaaatgaagtacatgctaattcttctcaaaagctaggtttataactgagtatttcagtgaaaaactcacttggcttctaaatttatctatactgctttgaccgagccactgagaaattacttctgatatataggcttgtgggaaatattttgtgtgttcatttgaaaatatctaaaaaggaataaaaatttcaagagcagattgacttaactaatttatgatctcctaatttagcaaaaatgctaaagcaaaagcaattctatgaattacagtagcatgtttatgctgtgttctgatactgtagattttatctttttttcaactgaactttgaacatgctctaacacctctgctgtgaaragatgaactgagaaacaagcag

SEQ ID NO: 314728 - DNA, 623 bp, Homo sapiens
tgtgtccaggaatgtggaatactctgactgatccaacatacaattgcctstagaaattaataaaagttaatgaaatgaagaatcaatgactttattttgttttacagtcagtttccatttttacctctttaactatattataagcactttaaggacagaaattaaacattattagtctttgaaccctcagcacctagtataatacatgaactaatacaggcactaaataaatgtttgataattgaattaatgaatattctggaccatttgctcttcctctttctccaatgctcattagtcccatcccatcttcaatagtcccctccccagcctacaccttcttccacttccctgagaataaaagattaattgtaagtaatcaaccttttcatttgtaacatctcagaagttggtgattggttgaacacattttatgaaaaactagtagaatgttcaattttaggtaaattcataatttaagcacaaatttaagtacctaaatcacatgaaagttatacttagcttggaaacatttacaaatttcaagtttatttcaagcccttaagaacttactgctgcaaaatatgctgtaactgtaggttatgatctcagcagaaagcctg

SEQ ID NO: 314729 - DNA, 506 bp, Homo sapiens
gagaacaaactcccaaagaaaacccagaagcaccaggatcagatgagagagagataaatatgacatcttttcctggggttgacaaggaaagtagggggaaaccactgtccagattatagtttgggaggagtaaagctttctggagaaataaatttgtaactatttagtattaaaagaccatgttttgagtatgtgcataagaaaatatttattataaaatttcttgatgtcagaagcagactttttttttttttttttttttgacagagtcttgctctgtcacccagtctggagcacagtggcatgaatatggctaccttctgggatcaagcgaccctccagcctcaaccctgacacayctggctaatttttgtttttttctttaatagagacagagtctcaccatgtttcccaggctggtcttgaactcctgggctcaagtgatccacccaccttggcctccctcagtgctgggaatacaagcattagccaccatgcccagccca

SEQ ID NO: 314730 - DNA, 552 bp, Homo sapiens
gccagaaacagacatcttaaaatagcagtgaagtgaaaraatgcatgggacccacagaggaccacattctctgccacaagttggccaggccttggaaaaaagtaatccagtatggcctcgctaacagctgtcatcagtcctgtagcaaaaaagactgtagatcatcatcaggtaccactctctgcatattctttgtaaattgttatacataaatatatttaattatctgtagttttcattgcagagatagtttagtcattctaaacaggctattttgccttcttcataaagccacaaggtaaagagcccctctctccagacttctactttaggaaatactaccgcaagcacccaaagatgagtgtataaggatgtttattgcatccgtacacaacagaaatgcacatggtcattaaaaagaagaaagcaaataaatgtagagaatagtctaatttattctcctaaatgctcataaatgcatataacctttctgaaaaaattagagggagtggggcagggacttaacaccttcaccttcttacattctgaact

SEQ ID NO: 314731 - DNA, 588 bp, Homo sapiens
atttaaagaaatttaaataataagagaaaaaaatatttacctatgcagttaccagctctggaccttttatatagatctcaatttccaccttgtatcattatgttctgcttgaaagtctttctttcaatggtttgggcttttgtttggtttggtttgctttggtagtacaggtctttttatgattaatcctttcagtttttttaatatatgaaagcatatttatttcatctttattttcaaatacatgcaatccttacgctgcccagttcaaatataaatagatttcagttaccactgtttagctaaaaaattaccactctttagtaaaaacagtccgccaataacatggtttaaatttcagctatcatggtatatgaactatgagtaactgcataaaatacaaattttgctactagctcctcagaccactaatgagtaaatgacagtcagcaaagcatgtagttgtgackcctccttgtttcctagtgataaactcatgtaatgttgcataaaaatgaatacttccccatctctactaaaaacacaaagattagtcaggtgtggaggcatgcacctgtaaccccagct

SEQ ID NO: 314732 - DNA, 606 bp, Homo sapiens
ctaccttcattaccagcatgtaccagcagtttatcatttgatgaaatgttggagggaaatttacaaaccaataaacattttaaatttgcttcccaaacttttacaaatgacacatgccagattcaaatatgtgcacatttctgccacataatactatatgaggcagttactataagcctgacacttgggtgggcacgagttactatgggcccagacttctagaaacttacagcacctgaaccagaataaggaaacaatgaatccatttttaatgactaaacaaatgcatgaataaatgaataaatctatcaagattgaaagaccaagctgtgctcaaggtgatgaggggtcctaagagaaggcacttaactcaacacaggagaaatgatgtcaaaaagataaaaagaactcatagagacaggaggtagaataatggttgccaggggctagggaaatggggcaatggagagttattgtttaatagatacagagtttcaattttacaagatgaaagggttctgtggatgcatggtggcatcggtaacacagcaatgccrtagaactacacacataaaaatagttaagatggtagattttatgctatgt

SEQ ID NO: 314733 - DNA, 589 bp, Homo sapiens
ggagtggggtgactgattttggtgctttctcttttattgcctgtctgacgttaaaaatcctatcaaccgttcggaaactaatctaattcatttcgagaataatgttgtgaactctatttacagaatccaaagccataaagcttctaatgctacgtgaaacagcaccmcctactggcaatgttgtcacattacatcatcatatcctcagcactgaaatccatctctctcctgttgagaaactttgacaagtaacttcacaaacagaacctatttaaaatacttcaaatagaacaaatctcttactctgttttaccttcatggaaactattccttgataacaatttttgctaagaaaggaaaatatgtgatctccctttttctaggaccataaagttgtaaaaggcaagtttatttcaaacttaacatcaggtgggtccaaaccatgcacttcatgtctctgtgtttcagcagtacaattctttgtatagcaaatgtactttcttacaaaacaccaaaactagctttaaaaataattgcatatgattttttcactgtgaccatttattcattcccgaccacagcattcatt

SEQ ID NO: 314734 - DNA, 529 bp, Homo sapiens
atctattaccattaaaacataccctttctgtccaatcacgtttctacatggctgtccattcttcattcaacttaagcataaaaattaatagttttccctttatctttgggtctttatttctgaaggctcctgtgtcatgtgaaattttgatcaatcttttatgcttttctcttgttaaccagtcttttttttacaggagtatcagctgtgacccttatgatggattaggaagggcatcacatctatgcactgctatacgttcaagttactgtgtgctacaggcacatagtaagcaatcaattcatattttgagggtataggygtcacttagagtccacattgtgtatatgcgtattgttttcaatatatgagtattgctttaacatgtaaactcacatttcttgcttttccaaaaatataatttgtggatgtttagataaagagagtagttgctcatgactcttcaaataaagtttaatcacaatgttaataggctaatttactgttaagccaatgactaacacatgct

SEQ ID NO: 314735 - DNA, 512 bp, Homo sapiens
acagaactaatataatatatatatgaaggggagtttattaagtataaaattacacgatcacaaggtcccacaataggctgtctgtagcctraggagcaaggagagccagtgcgagtcccaaaactgaagaatttggagtctgatgatagagggtaggaagcatgcagcactggagaaagacgtaggctgagaggctaggcctgtctcatcccttcacgtttttctgcctactttatattcactggtgtctgattagatggtgcccatccgataaagggtgggtctgccttccccagcccactgactcaaacgttgatctcctttggcaacacccttacagacacacccaggatcaatattgcatccttcaatccaatcaagttgacgctcagtattaaccatcacactcagtctaggttgagctgaatgaatgaatgatacagacaaaattaccatcctttataactctctactaatattcctccttatatgaaaaatggctgggttttttt

SEQ ID NO: 314736 - DNA, 616 bp, Homo sapiens
agctatgctaattttcacaaccttaaaaaattctactaagagcaaatgtccttcattttccacagcaaaaagggagaaagtaagcaattaggtttagagcaatggagaagactatttaaatttttatctttgcccttgtaattwaaaaaactgccttcctttatatacagttatttactgcaactttattaatgtaaaagatattattttatcttaaatgttgaggtctattaaacatagaagactcaaaaatagatgacagcttcttttttcaagcacattaaacccttatctcaatttgatttttcaaaattgtaaggcacaaattatccagcacgtaacactcttgagtctcttttctggcctgtaaagtcaacagttatggtgctaaagtttaaccaatcctataaaacattactcaaaaagtgacctggtgttatgcctgaagtgcatctcctgcattaaaaagtactttcaatgcagccagaacagtgttattgaaagagagagaactaatagatacctggacgtggatgggggaaaaggagaggggaaagaaagtcaaatgggagagaaggccacaaaaatcccattttcaagcagttccctaaggaga

SEQ ID NO: 314737 - DNA, 560 bp, Homo sapiens
attatttccacctggcccttcccttgacatatggggattattacaattcaaggtgagatttgggtggagatacagccaaaccatatcagccacaatatcttaaaatatcccaaaatatttctactgtcataatttagaaacacaaatgatgataaaataacattttcatgagatgttttatacaaacacagctgttactgaagcatagctctgtatctaaattgtcattagtaaataacctttgaaaatgtccttgttaataatgtagactatgttttataaaatttgaaggacagggataagtgctgttcaaaawttgatttcaaattgtaaaatatttaggattttaatttaatatcaaattaatgtatttgaattgagcctatattaaaagatgtacagtcatattccattttgttgtgtttcacagttattacactttacaaattgaaggtttgtagtagtcctgcatcaagtaaatctattggtgccatttttccaacacatgtgctttctttgtgtctctgtgtcacattttggtaattctccaaatattgcaa

SEQ ID NO: 314738 - DNA, 635 bp, Homo sapiens
tttcaactttcaagtcttgttatataagaaatacatttcataatgctagaagttgtatagatagtgattcctctaattaatgtggtcatagttaattaaagctgtctagaaaaaatgcaccattccagaagccattaagaacacttttgattcatggggcaatgtccaaatatcaacattaacaggagtgtggaagaaattgatcccaascttcatgaatgactttgaggggttccagacctcagtggaggaatcaactgcagaggtggtagaaatagcaagagaactagaattagaagcagagcctgaaaatgtgactgaattgctgcaatctcatgaatggatgaggagctgcttcttgtggctgaccaaaggaagtggtttcttgagatggaatctacttctggtaaagatgctgtgaacattgttgaaataataaaaaaaggatttagaacattacataaacttatttgataaagctgcagcagggattgagagcattgacttcaatttgaaaaaatattctactgtggataacatattaccacacagcaatgcatgctacacagaagcctttcatgaaaggaggactcaattgatgtggcaaacttcactgtcttattttaagaaattgc

SEQ ID NO: 314739 - DNA, 687 bp, Homo sapiens
tgcttcttgtggctgaccaaaggaagtggtttcttgagatggaatctacttctggtaaagatgctgtgaacattgttgaaataataaaaaaaggatttagaacattacataaacttatttgataaagctgcagcagggattgagagcaytgacttcaatttgaaaaaatattctactgtggataacatattaccacacagcaatgcatgctacacagaagcctttcatgaaaggaggactcaattgatgtggcaaacttcactgtcttattttaagaaattgccccagatacaccagccttcagtaaccagaaccttaatcagtcagcagccatcaatattgaggtgagattctctaccagtaaagggattccagctctctgtaggctcagatggtcattagcctttttcagcaataaaatagttttaaattaagctatgtacatgtttttaggcataatgctaatgcacccttatggactacagtatgtagtaagcatacatttatatgcactgagaaaccaaaattttgtgtgacttgcttcattgcaatattcactttatttcaatggtctatacttgaacctgcaatatctatgaggtatgcctttaaaagacagcttgacagactgtaaaattcgtgataaaattcatgtaaggaatgcattatgtattgaattttcttgga

SEQ ID NO: 314740 - DNA, 566 bp, Homo sapiens
ccaattttaataatatattctctgccatcatcccactcagtcacttagtatcacttgttacattttagcactaccacaatttgaaaacatttatttatattccttctayttccagcatacattcttggcttctttactacatcataggctgactcttttcagtttttcatttctaactccgctcttgccctggcatccatttttaaagaatgacctactgctttatccagggtgctctttaaaaataaatctaaaatttttatttaaaactgccatataggaaatcacatcttgtcccacgacgattaagcagaatcagtatattgatgtctcccaaatttacaacacactataccagccttaaatagctaaatatattatatatgcacatgatcccagactgacctctgagagcacttgtaagactttagtgtcttataagaacctcagaaccaactaaactttgattttatagccaaatactattctttattaaaattcttcattacatttttttcattatgcctaagcaggactgaaacttacatcctgtttttcatgagacc

SEQ ID NO: 314741 - DNA, 566 bp, Homo sapiens
ccaattttaataatatattctctgccatcatcccactcagtcacttagtatcacttgttacattttagcactaccacaatttgaaaacatttatttatattccttctatttccagcatacattcttggcttctttactacatcataggctgactcttttcagtttttcatttctaactccgctcttgccctggcatcyatttttaaagaatgacctactgctttatccagggtgctctttaaaaataaatctaaaatttttatttaaaactgccatataggaaatcacatcttgtcccacgacgattaagcagaatcagtatattgatgtctcccaaatttacaacacactataccagccttaaatagctaaatatattatatatgcacatgatcccagactgacctctgagagcacttgtaagactttagtgtcttataagaacctcagaaccaactaaactttgattttatagccaaatactattctttattaaaattcttcattacatttttttcattatgcctaagcaggactgaaacttacatcctgtttttcatgagacc

SEQ ID NO: 314742 - DNA, 566 bp, Homo sapiens
ccaattttaataatatattctctgccatcatcccactcagtcacttagtatcacttgttacattttagcactaccacaatttgaaaacatttatttatattccttctatttccagcatacattcttggcttctttactacatcataggctgactcttttcagtttttcatttctaactccgctcttgccctggcatccatttttaaagaatgacctactgctttatccagggtgctctttaaaaataaatctaaaatttttatttaaaactgccatataggaaatcacatcttgtcccacgacgattaagcagaatcagtatattgatgtctcccaaatttacaacacrctataccagccttaaatagctaaatatattatatatgcacatgatcccagactgacctctgagagcacttgtaagactttagtgtcttataagaacctcagaaccaactaaactttgattttatagccaaatactattctttattaaaattcttcattacatttttttcattatgcctaagcaggactgaaacttacatcctgtttttcatgagacc

SEQ ID NO: 314743 - DNA, 633 bp, Homo sapiens
tagtatttctttttttgcaaaattatttgagacaaaaatttaaaaaaatgcagaacaaacattcctattcccattcaccaggatttcaacttttaaattttttacaaatttaaaaattaaaaaatctatctttgtcacttactagctttacaatttttggctcatacaaactctgtgaccttggcaagttatacattatttcatcttttatatgatgggaattgtgctactattatagatgtgctgtgatgattagcaaagctaaccatttaaagtattcaaacaattcctggtccataataagtagtactcaatagatactattgattatcataattaacattgtacagttgatatgagaacaacatgggtttgaactgttcatttcctagaatgtggtttttttttttcactaaatcaattgaaacaacttttaaagattgtgacaatttgaaaaactacatagcccaggaatataaaaaaacaagaaaaatttggtatgtcatgaatatatgtagatactagtctttttatgtgttgatcaactgtttatgccatccttaaggtgtctggrcaaaagtagactaaaaacagttaagttttggggaagtcaaaggttaagcatgtgtgtgg

SEQ ID NO: 314744 - DNA, 575 bp, Homo sapiens
tatctgtcctcccatgcttgttgcagtactgttcacagtagccaggatttggaagcaacgtaagtgtccatcaacagatgaacagatgaagacaatttgctacacacaaacaatggcgtactattgagccataaaaaagaatgagatcctgtcatttccaacaacatagatggaactggagatcattaagtgaaataagccgggcacagaaagacaaacattgcgttctctcatttatatgtgggatctaaaaatcaagacaattgaaggcatggacatagagtgtagaaggatggttatcagaggctgggaagggcagtgggacaggggatgtttgcggtggaaatgagggtgattaayggatataaaatgtaactagaaagaataaataggaccttttatttgataacccaacaggttactctagcaataataatttaattgtatatttttcaatggctaaacgagtataattggattgatgtaacacaaaggattaatgcttgaggggatgataacccattctctatgatgtgattattattctgcattgcatacctgcatgaaaacatctt

SEQ ID NO: 314745 - DNA, 555 bp, Homo sapiens
gtaaaccaaaaggaaaaaaattaacaggagaaaatatgtcagaaaattaatctgtttccatcatctcaggtgttgtagacctcatttcaacatctgcttggtataaggatcctggtttagcttttctcttctaaagttcatwtgcttctggaagattccagaaacatattctggaaggttcctaagaatcctcatcttaatatttcatgaaagaatggaatacaatgatctgtagaggagagcaaatgccttttgatgaagaaacatgaatccagggatcaacctcttggggttttattgtttgtgatagtttttaagagttcctaatgaggtgttttccactgagacttagtggcactctgggatgtctctatcagaagactaaatctttttatttcaggctatgcaaaatctacttaagaagatattttgaatgtcttgtaaatggtttttctacctggtgattataaatctgtataaagtgtatgaatatttcacagtatttagccataccactttgcattagggcagacaaatatttagattgaaatcccc

SEQ ID NO: 314746 - DNA, 600 bp, Homo sapiens
taatgattgaattattaattactctcatgattcagttttaaaaacatctaatttgagatgcagttgttattgatcattttcttctaggctatgcctcaaccttgcacaaatttctttaatagagctgcccatgttatttgtaattgagtttttacatgtctgcctctctttaatttaactgaactatttaagaacaaataaaacattattaatcatgactcatatcattagtaattttgtagtgcatgaaatattcttaaatatattaatctataaatgctaatgacttttattaattgaattgtttataatttattttataagctatttgtttcgctcaaaattatttttatataaatttcaaattgaaaagttacaaatactttaaattccagagaatattttaaaattgaaaagcctttgtgtatctctatatagtggccttatttttctttcttatatctagcaaaaggataggtttgtgcttgaaactgtttggttaggtaaggtatattttgatctcaactgtgaatacaaatagttctttttcagtctarctctctttaaaaatcaatattcataaacctaaattcaaatata

SEQ ID NO: 314747 - DNA, 588 bp, Homo sapiens
aagacgatgagtaatggtagcagttaaggaaagctattagttcaaattgaatccctcacgggtataacaagttacattgtatactccaaaaatatacattcaartcctaaactctggtactggtgtatgccttgtttggaaatagggtctatgcagttgtaattaagttaaggaccccaggttaagatgattctgcatttcgagttagccttggtccaatggctggtatataaaaaagagaagagagggagattataggcacaagacagaaggccgtgtgaagctggaggcagagactggagttaacgctgccataaaccaagaaatgctggaagctaccagcagctggaagaggccaggattctcccctagagcctttggaaggaacatggctatgccaccaccttcgtttcaaatgtctgggctccagaagtctgagagaataagtttctatagtttttggccactgagtttgtgttaatttgttctggaagaccaagacaaccaatacaatggtttgaaataggatggtatttgtctaagaggtttttctctactcgtcttttggtagatgtgaggaagaaaact

SEQ ID NO: 314748 - DNA, 597 bp, Homo sapiens
tcaggatttacttctactttgagttgttttatgtatttcatttctagcaagcttatcattttgtaattctatttttatacatctttaraagtgttgtgtagctttcaaataaatatccaaatagatttataaaagaagccgatggataagttggaaacctagatatttattgataagaatgggagaaattaggaagcttgaaaaataaataaaacatttggaatgcatttatttctacaagtagttgtgaagttttaaaaaaaatttactgtttttcatttaagtttgcaaagtaagtattgcaactaaagaatagtttgaggacaactggtgatcacacatacagcaagcaacaaaaacaatgatgaaaggattagagatagtaaaacaaaatggaaagacaaacccatcatcatgatggcatggcaactatgttgaagattttgacctttagatacagtccatgtaagtcaccttcactttatgttggattgtaataccttgctggttctacttaaggagagaatcatggaaatgtgtcaggtcacacacacaaattcagttgtataaaatgctaccctgagtagggatataaaa

SEQ ID NO: 314749 - DNA, 400 bp, Homo sapiens
acgtttatctggggtgagcaaaagttaactaaatgttagacatggtgctataggagatcagaattgaggcatttttgctaatccaagattcagtttctaatttcattttatttcagaacagttctttacccatccatgagagtaagatatacttactcctctgagcttccatgcaatcctgtatattatattccaaatattatgtattttctaccttattaaaatgtaaagctgtgaggagagttttagttcttcagccaaatagtcccaatatatgaaattgatcagaccatccatayagattatggtattctattgcctgaagtagtaaatatttatttctgagggaaacctgtgataccccttttctatgggcatcagtctaccctttctacaatcc

SEQ ID NO: 314750 - DNA, 610 bp, Homo sapiens
aaatgtaaagctgtgaggagagttttagttcttcagccaaatagtcccaatatatgaaattgatcagaccatccatatagattatggtattctattgcctgaagtagtaaatatttatttctgagggaaacctgtgataccccttttctatgggcatcagtctaccctttctacaatcccttggaatttctttgcattttcaactgccatttccaatcagttttatctgcctggtcttcattaacacaaatagaatctattataatagtttttaagtcattttccctgcttctagtcttttcttcctcaatttctgcttaccttagaagcatagatttcccaaagttctgttagtctcaaattttttctagtaactacagaagaattatcctgttatagcctggtcttaaagacctacatttgcttgaagaaatctgcttcatcttattgctctattattgccttcgcaattcatttctgagtaatgaacctcctgttaggaaggacactatcactcgttttactctctgcrtctaagaatacttcccctgtatccgattcatgaccattctttaattcaatgcactttaatttagtgcactttgtatgt

SEQ ID NO: 314751 - DNA, 467 bp, Homo sapiens
aatgaacctcctgttaggaaggacactatcactcgttttactctctgcatctaagaatacttcccctgtatccgattcatgaccattctttaattcaatgcactttaatttagtgcactttgtatgtcactcatgaatcatttcgtacgtccttayaactaggatttctcaacctcagccataatgctattttgagcaggataattctatggtaggggaaagaggactatcctgcgcattgtgggctgtttaatagcatttctagcctccacccactagatgccagcagctcctccacacccaaagtgcgacaactgaagggaatgccactttggcataaggattattttgagctgaaggtaattaaaaaacaacagcaattgagaaaccacagtaagaactatctgccttcattctatctgatgaaaattaaagcacaaatttcctttttataaagggatactttt

SEQ ID NO: 314752 - DNA, 467 bp, Homo sapiens
aatgaacctcctgttaggaaggacactatcactcgttttactctctgcatctaagaatacttcccctgtatccgattcatgaccattctttaattcaatgcactttaatttagtgcactttgtatgtcactcatgaatcatttcgtacgtccttacaactaggatttctcaacctcagccataatgctattttgagcmggataattctatggtaggggaaagaggactatcctgcgcattgtgggctgtttaatagcatttctagcctccacccactagatgccagcagctcctccacacccaaagtgcgacaactgaagggaatgccactttggcataaggattattttgagctgaaggtaattaaaaaacaacagcaattgagaaaccacagtaagaactatctgccttcattctatctgatgaaaattaaagcacaaatttcctttttataaagggatactttt

SEQ ID NO: 314753 - DNA, 467 bp, Homo sapiens
aatgaacctcctgttaggaaggacactatcactcgttttactctctgcatctaagaatacttcccctgtatccgattcatgaccattctttaattcaatgcactttaatttagtgcactttgtatgtcactcatgaatcatttcgtacgtccttacaactaggatttctcaacctcagccataatgctattttgagcaggataattctatggtaggggaaagaggactatcctgcgcattgtgggctgtttaatagcatttctagcctccacccactagatgccagcagctcctccacacccaaagtgcgacaactgaagggaatgccactttggcataaggattattttgagctgaaggtaattaaaaaacaacagcaattgagaaaccacagtaagaactatctgccttcattctawctgatgaaaattaaagcacaaatttcctttttataaagggatactttt

SEQ ID NO: 314754 - DNA, 586 bp, Homo sapiens
tgaatatgaatgtaactatgaggtttcttatggaaatagccttgattaagtcaaaaactgagtacttccagaatttatcatccaggtagaagatgaaaagtatcaagagaaagagaaggaccaagcagaaacatgtgggaagaaaatcaagggcatgtggatagatagtgcttcaaaaaggatgatgcagttaacatatttggatgattctgaaatttcaagtagctggaattacttgaatattttcagtatttttgaagactgaaatattgraaaatatttactagcagtaatgacatgaaagtcataagtagccttagcaaaaatcatttttggaaaatgtctgtagagactggaatactggcatccattaaaaagtaagaaatgaatggaagataggcacttatatatagtgagtagggactactctatcaaaaagattgtctaaaaataagaggagagagtgtaatagctggaggggaagatgaagtagagtcggtgtagttgattttattatttttgaagatatgtggttcaatttttcaaaagagagtacaacaaatttgattaaatgttgaagggaaag

SEQ ID NO: 314755 - DNA, 586 bp, Homo sapiens
tgaatatgaatgtaactatgaggtttcttatggaaatagccttgattaagtcaaaaactgagtacttccagaatttatcatccaggtagaagatgaaaagtatcaagagaaagagaaggaccaagcagaaacatgtgggaagaaaatcaagggcatgtggatagatagtgcttcaaaaaggatgatgcagttaacatatttggatgattctgaaatttcaagtagctggaattacttgaatattttcagtatttttgaagactgaaatattggaaaatatttactagcagtaatgacatgaaagtcataagtagccttagcaaaaatcatttttggaaaatgkctgtagagactggaatactggcatccattaaaaagtaagaaatgaatggaagataggcacttatatatagtgagtagggactactctatcaaaaagattgtctaaaaataagaggagagagtgtaatagctggaggggaagatgaagtagagtcggtgtagttgattttattatttttgaagatatgtggttcaatttttcaaaagagagtacaacaaatttgattaaatgttgaagggaaag

SEQ ID NO: 314756 - DNA, 542 bp, Homo sapiens
gtttttccaaaatatggttttctggctttatatttatagagatgtcctgtctaaaatagattgaaaaagaggactaaaggatattgtgattccaataatgatccatagcctcacattttgaacttgattttattccatgtattctatatttctttggctttggtaatagctctcttttcttcttatttattcccttctcttgctgttgaaacccttctggggttccccattaattacagaatgatyctcaggctttagtgttcataaaattccatgttgggacaatgtacatttataaagaataccacagtgtgattttgattccacttttgagaaacattaataagataaatctgcttgggaaacatgtcccccttttgtaatgtgtccctttgatgcctcatctcatctcgtagccctccttgtgcgcctattctggtcataacagactctgcctttccctcaggaaacgtgttctcccacaatcctcatttttgtacatagcattcccattcagattcaattaataaactgattgaatt

SEQ ID NO: 314757 - DNA, 506 bp, Homo sapiens
actgacggagagctcttaggagaagaggaatgagagaccctgatagggaaggagaagaaaattgaagatayttacagaaaatatttatgctcggcagtgtgtattgcaccacatcccccaaaaaaaatttggcggcaccaagacaaggggactatcctttataatccccatgttggtcactctggctgttgactgtcaaggagtgcatcttgggtgggaggggattttctttagactaaaggcaattctctgcagcagcggggaggtgggtgtgcccacttggctgggcaaggtactaatagcacccattgttggggacatatgcattcctgccatctcagaagataatgagtgaatattaacaagaacttatcctaaataggtataaacaaatgtgggtatttggggcaatatatgtgggagttaaagattagtctgcctgaaatcaaggtcaatggaggtctgaattataattagttttttgtttgtttgattctctgttttgg

SEQ ID NO: 314758 - DNA, 506 bp, Homo sapiens
actgacggagagctcttaggagaagaggaatgagagaccctgatagggaaggagaagaaaattgaagatacttacagaaaatwtttatgctcggcagtgtgtattgcaccacatcccccaaaaaaaatttggcggcaccaagacaaggggactatcctttataatccccatgttggtcactctggctgttgactgtcaaggagtgcatcttgggtgggaggggattttctttagactaaaggcaattctctgcagcagcggggaggtgggtgtgcccacttggctgggcaaggtactaatagcacccattgttggggacatatgcattcctgccatctcagaagataatgagtgaatattaacaagaacttatcctaaataggtataaacaaatgtgggtatttggggcaatatatgtgggagttaaagattagtctgcctgaaatcaaggtcaatggaggtctgaattataattagttttttgtttgtttgattctctgttttgg

SEQ ID NO: 314759 - DNA, 618 bp, Homo sapiens
ttaaaaatgtgatattactgcactcatctaatttttggcagcttatttgtcaggttctgtgtttgctgtttgcatacattttattgttttcattgaataagagaaagtttgactggtgtagtggctctattttatccttatttgtattccctgtagtgatgagcacatttcattatatgtaatagacctttagtgaatacatgttgaatggagatgtatagttttaaaatgagtgtgattccttttcctaaaatcaggcattctctgttattcacaatgattgtcatttgtcacttgttaacatatgtctctgttcaaaaattttttcccaagtttattagactaaccataatttgaagaaaacataatatatattaaaataaattttacwagctttagttttcgtaatgtttttcctcttattttagttcatggatgctaatttgaatagctttgaatgtgaatttccaagttgcttaattgcgctggaaataatacagatactagtaggattatatggtctttgaaataccaaaatatttacataaaaggcaaagcagaatttatcataacaaatctttattctgagttacagcctttcttgtataaaaatataaa

SEQ ID NO: 314760 - DNA, 618 bp, Homo sapiens
ttaaaaatgtgatattactgcactcatctaatttttggcagcttatttgtcaggttctgtgtttgctgtttgcatacattttattgttttcattgaataagagaaagtttgactggtgtagtggctctattttatccttatttgtattccctgtagtgatgagcacatttcattatatgtaatagacctttagtgaatacatgttgaatggagatgtatagttttaaaatgagtgtgattccttttcctaaaatcaggcattctctgttattcacaatgattgtcatttgtcacttgttaacatatgtctctgttcaaaaattttttcccaagtttattagactaaccataatttgaagaaaacataatatatattaaaataaattttactagctttagttttcrtaatgtttttcctcttattttagttcatggatgctaatttgaatagctttgaatgtgaatttccaagttgcttaattgcgctggaaataatacagatactagtaggattatatggtctttgaaataccaaaatatttacataaaaggcaaagcagaatttatcataacaaatctttattctgagttacagcctttcttgtataaaaatataaa

SEQ ID NO: 314761 - DNA, 635 bp, Homo sapiens
gatctataatacatttaacatacaaaatatatgttaatcgactgtttgtgtcatcagtaaagcttccggtcaatagtaggctgttagtagttaagttgtggggagtcaaaagttgtaagtagatttttggctgcacggaggggttagaaccccaacccccacgttgttcaaggctcaactgcatactatttcttgtttctctattctcttccattgaagaatatgtctgtctttctaccccactgttttgattactaggtcggcagtaagttgacatcagatagtgtaagcctccaaccttcttcttttaaaakaaatgttttactgttataagtattttgctttttaatatacattttagagcaagctaggcagttctttcaaagaaaaaaaatctgatgggattttgattgggattacattaaatatatagatacattttggtcaaattttccgtattaacaatagttctattatctatgaatgtggtataaatctcaatttctttaagtcttctttaatttgcctcagtggtattttatacttttctatgaacaagtcttgtgcacaatatatcaaatcctatttctaagtatttgctgatgttattgtaaaggttttgaaaaactgatacc

SEQ ID NO: 314762 - DNA, 635 bp, Homo sapiens
gatctataatacatttaacatacaaaatatatgttaatcgactgtttgtgtcatcagtaaagcttccggtcaatagtaggctgttagtagttaagttgtggggagtcaaaagttgtaagtagatttttggctgcacggaggggttagaaccccaacccccacgttgttcaaggctcaactgcatactatttcttgtttctctattctcttccattgaagaatatgtctgtctttctaccccactgttttgattactaggtcggcagtaagttgacatcagatagtgtaagcctccaaccttcttcttttaaaataaatgttttactgttataagtattttgctttttaatatacattttagagcaagctagrcagttctttcaaagaaaaaaaatctgatgggattttgattgggattacattaaatatatagatacattttggtcaaattttccgtattaacaatagttctattatctatgaatgtggtataaatctcaatttctttaagtcttctttaatttgcctcagtggtattttatacttttctatgaacaagtcttgtgcacaatatatcaaatcctatttctaagtatttgctgatgttattgtaaaggttttgaaaaactgatacc

SEQ ID NO: 314763 - DNA, 616 bp, Homo sapiens
aagctgtggcaacttaggttgcaggagtaggggygctcaaggtggactcctactctgagggtatgaagcagcacagatttctgactaactctccaaacaagattcagggcctgtgaggacttggggaatctcctgtagcagagactactgacagttttggcaggagtggggactgctgggcaagtgagctccagctcagctgttccctgtaagaagaagtcctcctgactctgcactgaccttggtgtggcagatgcaaaatgccttgctcccctctctatggagaatcttctctctctacctctcattcctggaaatgaaactgtgtcaaaagaaatatattctcttaagtaaagcacataactactactcagtaaatatttgatgaatcatttagaagtttattgacacagtcacttagtgataaccccacataccactttaagacttaacagaaaacaattacacaagagaaaaattctgtcggcaatttttattggctaatattaaagacttcaagccaattgcttgtgctagaagattcacaaggttaaccagttacagtaatgattaaggtttgttaacaacaataacaaagataacaagctgactggat

SEQ ID NO: 314764 - DNA, 616 bp, Homo sapiens
aagctgtggcaacttaggttgcaggagtaggggcgctcaaggtggactcctactctgagggtatgaagcagcacagatttctgactaactctccaaacaagattcagggcctgtgaggacttggggaatctcctgtagcagagactactgacagttttggcaggagtggggactgctgggcaagtgagctccagctcagctgttccctgtaagaagaagtcctcctgactctgcactgaccttggtgtggcagatgcaaaatgccttgctcccctctctatggagaatcttctctctctacctctmattcctggaaatgaaactgtgtcaaaagaaatatattctcttaagtaaagcacataactactactcagtaaatatttgatgaatcatttagaagtttattgacacagtcacttagtgataaccccacataccactttaagacttaacagaaaacaattacacaagagaaaaattctgtcggcaatttttattggctaatattaaagacttcaagccaattgcttgtgctagaagattcacaaggttaaccagttacagtaatgattaaggtttgttaacaacaataacaaagataacaagctgactggat

SEQ ID NO: 314765 - DNA, 543 bp, Homo sapiens
tatatttaaaatcacatagcagaataaaatcagaatgtgaattagaagaccgacagttagctatggctttttattacctttgcaagtcacttgacctcccacgtcattagcctctttttgcrtaaagtatgaaagtctgactaactgattttagttccttatagctttaaactttgatttttttttctctccatggttttaagatttattatatatgtcatggtgagataaatcatttttcagtcatcatatagccacaggaatgtgtctatgtgtaatattagctttctataaaaatcattatattttcctcttagggcaaaatgcttactttagtcatttatggtatgagcatgattataaagaaggattagcatttctatattttgtaaagcatcaatcatcatcatcatgctatgaattttgtcttctgattgctaagtctggaagttcatattgagttttcttctgcgtctctcttcaagaccatgaatgacaggtcagtttcactgagagtggtgtgcaatctttcctgcgttttag

SEQ ID NO: 314766 - DNA, 543 bp, Homo sapiens
tatatttaaaatcacatagcagaataaaatcagaatgtgaattagaagaccgacagttagctatggctttttattacctttgcaagtcacttgacctcccacgtcattagcctctttttgcgtaaagtatgaaagtctgactaactgattttagttccttatagctttaaactttgatttttttttctctccatggttttaagatttattatatatgtcatggtgagataaatcatttttcagtcatcatatagccacaggaakgtgtctatgtgtaatattagctttctataaaaatcattatattttcctcttagggcaaaatgcttactttagtcatttatggtatgagcatgattataaagaaggattagcatttctatattttgtaaagcatcaatcatcatcatcatgctatgaattttgtcttctgattgctaagtctggaagttcatattgagttttcttctgcgtctctcttcaagaccatgaatgacaggtcagtttcactgagagtggtgtgcaatctttcctgcgttttag

SEQ ID NO: 314767 - DNA, 584 bp, Homo sapiens
cctgttcgcagtgtataaatatccagaaaaattgaagttaggtaatgaagagttaaactttcaccatacttgtcatcttttaaattatctccaagtaaataaaagaaaaaaaaaatccaataacacatagckaagttattcctaccaattctattatttctgttaatttagtaactagtaaacctcgttttccactctgtgaagtgacaatccccctggccatgagctcttttatttcaggactctaatttgaaacatttcaatcacctctgaaagttgcaaaatgatccacatgctgatctcccagaagctatgtcataatgcagatgtgctacactttgcaagtagaaacagaatgttaaaagatcagattacctttcttcttggaaacctacattaacacctaagatgttacttaggttagcttttattttgctggaggctctcaggggtgccgctgctggttggcaacgccattaagtaagttcaagttgggaatggaaggttaacaacagtctctgtaatagaaatgtagacaaaagataatctaagtttctagctttcaagggattcatggcggtagc

SEQ ID NO: 314768 - DNA, 584 bp, Homo sapiens
cctgttcgcagtgtataaatatccagaaaaattgaagttaggtaatgaagagttaaactttcaccatacttgtcatcttttaaattatctccaagtaaataaaagaaaaaaaaaatccaataacacatagcgaagttattcctaccaattctattatttctgttaatttagtaactagtaaacctcgttttccactctgtgaagtgacaatccccctggccatgagctcttttatttcaggactctaatttgaaacatttcaatcacctctgaaagttgcaaaatgatccacatgctgatctcccagaagctatgtcataatgcagatgtgctacactttgcaagtagaaacagaatgttaaaagatcagattacctttcttcttggaaacctacattaayacctaagatgttacttaggttagcttttattttgctggaggctctcaggggtgccgctgctggttggcaacgccattaagtaagttcaagttgggaatggaaggttaacaacagtctctgtaatagaaatgtagacaaaagataatctaagtttctagctttcaagggattcatggcggtagc

SEQ ID NO: 314769 - DNA, 590 bp, Homo sapiens
aataattgtttcagtttaagctagcaatttataagattcttgtagcaaagacccggtatttagaaaaaaaatcactggtttgcctctagctgatcagtttgacatcaatgtgggaaatattatattaaggaaacaaatttttttttctgcattaatgtctaacaaaaggggtaatggaaaggaaatttcaaagatcaaatagttcaaaaatgcctttaacagcaaaagtacttttttcaatatctttaagtgctttgtgcttaacaagaaatttttcaaatttcaaaatttaagatgtcaaataaacttgtaaaaagtttagaaaactcactaatatttagaaaactataaaatataaatttctcttttaaaatttaaacagattttatgtctcaacatttttaataaatttactttttatattctaaaaactgatccattttcatatttaatgtggartaaaatgaattaaagcatgttgatatgacatgaacccatttgaaagaaaaacaaaaatactaaaatacgtaaagctataccaagggaattaaagatgaataatgcggtttgcttaaaagagttcaccgttt

SEQ ID NO: 314770 - DNA, 590 bp, Homo sapiens
aataattgtttcagtttaagctagcaatttataagattcttgtagcaaagacccggtatttagaaaaaaaatcactggtttgcctctagctgatcagtttgacatcaatgtgggaaatattatattaaggaaacaaatttttttttctgcattaatgtctaacaaaaggggtaatggaaaggaaatttcaaagatcaaatagttcaaaaatgcctttaacagcaaaagtacttttttcaatatctttaagtgctttgtgcttaacaagaaatttttcaaatttcaaaatttaagatgtcaaataaacttgtaaaaagtttagaaaactcactaatatttagaaaactataaaatataaatttctcttttaaaatttaaacagattttatgtctcaacatttttaataaatttactttttatattctaaaaactgatccattttcatatttaatgtggagtaaaatgaattaaagcatgttgatatgacatgaacccatttgaaagaaaaacaaaaatamtaaaatacgtaaagctataccaagggaattaaagatgaataatgcggtttgcttaaaagagttcaccgttt

SEQ ID NO: 314771 - DNA, 546 bp, Homo sapiens
cccagggcagtagaacccctaaggaaactttgcttcactttctgtgtcatttgttcattggaagatttctgccatcratgtctatggttactatagttgttgcaacctttaattctgttcaaactactagcaatatcttcgtttttcttttttgacttttttttttgcccgtgtcttctattgtggtttataagcttttgtgtaaaaagcctacttgttaaaaaattgacttcaaatacataaaaacttactttccctctcttatgtgatagcaaaccacaacacataaggtatactctttaaaatttggatgagacttccttcctcccttgccttccctccctccctcactttctccctccttctttcccatcctgcttttctcttcctttcccttcctctttttctcctctgtttccttttcctcttccttctctctctctcattctctctctcttctggtttatgttgtgtattggaggctgttctaattacgtcaaagccactgtgatgtctttggggtgtgggtgtgttagtggcagtttt

SEQ ID NO: 314772 - DNA, 454 bp, Homo sapiens
gaggctagtgtgaacaagtcggagattcaaaaacttcacagaaacccagtcatagggaggttctcctacctttgtgaattttaccgtcaggaactctaccaggtgtcacagtcaccccttacgtttctggggaaggggaaaagtaaccgttttgaaatacaacagagcattctcttctttttagcaaaacctgctctcaggagaaaatatttyacaagagcttaacctgctgggagtatgttagagcccagtgcatctagggagaaggaaatacccaactctagtagtttctttcacccaggacattatgcctgactttcaacaaaaaattattaaaaggcagaaacaaagtttaaaggcatgggtggatcacctgagctcggtagttcgagaccagcctgaccaccaaggtgaaaccctatctctaataaaaatacaaaaattatctgggcgt

SEQ ID NO: 314773 - DNA, 633 bp, Homo sapiens
tcaacacaatcccaataaaaatatcaaccagttatcttgcagatatcatcagattctttctagagtttatatggtgcatgaaaagtcacagaaaagccaactcaatattgaagtataagaagaaagttgaagaactaatgccacctgacttcaagagttgctataagctataataattaagacagtgtggttttggcaaatgaatagacaaatagataaatgaaacagaatagacagcccagaaactgatccatataagcaactgatctttgagaarggtgcaacagcaagacgaaggagaaaagatagtctttttaacaaatggttctggaaccatttagcacatacatgacaacacacaaatataggcccagactttacatctctgacaaaaattaactcaaaatggatcacaatctaaatgtaaaatgaacaactataaacttccttaaaattaacataggaaaaaatctagttgactttgggtatggtggtaactttttagatacaacaccaaagggatgatttatgaaagaaataattagctgtatttcattgaaatttaaaacttcactcctgtaaacaaacaaacaaacaagaaactgtcaagaggatgagaagacaagccacaga

SEQ ID NO: 314774 - DNA, 493 bp, Homo sapiens
taatgtgcaagaggaataattacttttcacataagctctttttaaattggctttgatggaactctgttccatagaaggaatctcaggtaagacttctttagtgtcgagctctaccatggctttgtaacctcaaatgcctatgaattgagtaaatacctcttctcttgggttcccaarataacttggggctcctggacagtgacattctttacttgccacaggtcagaaaccctgtacagggactgttgtagacaatgtctgaggccagttcctcaagaggcttttattggctttataagtgaagtttgattccttaaaggaaaacacatcattccaatcaaagccttggtaaaataaccagtttccccaattgtttcctgtttcaaaagaaaacagattcttattgcacttatgcaaataactttattgccataaattaagaatactgacaaatagtttccaaatcctggataaatcagatagagagaaacac

SEQ ID NO: 314775 - DNA, 642 bp, Homo sapiens
gttaatgaattatggttaatgatgacatcacactttctcccaagaacaatgaggctactggttttatattcgtgtaaataagrgactccaattagtgattttccccaaatacaaggaaatctgtcaaagatacattgaacttctacctctagacatgtaaaaccatagtgacattgaaatacagacagtctagctttataaagaccaagactcagtatttaccaggcacccagtcccaatacaattagatatgccagttattgacagcaaataccctgctgtaatctctgaggagaaactgaaagcttttgagggaagtgagtgtcaaagtatctggaaacaatcattgtcgtaatccctttgaaagatgaaaatgcattacaggagaacaaatggaactaacagtttaaatatctattcaaacaaaataacatagtttacccttgccgtttcttctgcttggaattttcttcccctatgaaatctttgtggttcactctcgctttctctagatcttcgctccaatgaccactcagtgagaccttctctaggcacctctatcagagactgaatcctgcttccctccacactccatccctctaccttattctatttttctcattagcactcatcatcatcctg

SEQ ID NO: 314776 - DNA, 642 bp, Homo sapiens
gttaatgaattatggttaatgatgacatcacactttctcccaagaacaatgaggctactggttttatattcgtgtaaataagagactccaattagtgattttccccaaatacaaggaaatctgtcaaagatacattgaacttctacctctagacatgtaaaaccatagtgacattgaaatacagacagtctagctttataaagaccaagactcagtatttaccaggcacccagtcccaatacaattagatatgccagttattgacagcaaataccctgctgtaatctctgaggagaaactgaaagcttttgagggaagtgagtgtcaaagtatctggaaacaatcattgtcgtaatccctttgaaagatgaaaatgcattacaggagaacaaatggaactaacagtttaaatatctattcaaacaaaataacatagtttacccttgccgtttcttctgcttggaattttcttcccctatgaaatctttgtggttcactctygctttctctagatcttcgctccaatgaccactcagtgagaccttctctaggcacctctatcagagactgaatcctgcttccctccacactccatccctctaccttattctatttttctcattagcactcatcatcatcctg

SEQ ID NO: 314777 - DNA, 533 bp, Homo sapiens
ttatgaatgacctgcattatatcattactctgaaagcaaaagttggtatacatgctctgttggtaaactttctaataattttcagttggtgaaattgatataatctggtatgatacaaagatttttaaaagtttattttcaataatttgttaacagtattaaatgaattcatcacatacacctaaaacttgaccaattaatgaaatatattggaaagattaataatctggcatccctgaaaacattattacttaaatatttatccaacatttatgtaaaacaaagaccaagcaatgcagarggcagggtagaataggagaacaggtgtctgtactctcctataatgtgttgtccctaagagttccacatttgccctaaagttgcatgtcccacacagcaatgtcttggctggtctttgctggtcacaccatcttatttagtagggtcccaacatgcccaagcttttagaacaaagctttcctcccatttccatatattgtgcagaggaaactaagcaatggagttcatgaaaa

SEQ ID NO: 314778 - DNA, 607 bp, Homo sapiens
agaacaggtgtctgtactctcctataatgtgttgtccctaagagttccacatttgccctaaagttgcatgtcccacacagcaatgtcttggctggtctttgctggtcacaccatcttatttagtagggtcccaacatgcccaagcttttagaayaaagctttcctcccatttccatatattgtgcagaggaaactaagcaatggagttcatgaaaaagtctctagcattgcctgacacataagaagcagctctgagatgtgttctgataaacaggattttctacatttcccgcacataacatttagcattccaaagaaacattagtaccatctgtaaattggcattccaggaacatgcccagctgacccactgtctagccctcatctgcctggatcttattgtaaagaagcaaaagataagatttgtcgtatatgtaggtgacatgagtttataataagttagaaatgataatgaaaatcttataagtaatgttacctaattttacagaataagtaagttttttcttcattttaaactgaaaaatatttaacaaattgtccaaactttcataggtatttataaatatagaaatgaagttgaaaccta

SEQ ID NO: 314779 - DNA, 607 bp, Homo sapiens
agaacaggtgtctgtactctcctataatgtgttgtccctaagagttccacatttgccctaaagttgcatgtcccacacagcaatgtcttggctggtctttgctggtcacaccatcttatttagtagggtcccaacatgcccaagcttttagaacaaagctttcctcccatttccatatattgtgcagaggaaactmagcaatggagttcatgaaaaagtctctagcattgcctgacacataagaagcagctctgagatgtgttctgataaacaggattttctacatttcccgcacataacatttagcattccaaagaaacattagtaccatctgtaaattggcattccaggaacatgcccagctgacccactgtctagccctcatctgcctggatcttattgtaaagaagcaaaagataagatttgtcgtatatgtaggtgacatgagtttataataagttagaaatgataatgaaaatcttataagtaatgttacctaattttacagaataagtaagttttttcttcattttaaactgaaaaatatttaacaaattgtccaaactttcataggtatttataaatatagaaatgaagttgaaaccta

SEQ ID NO: 314780 - DNA, 607 bp, Homo sapiens
agaacaggtgtctgtactctcctataatgtgttgtccctaagagttccacatttgccctaaagttgcatgtcccacacagcaatgtcttggctggtctttgctggtcacaccatcttatttagtagggtcccaacatgcccaagcttttagaacaaagctttcctcccatttccatatattgtgcagaggaaactaagcaatggagttcatgaaaaagtctctagcattgcctgacacataagaagcagctctgagatgtgttctgataaacaggattttctacatttcccgcacataacatttagcattccaaagaaacattagtaccatctgtaaattggcattccaggaacatgcccagctgacccactgtctagccctcatctgcctggatcttattgtaaagaagcaaaagataagatttgtcgtatatgtaggtgacatgagtttataataagttagaaatgataatgaaaatcttataagtaatgttacctaattttacagaataagtaagttttttcttcattttaaactgaaaaatatttaamaaattgtccaaactttcataggtatttataaatatagaaatgaagttgaaaccta

SEQ ID NO: 314781 - DNA, 574 bp, Homo sapiens
ttttctgaagtcttttatcaggtctaggagtcttttgacagcattttaagtgtgttctaggtatagaaacacattgccatcaaagaaaggtaatttgatttcctcctttcctgtttggatgccttttatttctttcacttgtctgattgctctggctagaaatatatgttattttaactaacatactcaagtatcacaacagaatttagcatacttattatttgaaatattgacctatataataggtagtaaggggtaactatttgaaaagatagcccaatatgcatctcaaataacaaaattgaaagtgaagakaaataaatattcaatttaatgaaaatttgaggccatgcatctgcatatttatcctaatctggcaagagtagccttcacgtaacctgtttatctaccatcactcaccctccaatcttttttttttttttttttttggagaggagttttgctcttgttgcccaagctggagtacaatagtgtgatcttggcccactgcaacctctgcctcctgattcaagcaatcctcctgcctcagcctcccaagtagctgggattacag

SEQ ID NO: 314782 - DNA, 533 bp, Homo sapiens
agttccctcaaattcactgccctggagatttcttctcactctggtctgtgatctcacccatgtctatgactttcattaccacgttatatgatatggtttggctgtgtccccacccaaatctcaccttgaattgtagctcccataattcccacgtgttgtgaggaacgccatgggagagaattgaatcatggggatggtttcctccatactgttctcatggtagtgaattagtctcatgagatctgatggttttataaggggttttgcctttcacttggttctcattacctcttgactgccaccatgttaagacatgccttgtgtcttccaccataattgtgaggccttcccaaccacgtggaactgtgagtccattaagcctctttttctttataaatttcccagtctcaggtatgtttttagcatcggcgtgagaatggactaatacattatattaatattgtaacactccaatttttattctcaatatccaattcattgaagatactayctttacagcttttccttattca

SEQ ID NO: 314783 - DNA, 592 bp, Homo sapiens
agagaaaaaaaaaactcctgttttttttwaattatactttaagttttagggtacatctgcagaaatcatcattctcagtaaactatcgcaaggacaaaaaaccaaacaccgcatgttctcactcataggtgggaactgaacaatgagaacacatggacacaggaaggggaacatcacactctggggactgttgtggggtggggggaggggggagggatagcattaggagatatacctaatgctaaatgatgagttaatgggtgcagcacaccagcatggcacatgtatacatatgtaactaaaactcctggttttataaaaatccctctttctcctttagggccttcaggttttaaataacacaccagacattgttattccttctgtgtagcagatacaagaggcaatattttcacttttatgttggaggggatgtcctggcatacctgggaccactggagctaactgaacattgcatcctgaatcttcgtaaggtttccctcccatcctctggagttcctgtgtcttactgagcctacagcagtagaagctagaagccagctcttgctcatcttgcctgctcaacatgatg

SEQ ID NO: 314784 - DNA, 592 bp, Homo sapiens
agagaaaaaaaaaactcctgttttttttaaattatactttaagttttagggtacatctgcagaaatcatcattctcagtaaactatcgcaaggacaaaaaaccaaacaccgcatgttctcactcataggtgggaactgaacaatgagaacacatggacacaggaaggggaacatcacactctggggactgttgtggggtggggggaggggggagggatagcattaggagatatacctaatgctaaatgaygagttaatgggtgcagcacaccagcatggcacatgtatacatatgtaactaaaactcctggttttataaaaatccctctttctcctttagggccttcaggttttaaataacacaccagacattgttattccttctgtgtagcagatacaagaggcaatattttcacttttatgttggaggggatgtcctggcatacctgggaccactggagctaactgaacattgcatcctgaatcttcgtaaggtttccctcccatcctctggagttcctgtgtcttactgagcctacagcagtagaagctagaagccagctcttgctcatcttgcctgctcaacatgatg

SEQ ID NO: 314785 - DNA, 592 bp, Homo sapiens
agagaaaaaaaaaactcctgttttttttaaattatactttaagttttagggtacatctgcagaaatcatcattctcagtaaactatcgcaaggacaaaaaaccaaacaccgcatgttctcactcataggtgggaactgaacaatgagaacacatggacacaggaaggggaacatcacactctggggactgttgtggggtggggggaggggggagggatagcattaggagatatacctaatgctaaatgatgagttaatgggtgcagcacaccagcatggcacatgtatacatatgtaactaaaactcctggttttataaaaatccctctttctcctttagggccttcaggttttaaataacacaccagacattgttattccttctgtgtagcagatacaagaggcaatattttcacttttatgttggaggggatgtcctggcatacctgggaccactggagctaactgaacrttgcatcctgaatcttcgtaaggtttccctcccatcctctggagttcctgtgtcttactgagcctacagcagtagaagctagaagccagctcttgctcatcttgcctgctcaacatgatg

SEQ ID NO: 314786 - DNA, 452 bp, Homo sapiens
aatcatagtctttttctcatttactgcttttcatctgaactatatttgttccgatataaaattctcaatccttgtttttttattgtttcatttgcctggcgggtttttgttcattcctctgtttttagtccttttgaatcactgttttaggtgtgttccctaagactgggtttaccttaataaaccactctgaaaatctttgttgtaaattattaatagtaaaacacactcatgtttattgatgacatattgtcctcaactttgtcrtatatttgtattatcactcctggattataatgataaatgtcatcatcaaatttgtaagggtaattaattatttatttatttatttacttttgttatattttaaatttacttttgaactttttaaaaggcttttatttttattttagtatttcctttgcatttacaaatttgatagagacattttt

SEQ ID NO: 314787 - DNA, 452 bp, Homo sapiens
aatcatagtctttttctcatttactgcttttcatctgaactatatttgttccgatataaaattctcaatccttgtttttttattgtttcatttgcctggcgggtttttgttcattcctctgtttttagtccttttgaatcactgttttaggtgtgttccctaagactgggtttaccttaataaaccactctgaaaatctttgttgtaaattattaatagtaaaacacactcatgtttattgatgacatattgtcctcaactttgtcgtatatttgtattatcactcctggattataatgataaatgtcatcatcaaatttgtaagggtaattawttatttatttatttatttacttttgttatattttaaatttacttttgaactttttaaaaggcttttatttttattttagtatttcctttgcatttacaaatttgatagagacattttt

SEQ ID NO: 314788 - DNA, 600 bp, Homo sapiens
tcatgaatagaaaagacctaatctttcttttgattcatgcttatatatctggaataaagcacagagatgtctaatgattttatgataatatcaactatttttcctgacttcttttattcagcaaagcagagttgcttctgatggaattctgaaatagaaattgttcctgaaactaggaactattaactaagaagtgtatttgaggttcttagcacwtaatttggtacaatcatgccttatgaagtaatagtcaagaagctgtatagtgtttccagctgacagacatttttataagaaagggtcctgttctccccaaccagacatagggcttcacacccatcttgtttcctggaccctccaacataatatagtagatcttcaattagccttcaggatgtaacttattgtctctctactctgacatcatcttagttgtgttacagaggtagactatcattttcagaaaaacaatccatactatacaaacgatatccttatagcacactggaacccaaaagctctttattatcacatgtagggtgaagcccacaagagcttgagggcttgagaaatgatactcacaagtgagtcacagaaagt

SEQ ID NO: 314789 - DNA, 600 bp, Homo sapiens
tcatgaatagaaaagacctaatctttcttttgattcatgcttatatatctggaataaagcacagagatgtctaatgattttatgataatatcaactatttttcctgacttcttttattcagcaaagcagagttgcttctgatggaattctgaaatagaaattgttcctgaaactaggaactattaactaagaagtgtatttgaggttcttagcacataatttggtacaatcatgccttatgaagtaatagtcaagaagctgtatagtgtttccagctgacagacatttttataagaaagggtcctgttctccccaaccagacatagggcttcacacccatcttgtttcctggaccctccaacataatatagtagatcttcaattagccttcaggatgtracttattgtctctctactctgacatcatcttagttgtgttacagaggtagactatcattttcagaaaaacaatccatactatacaaacgatatccttatagcacactggaacccaaaagctctttattatcacatgtagggtgaagcccacaagagcttgagggcttgagaaatgatactcacaagtgagtcacagaaagt

SEQ ID NO: 314790 - DNA, 609 bp, Homo sapiens
ttagttccatgacttttttctggttctaaatattttttaattataaaaagatcaacagtcccatcaattatgctcctgtgtcttttgaatagttcttgttgatctgtggggatttattgttcttattctgtgactcatagcaaagatcattttcttgtccctttgatgtttcagatacatttacattcatataaatctacaaaataccaggaataactacargaagagacacttctctggaaaagtatttcagatggtgacattgtaaaaaatgctaatatataaatcattgtaaaaaaaagctaatatacagatcaatccagttgaagatggagcttcattcatctccagtcttagacatatacatggaggcaacaaaacgcctggcccaactgaagccatccaagttcaaatacacaacaaatgaggtttcacaacaagtgaaaggtcatttctttaatccatgttttcttggaaagcagacagatgtcattctttccaccctgtataattaaacagtttaaatggaaaaaaaaaattcagcatggtatagtccaatgccccagtcatgttgagctatcttcaggttctcaagcatgtcaggctctt

SEQ ID NO: 314791 - DNA, 609 bp, Homo sapiens
ttagttccatgacttttttctggttctaaatattttttaattataaaaagatcaacagtcccatcaattatgctcctgtgtcttttgaatagttcttgttgatctgtggggatttattgttcttattctgtgactcatagcaaagatcattttcttgtccctttgatgtttcagatacatttacattcatataaatctacaaaataccaggaataactacaagaagagacacttctctggaaaagtatttcagatggtgacattgtaaaaaatgctaatatataaatcattgtaaaaaaaagctaatatacaratcaatccagttgaagatggagcttcattcatctccagtcttagacatatacatggaggcaacaaaacgcctggcccaactgaagccatccaagttcaaatacacaacaaatgaggtttcacaacaagtgaaaggtcatttctttaatccatgttttcttggaaagcagacagatgtcattctttccaccctgtataattaaacagtttaaatggaaaaaaaaaattcagcatggtatagtccaatgccccagtcatgttgagctatcttcaggttctcaagcatgtcaggctctt

SEQ ID NO: 314792 - DNA, 598 bp, Homo sapiens
tgcagtagatatagcctattattacatggacagttaaattgcctggaaaaatagcctcctctcccagcttctctttttagtgagtgttccccaaacaaactttgtaaaacaaaagtttcatttcattcatatacctgctaatatccttgattggatatatattaaagtcaacatgtattaaagataacaatttattatctagttgctatcttttaaaacagcaatatggagcctcttaacatctaaacatctcaaatatatttctaaagataaaytgtatgcatgcattgtacctataaaattgtatatttgcactactgtcactaattatacaaaacacacataaacctatcctataaacgaagtactaaaaatacactaatgtaccttgaactatatcaaagtggggctatatatattttttctggttttaagattatatgatttgttatagtcttagtcctttcctgtctttatacccattcccacatgtgggatgaaagagaaatagaagaatagcatatgaggtaaagagtttttttataatgataagtaagaaaatgatacaccagtttgaaatgcagcgtttcagacagtc

SEQ ID NO: 314793 - DNA, 598 bp, Homo sapiens
tgcagtagatatagcctattattacatggacagttaaattgcctggaaaaatagcctcctctcccagcttctctttttagtgagtgttccccaaacaaactttgtaaaacaaaagtttcatttcattcatatacctgctaatatccttgattggatatatattaaagtcaacatgtattaaagataacaatttattatctagttgctatcttttaaaacagcaatatggagcctcttaacatctaaacatctcaaatatatttctaaagataaactgtatgcatgcattgtacctataaaattgtatatttgcactactgtcactaattatacaaaacacacataaacctatcctataaacgaagtactaaaaatacactaatgtaccttgaactatatcaaagtggggctatatatattttttctggttttaagatyatatgatttgttatagtcttagtcctttcctgtctttatacccattcccacatgtgggatgaaagagaaatagaagaatagcatatgaggtaaagagtttttttataatgataagtaagaaaatgatacaccagtttgaaatgcagcgtttcagacagtc

SEQ ID NO: 314794 - DNA, 609 bp, Homo sapiens
ttagttccatgacttttttctggttctaaatattttttaattataaaaagatcaacagtcccatcaattatgctcctgtgtcttttgaatagttcttgttgatctgtggggatttattgttcttattctgtgactcatagcaaagatcattttcttgtccctttgatgtttcagatacatttacattcatataaatctacaaaataccaggaataactacaagaagagacacttctctggaaaagtatttcagatggtgacattgtaaaaaatgctaatatataaatcattgtaaaaaaaagctaatatacagatcaatccagttgaagatggagcttcattcatctccagtcttagacatatacatggaggcaacaaaacgcctggcccaactgaagccatccaagttcaaatacacaacaaatgaggtttcacaacaagtgaaaggtcatttctttaatccatgttttcttggaaagcagacagatgtcattcttyccaccctgtataattaaacagtttaaatggaaaaaaaaaattcagcatggtatagtccaatgccccagtcatgttgagctatcttcaggttctcaagcatgtcaggctctt

SEQ ID NO: 314795 - DNA, 626 bp, Homo sapiens
agtgagggttaaagattttaagacaaggatggtgttaaattagccaatcagatgttcacagtttgtttctttgctttatatcttcctgaggaaaagttgctgtcattttattgaaaaagtagggcagttctccagtatgggaaaatattagtttactttaaattatttttcataaatgctctaagaaatttagcttagatcatcaaygaattaaaaataatacatactcaaaaggtttgttttatgcgataagaaacaaaacacagtcctttgttcactattacatatttaagtgactcaaacttaattctttgaagactttccgttgtgtgacacaaacattgctgggtttaaacaaagaattagagtttcataacagcttaattactttgcagggacactagcatcttcattagtccttatcctttccatagaccattcttacaaccttttctcaaataagtactctagtttctttcaagattttttttccctctaacagtgttttgtgaatattgacttactttataatcaacaagacttttcaataccttttaaaaccagatagtcaaacactaaaggtaatataaagtgatatattaaggatttaaagtataaaatttaaa

SEQ ID NO: 314796 - DNA, 626 bp, Homo sapiens
agtgagggttaaagattttaagacaaggatggtgttaaattagccaatcagatgttcacagtttgtttctttgctttatatcttcctgaggaaaagttgctgtcattttattgaaaaagtagggcagttctccagtatgggaaaatattagtttactttaaattatttttcataaatgctctaagaaatttagcttagatcatcaatgaattaaaaataatacatactcaaaaggtttgttttatgcgataagaaacaaaacacagtcctttgttcactattacatatttaagtgactcaaacttaattctttgaagactttccgttgtgtgacacaaacattgctgggtttaaacaaagaattagagtttcataacagcttaattactttgcagggacactagcatcttcattagtccttatcctttccatagaccattcttacaaccttttctcaaataagtactctagtttctttcaagattttttttccctctaacagtgttttgtgaatattgacttactttataatcaayaagacttttcaataccttttaaaaccagatagtcaaacactaaaggtaatataaagtgatatattaaggatttaaagtataaaatttaaa

SEQ ID NO: 314797 - DNA, 590 bp, Homo sapiens
tattgacaaatagacaataaggttgtgtctattgtgttttggagtgtcagattttgccttttcttmtttttttaatctctgttttctgttaatacatatttaggattgaaaaatatctttatattgcaaatacattcactcctattgtaatatggaatgccccctttatccctggtaccagtttttgttataaagtccagtttgaaattagtttagccctatcatctttcttaaaactaagaatatatatcatatcattattttgtcattaattttacattttaatcttgttatcgagtctccttaagtaaattgtacttgctttctcttaactagttagtttcattgtattgaaaatgaacttattttagaaagaacggtttggaacttgtatgtttactcatttttatgttttctaacttttaatcgtttggaccatttatatttaaaataattttccatatattgggatgtatctgtagatatggagatttttaaaactcttatatgttctttgttcatttactcctcttttcctgagtttattttttaggatggcattttatattcactgttggaatgtttgctta

SEQ ID NO: 314798 - DNA, 583 bp, Homo sapiens
acagtcaatagtttcaggccaagtctcatctttctatgcataccaagacttcacataaacagaatgaggttttcagattttcccactagatattcagggaaaatatactcagaatccatgaagagaaaactataaactgaggtcatctctgctacattattctgttctygcactactaataaaggcatacctcagactgggtaatttataaaggaaagaagtttaatggactcacagttccacatgggtggggaggcctcacagtcatggtggaaggcaaaggagaagcaagggcacatcttacatggtggcaggcaagagagtgtgtgcagaggaactgccctttatgaaaccatcaaatctcatgagacttattcactatcatgagaacagcatggaaaaaaccagcccccatgattcagttacctccccctgggtccctcccatgacatgtgggatttatgagagctacaattcgagatgagattttggtgaggacacagccaaaccatatcatctgctattccaattacaatgttatggaccaggaatcattaatagtctaccataaaatgattggagt

SEQ ID NO: 314799 - DNA, 583 bp, Homo sapiens
acagtcaatagtttcaggccaagtctcatctttctatgcataccaagacttcacataaacagaatgaggttttcagattttcccactagatattcagggaaaatatactcagaatccatgaagagaaaactataaactgaggtcatctctgctacattattctgttcttgcactactaataaaggcatacctcagactgggtaatttataaaggaaagaagtttaatggactcacagttccacatgggtggggaggcctcacagtcatggtggaaggcaaaggagaagcaagggcacatcttacatgstggcaggcaagagagtgtgtgcagaggaactgccctttatgaaaccatcaaatctcatgagacttattcactatcatgagaacagcatggaaaaaaccagcccccatgattcagttacctccccctgggtccctcccatgacatgtgggatttatgagagctacaattcgagatgagattttggtgaggacacagccaaaccatatcatctgctattccaattacaatgttatggaccaggaatcattaatagtctaccataaaatgattggagt

SEQ ID NO: 314800 - DNA, 588 bp, Homo sapiens
catactcctataattcatcattatcatcattgttgccatcacaatgactgatatactcattatgggacaagttcttcaccttcataggcaccatcttggaggagaaggggctatgcttctccaaggtcgtgtccaagtctagtttctgctttgaaatgagtggaaagtcctcctcttsaaccacgggctgtgcctgcctgctacccctcttggcttttttcttgaagtaagcagcgtcaccatctctccagttgtcctcttccattctactgctgaggggagccctggaaagtcacagccatgaagtaactcatccttgatgatgacatggagccctggagagagcagaaacataggaggtagagagacccgagtccaaatcccatctctgacacttcatgctgtgtgaccctgggtaagtcagtcaccctctctgaacctcattcctcatttgcaaagcaggaccagtaatgccttcttccagggtcgtggtgaggattagagagaatatatttatgctgcttagcacaatgccaatggcagtaataacaaaattgtattttgttgtgccaggtactggttaaaaca

SEQ ID NO: 314801 - DNA, 588 bp, Homo sapiens
catactcctataattcatcattatcatcattgttgccatcacaatgactgatatactcattatgggacaagttcttcaccttcataggcaccatcttggaggagaaggggctatgcttctccaaggtcgtgtccaagtctagtttctgctttgaaatgagtggaaagtcctcctcttcaaccacgggctgtgcctgcctgctacccctcttggcttttttcttgaagtaagcagcgtcaccatctctccagttgtcctcttccattctactgctgaggggagccctggaaagtcacagccatgaagtaactcatccttgatgatgacatggagccctggagagagcagaaacataggaggtagagagacccgagtccaaatcccatctctgacacttcatgctgtgtgaccctgggtaagtcagtcaccctctctgaacctcattcctcatttgcaaagcaggaccagtaatgccttcttccagggtcgtggtgaggattagagagaatatatttatgctgcttagcacaatgccaayggcagtaataacaaaattgtattttgttgtgccaggtactggttaaaaca

SEQ ID NO: 314802 - DNA, 446 bp, Homo sapiens
tttgcccctgtggggaaacagaattcggcctttttactggaagaaccctgctcaacagagcgcccagctgtagttggtcaataaatatttctgcataaataaatatatagatttgaaccaggaggaagttaaggcagaggcgcctcaatacagacagcaagaaggagctgtctggctgggcagggaaactgagctcatgagggtcccatgcaaggaagaggccactgaggttttgcagctacttctatgaaggtggggccaggataaggaaatgccaagaggtcatagggcaccaggaacctgcaacagtgggagtcacrgtaggctgagaaatggccccttgcaaaatatgcactccctcaaaaaaagggggaaggtctttgcagatgtgatgaagttaaggctcttgggatgagagattatccctaaatgccatcacatgtacc

SEQ ID NO: 314803 - DNA, 569 bp, Homo sapiens
tcacatgtaccttacagggggaggcagagggagatttgacacacgaaggagatggagccaggtgtggttgctcatgcttgtaatcccagcactttgggaggccaaggtgggcagatagcttgaggtcaggagttcgaggccagcctggccaacatggtaaaacccagtctctacaaacaatacaaaaattagcccaggtgtggtgaaacacacctgtagtcccagctacttgggaggctgaggtgggaggattactagaacctgggatgtggaggatgcagtgagctgagattgtaccattgcactccagcctgggcaacagagtgacaccctgtctcaaaaaaaaaaaaaaaaaaaaaagaaaaaaagaggaaagcactgtggagatggaatgcagagaaacttaagggtgtcagccttgaagactggtgtaatgyggccacaagccaaggaaagttggcagccccctgaaattggaagggagaatggggtgggttctcccctagagccgtcaaaggggccctgctgataacctcaactttaacgcagccatactgatttcaggcttc

SEQ ID NO: 314804 - DNA, 543 bp, Homo sapiens
catgggttagaattcagatgggacacaggtgggctggcttgtctggggcctcagaggcctcttcttgtaagttcttagcctaggcttgtttcagcttcctcacagcatggtggctggcctccaaggtggctttccgtgggagcaagagagacaagcagaaactgtatatagttttaaaatatagcctctaaagtcatggagcatcacttctgctataccctgttgggcagagcagtcayggccccaaatggatttaagggtggggacacagacccggccacttgctggggtgggatttggggagtgtcagctgcattgtgagaaaaaacatgtaggatgggagctgtgtatgggatcctgcatcctaggtgtgggtgtgagaattaaacaagctcctgttcagcagagcattttggaagctgggaaacactagattcccctgcttgtcaatggaggttgtgcttatctgttagttacagtggagaggaggtgaatgctaggcgagggatggatggtcatctcaaagttgatgcacagctcagt

SEQ ID NO: 314805 - DNA, 614 bp, Homo sapiens
gtcttgtctttcaaatctttcatgcctccatttaacatgttcagtcttctttctcaaacatatgggttgtaggtatctgttttagtgtccctgttctaattatgatttctagacctgtttttattgatcttatgagttgtacttttataatttagagatgaggtctcattctgtcatccaggctggggtgcagtggtacaatcatagctctctgtggccctaaattcttgggctcaagcaaccctcctccctcaractgagtagctgggctataggcacataccaccaggcccagctaagttttaaagatttggagatgtgaggtctcaatatgttggctcaggctggtctcaaactcccagcctcaagcaatccatctgcctcagcctcccaaagtgttgggattacaggcatgagccaacacacccagtcatgagttgtattttcttgattctccatatgcctggacatttgattggatgcccaaaattgtgactttggatatttttgtatttctagaattattcttataccttattctaagatagttacttggtcagctagatccttttgagccttgcttttttaggcttcatcaggattaggatagcctc

SEQ ID NO: 314806 - DNA, 592 bp, Homo sapiens
atgggttgtaggtatctgttttagtgtccctgttctaattatgatttctagacctgtttttattgatcttatgagttgtacttttataatttagagatgaggtctcattctgtcatccaggctggggtgcagtggtacaatcatagctctctgtggccctaaattcttgggctcaagcaaccctcctccctcaaactgagtagctgggctataggcacataccaccaggcccagctaagttttaaagatttggagatgtgaggtctcaatatgttggctcaggctggtctcaaactcccagcctcaagcaatccatctgcctcagcctcccaaagtgttgggattacaggcatgagccaacacacccagtcatgagttgtattttcttgattctccatatgcctgracatttgattggatgcccaaaattgtgactttggatatttttgtatttctagaattattcttataccttattctaagatagttacttggtcagctagatccttttgagccttgcttttttaggcttcatcaggattaggatagcctctagggcaggacttattccattactgaggcaacacctttg

SEQ ID NO: 314807 - DNA, 595 bp, Homo sapiens
actcattcaacaaataagacattcatgtcttattaatggcagtgccaaaaaaatgacaatctccatttctaatagagagtggacactccctgtgagttcaggcagttctattggggtggttgatcccagccatacaaagcccaagagcttgtattcaaaggatctgmagctacactgggcactaggaagagacaatgccagcttcacatggccacgttataaaattgtttagcaaagaattcttgggaaaaggccattctgtgcagaagtagagttggagtaccaccatctgtagtctggtcctgttcacataaatgcccagtctcagggattccatacacttcctgctgggaagtcaaagccctcttcagtgccagaagtgggctacagagactggaagcacaagattttccaattccccttaagccacatgaagaccgtatcattatgaattgcgcttgtcacaagcatgtaaggctctagataaagccaaacattttagtcaacattgaacctggggctgaatgctaacatgcttacatggctggcagagccttgaaaagtctccaggctgctcacaaaggccacctattga

SEQ ID NO: 314808 - DNA, 544 bp, Homo sapiens
caccttaaacattgatcatttctttgtgttgggaacattcaaaatctgcccttctggctatttgaaaatatacaacaaattactatcacagtcacctacaatgctataaaacactggagctcattcctcctagctagctgtaacttcgtatccattcacctaccttgggctatctccacctgcacccctgacccttcccatcctccagtaaccactattctactctacaagatcaacttttagttcccacatgacaacatgcaacatgcagtatgtcttttcatgcatatgatcttttagttataaccactctgagaggtaccgttatgcccatttcacagaagagcaaactaaggcctggagatgacaggtgacttatttcagagtccatgctcttagctgtaagctctgctatgtaagcgctcagccatggtggctgttatcatgggaggctctgaaggaactctaaataggcagccacgggggtcctccrcttggatgccttttaactgatcttctgccaggtgggggcacggagctgggt

SEQ ID NO: 314809 - DNA, 613 bp, Homo sapiens
ttatggcatcaagtacattcacatgtttatacaaccatcaccatccaactccaaaaccattttcatcttgcaaaactgaaattctgtacccattaagtactaactccccgttctccctcccccctcatccckggaaaccaccattctttctctgaacttggctactctaggtgcctcatgagtggaattatacagtctccagccttccgtgatctttccagcttcataactgccttctgacatggatgaagcaggaaatgttactgcctcagggagatgaggggagggagggagggttatgggggaagtgacttgccctgggtctcacatctagtgagtatatagcacactcaatagattcaggaagcccagagtccttcctgggtctgctgctgtgttaggtcattcttgcattgctataaagaaatatctgatacggctgactctcttttcagactcagcccgcctgcacccaggtgaaataaacagccttgttgctcacacaaagcctgtttggtggtctcttcacacggacgtgagtgaaatttggtgccgtgactcagatcaggggacctcccttgggagatcaatcccctgtcctcctgctctttgc

SEQ ID NO: 314810 - DNA, 613 bp, Homo sapiens
ttatggcatcaagtacattcacatgtttatacaaccatcaccatccaactccaaaaccattttcatcttgcaaaactgaaattctgtacccattaagtactaactccccgttctccctcccccctcatccctggaaaccaccattctttctctgaacttggctactctaggtgcctcatgagtggaattatacagtctccagccttccgtgatctttccagcttcataactgccttctgacatggatgaagcaggaaatgttactscctcagggagatgaggggagggagggagggttatgggggaagtgacttgccctgggtctcacatctagtgagtatatagcacactcaatagattcaggaagcccagagtccttcctgggtctgctgctgtgttaggtcattcttgcattgctataaagaaatatctgatacggctgactctcttttcagactcagcccgcctgcacccaggtgaaataaacagccttgttgctcacacaaagcctgtttggtggtctcttcacacggacgtgagtgaaatttggtgccgtgactcagatcaggggacctcccttgggagatcaatcccctgtcctcctgctctttgc

SEQ ID NO: 314811 - DNA, 585 bp, Homo sapiens
cttggtcatttgagtgaataaactggactattttcttcttaatttcaactattgataagaaagagtttgctaaggcaagaaggggattctgttacagtaagatttrtaatagaaatttggtggctgatatggtttggtgtctccacccaactctcccaaattggaggaggggcctggtgagaggtgactggatcataggggtgaatttccttcttgctattctcatgatagtgagttctcatgagatgtgatggtttaaagtgtgtggcacttctcaattcacacattctttctcctgctttacaccatagtaagacatgcttgcttcaccttccgccatgactaagtttcctgaggcctcccaatcatgcctattaaacctgcagaactgtgagtcaattaaaccacttttcttcataaattacccagtctcaggtagttctttatagcagtgtgagaacagactaatacagtggttttagtaaagatattcagtgcaagtctagaaggcattcttggccctgagcacccaggattgtataagtgcattacaaaataggtgtttgggttaaccttgttatgcct

SEQ ID NO: 314812 - DNA, 585 bp, Homo sapiens
cttggtcatttgagtgaataaactggactattttcttcttaatttcaactattgataagaaagagtttgctaaggcaagaaggggattctgttacagtaagatttataatagaaatttggtggctgatatggtttggtgtctccacccaactctcccaaattggaggaggggcctggtgagaggtgactggatcataggggtgaatttccttcttgctattctcatgatagtgagttctyatgagatgtgatggtttaaagtgtgtggcacttctcaattcacacattctttctcctgctttacaccatagtaagacatgcttgcttcaccttccgccatgactaagtttcctgaggcctcccaatcatgcctattaaacctgcagaactgtgagtcaattaaaccacttttcttcataaattacccagtctcaggtagttctttatagcagtgtgagaacagactaatacagtggttttagtaaagatattcagtgcaagtctagaaggcattcttggccctgagcacccaggattgtataagtgcattacaaaataggtgtttgggttaaccttgttatgcct

SEQ ID NO: 314813 - DNA, 585 bp, Homo sapiens
cttggtcatttgagtgaataaactggactattttcttcttaatttcaactattgataagaaagagtttgctaaggcaagaaggggattctgttacagtaagatttataatagaaatttggtggctgatatggtttggtgtctccacccaactctcccaaattggaggaggggcctggtgagaggtgactggatcataggggtgaatttccttcttgctattctcatgatagtgagttctcatgagatgtgatggtttaaagtgtgtggcacttctcaattcacacattctttctcctgctttacaccatagtaagacatgcttgcttcaccttcygccatgactaagtttcctgaggcctcccaatcatgcctattaaacctgcagaactgtgagtcaattaaaccacttttcttcataaattacccagtctcaggtagttctttatagcagtgtgagaacagactaatacagtggttttagtaaagatattcagtgcaagtctagaaggcattcttggccctgagcacccaggattgtataagtgcattacaaaataggtgtttgggttaaccttgttatgcct

SEQ ID NO: 314814 - DNA, 585 bp, Homo sapiens
cttggtcatttgagtgaataaactggactattttcttcttaatttcaactattgataagaaagagtttgctaaggcaagaaggggattctgttacagtaagatttataatagaaatttggtggctgatatggtttggtgtctccacccaactctcccaaattggaggaggggcctggtgagaggtgactggatcataggggtgaatttccttcttgctattctcatgatagtgagttctcatgagatgtgatggtttaaagtgtgtggcacttctcaattcacacattctttctcctgctttacaccatagtaagacatgcttgcttcaccttccgccatgactaagtttcctgaggcctcccaatcatgcctattaaacctgcagaactgtgagtcaattaaaccacttttcttcataaattacccagtctcaggtagttctttatagcagtgtgagaacagactaatacagtggttttagtaaagatattcagtgcaagtctagaaggcattcttggccctgagcacccaggattgtataagygcattacaaaataggtgtttgggttaaccttgttatgcct

SEQ ID NO: 314815 - DNA, 585 bp, Homo sapiens
ttattacagagataggcaattccagattaaaaacatacataagtagcctctaatcaacaaaggggcagtagttttgttgcctagaaactggaggtacaatggtgaacaaaacaccaygcctgcttgagtgaataagtggcttcaaccatctaatatttaaacaactaccaagtggcaggcaccatgctgggctcaaggatacggtgaaaagacagtccttgcatttttgaacttacatcctagtgaggggaaaaataaaattactgcataacaaagtaccccaaaacttggtaacttgagacaacaatgattgctcatttctcatattgcaggttgcgtatttgggcagggctcagctgtgtggttcttctaccctatgtcacctggagttaatgcatgcttacatttagctggtgattcagatggaacactacgatggcctctcaccccccagggtctctctgtatgtggcctctcatcattgagcggttcagcttggacttccttacagcatggcatctgggctgcaagaagggaaagatgcagctgcaaaccttaagggctgaagtctcaagacatcacctc

SEQ ID NO: 314816 - DNA, 585 bp, Homo sapiens
ttattacagagataggcaattccagattaaaaacatacataagtagcctctaatcaacaaaggggcagtagttttgttgcctagaaactggaggtacaatggtgaacaaaacaccacgcctgcttgagtgaataagtggcttcaaccatctaatatttaaacaactaccaagtggcaggcaccatgctgggctcaaggatacggtgaaaagacagtccttgcattwttgaacttacatcctagtgaggggaaaaataaaattactgcataacaaagtaccccaaaacttggtaacttgagacaacaatgattgctcatttctcatattgcaggttgcgtatttgggcagggctcagctgtgtggttcttctaccctatgtcacctggagttaatgcatgcttacatttagctggtgattcagatggaacactacgatggcctctcaccccccagggtctctctgtatgtggcctctcatcattgagcggttcagcttggacttccttacagcatggcatctgggctgcaagaagggaaagatgcagctgcaaaccttaagggctgaagtctcaagacatcacctc

SEQ ID NO: 314817 - DNA, 514 bp, Homo sapiens
gcaatagcaagcaaatgatagttatagtttaaaaatagccactataccttgaacacactgtcaagatgacatgagactcctgggtcagagacaaaggatttttgttttttactcaaagcacagcaagcagaataaacattgatagtttgagggytcccccttgctgtccaagttttcccattcacctgggcacagagcaatccaggtgaatgctacatatgtggcaggttcacaccacagctgagctaccttgagcctagggaaccagacaaagaactgcaagtagtcctgtctgacctgcctgagaagcaacattgtctttattacacaggacaacaaatgaatcttccctctgctctgaggctgtggaggggggtggtgacagtatttaccaaggcagttgattatataaacattcttgaagaggtagtccagaacaaaatgtcagtgcttctgctcagaagacatgcaggaatgtaagtcgcctatagagaatagtctcccaacactatgt

SEQ ID NO: 314818 - DNA, 612 bp, Homo sapiens
attctggcatttggtgcagggggcagtgagagaggtccagactggggcagtagaccccatgcttcggaacttaggcccagcttcccgattgcatgatctgcagtcagtctctcgctgttctgtgtcctacttccttcttctaaaactggaatgagaaacaagcccagctgctcttatggggaactctaagggactgcccaggttacttaaaggaggtcatcactcatcacctcaaaatgtttttgggaccccaaggtgtccatatggcaaatttgggggtatagtgtttgacaggygcccttgcctgcatagtggtttagagctgctgatgatacttgttactttcttatccaggtgttttcaaaagtggggacagtgaagagctgctccatctccaagaagaagaacaaagcaggtattccgcatgaaattcggaaagtgttcagtattcagccggaaagagtggattccaaaagaagctccagcttcagacaaggggttggggtagttctcccttgcacattttgaaggttctcttttttctgaagcatggtcagcctcagactctttgaaatagcccctctttctgttcccctggagtctcctttccag

SEQ ID NO: 314819 - DNA, 611 bp, Homo sapiens
agttggctcttattttgtaacacctgctgtcaatggaaaggcaggagcataggtctcacaaacagcacagtaaaggtaaagataggacctgcaaagtgagccaaaggtagagagccttgagcctcatttgaacccatcagactgaagggaatcttctttgaattcacaataaagaagaaacctaacaaatatgtatgagatgctggggtgtgggtggaaggtggggggacatcaaatctaatgtcaagagggcaagatgtaattagggatcttaatgttttttagtgccctataaaaacactcctcyctccccagttacacatagtgaggaagcggaagtttctgatgaaatttttgcagtattctttgctatctgaactcttgctacttgcaacctagaagtaaggaaccagagaagtttgaataatgcagtcgcccacatgatccaaactttatatctgaaacccaggaaactgaatgtgattggctggtgagaaatatttgtgaagagcaagcctttggtgcgtttgactctcacgcacatattcattttaggcattacgtgtggaggcagaggactgcccaggtagaggttttgccacttgccttca

SEQ ID NO: 314820 - DNA, 517 bp, Homo sapiens
attgattcaggcaagaatcatcagtagatgttcattttgatgagaagcagaatatttacagttaaaacatagtcttaacatgaggtagtattaattacaaagaggaaaaaaaaaagagtaactttacagtggagaaacctgccagagaaaccttaaccaacttatcagaatgcacatcaccagtaatgggacacatcatgtgtttcctgtgattttctgccaaaaatgcataacctgaatctaatcctgaggacacaaacaagccccaattaagggagagtctacaaaatcacttgatcgcactgttcaaaagtatcaaggtcataagaaacaaagaataaagcagccaytccagattaaatgagactaaaaagaaatgacaactaaatgcaatgtgtgaccctgggttaggtcttgaacaagaaaacaagtttattcttttgctctaaaggacactgctgggaccactggtgaaacctgagtaaggtctgtagattacagtgttacagcaatgtta

SEQ ID NO: 314821 - DNA, 595 bp, Homo sapiens
ttgtaatctctttgcccccctagtccaggagactaataaggtgcccccccagatggtgaacccaattggccatctcccagaaagtttaacaaaacccgaccaggttgcccccttcaccttcttgcaacttcttcccctttccccaggggtccagtcctccactccagatcattcctttagtttagagctgggcagtgaagtggatatcactgaagragataggaagccggactccactgcttacgttgccatgatccctcagtgcataaaggaggaagacaccccttcagataatgatagtggcatctgtatgagcccagagtcctatctggggtctcctcagcatagcccctctaccaggggctctccaaataggagcctcccatctccaggtgttctctgtgggtctgcccaccccaaaccttacgatcctcctggagagaagatggtagcagcaaaagtaaagggtgagaaactggataagaagctgaaaaaaatggagcaaaacaagacagcagccactaggtaccgccagaagaagagggcggagcaggaggctctcactggcgagtgcaaagagctggaaaagaagaac

SEQ ID NO: 314822 - DNA, 595 bp, Homo sapiens
ttgtaatctctttgcccccctagtccaggagactaataaggtgcccccccagatggtgaacccaattggccatctcccagaaagtttaacaaaacccgaccaggttgcccccttcaccttcttgcaacttcttcccctttccccaggggtccagtcctccactccagatcattcctttagtttagagctgggcagtgaagtggatatcactgaagaagataggaagccrgactccactgcttacgttgccatgatccctcagtgcataaaggaggaagacaccccttcagataatgatagtggcatctgtatgagcccagagtcctatctggggtctcctcagcatagcccctctaccaggggctctccaaataggagcctcccatctccaggtgttctctgtgggtctgcccaccccaaaccttacgatcctcctggagagaagatggtagcagcaaaagtaaagggtgagaaactggataagaagctgaaaaaaatggagcaaaacaagacagcagccactaggtaccgccagaagaagagggcggagcaggaggctctcactggcgagtgcaaagagctggaaaagaagaac

SEQ ID NO: 314823 - DNA, 595 bp, Homo sapiens
ttgtaatctctttgcccccctagtccaggagactaataaggtgcccccccagatggtgaacccaattggccatctcccagaaagtttaacaaaacccgaccaggttgcccccttcaccttcttgcaacttcttcccctttccccaggggtccagtcctccactccagatcattcctttagtttagagctgggcagtgaagtggatatcactgaagaagataggaagccggactmcactgcttacgttgccatgatccctcagtgcataaaggaggaagacaccccttcagataatgatagtggcatctgtatgagcccagagtcctatctggggtctcctcagcatagcccctctaccaggggctctccaaataggagcctcccatctccaggtgttctctgtgggtctgcccaccccaaaccttacgatcctcctggagagaagatggtagcagcaaaagtaaagggtgagaaactggataagaagctgaaaaaaatggagcaaaacaagacagcagccactaggtaccgccagaagaagagggcggagcaggaggctctcactggcgagtgcaaagagctggaaaagaagaac

SEQ ID NO: 314824 - DNA, 522 bp, Homo sapiens
caccctgcattgctaccaaaggctggaacttattccatctgcttgtatttttgtacccatttaccaatttatctttaggacttctgcctcactacccttacaagcctctggtcaccctcattccactctctacttccatgagatcaacttttttggcwctcacatatgagtgacaatatgcagtacttgtctttctatgcctgcatcacctttattaaaaagtagaaataactcaaataaaaattttaacaatgcaccttaaagaactagaaatgcaagaagaaatcaaacccaaaattggtaaaaggaaagaaataataaagatcagagaagaacaaatgaaatagagactaaaaattacaaaggatcaacaaaatgcagtgttggtttgttaaaaagataaatacaattgataaatagctagccagactaaccaagaaaaaatagaggacaaaaaatgagaaataaaaaggcaatattacaacttccatcaaagtaaaaaaaagtcattagagattatta

SEQ ID NO: 314825 - DNA, 522 bp, Homo sapiens
caccctgcattgctaccaaaggctggaacttattccatctgcttgtatttttgtacccatttaccaatttatctttaggacttctgcctcactacccttacaagcctctggtcaccctcattccactctctacttccatgagatcaacttttttggcactcacatatgagtgacaatatgcagtacttgtctttctatgcctgcatcacctttattaaaaagtagaaataaytcaaataaaaattttaacaatgcaccttaaagaactagaaatgcaagaagaaatcaaacccaaaattggtaaaaggaaagaaataataaagatcagagaagaacaaatgaaatagagactaaaaattacaaaggatcaacaaaatgcagtgttggtttgttaaaaagataaatacaattgataaatagctagccagactaaccaagaaaaaatagaggacaaaaaatgagaaataaaaaggcaatattacaacttccatcaaagtaaaaaaaagtcattagagattatta

SEQ ID NO: 314826 - DNA, 522 bp, Homo sapiens
caccctgcattgctaccaaaggctggaacttattccatctgcttgtatttttgtacccatttaccaatttatctttaggacttctgcctcactacccttacaagcctctggtcaccctcattccactctctacttccatgagatcaacttttttggcactcacatatgagtgacaatatgcagtacttgtctttctatgcctgcatcacctttattaaaaagtagaaataactcaaataaaaattttaacaatgcaccttaaagaactagaaatgcaagaagaaatcaaacccaaaattggtaaaaggaaagaaataataaagatcagagaagaacraatgaaatagagactaaaaattacaaaggatcaacaaaatgcagtgttggtttgttaaaaagataaatacaattgataaatagctagccagactaaccaagaaaaaatagaggacaaaaaatgagaaataaaaaggcaatattacaacttccatcaaagtaaaaaaaagtcattagagattatta

SEQ ID NO: 314827 - DNA, 572 bp, Homo sapiens
aataactcaaataaaaattttaacaatgcaccttaaagaactagaaatgcaagaagaaatcaaacccaaaattggtaaaaggaaagaaataataaagatcagagaagaacaaatgaaatagagactaaaaattacaaaggatcaacaaaatgcagtgttggtttgttaaaaagataaatacaattgataaatagctagccagactaaccaagaaaaaatagaggacaaaaaatgagaaataaaaaggcaatattacaacttccatcaaagtaaaaaaaagtcattagagattattatgaacaactatatgctaamaaattttaaaacctagaagaaatggataagttcctggacacagacaacctaccaagattgaatcaggaagaaatagaaagcctaaatagactaataatgagtcacaagactatcagtagtaaacatcttcatcaaacaaaagcccaggaccacatggctttatgatagaattctatcaaacttgtaaagaagaacttataccaattcttgtctattaataaaaaaatggaggaggagggacttcttcctaattcatt

SEQ ID NO: 314828 - DNA, 572 bp, Homo sapiens
aataactcaaataaaaattttaacaatgcaccttaaagaactagaaatgcaagaagaaatcaaacccaaaattggtaaaaggaaagaaataataaagatcagagaagaacaaatgaaatagagactaaaaattacaaaggatcaacaaaatgcagtgttggtttgttaaaaagataaatacaattgataaatagctagccagactaaccaagaaaaaatagaggacaaaaaatgagaaataaaaaggcaatattacaacttccatcaaagtaaaaaaaagtcattagagattattatgaacaactatatgctaacawattttaaaacctagaagaaatggataagttcctggacacagacaacctaccaagattgaatcaggaagaaatagaaagcctaaatagactaataatgagtcacaagactatcagtagtaaacatcttcatcaaacaaaagcccaggaccacatggctttatgatagaattctatcaaacttgtaaagaagaacttataccaattcttgtctattaataaaaaaatggaggaggagggacttcttcctaattcatt

SEQ ID NO: 314829 - DNA, 579 bp, Homo sapiens
cttgactgtgaaggatgaagggaagatgagtcagaagcaggctgtgagaatccagcatcagactatcatgaagcattgacttctctgaagtgagagactgatgaaggaaggattaggtagtaggagtctcaggcaggccaggtacacggagacagagtttaaaaaatgcctgtgctgtgaaggaatgtcttgggcaagtatggcccagctccagcatccccgttgtgttcagtcattgtctgtgagaagcacagggaaaaagagtccttggcataatacggtgggggcggcaggtccaacagtacagaggctggagtctgtccagtamctaatctccttgcagaagattcgcttgaacaagatctaagcaacacacttccattgccacctcaggatcatatctatcaagtgtttaattttattttttatagatgtaggcatttacaattctaatctccctctaaatacttcttgcactgaatcttacctgttttaaaagttaatacttttattattcttcacgtgtattttctaatatctattatatctgttacgtagttttttgtttgtttgtttgtt

SEQ ID NO: 314830 - DNA, 389 bp, Homo sapiens
gtataatcctgcccttgttatcatcaaactctgtaacacatctggaatcctgtcatataagcttgccactatgtgaccagcagtttctctcatccttgcttattccaacaacttttttaaccacattaaaatcttcagttttttttactttaatttgtatgcttcaccacctccactcacttttctcacatttttacttcactccttatgttgtctaaattatatggaccaatattttaataayttatttgcaaacactactaagcctcttgtcccatctcttcctccataattcccaccaaccaaaactgcaaacctgcttataatatctgcctattctgcaaatttatacaagcagcaatatgttccaagactttaaaaaatcacat

SEQ ID NO: 314831 - DNA, 565 bp, Homo sapiens
tctgtcccaaaatctagactggtgcagacagaaaatattatttgacttctcgccttttccctgtagatttagagaaaattatccaatcaacttattacttatacagctaacactttaatgtttacttttctgacacgtgtgttttatttattaattgattctgatattgaggagaaaataaagttccataaatatataagaatttcatcagcataaaatcaaatttaatctaaaaaaatagaaaacttgtcaacattccttttcagctactgctgtaatatcctactcctcttctcactgaaatttctttttttaaaaaaatcattttggccagattcctctctgttatcttatatttttctttcctcaggcctgtacctccagttaggatgccatgaccttcactctctgggtggcgttttcttacatcaycagcaagcacactgatatttaaggagaatatccctgtcttaatctgcttgaatccttagctccttccttattgagattattgttttaagttctgttacactcacttgttaaagtttttatttattcatgcaat

SEQ ID NO: 314832 - DNA, 509 bp, Homo sapiens
gacaggaggagcacattaaacactcccattcaaaaatgaaaagaaagggaggaatttagaagtcactagttcatggtaattctcaaatcccactggatcaattttgtgaggtcaccttacactgttcccagattttatgaggcctttcttcccttgattaaatccgtgttctgctcccttaacttctttccccagcctattaatytctttgacttgctctctatcttctggtgtcctttctttttttccattgtccccttttgccacatctggagagagtggtgggaaatgtgtcctcctgtggaactaagaagttctctgaagctgcttcatagacatgcaagtcttttaatatcttgaatagcctcaatgtcttttagtgcagattggtagtaagtaggccaatgcaacttaataaaaactttgaagcactctatgcatttcattatatttcattttaaatgtcaaaagttataccgagaatttattctttcttcttctctgtctct

SEQ ID NO: 314833 - DNA, 435 bp, Homo sapiens
ttggggagtcacttttctggctgaaaatctctggcttgtggcacctttgctcaagttttgcttgggcctgctgggcttgttccacccactcagcctggcaggctaagttcagctygcattactggcctggatcctatgcctccaagggagacagcaagtcaggcgttgagtggtgaggggtgtgtgagtgagcatggagtccagccactgtgtacagtcagacccgctggctactgacatggcacaggcagctccaggtgccagcatgggctcctgctctctgtgaggctgcagctcaatcaggcgtgctgcaggcagctgccccggctagcaccggggaatgtggtagcacctggaagcttggagacaccagaaactgcagagcctgaaagagagagtaacagccctggctcagggagctctcaggtctgggct

SEQ ID NO: 314834 - DNA, 642 bp, Homo sapiens
ccagggtgtttcaatgagtgttcagctctcagcacagagtgtagctcctctcttctaggcaggtcatcccaacaagtgctcagctctcagagagcacagagggtagctcctcttcacagctggtcaacctatcatctttttcagctttcagtggacaaggtagctcctctctgcaaatggtcatcttgcagcctcctcactttctctctgcagytggtcaacctgttgtctccccatccacttcccatcctctctttgagtctggctgagtctgggatttttatgggcctcagaggaaaggaagtgggtgctgactggtccatgggtggccatgggtgggcccagggaaaagcatcacacattcccactccagtctatgggaccagcagcacagcccccaggcttcaggccttccccagcttgaagctggggcttcaccagagacccaccctcttccacccaggagcctgtctcctgccacccttcatggcacccaggctgtttgtgccaaggggtgccttcgggccagtgtcaagctgccctcagcccctccttggcctcccttccatgctccttggtgcccaaagtctggaggtggccaaggtggtagggggctgacatgtcaggagtgccccaagcata

SEQ ID NO: 314835 - DNA, 642 bp, Homo sapiens
ccagggtgtttcaatgagtgttcagctctcagcacagagtgtagctcctctcttctaggcaggtcatcccaacaagtgctcagctctcagagagcacagagggtagctcctcttcacagctggtcaacctatcatctttttcagctttcagtggacaaggtagctcctctctgcaaatggtcatcttgcagcctcctcactttctctctgcagttggtcaacctgttgtctccccatccacttcccatcctctctttgagtctggctgagtctgggatttttatgggcctcagaggaaaggaagtgggtgctgactggtccatgggtggccatgggtgggcccagggaaaagcatcacacattcccactccagtctatgggaccagcagcacrgcccccaggcttcaggccttccccagcttgaagctggggcttcaccagagacccaccctcttccacccaggagcctgtctcctgccacccttcatggcacccaggctgtttgtgccaaggggtgccttcgggccagtgtcaagctgccctcagcccctccttggcctcccttccatgctccttggtgcccaaagtctggaggtggccaaggtggtagggggctgacatgtcaggagtgccccaagcata

SEQ ID NO: 314836 - DNA, 642 bp, Homo sapiens
ccagggtgtttcaatgagtgttcagctctcagcacagagtgtagctcctctcttctaggcaggtcatcccaacaagtgctcagctctcagagagcacagagggtagctcctcttcacagctggtcaacctatcatctttttcagctttcagtggacaaggtagctcctctctgcaaatggtcatcttgcagcctcctcactttctctctgcagttggtcaacctgttgtctccccatccacttcccatcctctctttgagtctggctgagtctgggatttttatgggcctcagaggaaaggaagtgggtgctgactggtccatgggtggccatgggtgggcccagggaaaagcatcacacattcccactccagtctatgggaccagcagcacagcccccaggcttcaggccttcccyagcttgaagctggggcttcaccagagacccaccctcttccacccaggagcctgtctcctgccacccttcatggcacccaggctgtttgtgccaaggggtgccttcgggccagtgtcaagctgccctcagcccctccttggcctcccttccatgctccttggtgcccaaagtctggaggtggccaaggtggtagggggctgacatgtcaggagtgccccaagcata

SEQ ID NO: 314837 - DNA, 419 bp, Homo sapiens
tgggtttctctgacttcagaactgtaagaaataaatttctgttgtttataagctaccagatctatggtgttttgttgtggcagcccacacagactaagataccgctgtaggttaaatttacttcatattgaatgaggaagggaataaaactaaggccagatgaaacaagcagggtgctttgtacgtctctggaatgataaggtcttgtaaagtgataaaatctctgtacctgaaaataattatttaaaaacataggaggaggagagagactaaaaaataaagaaagcaaattagaaaaaaagaatagactgaaggatgtggamagtggaaggtgggaaaaaatgaggaaaattattatctatttacaggagccgacaataatcattgcgaaattactatagtgatgttttttccttctc

SEQ ID NO: 314838 - DNA, 617 bp, Homo sapiens
gtgatcacacatttcctaattttgattctgtcaaagtacctctggtatatttattacttttaacaaatattttaaatgattattcttacccattcatttataagttaactaaataaaacgaaggatcatggaaaacttaataatattcaagaggtacaaagtaatactaaaaatttatataggagattttgatttatggcttgaaagtactctcatctagctctcatacatagttaagaattcttgctgggcacagtgactcacacctgtaatcccaggactttgggaggccaagggagggtggatcacgaagtcaggagtttgagaccagcctggccaacatggtgaaactccattgtccctgtttgcagatgacatggttgtatatctagaaaatcccatcgtctcagcccaaaatctccttaagctgataggcaacttcagcaaagtctcaggatacaaaatcaatgtgcaaaaatcacaagcattcttatacaccaataatagacagagagccaaatcatgagtgaactcccattcacaattgyttcaaagagaataaaatacctaggaatccaacttacaagggatgtgaaggacctcttcaaggagaacta

SEQ ID NO: 314839 - DNA, 608 bp, Homo sapiens
gtctttcaatctgatggtaagtcaggtcttacccaccaaggaagggagaaacacagtattagcacayggcagaaaaaaagacaagcaaataatatgtctactcttgataaagaagattttgatacattcacagagcgagaaaaaagttagtaataactgctgtgacagttaatgcatccagtatgtttatataaaatgtatgaagaatatcggtattaaaaaaataaaaaagcaaaatgtaacagtactaggagaactttaagatagcattctcactcatttgtttagaaattcaaatgataaacaagaatcgagaatatctgaataatattttatagccattagaatatgcatgtatgtgtatatatgtatacacatacacaaacacacattaacatgtttatatgtatatatatgcagtaacacgtgtttgtgtgtgagtgcatgtatatacatctccacaaaactttcatacaattcaatgatggtttgtcttctagctacgaaacatcaaaaatagatgatcaattttaccatatatgaaatttcacaaaacaataaaatttgaaaccattaagaaaaggccatttaaataaattaaacaatta

SEQ ID NO: 314840 - DNA, 608 bp, Homo sapiens
gtctttcaatctgatggtaagtcaggtcttacccaccaaggaagggagaaacacagtattagcacacggcakaaaaaaagacaagcaaataatatgtctactcttgataaagaagattttgatacattcacagagcgagaaaaaagttagtaataactgctgtgacagttaatgcatccagtatgtttatataaaatgtatgaagaatatcggtattaaaaaaataaaaaagcaaaatgtaacagtactaggagaactttaagatagcattctcactcatttgtttagaaattcaaatgataaacaagaatcgagaatatctgaataatattttatagccattagaatatgcatgtatgtgtatatatgtatacacatacacaaacacacattaacatgtttatatgtatatatatgcagtaacacgtgtttgtgtgtgagtgcatgtatatacatctccacaaaactttcatacaattcaatgatggtttgtcttctagctacgaaacatcaaaaatagatgatcaattttaccatatatgaaatttcacaaaacaataaaatttgaaaccattaagaaaaggccatttaaataaattaaacaatta

SEQ ID NO: 314841 - DNA, 608 bp, Homo sapiens
gtctttcaatctgatggtaagtcaggtcttacccaccaaggaagggagaaacacagtattagcacacggcagaaaaaaagacaagcaaataatatgtctactcttgataaagaagattttgatacattcacrgagcgagaaaaaagttagtaataactgctgtgacagttaatgcatccagtatgtttatataaaatgtatgaagaatatcggtattaaaaaaataaaaaagcaaaatgtaacagtactaggagaactttaagatagcattctcactcatttgtttagaaattcaaatgataaacaagaatcgagaatatctgaataatattttatagccattagaatatgcatgtatgtgtatatatgtatacacatacacaaacacacattaacatgtttatatgtatatatatgcagtaacacgtgtttgtgtgtgagtgcatgtatatacatctccacaaaactttcatacaattcaatgatggtttgtcttctagctacgaaacatcaaaaatagatgatcaattttaccatatatgaaatttcacaaaacaataaaatttgaaaccattaagaaaaggccatttaaataaattaaacaatta

SEQ ID NO: 314842 - DNA, 585 bp, Homo sapiens
ttctataatatgtatactttaaatgtttaatttcatcctctggatcttcttaggtcttggttccctagaatcagggacagaagaagaagttcctgtatgaattatttattaaggaagtgctatcatgcaaggaggtaatagaagcaaaaccaaatagaaaaggaagttgaacaaagaggtgtggctcagcctgattttacaggtatacctgtagtttgaatggctcttcacgattgttatgtctccatacaaagggtctggcttttatattcccacattagtcatgggcctcagtcctcactacccccaggatgtgcacattaggacaccaggaaaatcacttatatgggtatgtgttgcttttgttggcagaaagccatgataaatagtttcatgtaggctgtttaaatcatttgttgaaagttataaattagataaattaattttttaaaactktcttttcttttgctaatagcccacagtgtttttctataatttctatgtcctcagataacatggaaggctcacactatttcttgtttgtgtaaatgtttttccaaagcagactgcatagtgtacctagat

SEQ ID NO: 314843 - DNA, 608 bp, Homo sapiens
gtctttcaatctgatggtaagtcaggtcttacccaccaaggaagggagaaacacagtattagcacacggcagaaaaaaagacaagcaaataatatgtctactcttgataaagaagattttgatacattcacagagcgagaaaaaagttagtaataactgctgtgacagttaatgcatccagtatgtttatataaaatgtatgaagaatatcggtattaaaaaaataaaaaagcaaaatgtaacagtactaggagaactttaagatagcattctcactcatttgtttagaaattcaaatgataaacaagaatcgagaatatctgaataatattttatagccattagaatatgcatgtatgtgtatatatgtatacacatacacaaacacacattaacatgtttmtatgtatatatatgcagtaacacgtgtttgtgtgtgagtgcatgtatatacatctccacaaaactttcatacaattcaatgatggtttgtcttctagctacgaaacatcaaaaatagatgatcaattttaccatatatgaaatttcacaaaacaataaaatttgaaaccattaagaaaaggccatttaaataaattaaacaatta

SEQ ID NO: 314844 - DNA, 558 bp, Homo sapiens
gaggcatgcttccattttctgaacttcccttgacttttgcctgttgtatatgttaagcatgyatgcagtaagatagcaaaacagaaacaacagcatttcctgccctattacgctctcagaagtattagccttcagcgtgtattaagcccataggtcatactggtaaattgttttgaatgacaaagctacataattcggctaatagggatatcacagcagtgagcagaacatcggtgcatcacataaaaagggacattctctcagtgtgtccttttggtgctgtcaacacataatttgactaaaaatcgtccacccagtctttcaactgtagtgtaactaattttgcataataagtaaccaggaagaaataattagagattattatataaaaaccctgtttcctttcaacatttgacccactagctttaatagtcttcgtagattcttttctgagtcaagtctttgaatgttgcacatggtgattttccaactttattattccttctatatagtatttataggttggaattctactttaagaaagaaatctcctttcct

SEQ ID NO: 314845 - DNA, 603 bp, Homo sapiens
aagcagctttttgtttgatttatcttctgtaattgtttttgtttcaatttcatttagttctgttctgatcttggttatttcctttcagctgctgggtttgattttggtttgttcttgtttctctagttcgttgaggtgggaccttaaaatgtcagtttgtgctatttcagtgttttttatgtaggtgtttagggctatgaattttcctcttaacaccacctttgctgtatcccagaggttcttatttatttatttttgtgatggagttttgctcttgttgcccaggctggagtgcaatggcatgatcttggctcactctaacctctgcctgctgctggattcaagtgattctcctgcctcagcctcccgagtagctgggattacaggcatgcaccaacatgcccagctaattttgtatttttagtggagatggggtttctccatgtttgtcaggctggtcttgaactccctagctcaggtgacctgcccgcytcagcctcccaaagtgctgggattacaggcatgagccaccatgcccagccccccagaagtttgatagcttgtgttaatattgtcatttggttcaaagaattttttaatttc

SEQ ID NO: 314846 - DNA, 565 bp, Homo sapiens
attcaagtgattctcctgcctcagcctcccgagtagctgggattacaggcatgcaccaacatgcccagctaattttgtatttttagtggagatggggtttctccatgtttgtcaggctggtcttgaactccctagctcaggtgacctgcccgcttcagcctcccaaagtgctgggattacaggcatgagccaccatgcccagccccccagaagtttgatagcttgtgttaatattgtcatttggttcaaagaattttttaatttccatcttgattttgtatttgacccaatgctcattcaggagcaggttatttaatttccatgtaattgcatggttttgaaagttccttttggagttgatttccagttttattccactgtggtctgagagagggcttgatgtaattttgattttcttaaatttattgaggctattatatggcctatcacatagtctgtcttgtagaaagttccatgcactgttgaatagaaygtgtattctgcaaatggggatgaaatgtgctgtatatatctgttaagtctatttgttccaaggtatagttca

SEQ ID NO: 314847 - DNA, 567 bp, Homo sapiens
aaagcaaaaatccactgctctggggaagcgtacatgcaaaatcctctgcccttgggggtgaggcagaaaaatcaggctctgaagtctttgggaatacaaatcgctgttccactaccactgwtcacaggggaataactttatcttatagaagacccacaagaagccaggtgcagtggctcatgcctgtaatcccagcactttggcaggctgaggagggtggatcatttgatgtcaggagtttgagaccagcctggcctacatggtaaaaccctgtctctactaaaaacacacaaaaacattagccaagcatggtggtacatgcctgtagtcccatcttctggggaggctgaggcaggagaattgcttgaacccaggaggtggaggttccagtgacgagttcacactactgcactccaccttgggcgacggagtcagactctatctcaaaacaaaacaaaacaaaacaaaacaataacaacaaaaaaagacccacaacagatacaagacaaaatttggctgccatgggtggagcagaggcaggaacactgaaaagccctaactcctgag

SEQ ID NO: 314848 - DNA, 567 bp, Homo sapiens
aaagcaaaaatccactgctctggggaagcgtacatgcaaaatcctctgcccttgggggtgaggcagaaaaatcaggctctgaagtctttgggaatacaaatcgctgttccactaccactgttcacaggggaataactttatcttatagaagacccacaagaagccaggtgcagtggctcatgcctgtaatcccagcactttggcaggctgaggagggtggatcatttgatgtcaggagtttgagaccagcctggcctacatggtaaaaccctgtctctactaaaaacacacaaaaacattagccragcatggtggtacatgcctgtagtcccatcttctggggaggctgaggcaggagaattgcttgaacccaggaggtggaggttccagtgacgagttcacactactgcactccaccttgggcgacggagtcagactctatctcaaaacaaaacaaaacaaaacaaaacaataacaacaaaaaaagacccacaacagatacaagacaaaatttggctgccatgggtggagcagaggcaggaacactgaaaagccctaactcctgag

SEQ ID NO: 314849 - DNA, 530 bp, Homo sapiens
ttttgtgtgtcagtacttaggcactgggaatccaatagtgaataaaaaacagacatgattctttcatgagcttactgagtattggaggaaacttttgctaaataaacattcatagacatagatgtagagctacactgtggtgaaagtaatgaaggagacacttggtgctatgagagcagtatggcagggggccgacttgtctgcatcagcaagaattctttcctcttgaaaagatgactaatctgaaatgtgaaggataaagagatattaactgtgggtgaatgaagaagaaacactctggagatgcaaaggcttttcaggtggagcatacatggagcyttcggggagttgaaaggaggacaatgtattttgacatagaggacaaaggcaggaggatgtgtgaaaggaagctctaaattccttctcttgtaataccccaagctgtccttttagttttgctttcatttactcatttattcattatttgattcattcaggcattcaacaaatgactattccatgccagttct

SEQ ID NO: 314850 - DNA, 584 bp, Homo sapiens
actgtgggtgaatgaagaagaaacactctggagatgcaaaggcttttcaggtggagcatacatggagccttcggggagttgaaaggaggacaatgtattttgacatagaggacaaaggcaggaggatgtgtgaaaggaagctctaaattccttctcttgtaataccccaagctgtccttttagttttgctttcatttactcatttattcattatttgattcattcaggcattcaacaaatgactattccatgccagttctagggccggcaccatattaggtacagataagatcatgattaaggtatagccctggccccaaagagcttacaggagagaaaaagatgtcaagatgctatgcgccctagaggaagagcactatccttgacstacatttaggaagctcatgaattagcagagtgaggaggagaatgaagagaatttcaagaagtagaaaaagtgtgtacaaaggtccagaggcaggctaggtgtggtggctcatgcctgtaataccagaattttgggagatcgaggcaggtggatcacttgagccctggagtttaagaccagcctgggcaacatggga

SEQ ID NO: 314851 - DNA, 613 bp, Homo sapiens
cactagaagaactcacagaactcactgaaagtgattatactcaaggttatgacttatasggaaaggttacagattaaaataaaccaaagaaagagatgcataaggcaaagcctgggagagttccaattgcaacgtttcaattgttggatgcattaccctcctgccattgacctcatgcattacccccctgccattaacctcctgccatgtgacaatatgcataaagtattgtcaaccaaagaaacttatctgagcctcgtatttagagtttttattagagctcaattatgtagacatgatggattgactgattatatacaagattgaacttagtgttcaggtcacctgataaccatgtgacccaaagcttccaccctaagtcacatggtcatctggtattgccatccccaccctaagttccactggagccagtcctcaccctaaacaaagacattgctgtcatatatgatacagattacctccaagaagcctagggcaaaacccaggcctctcttcaggcaagggtaaaccctttactacataagcatcctaggtttgttgttcattaattttcccttgtaattcatccttattattgagcaaacacatattc

SEQ ID NO: 314852 - DNA, 613 bp, Homo sapiens
cactagaagaactcacagaactcactgaaagtgattatactcaaggttatgacttatagggaaaggttacagattaaaataaaccaaagaaagagatgcataaggcaaagcctgggagagttccaattgcaacgtttcaattgttggatgcattaccctcctgccattgacctcatgcattacccccctgccattaacctcctgccatgtgacaatatgcataaagtattgtcaaccaaagaaacttatctgarcctcgtatttagagtttttattagagctcaattatgtagacatgatggattgactgattatatacaagattgaacttagtgttcaggtcacctgataaccatgtgacccaaagcttccaccctaagtcacatggtcatctggtattgccatccccaccctaagttccactggagccagtcctcaccctaaacaaagacattgctgtcatatatgatacagattacctccaagaagcctagggcaaaacccaggcctctcttcaggcaagggtaaaccctttactacataagcatcctaggtttgttgttcattaattttcccttgtaattcatccttattattgagcaaacacatattc

SEQ ID NO: 314853 - DNA, 596 bp, Homo sapiens
gttggggctacaggcgtgagccaccgcgcccggccgcccctatctaattttagaacattttcaacacccgcaaaagaaatcctgaaccctttagcagtcattcccaccccttttttttttatcctcagtccctggcaaccactaatctactttctctgtctaagcagttgtctattctgaacgtttcacataaatggaatcatacaatatgtcatcttttgtgtctggtgtctttcatttagcataatgttttcaagtttcatctatgttgtggcatgtttcaatacttcgttcctttctgcagctgaataatattctattgtatggacatataacattttgtttatccatytatcagttgatggacattttgggttgtttccactttttggctattataaataatgctactacatgaacatttgtgttcaagttttggtgggaacacgtgcttttaattctcttcaatatatacatagaagtgaaatttctgggtcatatggtaactgtgcttaatattttgaagaactggcaaactatttgtggctgcattgttatacaatcccagaagcaatgtaggatttgaaggttctgat

SEQ ID NO: 314854 - DNA, 629 bp, Homo sapiens
gtacttgcacatttgctgaacattgatgatggtgatgatgacgaaagtaaatactcatagtaatagcaatgtattttttccacgtattatctcatttaatccttgtaataactctatgaaacaaatactattcattttcctaatttatagatamgaaaatgatgctttagggagatcttgtaacttgcttgaggacagaaaaataagtgacagaaaatgatatcggagccttggcacttaacattgcactatagtctgtcgatatagaatgcatttgctgtatttctaagaaagttcacgttattaaaattagatgatagaatttaagttctatgaagaaagaaattctgttttatataaatctatatccttggcacctagagcaattctttttttttttttttcttgagaaggagtcttgctctgtctcccaggctggagtgcagtggtgcgatgcaacctctgcctcccgggttcaagcaattctcctgcctcagcctcccgagtagctgggactacaggcgcgtgccaccatgcctggctaattttttgtatttttagtagagacagggtttcaccatgttagccaggatggcctcgatctcctgacctcataatctgcctgactc

SEQ ID NO: 314855 - DNA, 629 bp, Homo sapiens
gtacttgcacatttgctgaacattgatgatggtgatgatgacgaaagtaaatactcatagtaatagcaatgtattttttccacgtattatctcatttaatccttgtaataactctatgaaacaaatactattcattttcctaatttatagatacgaaaatgatgctttagggagatcttgtaacttgcttgaggacagaaaaataagtgacagaaaatgatatcggagccttggcacttaacattgcactatagtctgtcgatatagaatgcatttgctgtattkctaagaaagttcacgttattaaaattagatgatagaatttaagttctatgaagaaagaaattctgttttatataaatctatatccttggcacctagagcaattctttttttttttttttcttgagaaggagtcttgctctgtctcccaggctggagtgcagtggtgcgatgcaacctctgcctcccgggttcaagcaattctcctgcctcagcctcccgagtagctgggactacaggcgcgtgccaccatgcctggctaattttttgtatttttagtagagacagggtttcaccatgttagccaggatggcctcgatctcctgacctcataatctgcctgactc

SEQ ID NO: 314856 - DNA, 629 bp, Homo sapiens
gtacttgcacatttgctgaacattgatgatggtgatgatgacgaaagtaaatactcatagtaatagcaatgtattttttccacgtattatctcatttaatccttgtaataactctatgaaacaaatactattcattttcctaatttatagatacgaaaatgatgctttagggagatcttgtaacttgcttgaggacagaaaaataagtgacagaaaatgatatcggagccttggcacttaacattgcactatagtctgtcgatatagaatgcatttgctgtatttctaagaaagttcacgttattaaaattagatgatagaatttaagttctatgaagaaagaaattctgttttatataaatctatatccttggcacctagagcaattctttttttttttttttcttgagaaggagtcttgctctgtctcccaggctggagtgcagtggtgcgatgcaacctctgcctcccgggttcaagcaattctcctgcctcagcctcccgagtagctgggactacaggcgcgtgccaccatgcctggstaattttttgtatttttagtagagacagggtttcaccatgttagccaggatggcctcgatctcctgacctcataatctgcctgactc

SEQ ID NO: 314857 - DNA, 574 bp, Homo sapiens
cctctgggcccatctagctaaacttgtggagcttaactgagcaaaacatttgctgatgtctctccctacagtgrtacccattgaaatgaataccttctacaagatgaaacctaggaaatgtcgtttccaattggctttctagtgattggggttgatgtcttttccaaattggctttctagtgatttgggttgcttcattaaatgtttttggttgtttcataacaatagtaatctcattttctttcaaaagtagagtttgaaatttgggaaaacatgggtggggagggaattctatattttcttcctagttgaagtaggaagacaggtctcttttctggattaattggactcctggaaattcccccagggtagcagtggctctctgtgggcacagggctcttatgcttatgttcctgtgcttcaatgtaccttccatgctgagagcaaatagaaggtgttcctgcacaagcaaaacctaacggagaggctgcaataatttgtccaaaacgaagtgcaaactgcaagggagagtggactttttcagactgatcctgtttactagtctggtgctttc

SEQ ID NO: 314858 - DNA, 574 bp, Homo sapiens
cctctgggcccatctagctaaacttgtggagcttaactgagcaaaacatttgctgatgtctctccctacagtgatacccattgaaatgaataccttctacaagatgaaacctaggaaatgtcgtttccaattggctttctastgattggggttgatgtcttttccaaattggctttctagtgatttgggttgcttcattaaatgtttttggttgtttcataacaatagtaatctcattttctttcaaaagtagagtttgaaatttgggaaaacatgggtggggagggaattctatattttcttcctagttgaagtaggaagacaggtctcttttctggattaattggactcctggaaattcccccagggtagcagtggctctctgtgggcacagggctcttatgcttatgttcctgtgcttcaatgtaccttccatgctgagagcaaatagaaggtgttcctgcacaagcaaaacctaacggagaggctgcaataatttgtccaaaacgaagtgcaaactgcaagggagagtggactttttcagactgatcctgtttactagtctggtgctttc

SEQ ID NO: 314859 - DNA, 574 bp, Homo sapiens
cctctgggcccatctagctaaacttgtggagcttaactgagcaaaacatttgctgatgtctctccctacagtgatacccattgaaatgaataccttctacaagatgaaacctaggaaatgtcgtttccaattggctttctagtgattggggttgatgtcttttccaaattggctttctagtgatttgggttgcttcattaaatgtttttggttgtttcataacaatagtaatctcattttctttcaaaagtagagtttgaaatttgggaaaacatgggtggggagggaattctatattttcttcctagttgaagtaggaagacaggtctcttttctggattaattggactcctggaaattcccccagggtagcagtggctctctgtgggcacagggctcttatgcttatgttyctgtgcttcaatgtaccttccatgctgagagcaaatagaaggtgttcctgcacaagcaaaacctaacggagaggctgcaataatttgtccaaaacgaagtgcaaactgcaagggagagtggactttttcagactgatcctgtttactagtctggtgctttc

SEQ ID NO: 314860 - DNA, 574 bp, Homo sapiens
cctctgggcccatctagctaaacttgtggagcttaactgagcaaaacatttgctgatgtctctccctacagtgatacccattgaaatgaataccttctacaagatgaaacctaggaaatgtcgtttccaattggctttctagtgattggggttgatgtcttttccaaattggctttctagtgatttgggttgcttcattaaatgtttttggttgtttcataacaatagtaatctcattttctttcaaaagtagagtttgaaatttgggaaaacatgggtggggagggaattctatattttcttcctagttgaagtaggaagacaggtctcttttctggattaattggactcctggaaattcccccagggtagcagtggctctctgtgggcacagggctcttatgcttatgttcctgtgcttcaatgtaccttccatgctgasagcaaatagaaggtgttcctgcacaagcaaaacctaacggagaggctgcaataatttgtccaaaacgaagtgcaaactgcaagggagagtggactttttcagactgatcctgtttactagtctggtgctttc

SEQ ID NO: 314861 - DNA, 621 bp, Homo sapiens
ggggttatatagaggaagggccttgggtagggttgaaatttcccacaaaaataaagtcaacacaatggtttgattttttttttcagatatggaaccccaggtttcctaaccagggattcatctctcaaatctctctatatgtgggtttcctgctatatttttaggcttctgttacagccaagtaaaaccctatctccattatagcagtctgtgagttttctagattaatcttcctactttcaaatggggccacagatagaccaaatattctacatagatggggtgttttaaaataactgctctgttctcagtttccttagctggaaagtgggaataacaatagaacctatgccaaagaaaaattatttgatgcagagaaagcactcaagcactcgggatatgcctaatacaaagcccacccttaattcattatagctgttattgttacttaatgtacttcctggttatattctggcaacaagtgggttccaccttccctcagaagcctttttaaaaaactgtcttgtttatacatattaaaggaagaacaagtttactattccaagtagctcctttcrattattgattcattctgcctttaattccttcaacaaatactga

SEQ ID NO: 314862 - DNA, 541 bp, Homo sapiens
aaatactgacgttttgcagaggtgatacgggatgttccaatacagacgtggtctctgtcctcagggatctttcaatctagcaaaggagatagtatgagacaaataattttgcaaataaatatatagttaccaattgtgataagtgatatttaggaaaggcacaagatgccttggggtcataaggtggaaaggtggatctaatttagatcgggagttcaaggacagcctctcagacagctgaaactgagaactaaaggatgaatttgcaattaacaagacctgaaagcattttaggtagaagggacaataggtayaaaagcccagagagataaaatagcctaactgattcaaggaatggaaagatgactatggctaggaacagggagaagagtgataaaaatgagaatggagtctgcagttcattttgaaatgtaccagaagcaagaaagattaatgctaagagagagggatgggtaaatggatagacatatgataaagcaagtataaaatgttagtcactggccagccatggtggtgtatg

SEQ ID NO: 314863 - DNA, 546 bp, Homo sapiens
tctcaaaaaaaaaaaaaaaaaaaaaaaaaaaattcagtttgaatgctggaagaggagtgataagtgaacactgtgactgtcagcttctatagcaagaatcctttttaaggtctgtcacctgaagatctgggtgaaaaggctttagcaatgagcctggcccttagatttatagcccctttggtccttatgtcttggctgcracaagaaagctaagactatatctctgatctcagccaatcattttataaggggactgagcaatggtctggatgagtcagtgaaaatcaattgcaatgatggaaaactcatctaagaaaaaatgtcctagagccagtgggtcagagccagcccctctgcacatgaaagatttcagtctgtgtttattgacacagagggtggttttaattaccctgaaggaatttctggcatgttttgccaaagccagttttaaaatgtttagtcagtggattagtgactatcggacctactggagaggtctgcatatggggcagcaggtcaagtgtagtgtatggcaatgaggctgtt

SEQ ID NO: 314864 - DNA, 546 bp, Homo sapiens
tctcaaaaaaaaaaaaaaaaaaaaaaaaaaaattcagtttgaatgctggaagaggagtgataagtgaacactgtgactgtcagcttctatagcaagaatcctttttaaggtctgtcacctgaagatctgggtgaaaaggctttagcaatgagcctggcccttagatttatagcccctttggtccttatgtcttggctgcaacaagaaagctaagactatatctctgatctcagccaatcattttataaggggactgagcaayggtctggatgagtcagtgaaaatcaattgcaatgatggaaaactcatctaagaaaaaatgtcctagagccagtgggtcagagccagcccctctgcacatgaaagatttcagtctgtgtttattgacacagagggtggttttaattaccctgaaggaatttctggcatgttttgccaaagccagttttaaaatgtttagtcagtggattagtgactatcggacctactggagaggtctgcatatggggcagcaggtcaagtgtagtgtatggcaatgaggctgtt

SEQ ID NO: 314865 - DNA, 595 bp, Homo sapiens
aatggactaattatgaaccttttgttctatattagtggtatgttgaagcttcccattaaggcctaattttttttaatcttacaygtttattttgaatatttcttcttatatcacctttttcatagtttctcgtaggatataacctcatacttctgaacgcttgcagagaaatggggccatttctaacgagtgaggtgacttacttctgctcctgaatagttcctattgcatagaagttgttctgcaccagagcattctctttcacccactgctcctagccctgcaccataaaaccctaccccaaacgctgagtatcctgtccacaggaccctactttggctatatgaagccagctctcctgatcactacagcctcttcaaaactccctagaggtcatacagcagctgttttcaaactttaacgtgcattagaatcacctgaagtatttgttaaatacaaggttccaggctccaccccctcaagcttagaataggtctataggcctgtgagtttgattttttcagtttcccaggtaatcctactgctgctgatgatgatcaggagcaacactttgagaccgtggctctctgtctgt

SEQ ID NO: 314866 - DNA, 621 bp, Homo sapiens
tttgttccgtaggacacaaattaatttacattttttaaatagttattgtacataggaagcatagtttgatttactgttttaagaacaagaacatattttgaccaaatgtacatggggatgatataactggttataaaattaccaggagagagagtgttggttaaacaagaatagagcctgctttattgatgttaggtttgtcgaataagctagagaacaaagtagatatattaactgctcaaacaaagaaaaagagcttggggtcaagacacaaagaaaaagagcttggggtcaagaggcaaagaaagacaatatgggcatcttactttgaatataacgaagaataaaaggtatcactgaacaggtaatttccaatgagaaaatagatctagaaatcactgtgtaggaaaaacaacttctcacctgtatcaaatattctaaagccctttmattattaactcctaagtagttacacttgatttggatgaagtagcatgaaggcttctgctaggcttttttattcatttctcgatacagtgtgtggtgaggctttagctttacagcctccacatttggctatattttgggataatggaaaataaaatttaatacaaaagaact

SEQ ID NO: 314867 - DNA, 585 bp, Homo sapiens
  misc_feature (1)...(585): n = A,T,C or G
accctctggggaaatatattaataaagaataataaagataaatgtacaattgcaaccgtgacaagcactctgaaggagttagtagtactctgagagtgtgtaataagaggattattggacctagacagggaaggcttccctggtgaaagaataattgctaaatccgaaagtcataataagagttagctctgttgaagaggagatgggaagatgacccaggcagggagaactgcatgtacaagggctttatggtagtagcagtagagagagtgtgtgttcaaaaagtgaaaggtggccagtgtggcttaagttcccacaggatggacattagacagaagccacatcttgcagagtcttgcaaaaatatatgagccatttttgctttttatcttatgagtaacaggaagccatttaaatgcttaaatgtagggaagattggggaaagtgaccaagtttgcttttcaaaaatactatkctggctgcagtgcanagaatagattggaaagggtctagaatagatctaaagagacacgtgatttactcacatgaaactgacacaaaatgtacataatatatgcccacgtg

SEQ ID NO: 314868 - DNA, 585 bp, Homo sapiens
  misc_feature (1)...(585): n = A,T,C or G
accctctggggaaatatattaataaagaataataaagataaatgtacaattgcaaccgtgacaagcactctgaaggagttagtagtactctgagagtgtgtaataagaggattattggacctagacagggaaggcttccctggtgaaagaataattgctaaatccgaaagtcataataagagttagctctgttgaagaggagatgggaagatgacccaggcagggagaactgcatgtacaagggctttatggtagtagcagtagagagagtgtgtgttcaaaaagtgaaaggtggccagtgtggcttaagttcccacaggatggacattagacagaagccacatcttgcagagtcttgcaaaaatatatgagccatttttgctttttatcttatgagtaacaggaagccatttaaatgcttaaatgtagggaagattggggaaagtgaccaagtttgcttttcaaaaatactatgctggctgcagtgcanagaatagattggaaagggtctagaatagatctaaagagacacgtgatttactcasatgaaactgacacaaaatgtacataatatatgcccacgtg

SEQ ID NO: 314869 - DNA, 576 bp, Homo sapiens
aactccagataaattgtgcagataacataccctcaaggaagacagcaagttggcatagctccctaagccttaagggtgagctgtacatcatgacttctttctaagggtgcagagtacagtttggaggagaggggagtaactttacagtggagaaacctgacaaacatttcttcagccaggtgatcaagtccaacatgaaaataaggcatgttgatataggtacctttgattgaygtgataggatggaaatggcactttatctctgtggtcttcaatcacgagaaaaacatcaaataaattccactggaggagcatcctacagtataccttactgctattcctcaaaactgtcaagatcatcaaaggtaaggtaagtctgagaaactgccacagcctcaaggagcctgaggagccatgacaactaactgtaatgtactatcctgggtaggatcctagagtagaaaaaggacattagaaaattaagcaaatctgaatgaactatggactttggttaatgattacataccaatattgcttcattacttataaaaacgtaccacactaacataagatatt

SEQ ID NO: 314870 - DNA, 485 bp, Homo sapiens
tgctttgagctttatcttcaaggataaatcagagctacaagggggcattaatgggtggtatgayagtgaagaaaggaggtctcagaagataaaaatacccttaagagacatctagaaatgggagagaagagtatggtattaagggatggcaggtgggttgatgtatttgaggatttgtgcaattgtacatgtgtgtaagcacatgcatgtgcacgtgttgtctgtggatatatatataggtgttggagattgtgtattgtgtgtgtttctctgtggatattttttagtatgtgagaaggttgtgttgtgtgcgatgtgtggtgagtgacctggtgagaagccagggtgtggctgaatgtaccactgtcaaggaggcggaatgatggaaggagggaggcctattagaaggcgatgcactaatcttggtgagagatggtatggcccaggactagcgcagtgcagagggcatggcgtggaaaaggaga

SEQ ID NO: 314871 - DNA, 485 bp, Homo sapiens
tgctttgagctttatcttcaaggataaatcagagctacaagggggcattaatgggtggtatgatagtgaagaaaggaggtctcagaagataaaaatacccttaagagacatctagaaatgggagagaagagtatggtattaagggatggcaggtgggttgatgtatttgaggatttgtgcaattgtacatgtgtgtaagcacatgcatgtgcacgtgttgtctgtggatatatatataggtgttggagattgtgtattgtgtgtgtttctctgtggatattttttagtatgtgagaaggttgtgttgtgtgygatgtgtggtgagtgacctggtgagaagccagggtgtggctgaatgtaccactgtcaaggaggcggaatgatggaaggagggaggcctattagaaggcgatgcactaatcttggtgagagatggtatggcccaggactagcgcagtgcagagggcatggcgtggaaaaggaga

SEQ ID NO: 314872 - DNA, 641 bp, Homo sapiens
agattggatctgcactcagaaacactaagatgggaaacatcttaaacctaaaacattttcatcacattaccacttgccaatgtattattgcggaaggttctggcttgcgttacagagatatcactttctcctcctttcaactatagttgagcatagaagagctcaactatagaagtatagagtatagaactatagagtatagaagagcactaaaaaaaaaattatctttggcacaatagcaaacaaaatwttcaggcaactagctggaacaccagtgagaatttacattcactggacacgtgaggggatctttattataatatggtgagcaattaagcttttgcaagttaaaagtaataccatgtggtatttgctaagcattctcctggatgtttagctatttccaagagactagtctctgcattccaaaaagagaaaggtggaatgagaatacataaaaaagaaattttagacataaaattctaatatcgacaaagagaaatgagcttaggcttcaacaagaatgagagcatcagggttcaagagaaaccacaatgtcaatgagtcccaggtacaagctttttcttctgcatttttaattcatattcccttatcctctgagttgacacttcatgtccacc

SEQ ID NO: 314873 - DNA, 638 bp, Homo sapiens
tgaactataaatcaatagaaattactcaatctagagaatggtgagaaaacagactgcagtaaaattaacaggccctcaaaaacctgtgggacaagctcaagcacagaaacaaccatgtcaggggaatgtcggaaggagagaagagaaagggacagaaaacctatttgaaaaaataatggccaaaacttccaaaatttgattttttagaaaattaatctatacacccaagaagctcaaagaaacccaagcaggataaatacaaatagatccacacttgaacacatcattgtcaaactgttgtatgccaaatccaaagagaaaatcttgaaagcagcaagaagaatagcacgcaccatagaaaggtgagcatccatgcaattaagctggcttctcatctaaaaccatggatgccagaaggaagaagaatagcacatccatactgcaaaaagaaaataatgtcaaacaagaattctgtatctaacaaaactatccttcaaaaatgrgggcaaaataaggacatttttggataaacagagactgagcaaatgtattgctagcagccctgttttaaaagatgtaccaaaggaaggaaggccttccggaaatggtactctatgatagcacaaatccacaggaaa

SEQ ID NO: 314874 - DNA, 560 bp, Homo sapiens
ctacttagcagatgaatttgtgattttggtaattactatgtgaacattaataagacatgatatcttttattaattagcacttcatggggtttttcaaaatagcaaaatctagatgatttacaaatattaatgagtcactagtattagttttgcaaaattaacatttggaggttattcactctagaatagtttttccctctgaagtcttttactgaagaacaaagaccrgagacaacatactgtaccctgcaccctagaaaaggctaatttggtctgcccaggcagaaatggtttaatttagagatgtacttacttaacacatttttccattttaattctctccaaagaggttttggtggtcaaaggataaaatactttcagaaaattaagttatgcttgaggaatgattttctaacagaattctatgagattcagacctgtttttcaaacgtaggggatactgcagacgtacccacccactcccctacaaaacaaacacacacacacacagcataaaaggacacaacagtgtgctggagcagtgtgctggaacaggttgg

SEQ ID NO: 314875 - DNA, 578 bp, Homo sapiens
aatataaatagaatttcagtcattactggaactrtatgttggcctctatttctttcaatttttactaagcatagaacttccttgcatgtttctgccttggatgtagggctactttgaaagtgtgggctaagatggccagacactgtaatgggagagagtaagacccttggagtcctccctgcctttcttaaacatgggatggctgcgtgtgaagactacctcttccaaagcatcaatcctttccctctgccttctcctaccatcctgaagaggcaataataataacaaggacaaacatttatttggcactgtttctgttttaagcacttgactctatgcttctaaaatcacaggaaatagactatttccgccgaatataaactcattcttgccttcagaacatcttacctgcatgggcagacagggcctccagaggacagctgcattccaaaaaagcctgaaataaagcattaggcaagtatctgcctacagggctgaacacacagtgtttttaacaacattttctgcaagttaggtgagagtttcttggctatagataggatttgaacttaccagca

SEQ ID NO: 314876 - DNA, 578 bp, Homo sapiens
aatataaatagaatttcagtcattactggaactgtatgttggcctctatttctttcaatttttactaagcatagaacttccttgcatgtttctgccttggatgtagggctactttgaaagtgtgggctaagatggccagacactgtaatgggagagagtaagacccttggagtcctccctgcctttcttaaacatgggatggctgcgtgtgaagactacctcttccaaagcatcaatcctttccctctgccttctcctaccatcctgaagaggcaataataataacaaggacaaacatttatttggcactgtttctgttttaagcacttgactctatgcttctaaaatcacaggaaatagactatttccgccgaatataaactcattcttgccttcagaacatcttacctgcatgggcagacagggcctccagaggacagctgcattccaaaaaagcctgaaataaagcattaggcaagtatctgcctacagggctgaacacayagtgtttttaacaacattttctgcaagttaggtgagagtttcttggctatagataggatttgaacttaccagca

SEQ ID NO: 314877 - DNA, 613 bp, Homo sapiens
  misc_feature (1)...(613): n = A,T,C or G
actgtgntcgatgtcccaaatcatgccatcactcccagcttgggaagggatccccaagcccaagtcagtgaaaacagagacattgcctgattttaagggcccagtacctgatggatactaacagaggacccatcanngcagtggccagtgtggaccacagtccagagggctcccaccaaatggcctggatctccccaggcctgggctgggagccaaggtcgagtgaacccccattacaagtgcgatcyaattctttcccactccaagagacaagactcagatttagatttacttctactctaaaaacaaacaaacaaatatattgatgtgaaatttcttgcatctgcatatcatagaataacattcacacctgctacacatgtttaaatgtttaaaaactcgagttgctggtgcagagttattgctcacgccttgggctttcatcaagagatgcagctgtggaactgttgggggtaggagggggctggttttattcagaatccttagctccaagatgtgcttactgatgctatggcagaaccaaggcaaaacaacatggaggctccttggagatcacttggaatggaccaacaaccacatcctacagctctcc

SEQ ID NO: 314878 - DNA, 607 bp, Homo sapiens
gccaggacaatgtgtcagaatcatgagttaaaccagaattagcatagtttgcgagtgcattcctaacaggcccttgtttgtatgctttctgagttattagttctgcaaagaacacatttcttacttccttattttgccagtgttttagaaggcgagggaccagaattctgttctctggaaagtgggttataactgcatggtatcccattctccccagtcccctctactctttatctrgtgacacaccatctcttatgtgaaatgtctgctagccagtcaaatatcttcttcttaaagccttttaacaagcacactatcaaaagtggtgctgtctgcctttttcaacaaacggaaatttccaaaagtcaggtttttactggctttccctgaaacagaaaactctgaaccagtggcagtgacactcgatcacagtggctatacatttggaagcatatctaatacacacacaaaatctatgctccttctgaggactctggctaagcatactgcagtgagaaggagagaaaactgtgtttcaaaatctcacaaagttgaagagcaggaagttttgtgagtccaagagcagtgacagacactggaccaacaa

SEQ ID NO: 314879 - DNA, 581 bp, Homo sapiens
tgcatagaccaatttttaacctctaagattctctccataaatatacctccacagataatggaagaaagaagcttgcaggatgtgccacctagaaagggtgcccagctatatcctgagaaaatcatcaaacgtttctcacaatagggctccttggaaaaagactcaattagtggttcattatcagattactagagaatcatttaatattagccagcaagccagaaatttaatcttaacttctcccttgccctcagcccattagttctaaacctttcaattctgtcttctccgcttgtcttgggtctttctttcctgttcacctcacgtgatgatgcttcaaagtaagatcctcaacatcttgttcctggacaattataacattcctggtctcacttccttcccattcccttcatcttagtccacaytgctgctagagttctttccaaaagataaatatagccaaataattgtcctgcttaaaacctttccatggttcaccaaaaccacaggataccatccaaactctctcacccggcacatgaggcccttatgaccttctcatcttaccacacatgtcctgc

SEQ ID NO: 314880 - DNA, 535 bp, Homo sapiens
gacatcacttacctcatgtgtttatctttgagagagagggtaactgtgatttttgcctgtggaacatttaaaccaccttattctggtaatagcacaccaattttcctttgaaaactcactcctattccactgttaatttgtgtggtaccratggggtccaccctgcctggcttgggaaggagcacatgactataccttgccaatcagtgcattccatcctccttcccacactgattggtccaaagaaaaacatgcaaatcaagctaaaacaatgagagtctcttgactgaatgtaaagctcaaactgccagcagccaccacaagaggagtctgtctacagatgaagccaacacttaaagacccagccaataataagaaataagaagtgaattccaataataacattggtatctggatcaagctattctcggtgttggtcatccctgaggacttctaagttatgtaagccagtaatttccaatgttttgagtcattttgagttgatgtcttattacttgcagccaaaagtgtttta

SEQ ID NO: 314881 - DNA, 521 bp, Homo sapiens
ttattacttgcagccaaaagtgttttaactaatatgcccctcttgctttgctgctccaagatttcaagcacaacaaaacaaaaaactgcataacttgacagattagagaatgttgctgatacaaactgaagttttcccttaatactgaaagcaataatagccttgaatgtaagttatggtgagcatggttctagaaaggttattctttgatatctaagatggatagatatgaaatctagaattgggttgttttgtttaagaagacttggatttattttcatcttttttctctcccactacagaagtgactgatataaatttatctatcttccttccttcttacattcttcaaatatttgttaaatcrtatcgaataaatgtttaatgaaataagccccagaagatgacattcagccgaatatccttctcaaaaaaattttattgggataaaatttatgtatgataagctgtatctattcaaattgtacaactttataaaatgttgcagatatatacatact

SEQ ID NO: 314882 - DNA, 548 bp, Homo sapiens
tgattttctttccatttttaaaatctgatatcactaataataaattttatgtatttttcctaagtcaaagagagaaataccttattagtagctgtctgttgcttacaytgaaacagccataagaacatattttaaaagctatgccttataaaagtgccttttttagaaaataaaaaaaagagagagagactgagaaatttgctaattgctctcaaattcaaatctccaatcaactgaacacaattgtaagtaaatagggcctctttgggggaaggtaatcttaattatgtggcaagctacagggacacccaagtttatgtcagtagcagattctgataagatatgcaccaaaggaatcatgtctggactgtttcaactgggagggtgttggtgtaatgttggtgtttagctgtgatctagagatcagcaaaggtcaggctggacaaaacagcgcctaatgaagcttctcgtgtttggggtgaaagagccacaaagcctttcaaattagcagctgaatcctgacactcattagtgattatatatgcaag

SEQ ID NO: 314883 - DNA, 548 bp, Homo sapiens
tgattttctttccatttttaaaatctgatatcactaataataaattttatgtatttttcctaagtcaaagagagaaataccttattagtagctgtctgttgcttacattgaaacagccataagaacatattttaaaagctatgccttataaaagtgccttttttagaaaataaaaaaaagagagagagactgagaaatttgctaattgctctcaaattcaaatctccaatcaactgaacacaattgtaagtaaatagggcctctttgggggaaggtaatcytaattatgtggcaagctacagggacacccaagtttatgtcagtagcagattctgataagatatgcaccaaaggaatcatgtctggactgtttcaactgggagggtgttggtgtaatgttggtgtttagctgtgatctagagatcagcaaaggtcaggctggacaaaacagcgcctaatgaagcttctcgtgtttggggtgaaagagccacaaagcctttcaaattagcagctgaatcctgacactcattagtgattatatatgcaag

SEQ ID NO: 314884 - DNA, 473 bp, Homo sapiens
tttagctgtgatctagagatcagcaaaggtcaggctggacaaaacagcgcctaatgaagcttctcgtgtttggggtgaaagagccacaaagcctttcaaattagcagctgaatcctgacactcattagtgattatatatgcaagggctgcatcttcagccccaaccagtgaaacagcctagacgctctgcatacacamaaaagaaataaagtacgtacaaacataaagaactagaaccttttaaatgcctttcccttcacattctgacattttcttttctttcttttttttaaatattaatgacaggactgcagtgtgcttaccttccaatttcatgttaaaataattaccatcgccgtgactaaaatgagactttcagttttttattttaatcaaggaaggtctagtcagaaattgctctgctaagttctgtacaagacataatacactcttgttaactaacaaagccaata

SEQ ID NO: 314885 - DNA, 548 bp, Homo sapiens
tattatttaagctaggtcttaaccacttcttctagtatgcccttctataccaggtacttctcattgcctgtttatttcttttcttkctacaaattttatacttggacattattagttatagtaactgtatttacactttaaccaagctgattttttatatttaagcaaaacagtcttccaatatcctctcctgaattaatgcagatttgtagctcacctttgcagctctttgcagaatgcatatgcattctgctaaacccagaaacttcaaagtttgacactcacttggtgttggagcagccctcatggaacagtccacatttaatttatagtcaccatccaagattacttttatttttcctgggtggaaacacactgccaacattactcatacactgaaaatgatactccatataagtgaccttcaaaatgcccatatgtcttcatttaacagacgtctatccactcttccatgccttttgaccaaatgcagcggaatatggggttcctttcttaaatggtttctacgtatccagatcataagcaac

SEQ ID NO: 314886 - DNA, 548 bp, Homo sapiens
tattatttaagctaggtcttaaccacttcttctagtatgcccttctataccaggtacttctcattgcctgtttatttcttttcttgctacaaattttatacttggacattattagttatagtaactgtatttacactttaaccaagctgattttttatatttaagcaaaacagtcttccmatatcctctcctgaattaatgcagatttgtagctcacctttgcagctctttgcagaatgcatatgcattctgctaaacccagaaacttcaaagtttgacactcacttggtgttggagcagccctcatggaacagtccacatttaatttatagtcaccatccaagattacttttatttttcctgggtggaaacacactgccaacattactcatacactgaaaatgatactccatataagtgaccttcaaaatgcccatatgtcttcatttaacagacgtctatccactcttccatgccttttgaccaaatgcagcggaatatggggttcctttcttaaatggtttctacgtatccagatcataagcaac

SEQ ID NO: 314887 - DNA, 599 bp, Homo sapiens
tgcctaaagagtgtgacatgatggcattctctggttggtgaatgccgtgatggctgtcacctccctgaaactgcctgggctggctgtgggaggggcasagagcttcctctatttaagcgaaggaaattagcagtgaaacaaattaaaacaacaatcagatttaagtggcctctatcaggaaattaactttaatgaatattgtcatcaccaggcctacctcagcatcgctgggctcaagcattaggatgcaataaaaaactgggacctaaacactaagttacctacccacaactcagaatgaattttcttttaactcccttgtgtttgttttaatacatcccattccctgttcatttaggtttttctatgattctattaaacagcttacacatctttgcaaatacgtaaaagtatgttaactgaactagaagctgaaaaagggactgggagacagatttccttgtgttgtcattgactcttaagtgagacctgaaagcttctattttccccatcaaatttcaaccctagaatggcaaagaagacttggaaggggctactctctgtttctaagtaagtcctttccttttaggagaataaaa

SEQ ID NO: 314888 - DNA, 557 bp, Homo sapiens
cctggtctagcttccgaccaatctcaaacttgacaccaactactttgactgcagccttgaagcgacggtctctgtaactaagagtgayttctagagctgctcacagtacgggaataaggtgtctgagctgaagaaatgataccaaaaagcctaaaattgctggtggaggctttctttgaaaactctcactgccgtactgtgaggtttaatgtaagatttgtcctactcccatttctcacttttattgaacgatgctcacctgaagagatgctagatttctgagtgttcaggaagaatctaggtacatgtaccttgttaacacatgttattaaagcccatggacatcatttagggctttgcttggttccattttgctctatcatctctagtctttccgttttgtatgtccatgactgtgcctgatcttgtattggaaatactttctttccttttgtcactgggtgtctaatctgtgtaaattctcagttcaccagccagagacatatctctaccaccaccaccctgattcactcattcattcgttcagaagacaggga

SEQ ID NO: 314889 - DNA, 475 bp, Homo sapiens
tgccgggcagctgtccccacctgaaattaatgttcttttccttactctgtcactacccatccctyaagcctcactgttcatctgctgctttttattttattttattttggaggaaaaaaagagtgggacaatggcacctataattccagctttctgagacctatgggtctgatgtgaaattaatgtttcctgctattccaggaagaattaaagttaccactagcaggaaattggatacacttgttgtaagaactggtccttaccagcaagccagagtctcaatgatttcattaaggaaacttagtggggaagagaattttgtgggtgggggggtggggggaggtgaggggagcaagttccatcgtcagtccacttggatttcagcaattcaaactgtaaagattacattgtgaagtccacacagtctcagcagcacatcacaaacatatttgctaatattgaagcagtttttaag

SEQ ID NO: 314890 - DNA, 475 bp, Homo sapiens
tgccgggcagctgtccccacctgaaattaatgttcttttccttactctgtcactacccatccctcaagcctcactgttcatctgctgctttttattttattttattttggaggaaaaaaagagtgggacaatggcacctataattccagctttctgagacctatgggtctgatgtgaaattaatgtttcctgctattccaggaagaattaaagttaccactagcaggaaattggatacacttgttgtaagaactggtccttaccagcaagccagagtctcaatgatttcattaaggaaacttagtggggaagagaattttgtgggygggggggtggggggaggtgaggggagcaagttccatcgtcagtccacttggatttcagcaattcaaactgtaaagattacattgtgaagtccacacagtctcagcagcacatcacaaacatatttgctaatattgaagcagtttttaag

SEQ ID NO: 314891 - DNA, 577 bp, Homo sapiens
aatttctctccctcctcatacatatgcatacactctgtcaaagagcagatttcccctactttttggtttgcttcttttatgggctgaattgtgttcccccaaaatgcatagaccaaacctgctagtagcctccacaactgtgagaaaataaatgtctgttgtttaaaccacatagtctgtgtttccatggttgacagccctagcaaagtaatacccttcctagaaggctgycttggcttaatccttcctacactaaagctgggtgatctcatcaaaatacaaatctgatcatatacactccctccacacacttaaacactcacccaacttaacatcttcccagattctctattattgcccacagacaaagggccaaacgttctgtggtatggtgtgtagaactctctgtgccctgccagccacttccccactcatatctggaggtctgagcttgccaagtgcttgcagttcacagaatgaggatttgtctaacgagttctctttctgccacatgactatggacctcaggagggttcgaactatattctattcatctttgcattcccagaaggcctca

SEQ ID NO: 314892 - DNA, 590 bp, Homo sapiens
tggactctggggagttgagatgtgccacaacacaatgacttcactgaggagacaccaaataggcagtagtaacggtgtcctatgagaactctattgtcattgggcttccagaagtcctgagagggaagatgtcctcatgactagggccatgcaccttggttccagggtccccttccagggtcattctayttggccaccattgactttccatatcttgttcatgtgacctcagacattcagtggccttgatgggatttttccctcggctctgccaagatggcccagataatgacattaggaagccatggcacctaatgtgtcttggcccagaaacagatcatttctcgttgcatgctggggcaagtggggtcaagggaaaactttgttcaaagaaaagtttatgaagaagtttgaatttacaaaacaaacaaacaaaaaaactgaaattaggtctgctcttgttgtggggggagggagggagggataaagttttaccccacaacaccacatttctagcccctcagggcccttggaaaaatcactgccccagaaccgggattgtacaaaccctttaacgattataaagcctg

SEQ ID NO: 314893 - DNA, 568 bp, Homo sapiens
tccaatggatgcaaatgtggaaagagamcctgtatggatgggttggctgtatgctccattctgtattggtatatgacatcaaataatggaatggcgataaaacaacaacaaaaaaaggaaaggctttataatagtcaggacacgccaaccaattttaaattgaattacacagcctgctaatctttatgatgggatagaatttctttcaacattatgcattatactaaaatttgcagcacttctccctccccatttcttaagctgctatccccccatactccccatatatctccccagtggaaaagcttcccttcaactccaaaagcattgttactgctgactgggaaggcagggcacagctctgtgcaagatttcatttttatagctattgttagtcggtgtatatctatattccatgccagggcatacacaaacacttttatgaacactgggcatatttccctaataatcacaagcacaaaatttttaacaaggtagattcaagcctatgtatacggtaaaagacattttttaaaccaacaatattgaggagctttgttatatttta

SEQ ID NO: 314894 - DNA, 549 bp, Homo sapiens
aactgaatcatccccaccagccccatttaggctaaattacgaaagcttgctaatcaaacgcctttgtaagggccattcaattcacaactctggaacatgacttcaagtttccacaaggactaacagccaggccagaaacacacagagtatctcaacatccaagtgtccagkaccacaagccaggttatcaaggctctttggatttcattatttagcactttctggtcagcagtctagcagcattccattaaacaaacctagtttatttgacatttgttacaaatttcattaattgttaaaattaatcaggacaccacgccgtatcttttgaagtcaaaatacatattaggtaactttctaatgtaaatatatcttctgacctttgccagtaaaatgtaaaaactagaaatgaaacaaatataacatcagtcgtttccacgtggctactagtctccaggatcctggagtcccacccttcttgtatgccgcagaagaatgcaggatgtgggacatagatactgccccttggagctctgtgacccagagcat

SEQ ID NO: 314895 - DNA, 585 bp, Homo sapiens
gtttttacaatgaacatgtgagctttcataattagaaaatcgtttacaggtttttatttatttatttataattgagacagggtctcactatgctgcccaggttggtctcgaactcctgggctcaagtgatccttaggcttcaacctcaaagtagctcaaactacaagtgtgtgccactgcatccagctatcgtcatcttttaaaaccctttaaagggtgaagatttgctgccactgagggtacccaaaaatatgtgacacggactctcaaatactactgagagtatcatggagaaattgcaatctttatgaagagaaatttgataatacataattttttaaaaatacacatcatctgaagaaacaattctacttctaggaatatatcctatgaatataattaaggatgtttgcaaagagagagcaagaaagatgttcatcacttcagtgcaagtagaataataaaagaatggaaataccttatgtatctagcaagagatctarctaaataaaaagtgcatcagtacaacagaatgctatgctgacacagagcatgatgtgttcattttttaagttacaagattac

SEQ ID NO: 314896 - DNA, 517 bp, Homo sapiens
tttaagtgtgtgtgtgtgtgtatatatatatatatataaaataacagtttagacataatcccatatcagttaggatttttatgttccatgcaattttatgttaagaaaagtcaacccaaacaatcttgtacaaatgcaatctattgtctccatattttaaaacttcaaaggtagatatggctttagagattttgatgtggccttaacatgtaacccagatactgtttcttcctttacacttctgagctccatttctcacaggttggctccatcctcaggcatgctgtctccttaggctttcaaaatgatggccagccacttckcagaactaagctgggaggaaagagcaaaatccagagactgagcctgctggctgatttggctcctatgctcatgcctgcaccaacctccagggctaaaggggtggaatgcacaaatggccttagcctgggtcacaagtgccatcttgctgggcctgaagtgcagccacttcactgtggatccccaaatggaagtt

SEQ ID NO: 314897 - DNA, 491 bp, Homo sapiens
aggcttgaaccccgaactcacaaggtcttagggaatctgttgcttctattttggtggtcaccagaggcttaattttagctgctgagagattagtcttttatatttatttaatgttctcagtgggggaagaaaagttcaagggttgtgtttgccttcaatgctcactgcacataactcattttgcatccttgcagcaaatgcctgctaacttcatcaggaagtcacatttgggcaaggtgcagtatgtgctgggcattcttagctagaagggccctttctkcaatgtctccatctttagctgcccccaccaaggctcttttttttttcccagatccctcttttgctgtaagtttccaccatcctttttgcagagccacgtagaataatgttggcagagaaacttagcgatgctctcttagctcttttatcctaatagtggtttctgtatcctcacactgctagacagaatatctttctcaagacaaccaaag

SEQ ID NO: 314898 - DNA, 636 bp, Homo sapiens
tctttacagagaaagaagtctagtcccagagaggggaaccgatttgcccagacccctacagctagttaggggtgacgctagcatgaagaagccacgtggctcttgtcaccacaccaagctgttgctctcatgtctcatgayacaattgtgctcacagattatttcccatggatccactgggatagtttatgaatcctttaaatgcaaaaattaaataatactgggaagccagagagcctatgagatcgggttcagtatttttactgtttactggctgtgtggccctgagccagatctcctctgagcttattacttcttctgaaaaagggggctaataatctatctgtacccgatacagagtttctctgaggttaaaatgtgtcatttaatgtggaaatgctgtacaaactggaaaactccactaaaacatatgctgttaaactcttaaatataaaacttgggtgctgaacaggcccctaggaagttcacatatgcagctattatttttctgtgaatttgtttatagggtgtttagaagcacctaggagtggccatattgcttatcctatgaatgcaggttttggaaccagagtcagctattgtcaaaaatcccagttcccccatttgctcaattct

SEQ ID NO: 314899 - DNA, 415 bp, Homo sapiens
tgaattttatctttcgagggtctatagctttcttcacattcttaaggggatctgctccctaagatcataaatgtagtactggatggtagggtgacgtctcgtggatccttgtatctcyagcacctagggcagggactcacgaaacctctcaggaaataccggttgattgaagtaaagattcattctgaagcagacccctctagctatcagcaaaggacaaaatccacactcggcctttcttacttgcccctgtttaactgcgcaaactcttgtactgctgtgccactctctttcgtatgcccctttgcacctggcttcctatttatcagctatcaatatccagcgagtgctggctcttgtcaagtctaatttctggttgctggcgccttcttgacaccccacactgtgatcaacg

SEQ ID NO: 314900 - DNA, 593 bp, Homo sapiens
aagtatcagacttgcttcctaaccactttccaagtccttaagccatgcccggggtgcttgcttataatagaaataagaatatgaggagaataattatattgtgttatttaatgctttttctgtgtcaaggtactattctaagcmctttatttgtattaactcatttaagcctcgcagcaaactcatgaggtgggcactattatcatctctactttacaatgaggaaactgaggcacagagaggttaggtaaacacaattaataacttggatataaacccaggcagtctggttccaaaaacaatgtttgccaccatataattcctcttcttatatactatctgaattaatttactccttgctctgggtgagactcttctgtactctttcaagcttgagtatcttgttgcttgaagcctagtgagctctgaactggaataatatatcaatttcatggttctgaaatccagtaataacatagtggagtggatacctgttgcttttgtctgttcagatctttcctccgtcttttggtgacaacatctgagtttcttttggagaaccactccctttcccactcagtacatgtgcttct

SEQ ID NO: 314901 - DNA, 587 bp, Homo sapiens
ttcttaaacatttttattagagtctaaaatacagcttttctcatttgggatgcccatccttccccttyattttacagtgaccctcttctaaggtttgttttaaaagtaaaaacaaaacaaaaaggcaacttcgaaacccaatgaaaactcagtgagcattttggacaaagagagacagagaaaaacaagcaaaagcatctgttttgctagattttgaaaacaagcttctgggcctatggttctcatctggacgtctaataaagaaggattttaacaagtctcaagcacactcaggtagttgttacaacgaggagatctgattttgctgtcagcgaggatagtgaatctctgaacccacaggacacccaggggcttccagaggcaaaggaacagggcttaaatttttcagtctttcctgttttcccttgcagaattttctcttaaaaccccacagccatattcccccaggaaatcctcagttttataagtgctctgtaaaagataagacaaacctatggtctatatttatagagacccaaaatttcatttggttaatgttaagctgtgacaaaatccagaagtttcca

SEQ ID NO: 314902 - DNA, 584 bp, Homo sapiens
gaagcaagttaggacgaaatcgctgaaaaggtcatctgtgtttgcagtacacagtacggtggtgcaggcagaagggagstgccaagccataaatccagggaggcttggacaggtgaatagcaatttactcccccacaaacttcagtgggggctgggtgcgtcctaggaaagcaggatttggaaacaggaagttggtgcctgttatcctcaggtgggctactcagggtcacagccctggtgttacaaatcaacgtccacaaattttcaatgcacagacaggtcctgagctggctgcatcaaaaagacttgggttcttattactatagtcttctgggcaccttctgcagggattacagcttggaagccttggggcagctgtgctcggatttggcacagaagctgtgaaggggaaagtgcaaagatcacatagcacccagactttaggagctggcaggttggctgtgccagttagcgtaacgagcacctgcaggctctttaaaagttagccattcttattttgaaggcaacggttaagagcatggattatggagtcaaacagacccaagttcaagttccagactggc

SEQ ID NO: 314903 - DNA, 637 bp, Homo sapiens
ggttttctttatggaagcaagttaggacgaaatcgctgaaaaggtcatctgtgtttgcagtacacagtacggtggtgcaggcagaagggaggtgccaagccataaatccagggaggcttggacaggtgaatagcaatttactcccccacaaacttcagtgggggctgggtgcgtcctaggaaagcaggatttggaaacaggaagttggtgcctgttatcctcaggtgggctactcagggtcacagccctggtgttacaaatcaacgtccacaaattttcaatgcacagacaggtcctgagctggctgcatcaaaaagacttgggttcttattactatagtcttctgggcaccttctgcagggattacagcttggaagccttggggcagctgtgctcggatttggcacagaagctgtgaaggggaaagtgcaaagatcacatagcacccagactttaggagctggcaggttggctgtgccagttagcgtaacgagcacctgcaggctctttaaaagttagccattcttattttgaaggcaacggttaagagcrtggattatggagtcaaacagacccaagttcaagttccagactggccaattattggcttctctggacttcagtttttacaaataaa

SEQ ID NO: 314904 - DNA, 529 bp, Homo sapiens
agagaagttctagtcatgacttttccaatttacttgctatataaccttgaataagtaccctctctgaattcctgtctccttacctgtggaatgaagacaaaaattcctaaggctctagcaagattgtcaaacaaaggcctatatgtgtgagttgcaaataaaaggaaagcaccttctgataagtgtcttctaattcccatgtcatttcttgtccctgtggcctgtttgtgctgtttgaaagctcgggggaattggaataagtgacaaggaggtcagatgtaagttaaagtgttagcccccatttatctaccattttggctctaaacgactagtttcagtccagaccgatttagtaaagtgagaaaactgtgactgcaaactggcagtacacacaatcagaggaatgagtaaaaagcttagactgcccttcaattcagaggttaaagcaagcacacagacccgstgtctccctcactgtgtgccagccaaccatatattattaattgggctcaacaaacattattgagca

SEQ ID NO: 314905 - DNA, 638 bp, Homo sapiens
atgatagccgtatttactgagcacccgagatgtagctagtctgaaaacggagatgtgctgtgagtgcgaaacacacatcatattttggatgcttcatattaaaaaaaagaatgtgaaaatactttaatagcttttatattgaatacatgtttaaatgattgctttctgataactgggtcaaatagaatatatcattaaaccaaattttattttatgtttttactttttaatgtggctaccagaaaatgtaaaattacctatgtagttcacgttatattcatatcggaaaatgctgtcacaggccatatataatgcttatactatgattcagtaatccctgtctagaaattacatcctaatgaaataatccaaaagtaagtaaaaatgctacgcacagagttgttcacacagtgtaattcgtaacaacaaaatattgggaacaattatttctaaattctgcagaaaaaagaatggttaaaaaatttgccatrattggaatatccagtaaaatacatattatgcaaatgttaattctgaagactaggtggcaacacagaaaatccttaagacatcatgttgcttgagaaaaaccagcccacagcatacactgcacaccatgtctatgttcaatctgcatc

SEQ ID NO: 314906 - DNA, 417 bp, Homo sapiens
gactctgttttataaatagaacattgtgcaaggttttctagaggtgtctgctaaaaataaagcaggttatagtttacttctttatagctttcaaaacaaaacagcctaagcttgactaaatttgctatatttcatttttgaaaggtatctttatgtgagccaggtctgatttcttgaaatgaaattccccagaagttagatttcctatatttacacaaggcatgcctgtgcaaagtaatgacactagtttttttttaaaaacataygccctagaatgaatacaacttagtgatgctatacttccaccctataaaatacacaattcttttttgaaaattgcttatttgaagagtaaaataaacattttgatgtatatatttctaggttatctgctcacaaatcaacagcattactttg

SEQ ID NO: 314907 - DNA, 527 bp, Homo sapiens
tattaggagctcagaaaaaagacgcatgagagtggccggaagctgggacctcacttggaattaaaataagcacaagacttggaaactcaggaagaaggccatctagagaactattaagagtggtgtgaaagcacttagcatgttcagggacttgtgagtaaacaagcatggcagaagcagagtcactatgaaggtgagcagaagaagatttgaaaggccagcgggattagggtctgaacctcagggagtcagactatggggcttgaacctggagggcatggaaaacatctttctccctctacccagtaagaggaacagagggccacagggaaagccraattttaggaaaagtggggttgctccctacaggatgggaggtggggggattcttgaggaaaggttggtttgtaatttattgctaagaatctaggtatatagtgacaaaaccaaatccatttgagaagaaaatacaaaggagagaatgtgaaggcaacaggaaattgatggttatcgtaaacagaaaccat

SEQ ID NO: 314908 - DNA, 539 bp, Homo sapiens
acttacaaggttacataatttccccatagtcagagatgctataaatcatgaggcctctgttataagaggaatagaattcctcagcttacctatagtccctccctgtccaatgcttttgtctacacaaactcaatgctaagttgaaaaattgtaagttttctcctgatttcaaataaattccttttaaaatatctaataaatttatgaattctagtttggtccattttgatactgtcaaaaagaaaacacactacaaactgaaaagtgctgtcttttgtcaggtgtttttactgatccaagtattatttgcttctatctcttatttcgtttaaaagaaaaacagatggtttaatayaaattcctgcatgaagttttctagactccccagcaaactttatgagcatagtaagttctagagacaaacagcatggatttaaatcccaaatacacaaacggacaacctctggaatatgggcaagttactcaacctcatacttcagtattctcacatctgtgttaggggtaaaaatacttcataa

SEQ ID NO: 314909 - DNA, 539 bp, Homo sapiens
acttacaaggttacataatttccccatagtcagagatgctataaatcatgaggcctctgttataagaggaatagaattcctcagcttacctatagtccctccctgtccaatgcttttgtctacacaaactcaatgctaagttgaaaaattgtaagttttctcctgatttcaaataaattccttttaaaatatctaataaatttatgaattctagtttggtccattttgatactgtcaaaaagaaaacacactacaaactgaaaagtgctgtcttttgtcaggtgtttttactgatccaagtattatttgcttctatctcttatttcgtttaaaagaaaaacagatggtttaatataaattcctgcatgaagttttctagactccccagcaaactttatgagcatagtaagttytagagacaaacagcatggatttaaatcccaaatacacaaacggacaacctctggaatatgggcaagttactcaacctcatacttcagtattctcacatctgtgttaggggtaaaaatacttcataa

SEQ ID NO: 314910 - DNA, 539 bp, Homo sapiens
acttacaaggttacataatttccccatagtcagagatgctataaatcatgaggcctctgttataagaggaatagaattcctcagcttacctatagtccctccctgtccaatgcttttgtctacacaaactcaatgctaagttgaaaaattgtaagttttctcctgatttcaaataaattccttttaaaatatctaataaatttatgaattctagtttggtccattttgatactgtcaaaaagaaaacacactacaaactgaaaagtgctgtcttttgtcaggtgtttttactgatccaagtattatttgcttctatctcttatttcgtttaaaagaaaaacagatggtttaatataaattcctgcatgaagttttctagactccccagcaaactttatgagcatagtaagttctagagacaaacagcatggatttaaaycccaaatacacaaacggacaacctctggaatatgggcaagttactcaacctcatacttcagtattctcacatctgtgttaggggtaaaaatacttcataa

SEQ ID NO: 314911 - DNA, 554 bp, Homo sapiens
ttgttggagaaaatgtatcatttcctataatgcaaaatataagaattcaaatatactttggaaatttataggtattttcatttatycatgactcatgatagctcgaaagcagctattatgtcaaggcaaattattagctctcactattgtataataaacagagctataattcatgtttatttacaaatattctttctagttatgagatttagcacatgtccatccattatgattgttagtttccttttgttttcttttaaggaaaggctactggctaaataaccaatcaataaacatctctaaccagctaccttggtgctgttaacaatggaatgtgcaattatttccgtctcccatattcccatttatatagaatgatctggatcaactgctgggtcaacattctgacagtcagtccaacatatttgaagataagtgaaaagttgctatagtaatatgtatgtgagaactcttcatggcaatgaccatgagggatccaatcaaagaaacattagcctggtaagaagagcctcatggtcagagggagaaagtca

SEQ ID NO: 314912 - DNA, 588 bp, Homo sapiens
tcaggagtgagggaggctacccaagataaggtggaccttaaaactggtttttcaggggggcagccttggagggccggtccagggaactccacgtgatttctgcttgtacatctttgcagcatttcaccggttaggatgaacaagtgatacttctgtaagtaaaatatcaattaaaaaactgatcaaaataaatattaactcatgtgtgtgctcctacgaagtccctcaatttctctgtctcaaaagctcccatctgtaacaatcagataattcctgttctttgaatacaataatgatttacygagagctgtgtagagcccttataaataaatctataaaacaataatgaggaatagaacaaaaccttgcaccaaaggatatacccacatatctgcatggcaagatactgtactgcaaaatgttggtttttatctcggtggtggtttccggaaactgcattaaaaaccccaaagccgtgacactctggggcactgctgtccaagagagatttctgcaatgacttctgcaatgatggaaatgctttacatgcaattgcccatgtgacagacactggccacttgtggctac

SEQ ID NO: 314913 - DNA, 588 bp, Homo sapiens
tcaggagtgagggaggctacccaagataaggtggaccttaaaactggtttttcaggggggcagccttggagggccggtccagggaactccacgtgatttctgcttgtacatctttgcagcatttcaccggttaggatgaacaagtgatacttctgtaagtaaaatatcaattaaaaaactgatcaaaataaatattaactcatgtgtgtgctcctacgaagtccctcaatttctctgtctcaaaagctcccatctgtaacaatcagataattcctgttctttgaatacaataatgatttactgagagctgtgtagagcccttataaataaatctataaaacaataatgaggaatagaacaaaaccttgcaccaaaggatatacccacatatctgcatggcaagatactgtactgcaaaatgttggtttttatctcgktggtggtttccggaaactgcattaaaaaccccaaagccgtgacactctggggcactgctgtccaagagagatttctgcaatgacttctgcaatgatggaaatgctttacatgcaattgcccatgtgacagacactggccacttgtggctac

SEQ ID NO: 314914 - DNA, 550 bp, Homo sapiens
aatggactataggagaccagaggataatctcaatagatgcaaaaaaaaatgtaggatagtttgacccgatatctaatattgttgaatctattttgacacaatcaatgggaaaagttacatattatacttcacaattagaagaaactactggcttccattctaggaattttggcatacatttggcaccaaaatcaaatatgatataaaatctaattttaakgattttttagacaaataatacctgtagagtgtaaaataaaatctacatttatgtatatatattatggatagtatatatgtcattaaattagtggtatgtagttttaataacatgttgatgtacaataaatatattggcttaaaataactttttaacatatgctacgcaaaaacatgggggaaaaatgtaaaaagtttctaagagagtgcataagattgtatattattatgaaagtcataagccaaaatacatcaggaaatgatattctaagggagaccatctctcagacagtccaagcactcaataaattttatgtggttagttgatatc

SEQ ID NO: 314915 - DNA, 521 bp, Homo sapiens
gagctacgaatgtcatcttatgaccatcagggaaaagaggcctcttgacaccctaacatcgatacacttgcctacatccaggctttctattttgtgagaaaaactaactgctatttgtttaagcaactgtaaatagtctgtactaactgcggccttaaagaattccttacttatagacccacatcttccaccattggcttgtgtgccatctctcattgaggttatgtcttcaagattcccagtaatactatttggtsccccagatttatccctagtaaagccaatgttactagataaaggaaaaatacgtactcatggagaatacactagggtgccagagaaagaatacagctaatcataacctgtaagatggaatacaagtaaaacataagggatgcaaaataatcaaccgacatcagctccataattaccttaagtataagctatactcatgaacttgctaacaaatctgcctctgaaacatggtatgtgtgtgtctcccccagaattcatatgttgat

SEQ ID NO: 314916 - DNA, 521 bp, Homo sapiens
gagctacgaatgtcatcttatgaccatcagggaaaagaggcctcttgacaccctaacatcgatacacttgcctacatccaggctttctattttgtgagaaaaactaactgctatttgtttaagcaactgtaaatagtctgtactaactgcggccttaaagaattccttacttatagacccacatcttccaccattggcttgtgtgccatctctcattgaggttatgtcttcaagattcccagtaatactatttggtcccccagatttatccctagtaaagccaatgttactagataaaggaaaaatacgtactcatggagaatacactagggtgccagagaaagaatacagctaatcatamcctgtaagatggaatacaagtaaaacataagggatgcaaaataatcaaccgacatcagctccataattaccttaagtataagctatactcatgaacttgctaacaaatctgcctctgaaacatggtatgtgtgtgtctcccccagaattcatatgttgat

SEQ ID NO: 314917 - DNA, 609 bp, Homo sapiens
cttatctcaaaaaaagctactaatgagtaataattggccacttccttatttattacaaaacagaaatgtctcatgacttttctatgtgcaccataatttaatagatctcacacaccagaattcagatcatcgatgactgacagaatgtttttgctgggcagtcctgatttaactaagactgggttgtggttaaatgaatatgttcagttttttgaattttaatagtagttacaattcactaaatgctatcgctgtttactccttctaaagatatgactggacttcattagtaatgttcaacttttcacaaatatggtgaatgccatcttaaaacttattggagtttggttttatatttagagttatataactggttatattaatatatttaaatattggagaaattccttcattgtctcaaaaccacctgtgctttgtgttcatttgcctctaaagggtaagggctgaagataaagtagcaacatctactttatatttttggcctcaactagaccaatctaattagaattctytgtatctaaaatggttcattttacttactgaaaagcattttagtgagatttatatgtaatatcaaataaagattat

SEQ ID NO: 314918 - DNA, 536 bp, Homo sapiens
tgaaatacagttaaaaaaaaattactgctcaaaaaacatttgtcactaccagatagctgggaaaactatgtcaatcaatgcctgttaaatgagcaaatctctgaatcctatcttctaagtccttgaaaatatctaagtcagttaycaatttgtgtacctttctcaacctgacagtatccagtgagagactggagatgattgtagttcaagattttctttttcagttctgtcttttgactgagatgatagaaaacataaatttcttttattccaccactgtccaagccttgaaatcaaaggattacacagcgtctggattaaaccgtcagcttgtacaagtttgagctaagaaaaggaaaagtgttgttcagtgtctaaaacattgtagtactctaaatatagagtcatggtgatacttgaaacttgtgagggaatgtgaagaaaagaaaatataaacataaatcacaaaatctactagcaacatgaatgtacaagtaatatttgacagaggagtaatcaagatggtgataaccagc

SEQ ID NO: 314919 - DNA, 618 bp, Homo sapiens
catttaaagttttttctttggtcaaagcttgataactcaggaaaactggaagaaacttcagtagaatattaagaggaataatatgcaaattaaaaagaaaataactgtccattaaaccagtaatttttrttattaattaaagcctaagtactagtgtaatttaaagtattataaatgcaatgcaaacatacaaagcacatcaggtttaagttgtagtccaattagacagtgaagcgacatcagaactagaagaacccaagagatcatctaggccaggaaaatgaactcttctgactttctgtaagaagagaagagaattagcttctggacatattaggtttatataagatttggaaatacataaccttgaaaaaccccctttcccttctcagagtctcagtttttctatcaataaaatgagaagattggactagatgattctaaagggccttacagttctgacattataagtataattgacaaacaatattatatgattgtatgaattaatcaacaccaatatacttcattatttcatcctatgacttaagccagtttgggaactgtttatacttcctcctctctactcaaaagtacaagtgtcagtaaacagtgaaa

SEQ ID NO: 314920 - DNA, 627 bp, Homo sapiens
ggctataagacagcactgagactgccacattttttttktgtggtaaagtgcacaaattttccctttaaaatattttaacatgtagaattcagtggcatttggaacattacattctaaatgtctttgggaagccactacagcccgagggccaaaacaaagttttctcaggccaccaacagacctataaaaatacacaaccccaaatgtttttggaacagtgtccttactggccgctgtggcacaaatcaggtactccaaaaatgtgagatgcttattcccatagttaaggtgagggtaaggaatggggaatggtagctgttttgtgcaggctgcctccttgcacatgatcagcatcctttcccttcatcaagcacctcccttcctgctacatttccagttaggtctcagaattataaaatagatgcttctaatagttttggttttggggttgtttgttttgtttgtttgtttgtttgttttttcagtttaagggttgtttcagtggagggattgacctctaggggttcctacttcaccattttgtgtgatgtcctcctctgagagttttgcaagttttagtttaaatatgtgattgctagttcaatcactccagatgatggagatagt

SEQ ID NO: 314921 - DNA, 627 bp, Homo sapiens
ggctataagacagcactgagactgccacattttttttttgtggtaaagtgcacaaattttccctttaaaatattttaacatgtagaattcagtggcatttggaacattacattctaaatgtctttgggaagccactacagcccgagggccaaaacaaagttttctcaggccaccaacagacctataaaaatacacaaccccaaatgtttttggaacagtgtycttactggccgctgtggcacaaatcaggtactccaaaaatgtgagatgcttattcccatagttaaggtgagggtaaggaatggggaatggtagctgttttgtgcaggctgcctccttgcacatgatcagcatcctttcccttcatcaagcacctcccttcctgctacatttccagttaggtctcagaattataaaatagatgcttctaatagttttggttttggggttgtttgttttgtttgtttgtttgtttgttttttcagtttaagggttgtttcagtggagggattgacctctaggggttcctacttcaccattttgtgtgatgtcctcctctgagagttttgcaagttttagtttaaatatgtgattgctagttcaatcactccagatgatggagatagt

SEQ ID NO: 314922 - DNA, 442 bp, Homo sapiens
ggcaaagctaaaagatcactgatggtaacattccttctggggcttcgggtgtcacaagtactccccgccaagaccctgccttgggacccgcaaggagttttgctcctactagtgcccaacagctcttgctgtggctcctgcactggctcasctccacttgccttcccatgaggggtggagcacagtagatctgagtgagtgaagctggccaaagtgaccagctagccccagtgcccacactccagttcccctcaccatgaaggggtcaggggaaatttttctgttttaaaatcatccagaaataaagccatctgactatacttgacttacaccacagttaatgaaacaccaaccttcccagaggagaaaaaaattcagcacaagaactctgccaattcaaatgtcagagtgtacccttacgtgaaaatgagtccactagctc

SEQ ID NO: 314923 - DNA, 442 bp, Homo sapiens
ggcaaagctaaaagatcactgatggtaacattccttctggggcttcgggtgtcacaagtactccccgccaagaccctgccttgggacccgcaaggagttttgctcctactagtgcccaacagctcttgctgtggctcctgcactggctcacctccacttgccttcccatgaggggtggagcacagtagatctgagtgagtgaagctggccaaagtgrccagctagccccagtgcccacactccagttcccctcaccatgaaggggtcaggggaaatttttctgttttaaaatcatccagaaataaagccatctgactatacttgacttacaccacagttaatgaaacaccaaccttcccagaggagaaaaaaattcagcacaagaactctgccaattcaaatgtcagagtgtacccttacgtgaaaatgagtccactagctc

SEQ ID NO: 314924 - DNA, 347 bp, Homo sapiens
gagatatttgtacacccatgtttagagcagcactattcagaatagataaagtgtggaagcaacccaagggtccattgacaggttaatagataaccaaattagaggaaacattaagactgcagtttttcaaattactgttctttggacaatctttctctcaatgtcccttttccttgtaacatttatagatgtatgagtctatgggagaatttagggaagttaaaggtggctcraaggccttgagataatttccctggagttgttttagttagagggtgaatactttattttgtgtagatttagcttcgccagcctgtgcttcttcacgttattgtgttaaaaacatg

SEQ ID NO: 314925 - DNA, 536 bp, Homo sapiens
cccacatattatacctgattgctgaatttcatatatttggtacaaagtactgtatgtctttgttagaatggaggataactatgagacctgtgttggttagaatggaggataactatagtgtcacaggaaaaaaaaaaactgtattctgagtcagagacagaaaaaaaccacactgcttgtgaaaatgtgaagagaggtaagtcacttacattactttggccttgtttttatcatctagaaacgagtaatttttgattcatacattttctctggaaatcarcaggtaaaacgtatgaaaaagcacacagcacaattcctggccttgcagcacagtcgtacaacttccgttctattcgcaacatgcctcacatgtccttttcttccgtcttgctttacacgccccggtttttcacagtacagatactaaacttatcatcttaagagggtgcagtattcattgactcagtgacaattacagaaaactaaattttgccaaaaagcaataaaacaaatacaatgtctgggggaacgttgtc

SEQ ID NO: 314926 - DNA, 536 bp, Homo sapiens
cccacatattatacctgattgctgaatttcatatatttggtacaaagtactgtatgtctttgttagaatggaggataactatgagacctgtgttggttagaatggaggataactatagtgtcacaggaaaaaaaaaaactgtattctgagtcagagacagaaaaaaaccacactgcttgtgaaaatgtgaagagaggtaagtcacttacattactttggccttgtttttatcatctagaaacgagtaatttttgattcatacattttctctggaaatcagcaggtaaaacgtatgaaaaagcacacagcacaattcctggccttgcagcacagtcgtacaacttccgttctattcgcaacatgcctcacatgtccttttcttccgtcttgctttacacgccccggtttttcacagtacagatactraacttatcatcttaagagggtgcagtattcattgactcagtgacaattacagaaaactaaattttgccaaaaagcaataaaacaaatacaatgtctgggggaacgttgtc

SEQ ID NO: 314927 - DNA, 622 bp, Homo sapiens
tgggcatcatgctgatggcagcaaaatggtgccatcttcatatgtcttaagaaacacatggccatcagttataatctgcatttcctttgccttagaatattttatagtttcctgtttaatagataattattygtattgtatatttatctaatccatggttctgcaaacattttctgtaaagcaaatactttaggctttgtgggacatacagtttgtcacaaccactcaactggcagcgacaggcaataagcaaattaatgggtgtagctatgatacacagtatctttattcacagaaataggtcactggccagatttggcctataggccttagttaattaaccatcacctattctactgatgttaagtctttaaagagatatgaatattaccatcgccatgaagatgctgagagtatggttccatttgaaaatgttttgttgctcatcaacatatcctatcctattatgccaagactccaggagaagatatagttacttggaaagattgatgacactaaatgaacacacattgatggcatatgtcttcctagcaggatgcattaatattttttataattgtctcagggtgcttcaaggacatctcaaaaggacatcaacaga

SEQ ID NO: 314928 - DNA, 563 bp, Homo sapiens
tgcccacatttaaaaggcatagagtggccagctgcataaaagcacaagatccaagcatcttctgtcttcaagagacccatttcatatgtaatgacatccacagsctcaaggtaaagggagagagaaagacataccatcaaacagaaaacaaaaaagagcaagagttgctagttttatattagataaaacagatattaaaccaataaaaattaagaagaacagggaagggcatttcataatgataaagagggtaatcaaacaagaagacaactatcctaaatatatatacacccaacataggggcacctgaattcataagacaggttcgttatggcctatgaaaagacttaggcaaccacccaataatagagggaaacttcaacaccccactgacagcattaaacagacctttgagaaaaaaaactactaacatagaaaatgtggatttaaacccaacagttgaccaattgtacctaataggcatccacagaacaatcctttctaaaaccgcagaatatacattcttctcatttgcacaagaatatattgtacgatttaccaca

SEQ ID NO: 314929 - DNA, 573 bp, Homo sapiens
aaaccaataaaaattaagaagaacagggaagggcatttcataatgataaagagggtaatcaaacaagaagacaactatcctaaatatatatacacccaacataggggcacctgaattcataagacaggttcgttatggcctatgaaaagacttaggcaaccacccaataatagagggaaacttcaacaccccactgacagcattaaacagacctttgagaaaaaaaactactaacatagaaaatgtggatttaaacccaacagttgaccaattgtacctaataggcatccacagaacaatcctttctaaaacygcagaatatacattcttctcatttgcacaagaatatattgtacgatttaccacatactcaatcatagagcaagtctcaataaattaaaaaaaactgaattcataccaagcacacacaaggaccacagtgcaataacaatagaaatcaatatcaagaagatccctcacaacgatacaaatacatggaaattaaacaacttgcttctcaataactactgggtgaacatcaaaattaaggcagaaattaaaaaatatttaaaa

SEQ ID NO: 314930 - DNA, 573 bp, Homo sapiens
aaaccaataaaaattaagaagaacagggaagggcatttcataatgataaagagggtaatcaaacaagaagacaactatcctaaatatatatacacccaacataggggcacctgaattcataagacaggttcgttatggcctatgaaaagacttaggcaaccacccaataatagagggaaacttcaacaccccactgacagcattaaacagacctttgagaaaaaaaactactaacatagaaaatgtggatttaaacccaacagttgaccaattgtacctaataggcatccacagaacaatcctttctaaaaccgcagaatatacattcttctcatttgcacaagaatatattgtacgatttaccacatactcaatcatagagcaagtctcaataaattaaaaaaaactgaattcataccaagcacacacaaggascacagtgcaataacaatagaaatcaatatcaagaagatccctcacaacgatacaaatacatggaaattaaacaacttgcttctcaataactactgggtgaacatcaaaattaaggcagaaattaaaaaatatttaaaa

SEQ ID NO: 314931 - DNA, 573 bp, Homo sapiens
aaaccaataaaaattaagaagaacagggaagggcatttcataatgataaagagggtaatcaaacaagaagacaactatcctaaatatatatacacccaacataggggcacctgaattcataagacaggttcgttatggcctatgaaaagacttaggcaaccacccaataatagagggaaacttcaacaccccactgacagcattaaacagacctttgagaaaaaaaactactaacatagaaaatgtggatttaaacccaacagttgaccaattgtacctaataggcatccacagaacaatcctttctaaaaccgcagaatatacattcttctcatttgcacaagaatatattgtacgatttaccacatactcaatcatagagcaagtctcaataaattaaaaaaaactgaattcataccaagcacacacaaggaccacagtgcaataacaatagaaatcaatatcaagaagatcyctcacaacgatacaaatacatggaaattaaacaacttgcttctcaataactactgggtgaacatcaaaattaaggcagaaattaaaaaatatttaaaa

SEQ ID NO: 314932 - DNA, 573 bp, Homo sapiens
aaaccaataaaaattaagaagaacagggaagggcatttcataatgataaagagggtaatcaaacaagaagacaactatcctaaatatatatacacccaacataggggcacctgaattcataagacaggttcgttatggcctatgaaaagacttaggcaaccacccaataatagagggaaacttcaacaccccactgacagcattaaacagacctttgagaaaaaaaactactaacatagaaaatgtggatttaaacccaacagttgaccaattgtacctaataggcatccacagaacaatcctttctaaaaccgcagaatatacattcttctcatttgcacaagaatatattgtacgatttaccacatactcaatcatagagcaagtctcaataaattaaaaaaaactgaattcataccaagcacacacaaggaccacagtgcaataacaatagaaatcaatatcaagaagatccctcacaackatacaaatacatggaaattaaacaacttgcttctcaataactactgggtgaacatcaaaattaaggcagaaattaaaaaatatttaaaa

SEQ ID NO: 314933 - DNA, 619 bp, Homo sapiens
tttattatttgtgttacaaacagtccaattatactattctagttactttaaaatgtacaattaaattattattgactatagtcaattgttgtgctatcaaatagtaggtcttttcattctttctaactattttttcgtccccgtgttacagtaggtagctagtcaggtatgagcagrgcaggagagggttctccaaacacacacacaccaggaggattgggcgaccatcaggtgatggtcagtcagttgttaactgtttctctaaagtaataattggttacagccagtgtcagggaaaggcaatctcctaatagattaaaaaaaaaaccacacacacacacacacacacacacacacacacacacacacacacacacacacacacctgaaactgaggagcagtgtcccaataagatcttaggagtgtggagaagtaatgcaagatcccggaagtatgccaatgtacccttcttctctctcctttccttccttttcttactgttctaaagcattttaataaactttcactcctactctgcaacttgcctcggccccttcgcctgtcttatgcccctcggtcaaattatttcttctgaggagacaaggaccgaagttgctg

SEQ ID NO: 314934 - DNA, 626 bp, Homo sapiens
agtttaacttttatggattttttttatgatgtgcttttgatttagaaataatctttccttaaatcaaggtcacatagactttctcctaaaagtgttaaattttggggttttacatttatgtctgtgaaccattttaagtaattttttatatggagttgtatttcaatttttgcctgtagatagasagttatattggcacaatttgctgaaaagaataattttattcattgtattgtcttgtaacatttgtaaaaaatcagttaaccaaatgtgtaggtttttttctgggcttcctattctgtttcattgatctgtgtgtctatctttataccagtaccacactgtatctttataatgagttttgaaatcaggtggcataagtattccagctttgttttactatggcaatattgttttggttattctaggtccttttaatttccatatgcactgtagaatcagcttgtcaatttctgccccccaaaaccacacacaacgaatttcccaaaacaagcctgttatttctgggtcggttttaatcgtatttttctcctcactatggatggcaatttttgactggatggcgaataatgtgaatttttttgatgattgtgcatgcgtgtatg

SEQ ID NO: 314935 - DNA, 580 bp, Homo sapiens
tgtattgtcttgtaacatttgtaaaaaatcagttaaccaaatgtgtaggtttttttctgggcttcctattctgtttcattgatctgtgtgtctatctttataccagtaccacactgtatctttataatgagttttgaaatcaggtggcataagtattccagctttgttttactatggcaatattgttttggttattctaggtccttttaatttccatatgcactgtagaatcagcttgtcaatttctgccccccaaaaccacacacaacgaatttcccaaaacaagcctgttatttctgggtcggttttaatcgtatttttctcctcactatggatggcaatttttgactggatggcgaataatgtgaatttttttgatgattgtgcatgcrtgtatgcatatgcgtgtgtgtgtgtgtgtgtgtgtgtgtgttttatttgggcttatttttttctggcacacaaataagctacttggaaacacatgattctttctgtgccagcatttaagctttgttacacaggaccagagcagcctttgatctgaagctatgtctttcccaatactagagcaatatcc

SEQ ID NO: 314936 - DNA, 529 bp, Homo sapiens
taaatcttcgtaagatataattgtaagagaaagagtttgcacataaataaaaagcagtgcactgtggtgtttrtttcacttaaatctctttacgcccttggcactcccttaattccttttcttagaataagtatgcatagttttgctacattaaattgtattatttgcggattctttatagcacttccatttggcagtgtatgttgtgtttagcctaggattcagacacagatgggcatatgtgaaaggtctgtcgggtaggacctctggggatccatttatcatgagtgactgtgaagtcttcctggaaggaattcatcccagggcaagacatatttcagctacaccagttgtttcagggaccctgggtaagtgtactatgcgagtaatagaaagtacactgtactcagctttatcctttccactgggactagacagctgtcttctggagtctctatcacttctcatggtccccttttttgtctcccaggtacactcaatctttattccaaaccttgagtagagtccc

SEQ ID NO: 314937 - DNA, 588 bp, Homo sapiens
tactgtaaataaattcatctaaatttatcttatattgatcttgctttatggcttagagtcaaygtaaagtacgtttacattatgggctctagggtcagattagatgcatttgaaccttgattccaccactaactggctatgtgatatcaggcaagttcatctcacaaggcctcattttcctctcctgcaaaccaagacctaactagtacctactctgatcatttagaaaattaataatattagatacataaagcactttagtataacatccagaatataggaaacatttaataaatattttatttgcctgtcacgatgacaaagaagagcattgtagttaaaaagatagaccctggagtgagcctgagtaggtttgaatcctggcttcgggatactaacttgctgcataaacttgaacaagtttattctcccaagctgtctttcccttctctataaaatgggaataataatggtactgcctcataaggttgctgtgagaataagtgatataatttatgtaaagcacttagcatgttatctatgtatatcaacaaactttagatatcatcataattatatccgtgaatg

SEQ ID NO: 314938 - DNA, 588 bp, Homo sapiens
tactgtaaataaattcatctaaatttatcttatattgatcttgctttatggcttagagtcaacgtaaagtaygtttacattatgggctctagggtcagattagatgcatttgaaccttgattccaccactaactggctatgtgatatcaggcaagttcatctcacaaggcctcattttcctctcctgcaaaccaagacctaactagtacctactctgatcatttagaaaattaataatattagatacataaagcactttagtataacatccagaatataggaaacatttaataaatattttatttgcctgtcacgatgacaaagaagagcattgtagttaaaaagatagaccctggagtgagcctgagtaggtttgaatcctggcttcgggatactaacttgctgcataaacttgaacaagtttattctcccaagctgtctttcccttctctataaaatgggaataataatggtactgcctcataaggttgctgtgagaataagtgatataatttatgtaaagcacttagcatgttatctatgtatatcaacaaactttagatatcatcataattatatccgtgaatg

SEQ ID NO: 314939 - DNA, 588 bp, Homo sapiens
tactgtaaataaattcatctaaatttatcttatattgatcttgctttatggcttagagtcaacgtaaagtacgtttacattatgggctctagggtcagattagatgcatttgaaccttgattccaccactaactggctatgtgatatcaggcaagttcatctcacaaggcctcattttcctctcctgcaaaccaagacctaactagtacctactctgatcatttagaaaattaataatattagatacataaagcactttagtataacatccagaatataggaaacatttaataaatattttatttkcctgtcacgatgacaaagaagagcattgtagttaaaaagatagaccctggagtgagcctgagtaggtttgaatcctggcttcgggatactaacttgctgcataaacttgaacaagtttattctcccaagctgtctttcccttctctataaaatgggaataataatggtactgcctcataaggttgctgtgagaataagtgatataatttatgtaaagcacttagcatgttatctatgtatatcaacaaactttagatatcatcataattatatccgtgaatg

SEQ ID NO: 314940 - DNA, 492 bp, Homo sapiens
ataagtgatataatttatgtaaagcacttagcatgttatctatgtatatcaacaaactttagatatcatcataattatatccgtgaatgctttactagtatagcacatataaattgagagtattttcygctaacatttttttggtggctgtgtgccagtattcacttatatcaatatatttctttttgagatatatgtttttataatttttggtttggtggaaaaattctatacattgatcaaatgtaatttcctacagaattcctgtataatatttttgtattatattaaataattcattatttcaaattattcttttgtaaacaaactttaaaacttacaacaaagcattctaaaattttgctttcttttcctcaagttctccttgaataatttggatgcatcttacttacttacagcaaataagtgatttttgtaaccttatacacatagtaaatggagaatccagttataaacacagtcaatctgaca

SEQ ID NO: 314941 - DNA, 517 bp, Homo sapiens
tggttaggtaaatcacgtacatctttagtataaaggttaaatacaaaactattaaaataataatagctacaacaatttgttaaagaatacacagtataagaygtaagttgtgacattacaattttaaaatgtgggggaatggtagaataaaagtgtagaggtgtttctgtgatctaaattaagttgctagctgggcatagtggcatgtacctgtagatttagctactcaggaaggggaggctgaggcaggaagctgcagagagctatcatcacagtagccagcatgactgagtgataccctatctcttaaaaaaaaagaacccaaaaaaaccattaaaaatgatagtggtatgtccttattaataattatgttgaatggaaatgtatcaagttcactgatcaaaatatctagagtggttgaatagttaaaacacaagactcaaatatgtgctgtctacaagagtctcacttcacctgtaaggacacacataaactaaaagtaaatggatgaaacaat

SEQ ID NO: 314942 - DNA, 517 bp, Homo sapiens
tggttaggtaaatcacgtacatctttagtataaaggttaaatacaaaactattaaaataataatagctacaacaatttgttaaagaatacacagtataagacgtaagttgtgacattacaattttaaaatgtgggggaatggtagaataaaagtgtagaggtgtttctgtgatctaaattaagttgctagctgggcatagtggcatgtacctgtagatttagctactcaggaaggggaggctgaggcaggaagctgcagagagctatcatcacagyagccagcatgactgagtgataccctatctcttaaaaaaaaagaacccaaaaaaaccattaaaaatgatagtggtatgtccttattaataattatgttgaatggaaatgtatcaagttcactgatcaaaatatctagagtggttgaatagttaaaacacaagactcaaatatgtgctgtctacaagagtctcacttcacctgtaaggacacacataaactaaaagtaaatggatgaaacaat

SEQ ID NO: 314943 - DNA, 605 bp, Homo sapiens
tggaagattgcgtgaatggatgcatgggtacagaaagcaactagtaattctgaaattcagagaaagcaggagaaaagttgaggactctgataaaaatgaacttaatgcagctcgttaaaggcaattaacacaatgaaaataagttaaatattaatataaagtcagcactttttttttcccccttggacatgggacttctccagaaccctatcccataggggacatacatcatggatcaagggagcatttgtcagtgtgatatgtcttttctaaaaaaccttatatttctgaaactttctttccgttcrtgcctagggcaggattatttctacaaaacagtaaattatagtattatctcaatatttaaaagtagcatttcagaagactatttcaaatgtcaaatttttaaaaactgatattgcaacttttcttagccaagccctatagtttctgaaaattattaatattttctaatgaatcatccttttattttaaaaagtcctggcgttcagttattttactcagggttgcctttcacatatacaaatatacaaatacaactctagacaatggtaacagaaaacatgtttctttataaatgagct

SEQ ID NO: 314944 - DNA, 605 bp, Homo sapiens
tggaagattgcgtgaatggatgcatgggtacagaaagcaactagtaattctgaaattcagagaaagcaggagaaaagttgaggactctgataaaaatgaacttaatgcagctcgttaaaggcaattaacacaatgaaaataagttaaatattaatataaagtcagcactttttttttcccccttggacatgggacttctccagaaccctatcccataggggacatacatcatggatcaagggagcatttgtcagtgtgatatgtcttttctaaaaaaccttatatttctgaaactttctttccgttcgtgcctagggcaggattatttcyacaaaacagtaaattatagtattatctcaatatttaaaagtagcatttcagaagactatttcaaatgtcaaatttttaaaaactgatattgcaacttttcttagccaagccctatagtttctgaaaattattaatattttctaatgaatcatccttttattttaaaaagtcctggcgttcagttattttactcagggttgcctttcacatatacaaatatacaaatacaactctagacaatggtaacagaaaacatgtttctttataaatgagct

SEQ ID NO: 314945 - DNA, 605 bp, Homo sapiens
tggaagattgcgtgaatggatgcatgggtacagaaagcaactagtaattctgaaattcagagaaagcaggagaaaagttgaggactctgataaaaatgaacttaatgcagctcgttaaaggcaattaacacaatgaaaataagttaaatattaatataaagtcagcactttttttttcccccttggacatgggacttctccagaaccctatcccataggggacatacatcatggatcaagggagcatttgtcagtgtgatatgtcttttctaaaaaaccttatatttctgaaactttctttccgttcgtgcctagggcaggattatttctacaaaacagtaaattatagtattatctcaatatttaaaagtarcatttcagaagactatttcaaatgtcaaatttttaaaaactgatattgcaacttttcttagccaagccctatagtttctgaaaattattaatattttctaatgaatcatccttttattttaaaaagtcctggcgttcagttattttactcagggttgcctttcacatatacaaatatacaaatacaactctagacaatggtaacagaaaacatgtttctttataaatgagct

SEQ ID NO: 314946 - DNA, 605 bp, Homo sapiens
tggaagattgcgtgaatggatgcatgggtacagaaagcaactagtaattctgaaattcagagaaagcaggagaaaagttgaggactctgataaaaatgaacttaatgcagctcgttaaaggcaattaacacaatgaaaataagttaaatattaatataaagtcagcactttttttttcccccttggacatgggacttctccagaaccctatcccataggggacatacatcatggatcaagggagcatttgtcagtgtgatatgtcttttctaaaaaaccttatatttctgaaactttctttccgttcgtgcctagggcaggattatttctacaaaacagtaaattatagtattatctcaatatttaaaagtagcatttcagaagactatttcaaatgtcaaatttttaawaactgatattgcaacttttcttagccaagccctatagtttctgaaaattattaatattttctaatgaatcatccttttattttaaaaagtcctggcgttcagttattttactcagggttgcctttcacatatacaaatatacaaatacaactctagacaatggtaacagaaaacatgtttctttataaatgagct

SEQ ID NO: 314947 - DNA, 535 bp, Homo sapiens
acgggcactttatattgcatctaggtaccagctcggtcacagcagtgtcaagcaccacgcaggctctcaggatccctgattccaggacatggttcctcgacgccatttctgtaactgccctaggctggaagatagcccactgctctgaagtttgagtcccaggccagscagcatttatcaaaagctgactggagagcccttgggcattaaaggaacattggcagtagtctgacagtgctcccattcagcctgtggtggcagtggccacaaggtgaggctcctctacttttgggaaggggaagaaagagtggtaaggatggtgtcttgcagtttgagtaccagcttagccacagtagaacagagcaccaggtaggaatccaaggtttttgagtctggtcccttgctcttgatggtacctctggacccacccagggcctggggaatctcactgccctgaagggaaggacacaggactggatatatctgtcacctgcttattttagaattcagggtcttgagcaaacaaaaagtagcc

SEQ ID NO: 314948 - DNA, 535 bp, Homo sapiens
acgggcactttatattgcatctaggtaccagctcggtcacagcagtgtcaagcaccacgcaggctctcaggatccctgattccaggacatggttcctcgacgccatttctgtaactgccctaggctggaagatagcccactgctctgaagtttgagtcccaggccagccagcatttatcaaaagctgactggagagcccttgggcattaaaggaacattggcagtagtctgacagtgctcccattcagcctgtggtggcagtggccacaaggtgaggctcctctacttttgggaaggggaagaaagagtggtaaggatggtgtcttgcagtttgagtaccagcttagccacagtagaacagagcaccaggtaggaatcyaaggtttttgagtctggtcccttgctcttgatggtacctctggacccacccagggcctggggaatctcactgccctgaagggaaggacacaggactggatatatctgtcacctgcttattttagaattcagggtcttgagcaaacaaaaagtagcc

SEQ ID NO: 314949 - DNA, 529 bp, Homo sapiens
gtctattgctgtgtaacaaacatctcaaagctgtgtggtctaaaatagtgattttatattttatgattctgtgggttggcctgggtgcaactgcatagttcccctggtataatttagaatgtgtcatgcagctgcagtcaagtggtcacggggacaagaatatctgaaatggctttacttacatgtccaayaccttagcagggataactggaatcctaatgatatctttctccaggtgctgtctctctcaggttagcttgggctttttcagtggctggatctcaagaggaaagggttccaagagagcaagctccattgtgtaagccgctgtttgcatcctgtttgctaatatcaaaattgccaatgtcacatcagtcaacatgtctaggactagattcagtttgggaagagctacagaagatataaatatcaggtggtgtggtacattggagccacctaaaataagtctgccatcagataaacaattaattcctcgcttttatgagcatggaattggtgctagatcata

SEQ ID NO: 314950 - DNA, 591 bp, Homo sapiens
actatatttatccctcttttatggaaagcataaaaactctaaatattaataataatacatcaacaaaactaaaaaagaaattgacaatcactatatctgcttcttcaactctcaatcaatcacccttcaatttattgcaatccagcagctaggcacaagacaccactagaatgtctctcttccacactcccatgacctcccaagtagggaactaagcactttatgtaactgtggtctctactgtgatcaacactgttgatcctagttccactatttattacctgtgtgatcttgggaaatttccttaatctgacataagtttcctcaactacaaaataaagagaacctcagagagctgctgtgaggaagaaatgtgtyagtacatacaaggtgcttcaaacagtggttgacataatccaagtactcaatgagtgtgaaccaatacccattatttcctcactgagtgcttacctcatttcatctgagtcaccacttctttgggttctcttcccatctctctagccactcctcagtttcctataccaaatattttttaacaacccaacctttgaatgacagtatttcccaaga

SEQ ID NO: 314951 - DNA, 599 bp, Homo sapiens
ccgcctcggcctcccaaagtgctgggattataggcgtgacccaccgcgcctggccaaaactgaatcttacaccccaaactagcttcatttataagcttatttatttctggcaccaatgcttgaaaccttagaatcatttttaaattgctttcttcttttccctaataagctttattgctttttcttccctcacctcccattcccattgctaatatctatcctttaaagtccagctcatattccacatctttgaccagtctttcctaaccactgctcatgagctcaccattatgaatttaaagactactatgtctgtacaatttattagaacttattacatatgacctaatgatatctcttccattagctattttttccaatyctatttaatattccatgcatttgcaatcctccaggtaaccctacattatgcactggggctcaatttgtactaatgaaatgactggcttgcctaaagtcacatagctggtgagtggcatagcagggaccagaaccagtgctatttcattactgatgcagatatgttatgtgtgaagctaacaacatattgcctgtttatccctctaacttcagttgtt

SEQ ID NO: 314952 - DNA, 596 bp, Homo sapiens
cacagtctgaaactctattatatcatgtatgtaaattaattatattgtatcacttaatctcccccacaataatataaactccataaaggcagatattttatctgtcttggtcaccacgatatcctcaagctaaagacagcgagtgacataaagtagatattcaatatttttttaatgaatgggatggaaatgtgagtcttctgagagagmagtttcagtattgttgaggggcagcattgcacagtgagaagagtgtgcctgcctagaatccagacagactggctatcagtcccagttctaccagttagagctatatgaagccagacactcatatcactcacaggattattgtgacttatacctgagctaatgtacgttgaagcacagtgcctaatcataataataatttttatgttgtgaccagcagaggtcgctcaaattgtgctttagtggtgctggttttgtctctgatactgtgctcatgtttacagtgaattcattagggacaagttcaatttgagtaaccacaaattattaaaatttaagagtaagtttccttggcatttctttggcagtctacctcttgtaaagtccag

SEQ ID NO: 314953 - DNA, 584 bp, Homo sapiens
cctagtcatgagaaccaggcagatgagtttagacttgacatggaaacagtaactattaaaagattttgattgtgatgacaaaatgatgaagatgatatatggacaaaattaatctaataacaatatgcaaattagcctgacaacagtatgcccaatgagagggagctgatatgaacaaaatggacttgggagccagactgaccagagttccaatccctttgmcacttctactttgtaaagttggcttcaacccagagtggatattataactctctccaatatagcagatagatgatatgcccgaaatactgtatgtacaagtaacataaattgattaatttcttttgttatgtttaaaacaaaactatactttggtatgtagcagttacttctaaagagataccataaaagggttttactgtcttctaagtatatccctttaattatctctcttttcatttaaagaagaagtagatcaccagaatttatttaatctttcctgggctcatgtgaatgatgttaatgagacaaaacggaatcagcagacccgggtccctaggatttggccatgccattaactgtct

SEQ ID NO: 314954 - DNA, 590 bp, Homo sapiens
taactgaccgtggtggaggggacactgtgggacttcgagagtaagtcaaagtcatgtggcttccacctcgttttctggaaccttcactcttggagctccaggctgcaaggcaaaagtatgacttccatgaggccatgatccagtggggagccccagcccgtggagaaagcacaaggcaatgggctggttagcaagccaagctcagctcagccttgtgagtatcagtccaagcgccasgcatatggggcgtcaggggattccaactcctggccattagcgtgttctcagctgaggcccaaacacggtggatcagaaacaagccagctcagctcagccttgtccaaattcatgagccacaaaattcatgaggatcataaaaatggttattggattactaagtttgagagtgttttgctgtgccacattagataagagagggcacttggaaaaggacttctccagcccaatattacccggctgatgctgctgaccttgttaacaggccagcaactgcccttgaggaacatgaagtcccacttaaaggaattacctttgttaatagacttcaggcccattggacacagggaaag

SEQ ID NO: 314955 - DNA, 590 bp, Homo sapiens
taactgaccgtggtggaggggacactgtgggacttcgagagtaagtcaaagtcatgtggcttccacctcgttttctggaaccttcactcttggagctccaggctgcaaggcaaaagtatgacttccatgaggccatgatccagtggggagccccagcccgtggagaaagcacaaggcaatgggctggttagcaagccaagctcagctcagccttgtgagtatcagtccaagcgccacscatatggggcgtcaggggattccaactcctggccattagcgtgttctcagctgaggcccaaacacggtggatcagaaacaagccagctcagctcagccttgtccaaattcatgagccacaaaattcatgaggatcataaaaatggttattggattactaagtttgagagtgttttgctgtgccacattagataagagagggcacttggaaaaggacttctccagcccaatattacccggctgatgctgctgaccttgttaacaggccagcaactgcccttgaggaacatgaagtcccacttaaaggaattacctttgttaatagacttcaggcccattggacacagggaaag

SEQ ID NO: 314956 - DNA, 376 bp, Homo sapiens
ctccaacctcacaaagtccctcccgagaaccccacaggctggactgaaggcttcatactccttgcttcattcacctcctgtccttgagccacactgggacacaggcacaaagtcccctccatttcccattgccctgagcctcctaaactgttcctgcttctctttcaggtgaaatctagaaatgcctaagtggatcagctgtgcaaataaatctttctgggctccccagtcccctatttggtggtcatgtaggctcagctgggaccaccatgctccataatcaaggagacagacaaaacgttcagcacygaatactccacaataagagtttgcgggaaaagaaaatgaataaatcaagcaattgtgttaaaaattg

SEQ ID NO: 314957 - DNA, 497 bp, Homo sapiens
tgatctccaatgaactgcttaccctctgagtcttgatttcttcatctatgaaagtcaggaggtgggggtgggggtattagacaagtccataataccctatgcatatttctaaagttccccaaaccaaaaaagtatttatccacttagtactaactgttttggtggcaaaatttcatatgaacaaacaggaggttatatatattctatatgtatccctgtctaagtctgttttgtgctgctgacctgaggctgggtaatttataaagaaaagaggtttctttggctcacagttccacaggctatacaagaagcatggcgctgacatctgcttttggtgaggacctcaggaagctcccaatcatggcagaaagtgaagrgggagcaggcatgtcacatggcaagaaagagggagcaagagggcggggagaaggtgtcagactccttcaaacaaccagctctcagctctcacgtgaactcatagaataaaaatcactcat

SEQ ID NO: 314958 - DNA, 562 bp, Homo sapiens
acctcctctcccttggatcaggagcatgtataaagacatccacacataagaacaaatctctgattctctgacccaaaataaggaaataagattacctagaaagaaacttgacctgcagttaaaaaaaaaacaaaaacaaaaacaacaggtactcgaggctctgaagtctgccctggcatttggctctgccactggcaggcaaagtatttmcaccactaagccccagcttcctcttttggaagaatgaggatggtgatagttcttatctcataaggggtactgggagaagtacaagaaataatgcatgtaaaacagcaccaaacccaatgaacacaattgttattacccaagaatgttgtcattaattctaattaggttttcccatattggttgccatttttctgcacaatttattgtctcatccatactggtgggcaagggttcaagtgcaccccaaacaagtgtgaatatttcccaagcaagatggggaaggaattcattgtcatcatcctaacaaataggttcattgcccaatgcacacagccagtcaatatgcccagac

SEQ ID NO: 314959 - DNA, 562 bp, Homo sapiens
acctcctctcccttggatcaggagcatgtataaagacatccacacataagaacaaatctctgattctctgacccaaaataaggaaataagattacctagaaagaaacttgacctgcagttaaaaaaaaaacaaaaacaaaaacaacaggtactcgaggctctgaagtctgccctggcatttggctctgccactggcaggcaaagtatttccaccactaagccccagcttcctcttttggaagaatgaggatggtgatagttcttatctcataaggggtactgggagaagtacaagaaataatgcatgtaaaacagcaccaaaccyaatgaacacaattgttattacccaagaatgttgtcattaattctaattaggttttcccatattggttgccatttttctgcacaatttattgtctcatccatactggtgggcaagggttcaagtgcaccccaaacaagtgtgaatatttcccaagcaagatggggaaggaattcattgtcatcatcctaacaaataggttcattgcccaatgcacacagccagtcaatatgcccagac

SEQ ID NO: 314960 - DNA, 516 bp, Homo sapiens
taagcttttttatgcaaaagctggtgctacactgttgtacctagtgcctgttatatcttgtgagtaattttgctttggcaggacagaccagcagtctagaaatcgtttcttagtgatgctaaagggcaccatggtggagtcttttccttcatgactagagtgatgtgcctgccccagggagctcctgacctctccctggactaatcaatgatgtttgcaatgaattatcccacccgagatttccttctccaaaagaggggttttgcaggggctctrctgtttggataaggcggtgagtcaaggtaagattagaagcctcttgatctgcagagaatagtgcattgtgggttctggctgcaccctacagggttgggacccaggcacttccttttctgtattgcttgtttgcaaggaaagggctcctatgtcatccatagtgaccaagcgggtgatgacaaatgttcttgctcccatcatgggtatctctggcctggacagccaggaagaaaatagtga

SEQ ID NO: 314961 - DNA, 516 bp, Homo sapiens
taagcttttttatgcaaaagctggtgctacactgttgtacctagtgcctgttatatcttgtgagtaattttgctttggcaggacagaccagcagtctagaaatcgtttcttagtgatgctaaagggcaccatggtggagtcttttccttcatgactagagtgatgtgcctgccccagggagctcctgacctctccctggactaatcaatgatgtttgcaatgaattatcccacccgagatttccttctccaaaagaggggttttgcaggggctctactgtttggataaggcggtgagtcaaggtaagattagaagcctcttgatctgcagagaatagtgcattgtgggttctggctgcaccctacagggttgggacccaggcacttccttttctgtattgcttgtttgcaaggaaagggctcctatgtcatccatagtgaccaagcgggtgatgacaartgttcttgctcccatcatgggtatctctggcctggacagccaggaagaaaatagtga

SEQ ID NO: 314962 - DNA, 611 bp, Homo sapiens
tatccctctaatgctaaagcctgtgagactccacggtgtccctctaagtcacaagttgtctgtgagtgtatatttacaaacacatgtggacaaaaattttgatagtagcatccacaaacgtcacattgagatgtgaaacaggcctctaataaatcagatcgggatatcttctttgcttctcacctggcatgatgctgggtttgtggcaagatacaaatatgtataaagttggcctcctgttgcctcaacacgagatgcctttacatcctaaaattgctattrcttaagttaaaatacatcacacagtctacttcagcctgcttcaggtcaacttgtggttgtcacaggggccagcctcagaggtagacagagtttagacttttcagtcttacccccagtgtccttcttctctcactgggaatttccctttgatattcccaccaaatacccttgccctggatggagtcatattctctgaagtatcttccattcaagggtcctaagagtcaaggtcattcctgatggaaacacacgcctaggaaaagaaaatcaaccctcaatgtgatctaggtcctttagatctaatttccactttttaaaaaaatccaagc

SEQ ID NO: 314963 - DNA, 581 bp, Homo sapiens
aagcttcaactctgtgagatgaaagcacacatcccaaagaagttcctcagaaaccttctgcctagtttttatatagagtaggcaaatgggagggtctcatcactgacccacttatgttttctaaagggatgtttgaaacaaatcctcaaaaaaaagactgaaactgtaagaattttttcatgagttcctattccaaaaacaaatttagtattcttggtatkcttcaatttaatttcgacttcttattctgcttcatgagatcataattattgcatctatccttaaaaaatagcatgaagttcttaattgtgagtttcatattgcttatagaatagtttataagtgatgctcatgttttatctatttcttttttaatatttccttactttttgtataaacttgaacagatcactagaagatcaccagaatcctgaaaactgagaagtgtcttcttaggaagcttttcaaagaaacttggagtgaagagtatgctttcctagatttctgctgtttcatctagaaactcatcaattcaagaacagaaatctcagtttttaattgatgttagaacctgagttaag

SEQ ID NO: 314964 - DNA, 581 bp, Homo sapiens
aagcttcaactctgtgagatgaaagcacacatcccaaagaagttcctcagaaaccttctgcctagtttttatatagagtaggcaaatgggagggtctcatcactgacccacttatgttttctaaagggatgtttgaaacaaatcctcaaaaaaaagactgaaactgtaagaattttttcatgagttcctattccaaaaacaaatttagtattcttggtattcttcaatttaatttcgrcttcttattctgcttcatgagatcataattattgcatctatccttaaaaaatagcatgaagttcttaattgtgagtttcatattgcttatagaatagtttataagtgatgctcatgttttatctatttcttttttaatatttccttactttttgtataaacttgaacagatcactagaagatcaccagaatcctgaaaactgagaagtgtcttcttaggaagcttttcaaagaaacttggagtgaagagtatgctttcctagatttctgctgtttcatctagaaactcatcaattcaagaacagaaatctcagtttttaattgatgttagaacctgagttaag

SEQ ID NO: 314965 - DNA, 534 bp, Homo sapiens
ttaagtaactattatcttttgtgtacaacgcactgtgctaggcacaacattatacatacaccaatgagtaaggcatgtcacatttttttcaatgagtgtatttgcaaagcagcccacagacaagtataccaatggtttaaaaaacgtattcccgaaatgtttttcaaagaacatcttgcttaagatgataatttggaataaagcaaaacataagaaaacccacacacaaaacagttctgtcatcaaatatttgaagaataatgcttttaaataagatagaatataatgggaaatgccaactactttagatgtcagaaaaagaagggtaaatatatactaagagggatcagattatwttatttaagtaatgttgatgtttacataatatggtttaataaatggaaatgtatttattgctggagtcttggcatgggacttacaagcccatctatgaacatcactggttggaatttgggctcttggtgttccttgacccttctgttaatgtattgcctctatagtgtttagcaggag

SEQ ID NO: 314966 - DNA, 524 bp, Homo sapiens
ttgaactctgtgtacacttacacatggatttttttctgcttgtgccactcctgaggcagcaagaccaacccctcctcttattccttctcatcccactaaatgtgaatacgatgagcatgaagaactttgtgaagatccacttccacttaataagtattaaatatatattcttttcttatgattttcttaataacattttattttctctactttattgtaagaatacagtatataatacatgtaatatataaaatamgtattagtcaactacttatgttttcagtaagcctctggtcaacagtaggctattagaagttaaatttggagagagtcaaaatttatacttagattttcaactgtacagggaattggcacccctaacacctgcattgttcaaggatcaactgcacagtggttcttcctctgataaacacagcccactaaaattcccttaaacttacttagcagaagacttccactacctactgacttagagatgggaaaatatggatattctcagagtg

SEQ ID NO: 314967 - DNA, 524 bp, Homo sapiens
ttgaactctgtgtacacttacacatggatttttttctgcttgtgccactcctgaggcagcaagaccaacccctcctcttattccttctcatcccactaaatgtgaatacgatgagcatgaagaactttgtgaagatccacttccacttaataagtattaaatatatattcttttcttatgattttcttaataacattttattttctctactttattgtaagaatacagtatataatacatgtaatatataaaatacgtattagtcaactacttatgttttcagtaagcctctggtcaacagtaggctattagaagttaaatttggagagagtcaaaatttatacttagattttcaactgtacagggaattggcacccctaacacctgcattgttcaaggatcaactgcacagtggttcttcctctgataaacacarcccactaaaattcccttaaacttacttagcagaagacttccactacctactgacttagagatgggaaaatatggatattctcagagtg

SEQ ID NO: 314968 - DNA, 499 bp, Homo sapiens
acctgcagtgcagagacagcaatgagtataaataattacactggtgtgtgataggtgatataatttggcaattttcaaagtactgtgaaaatatataaactaaatacttttcagtttcctcttcawccctttgtgttgcccaaaattattactgaacttcttagttcatttttcttcttgtaaacttaaactatttaagattatatgctattcaaattattgtcagctcatgaaaactatatgccaaacttacaagtaaattgtgtaactgatttttttaaatgcggacatctaatatatagaatcactagtttgtataaatgaatcacgttaagacacatctataaatacgtggtggaagaaacttagatataatatttagctaggccaaactactgaaataaatagaccaatagtgtaaacacagaagatgatttcttgctcatgaattagagaaggtagatattcctggtatgtagtctacaagccacacatgact

SEQ ID NO: 314969 - DNA, 499 bp, Homo sapiens
acctgcagtgcagagacagcaatgagtataaataattacactggtgtgtgataggtgatataatttggcaattttcaaagtactgtgaaaatatataaactaaatacttttcagtttcctcttcatccctttgtgttgcccaaaattattactgaacttcttagttcatttttcttcttgtaaacttaaactatttaagattatatgctattcaaattattgtcagctcatgaaaactatatgccaaacttacaagtaaattgtgtaactgatttttttaaatgcggacatctaatatatagaatcactagtttgtataaatgaatcacgttaagacacatctataaatacgtggtggaagaaacttagatataatatttagctaggccaaactactgaaataaatagaccaatagtgtaaacacagaagatgatttcttgytcatgaattagagaaggtagatattcctggtatgtagtctacaagccacacatgact

SEQ ID NO: 314970 - DNA, 584 bp, Homo sapiens
ctgtcatcagccaagaaaacctctctgtatttaagaatgcatgtgattaaatcatgacaatccagatagtcccccttaaaagtctgctatgccaaaaaacataagtatgaaataatatctccccataatcacagtttccaggaattatcacaaatatccttaaaaagcctagccaagtttcttccaaccttctaggctcacctccttaggtggggaaaatagagtyaacaggggccagggcttaaaagaataggaggaatacagaaggaatgctgcagataggtaggcaatggagaaagaggggaaaatagctctaccactggagaaacacttggaaaagacacagcctcaagatacaggtccactaaaaaactaaaatttaatcaaaagattgtagaatgttatttttccacacttctcaacaataatttatggctctgatgtaaccattgttttgtggcttactatcatctactgtaacagtagacaatagttgaaatacttggaagacatagactttctgcagaagactacatagaaaagaacaatgtgagaaggggataaaaaacaagaacactaaggca

SEQ ID NO: 314971 - DNA, 584 bp, Homo sapiens
ctgtcatcagccaagaaaacctctctgtatttaagaatgcatgtgattaaatcatgacaatccagatagtcccccttaaaagtctgctatgccaaaaaacataagtatgaaataatatctccccataatcacagtttccaggaattatcacaaatatccttaaaaagcctagccaagtttcttccaaccttctaggctcacctccttaggtggggaaaatagagtcaacaggggccagggcttaaaagaataggaggaatacagaaggaatgctgcagataggtaggcaatggagaaagaggggaaaatagctctaccactggagaaacacttggaaaagacacagcctcaagatacaggyccactaaaaaactaaaatttaatcaaaagattgtagaatgttatttttccacacttctcaacaataatttatggctctgatgtaaccattgttttgtggcttactatcatctactgtaacagtagacaatagttgaaatacttggaagacatagactttctgcagaagactacatagaaaagaacaatgtgagaaggggataaaaaacaagaacactaaggca

SEQ ID NO: 314972 - DNA, 477 bp, Homo sapiens
tgaatctttggagcgctttgaagcctttgttggaaatgggaatatcttcacacacaaactagccagaagcattctcagaaacttctttgtgatgtgtgcgttgaacccagagagatgaacctttcctttgatagagcagttttgaaacgtgtttttgtaagatctgcaagcggataattggcttcgctttgtgtcctttggtggaaacgggaatatcttctaataaaaactagacagaaatattctcagaatcttctytgtgatgtgggcattcaactaacacagttgaacatttcttttcacagaacagttttgaaacactcttttgaacaattggaggtgaatctttggagcgctttgaagcctttgttggaaataggaatatattcacacaccaaccagccagaagcattctcagaaacttttttgtgatgtgtgcgttgaacccagagagatgaacctttcctttgatagagc

SEQ ID NO: 314973 - DNA, 477 bp, Homo sapiens
tgaatctttggagcgctttgaagcctttgttggaaatgggaatatcttcacacacaaactagccagaagcattctcagaaacttctttgtgatgtgtgcgttgaacccagagagatgaacctttcctttgatagagcagttttgaaacgtgtttttgtaagatctgcaagcggataattggcttcgctttgtgtcctttggtggaaacgggaatatcttctaataaaaactagacagaaatattctcagaatcttctctgtgatgtgggcattcaactaacacagttgaacatttcttttcacagaacagttttgaaacactcttttgaacaattggaggtgaatctttggagcgctttgaagcctttgttggaaataggaatatattcacacaccaaccagccagaagcattctcagaaacttytttgtgatgtgtgcgttgaacccagagagatgaacctttcctttgatagagc

SEQ ID NO: 314974 - DNA, 615 bp, Homo sapiens
aatgtttttatttcatttatataatagctcttataaattacctgttggtcttatttgtttgtcttatttttttctgcaaatcccaacatctgggttatctcagggtctgtttcctttttctttgaccttgggtgacttttttttttctatttcctcacatgtctagcaattgttgatggtatattgaacattgtggaggatatagtacagasactctggtttctgtagttttctttctcctaaagtgtattgagttttcttttttaaggcagttaaatcatcttcattgtatagagcttcattttacattttgttagaaaggagctctttcagattttgtcgttagacttatggtgaatatcttaatcctgggacatagtgtgtactcataaaatgtggttcttctctggtttcataggaaagcttgagatatttattaagaccctctaacttgttggccttcaactccacactcttctttcctgtgaagggcagcagctgaaatctctgctcagatttttcacggttcactggcctccttggcatctctcccacacacacacacaggtctgggatcagacaaggatttgaaggaaatttgtaggtagatttttt

SEQ ID NO: 314975 - DNA, 560 bp, Homo sapiens
accctcactttgggttgaaatctcaaaaagtcttacctgttaagtaagagtgaactggatgtggaaggcctgtgcaggaactgcagcttagcttcaaattgtcccaatcctgaaattgctaatgcatgcaagcttgctggtaccgtcagcacctgacggaaacaaacatacatcctctctagaggaaaataaccgtgtacaagtgtagatgagamgaaataaacataaaggaacagaagaaatggaaaacataacagacctacagagtccccagatactgagttatcagacacagatttaaaaataactatatgttactacatttaaggagataaaggaaaagattaggaatttagggagaaaaaccaggaccactaaaaaataataaagcagaaaatgtatcatataataaagcagcacatctacccactaaatctaaaagttgaaattatataaaaaaagaaaatttagagttgaaaaatgcaaaaaaaacttaaatatgtgtttaatggcagatttaatatacatgaagagaaaataaataaaaaaagaatttctta

SEQ ID NO: 314976 - DNA, 629 bp, Homo sapiens
caagatggcatggacttgtccctcccygctcctccctgctgcttaaagttataaacccaagaaagaaaacacaattgtgatggttaatgttttgtgttaagttggctgggccacagtgctcagatatgtggctgaacattattttggatattctatgagggtgatttttggagaagattaacatttaatggttggactttgagtaaagcagattaccctccacaatgtggatgggcccccatccagttagttgaaggacttaatataaaacactgacctcacacaagcaagaagttctgccagatgactgcttttgaactcaaactgcaaggtgtatgtatataatagaaacatatattttgtttctcccattttatccaaatgaaaacataccatacctacttttctgcatcttgctttttgtacttaaccctttaaatatgtaagttcttgaagaactttccatattcgctcataaataatttttcttcctttttttccttaacagccacatatttttccattgtatggctatacagtcattattattttttttttttgcatgaatgtaagtgcattgtctttgtagggtaaattcctagaggtggaaccactaaaaatcaaagaaa

SEQ ID NO: 314977 - DNA, 629 bp, Homo sapiens
caagatggcatggacttgtccctccctgctcctccctgctgcttaaagttataaacccaagaaagaaaacacaattgtgatggttaatgttttgtgttaagttggctgggccacagtgctcagatatgtggctgaacattattttggatattctatgagggtgatttttggagaagattaacatttaatggttggactttgagtaaagcagattaccctccacaatgtggatgggcccccatccagttagttgaaggacttaatataaaacactgacctcacacaagcaagaagttytgccagatgactgcttttgaactcaaactgcaaggtgtatgtatataatagaaacatatattttgtttctcccattttatccaaatgaaaacataccatacctacttttctgcatcttgctttttgtacttaaccctttaaatatgtaagttcttgaagaactttccatattcgctcataaataatttttcttcctttttttccttaacagccacatatttttccattgtatggctatacagtcattattattttttttttttgcatgaatgtaagtgcattgtctttgtagggtaaattcctagaggtggaaccactaaaaatcaaagaaa

SEQ ID NO: 314978 - DNA, 660 bp, Homo sapiens
tttagaaaaacaaaaaattgaggcaatttaatatagttttttaatctataatttttatttataaatatgctttgaacatttttatgtcagtgctgtatccacttcatagcagtatggtattctatcttagagctatataatagcaaatttaatcaatgttttattattagatattttagtaacttgaacaattttgctattgtaaataacactaaaatgaatatcgtcatatatatccttgataatttttgtttattcaaataatgtttattttaaaaggaagagaaaatatgtgcaaaagcaaatttttaaaaattgcatcatacgaaattttatcactcaaagataactgttggtaatttttttgtgattttctttcagtatatttctatctatttatacaagattgtactattcatactatattattttacttcttattgagccatgacatgcatgtaaatgcataaatcataagtatatagtgaaattaattttcacaaattgaacacatcaatgtaaccagcacccagataaagaaatgtcaccacttcccaagcctggccccatctagccactgccttccagagggtaaccactacmctgcttctaacattctaaactagttttgcctgattttgaactttatacaattgggat

SEQ ID NO: 314979 - DNA, 609 bp, Homo sapiens
ctcacttacagtaattcaggaatgtacaaaatcctttagccagaaatggcctgaaaacgcagaggaggtaagcacaatgaacagcctggaaatcagagtttcttcctctctctgtgctgtgctggtggcatgacaacttacttgttctcacaggctccttcagtgcctgggggcagtttcctgcctcagggttaaagggctgccttcccctccttactcagcttctgaagccaacagrtccacctcctggtccgtttctgaacctgatacctgcagaaggaaattcatcaacaacctctccctgactgtcagggtgacttataatgagcttcttctccttctcccagatggggagattcctgtcctagcccaaagacttttttggctggaaaccaggttgccttaaattgccaggagagccagcctccctggcctggtcccagccctctgtgctcaccttccccctgctggtctgacttacaggctcccattttgtgtcagcttctcctctatcggtgggtgtgggcctaagacttaggaccccttccctggctaattcttatacctcaggctggaagagactagctcctgcatacccagctggatctg

SEQ ID NO: 314980 - DNA, 630 bp, Homo sapiens
ccttcacttgggaagacagaaaatacacatggagagtcatgcctcagggatacactaagagccctacttatttttcacaaatattaaaaggtctctcagatgttgacttctgtaagaaatctattttaatgcaatacatagatgatttgcttctctgcttagaggataggcaaacctctatagaggatgagattcacttgttataaccattagctctaaagggacacaaggcctcaaaacaaaacacattagttttgtcacacaaagatatttgggtaatttaatatcaaaggaaggtcttttcatccacctaaacagtatattggccttccctgacccccaaaactataaaacaactaaaaagatttctggggtgacaagatactatcagaattaaatttcaaacttctgcctaaaaactcagcttttatatactcttctgaacaagataaactagamcccctgaaatggactaagaaaaatcagttaacattgaaagaagttaaaaaaagctttataaatgccccagctttgagacacccatgttatgatattccattttcattgtttgttcatgaaatcatacaatgccttagggcagtctaacacaaaaacgtgcagaccaaaaca

SEQ ID NO: 314981 - DNA, 612 bp, Homo sapiens
tggtttaagtcttgggaaacttggtgacaaaagttattacttattcaaaaattataatcatatactatattttatcctgtttttgtcttcacttatacaacattcatttacaatagagtcaacatrcatatgactaaaaagaataacataatggttagtcaaaaagattacattaattaaagatacagccacttagtctgacttatgtaacaagtcacttccttcacgttactttaaattcagcctgtactccatcaactttataacttatccaattattcattgccaggaacatgacattctggaaatgagccttcatagcaaagtgaaactaaacacaaacataaaaagagtcaaaactactgggtttatctaggatgctttctttgaaagaaaatttaaaaaaaataaaaaaataggaaaattaaaaaaaaaaaagctgttgaaacttccaaaacactttaagccttgagagagatgtgactgtgatctgagtcacataacatgtagttgcaacttctgcttcttagattatgaattaactctctcattgttctcattctgtaaatgactaagagagatcagagactagacctccttcccttcaaatca

SEQ ID NO: 314982 - DNA, 612 bp, Homo sapiens
tggtttaagtcttgggaaacttggtgacaaaagttattacttattcaaaaattataatcatatactatattttatcctgtttttgtcttcacttatacaacattcatttacaatagagtcaacatacatatgactaaaaagaataacataatggttagtcaaaaagattacattaattaaagatacagccacttagtctgacttatgtaacaagtcacttccttcacgttactttaaattcagcctgtactccatcaactttataacttatccaattattcattgccaggaacatgacattctggaaatgagccttcatagcaaagtgaaactaaacacaaacataaaaagagtcaaaactaytgggtttatctaggatgctttctttgaaagaaaatttaaaaaaaataaaaaaataggaaaattaaaaaaaaaaaagctgttgaaacttccaaaacactttaagccttgagagagatgtgactgtgatctgagtcacataacatgtagttgcaacttctgcttcttagattatgaattaactctctcattgttctcattctgtaaatgactaagagagatcagagactagacctccttcccttcaaatca

SEQ ID NO: 314983 - DNA, 589 bp, Homo sapiens
attcatttattgttgttctccttttatatcttttatattttttatagataaagaaactgaggttcaagattgaacgacttgctcaaagttacaccactaggtctgtctggttctcaaaagtaggcttcttttattacctcagtggttcttaaaggaaggctcctagaaaacaacattagcactgcctgggaacttgttagaaatgtaaattctcatgctttagacctgttgaatcagaaactctggaggtggcattcagcaatgtgtgcttgagtgaggcctgcataaatgtctgagaacacctggattatactatcctatcatgcactggataatgttgtggtatgacagtacttagttcctttgtcttctctggggaattttggatgcagttcaaccaacaaaacttgatgctgtgcccatgtactgattccttcctgtgcctaaaagtacaggctgtggtatttcagtacatcagcttkgtctgcaagcctggagctaaggagggcagaagaagcagatgtgataggctttgtttttcatgtctactctcaggacctttttctttagtgaggacccaagatcacac

SEQ ID NO: 314984 - DNA, 595 bp, Homo sapiens
tatttttttgtgcatgcattttgaatcattttcctttatactctattgtatttggagaatttttaatgatgaatatacgtttgtgtttaaatgaaaaatatcagatggtgccaggtaatgtctgaaattttagggccccctgtaaggtgagtaaagatactggaaaggaaaaggaagtgttgtagaaagatagtgctattttctattttccaaagggacattggattatattattcaaacctcaattctttttgctcttaagtagctagtgtagtggaagaattttgaatgttgtactagatctttggctaataatgagagtrtgttcttagctctgttctcttttcaatggtatgttttattttctgtaaaatttatggatttaatagcttctatttcttcacttatcttaatggagaaaaattattttattttttaatggtacatgatttcttattgctcaaatatttcactgtacttggatggatggtgagacattattcattatttgcacttaatatttattaaagcaaacaatagactaaaaatgcatatgaaagcaaataagcataattttgtttattgaaattaattt

SEQ ID NO: 314985 - DNA, 633 bp, Homo sapiens
ttggagccctattaaatcaattctcgttagatgtggattcatagggccaagagttcactagctttccgctgctattatgttgcagtttgtatttaagcggactttgtagagacactcaaayttaatggattatggaccctgatcgattcaatatgtcctaaatttgtgaagctttatagtggtagggtgtgttttgcagtagtcatgtggtctgggaaagagagagaagccaagatagtttggggcataaaacagggcccatttgactcttcacactctcattccacacaggtccacaaaaccaatcaaaaaagaaaatcaggataggaatttgaaagtaccatgtggtaaactttggaactattaaaaaatcatactattgtaggctcatacattactgagtggatgtttaaaccattattccttctatggaaagcaaagtagctataactcaaaattacaagtgtttgtagcctataaccttgcaatttcatccccaggaattatcctacagatgtacttcacagatttgaaatggtatatatttgaggttataattgtaacattgtttaaaatatacaccaatacaatattaggaaaacatactatggtatatccagataatggaatgcc

SEQ ID NO: 314986 - DNA, 633 bp, Homo sapiens
ttggagccctattaaatcaattctcgttagatgtggattcatagggccaagagttcactagctttccgctgctattatgttgcagtttgtatttaagcggactttgtagagacactcaaacttaatggattatggaccctgatcgattcaatatgtcctaaatttgtgaagctttatagyggtagggtgtgttttgcagtagtcatgtggtctgggaaagagagagaagccaagatagtttggggcataaaacagggcccatttgactcttcacactctcattccacacaggtccacaaaaccaatcaaaaaagaaaatcaggataggaatttgaaagtaccatgtggtaaactttggaactattaaaaaatcatactattgtaggctcatacattactgagtggatgtttaaaccattattccttctatggaaagcaaagtagctataactcaaaattacaagtgtttgtagcctataaccttgcaatttcatccccaggaattatcctacagatgtacttcacagatttgaaatggtatatatttgaggttataattgtaacattgtttaaaatatacaccaatacaatattaggaaaacatactatggtatatccagataatggaatgcc

SEQ ID NO: 314987 - DNA, 577 bp, Homo sapiens
tgagcttcttcacagcgtgatggcctccggattccaagaagaacatgagtagaagctgctgttgaggtcaaggctcagggttaggctgatagactccagcttgataacggatgctacaaagagctggtggccacatttaatctatattatatrctatttgtcattcattttcacttactttttaaatagttgttgattgtactgggctacatgatctagaaacctaaaataagtgagagcagtggaatcatcaaaatcttggcattcttttattttctgttatacctttttgtattcaggtttagtgctctttgcagaaatcctccttctggcagtcatttgtcacagagaaactggttattagtgataaactcagttaatatattttggaaactctgactgagaaacagtggccatatgggtcccttctcttcaggagacagaacaacaagaagttttgtcacagataagctaattacatctgccagtggtttagataactggtctaaatttgttttactcactaattttcaaactttgatgtgatgtcagtgtattaaaataaaactcaaacccc

SEQ ID NO: 314988 - DNA, 369 bp, Homo sapiens
attatgatcttttgccttcataacctgtgttacagctgttaatttgacactgatttctgtgattctttgactaatttctgcctccccattggcatgtgagctcctgtgctcacctttgcttcttcagtatcaaccatagggactagtattcactgaatgatttaaacagatcttgtaaaagtcttttccctactggctttatttttcattacaaaagcatcatgttggtgctgtgtaaaggtgacaaagtatttatgtgatggctgtgtttatttgaaaatataatcaattgccaytttaaaatcacctattaaatgccatgaaatcaaatgttgcctgcatctcccagtgaatgcatgacaaaaggtg

SEQ ID NO: 314989 - DNA, 601 bp, Homo sapiens
ccggatcaaatggtagttttgccttcatttctttaaggaatctccatgctgtttcccatagtggctgttctagtttaaattcccaccagcagggtaaaagtgtttccttttcaccacatccatgccagcatctattattttttttattttttgattatgaccattcttgcaggagtaaggtggtatctcattgtggttttaatttgcatttccctgatcattagtgatgttgagcattttttcatgtttgttggccatttgtgtgtcttcttttgagaaatggctattcatgtccttagcccactttttgatgggattatttgtttttttcttgatgacttgtttgagttccttgtggatcctggatattagttttttcagatgtatggcttgcaaatattttctcccattctgtgggttctctgtttattctgctgattatttcttttgctgtgcagaagctttctagtttacttaggatccgtctatttatttttgtttttgttgcatttgcttttgcgttctyggtcatgatctctttgcttaagccagtgtctagaagagtttttccaatgttatcttctatagtttttatggtttc

SEQ ID NO: 314990 - DNA, 535 bp, Homo sapiens
aacaaattcaagaagtttggaatcatttcaaatgtattttctgaccacaatggtatgaaactaaaaattaataacaggaggaaaattggaaaatttacaaacacaagagaattaaaacactcctgaacaaccaatgggtcaaataataaatcaaaagggaaatttttaaataccttgagagaaacaaaaatggaaacmccataaaccaaaacttaagaggaggcagtaaaagcagttctgagagggaagttgttagcaataaatgtctaccttaagaaaaagaaagatttcaaataaacagccttactttacacctcaaggaactacagaaagaataataagctatgttcaacatcaacagaaagaaaggaagcaataaatattaaagcagaaatatagaaaataaagactagaaaaacaatagaaaagaccaatgaaactgagttggttttttgaaaaaaaaaaaaaaatagacaaacccttggctagactaacgaaagatggagaggacttgagtaaataaaactctaaatga

SEQ ID NO: 314991 - DNA, 535 bp, Homo sapiens
aacaaattcaagaagtttggaatcatttcaaatgtattttctgaccacaatggtatgaaactaaaaattaataacaggaggaaaattggaaaatttacaaacacaagagaattaaaacactcctgaacaaccaatgggtcaaataataaatcaaaagggaaatttttaaataccttgagagaaacaaaaatggaaacaccataaaccaaaacttaagaggaggcagtaaaagcagttytgagagggaagttgttagcaataaatgtctaccttaagaaaaagaaagatttcaaataaacagccttactttacacctcaaggaactacagaaagaataataagctatgttcaacatcaacagaaagaaaggaagcaataaatattaaagcagaaatatagaaaataaagactagaaaaacaatagaaaagaccaatgaaactgagttggttttttgaaaaaaaaaaaaaaatagacaaacccttggctagactaacgaaagatggagaggacttgagtaaataaaactctaaatga

SEQ ID NO: 314992 - DNA, 594 bp, Homo sapiens
cccacagctaacatcatactcagcagtgaaaagccgaaagctttttctctaagctcagaaacaagacaagggtgcccactctcactrcttctattcaacatagtactaaaagttctatatgtaggcaagaaaaggaaatacaaggcatacaaatgcaaaaagaagtataattatttctgtttgcagatgacatgatcttatgtatagaaaactctaaagactccacacacacatacacaaaactgttagaactaataaataaattcaactatacactggaactcattcctggtcctgaatgactcctggggaaggtgtgagttgagcaggtgaggagcaacctgctcttgccacagacctctggaatcctggcagcagaagaccccaaaacccccatgaacacttgagcttgcagggagagctgcttagagaggtggtaggaggataactccagcttgtacagagcccagagggtttgatatggcagcatctctagtggagcatgatcatgaatgcccattgcccaaggcttgtcttgctcccttaggagactttagcctttggggaactgtcagacctgaacagatcagggtg

SEQ ID NO: 314993 - DNA, 497 bp, Homo sapiens
gatggcaccagaggaatctacattaacaagctttactaactagcctttatttgccttcccacaagttgctgccgctggagactcaaagtactttgttttgtcacttctctaaaaatttactgttctttttgaagatgttatataaagtgcaattcagagtcacctctttgatagttactccttctctaggtatctcccacgtatgtatgaaatatacatgttaacaaaacttctgtttttccctcgttaatctgcttttttgttgttgttgctgttgttacaagtgtctgtttcaactaagaacatatgagggttaagcaaaaaattacttttttccctacatatctataaatcctcccttataatcctaaatactrtagagaaaagaaattacacatgtagacacaattactactcacaatgttattatccacctaatacaatttttatggaatcacattgtagtaattatgaagtcaaacaatgtgcattagtca

SEQ ID NO: 314994 - DNA, 631 bp, Homo sapiens
cacaatgttattatccacctaatacaatttttatggaatcacattgtagtaattatgaagtcaaacaatgtgcattagtcacaatttctccccactgatctcaaatattttggccattttctgtcattaaattctccaccatgaggtaggttggagggaaatggaattcaaactggggtagwttactaattttgtttttatgtctggcaaataagtggggaaaagtagaaatgtatgatcactaagagcatcgaaaggagatggggggctttgtcttattatcagagtttaggttaacacacacacacatacacatatgtaagatgctacagttattctaacacagttcaaaatgcttcttcaatctcttatctatttccctgttatgaaatgaacttcatatctattttatgaattagttgaggtaacagcagttgtgacaattataataacagtagcagttattatattgaatgctatctattgtattttttttaatttagtctctttggagactatcaaaaactgccaatgccaactatatttaaagtcatcacagcagggtactgggaaaagttttcaatcagcaataattgtgcttcagataaacctcattggctacaacaattgc

SEQ ID NO: 314995 - DNA, 670 bp, Homo sapiens
aatggccccaaataatccaattaaaacaggtgcaaatggtctggacagacatttctcaaaagaagacatacaaatagccaacaagtacacgaaaaaatgctcaacattgctaatcatcagacaaatgcaaacaaaagccacaatattatyttttcccagttaaaatatgttataaaaatgacaaaaaataacaaatgcttacaaggatgcagagaaaagggaattcttatacactgttggtaggaatgtaaattagcataccattatggaaaaaagtatgaaggtcacttaaaaaaactaaaaagagaactaccatatgattcagcaatcccactactgggtacatatatccagacgttttgaaatcagtacgttgaagagatatctgcactcccatgtttattgcagtactatttacaatagctaagatatagaatcaacctaagtgctcattagcaaaggaatagataaagaaaatttgatatatatatatatcatatatcacatatataaatatataatgaaatactattcagccatgaaaaggaataaaactctgtcttttgaagcaacatggattagcctagagggcattatgtttagcccggaagacattatgttaagtgaaataagcctggcacagaaagataaatattacctgttctgactc

SEQ ID NO: 314996 - DNA, 583 bp, Homo sapiens
agtttggcctggcatttctgaaagacgccaactagtattcgatagatttaaaatgaaatcttattctagttttaatttgtatttacaagatgaatagtgattttgaactttcatcgtagttcttcatttggatacttttttgtcatttgtgcatccttattattgatctgtaagcgttttttccacattaagggtatggtttctttgtctgtcacttgttaaagtcatttactttttttyaacaattgacttttaaatgttatttttaaatgtaaaaagggggtttatttttgttttaaaatctaaatgttttcaataatggcgtcttcctttgctttttataattgggcttcctagcccagaatttgtaacttacttatattttttctgttcattttctgtatttttatatttaattttctggaaaaaataaagtattaaatataaaatttgtaatttattttgacatgtaaagtgagatagggatatattccagttttctttcttacttacaaatttacttacaaaattgctttttttagtaaatttttaaaattctgcttttagctacctatcaactaat

SEQ ID NO: 314997 - DNA, 605 bp, Homo sapiens
tttccctttcccccctgccactcctgagctctttacagggattttaaatgtgctaaccaaaggtgtattatcaaaggaactcattgcactttcattagctagtgacccataagattacgagggaccagtattgcagtttcacccattacttttcatttctgaccytgattttccccttccagaatgccatgcctcatcacttgtgctatcatggctctattatttgtccaagatggctggtagtcattaagagatgctcaagcacaatgcgtattttattcatgaaatgattcccttggacatcaacctaaagctaccctcatcctccatattcctaacaggtcaagtttagatcagggtttgggtttctttgatatctacagattaaacacataacaaaagtgtattttttttcttaaaggctcatgaaatttgaagtgttttaatataaaaaataaagtggaggattaaaaatttttgccttaatgaagataatccagaaaatttagatatgttgtcctccttccttatcatcatgccaactgcttacaagcacacttgtgaattatagattttgatgtccacgattctgtcattatgtacaa

SEQ ID NO: 314998 - DNA, 644 bp, Homo sapiens
ttgatatttatacaccatacacacacacacacgtttttgtccatggttcctggctcataacttccatagcctttgctatttccttggtgactaacacaataagcctatcttttgttgaagtattggtcttttatccaagggtcctgaagcagcttcagaacaatttaagagtgatacaggtgaaggacagtcttttgttacaatattggggagatttaggcttcagaagtaggcctcagaaaatagggtctgtctctgttctgttctgcttctacctgttcctttttctccccaaggcaggccagggaaactaaaaatatactctaatgttcctccacctttctgtcttagagccggccataaggaaattctctgacctaccttgtctgactgtgggtcatgagaccgtcattttagaaggagtcctgccccatgccctggaggaatgaatactgcagagagaggcaagaagactctgaataggcagacttgcagggttttccccactcagtcgattagtatgaaatcatactccttttttttttwaaatcacatttctacatagttgtccatgtgttgaaggccaaaagaatgagggtcgtgatcaactaagtataccactggaggctatatgagtaaacagc

SEQ ID NO: 314999 - DNA, 632 bp, Homo sapiens
gctgggtgaaccatggaacagattcttcctcacagcccctcagaagatatcaatcctgctgatatctttttctcgaacttctagccttcagaattgtgagacaataaacttctatggtttaagctacctgatgcagtcatgccagagagaaatgatcataaatttgttttgattaggatgattttcccatgtctattggatgaataaccccattggaaagagtagaaaactagatttgagaactaaaatgctgaaagactgactcaaaggtacaactcagaaccaacaaccttgacttaaaattgctgacccaattcttagaaaaccctttggtggcatgcaaagtacgttcctttgaactgataaattatgaccatttggagatggaacagtgcctgtattagtttgttttcacgctgctgataaagacatacccaaaactgggaayaaaaagagatttaattggacttacagtactacatggctggggaggcctcagaatcatggtgggaggtgaaaggcacttcttacgtggtggcagcaagtgaaaaatgaggaggaagcaaaagcagaaacccgtgataaacccatcagatctcatgaaatttattcactatcatgagaatatcatg

SEQ ID NO: 315000 - DNA, 523 bp, Homo sapiens
agaggtggccaggagtgaaacaaaccagcccaagagttccaactggggaatctgtagaatattatttcaaaaaaattacatctaggagctagtatgtgcagtaactggctcctattttactatcaaaatcctgacagtgctttttatttactatttactgtaccatgcgctttgtatactcatttagatgatttataataacatctgtagaaaagagtcacaatggtctcagaccatcaaggtaacatttctacggtgatagaagtagagcgtcacagattaaaatatatgcatgtatgtcaagaaaacaaaaattattttaataaaattttaaatgatttttgtagtttttaaaaatcayatcaaattttaaaagaaagtcaaaatgaactagtttaagttctttttcagtaattaccctgtcacctgtccaccctctaatggaggtgttaatgaggagtggaacagccaaaaggcaggcagcaggggggcaatgagtttaaaagagcccagataatcacaa

SEQ ID NO: 315001 - DNA, 548 bp, Homo sapiens
cgccagttcagctagtggaaataggcacatacccagcattacatgagtgttaattattgttacttttaataattgaaagttgtgctttctgcagcctcatacatgcagtgaaccgtagtaaagtgaattcttaaggaagatgctctgtagatctgtgaaattatctctgtgttcctctatctgctctctgcaaactctaactactttgaattcctgaaacacttggctatatctcttcaatttggagaactctctgagctccatctgggatttctctccctaartcgtggtctagaaatactctgtaagcagtaatccgggtcaattgtaagattcacataatttatttcctatttctcagcaaacattgtcctcattgcctgatgtccaacatctagcaaacaattatttaatacattttgtccatatttttatcatttcaagcaggaggataaattctatcacaatgttcagtcaaagtaaagtctcaaaaagacatttggacctgacaaaacaactataaactcaatttaagagaaaactagttg

SEQ ID NO: 315002 - DNA, 573 bp, Homo sapiens
gagaagaaccataaaagaacctccatagccaaaggaagactaagcaaagagaacaaatctggaggcatcaaattacctgatttcaaactatactataaggccatagtcaccaaaacagcatggtactgatataaaaataggcacacagaccaatggaacagaatagagaasccagaaataaacccaaatacttacagccaactgatctttgacaaagcaaacaaaaatacaaagtggggaaaggacaccctcttcaacaaatgctgctggtataattggcaagccacatgtaggagcgtgaaactggatcctcatctgtcacctgaaataaaaatcaactcaagatggattaaggacttaaatctaagacctgaaactacaaaaattatagacgttagcattggaaaaactcttctagacattggcttaggcaaggattttatgacaaagagcccaaaagcaaatgcaataaaaacaaagataaattgctgggacttaagtaaactaaacagcttttgcatggcaaaagaaacagtcaacagagtaaacagacaacccaaagagtgggaaaaa

SEQ ID NO: 315003 - DNA, 457 bp, Homo sapiens
taattataaatatatattcaaaggctaaataaaattatgtaagtattgaagccaggaactcattctyttgaaaaattgctagtattgaactgagtcttggttgtttgcctctttctcataaaactacaagaaaacagtgtgcagcagtttgatctcttgtggggtgtgcatgactacctttctgtgaaattaattggtgaatcaaaatccaaagaagccttctcctaggtcatggctttaccttccagaaatctttacttctagtatatgctgggttttttgacttgtcagtgacattctgaacatcatctgctatttcttagacctataataatataccattgtttgtcctttcattgaaactgtaactcttcaggttgacaacaaatgtcctgtagctgatatccttaaaatgtggtacagggatgtacctaaggactactgagaggtagatggc

SEQ ID NO: 315004 - DNA, 562 bp, Homo sapiens
atcatttgtgtagattaccctgcataagctaattccatacagcagtaaacaggcaggtgagctcttacatgctagccatattccttagtactttatgccattcattcattccttccttcattcattcattctacaaatatttattcaacctttatgatattgggcactatgctagagaggagggatatgaaggaaaaataggccatatccatgtcccagaaaagctcacagtctgatagatgagagacactagaggcaaaatttacattgttcattccaaactgatgaaattaaggctttcgaggttaaaatttgcccctggagaatacaaagtagaatcatggatcaaagaccaccttgagaaattcattaataagtaaaatgttctcaacactcaattttgaaatttgagggaaaacagaatgagccccatacaacctgagcaaattctctgagcaaagagcaaccayagccagtactgatccatctaattccaggattataggagatcccaagagaaaggggaggtttgttttaagtgggattttgctacatgagaatt

SEQ ID NO: 315005 - DNA, 619 bp, Homo sapiens
acattaaaaaggttaaacatagtgacatgttttctgcccctgggggagagggtggaattaccagttaactagaaagctattaaattcattttgactagagaatagtatataattcattttaggtatttaagcataaattataatatagggattaatatcttttttgaaaaaaaattttactgtgttactgaaatgatggttgttttccattgctatttctctttctggtccattgtttagtcccaggagcagggctaaacaagggatcagaggtaagtatctgtgttttcccagttgtgaattattttttagcctctatttttcttagctctccagaattcaaagaggttgatcagagatggccccaagaaatatttattttcagtggtccctacctgatctttcagtaacttcccttgcttctcaggcttctctgtcctacctccaccattccactgagcaaaacatatctctcctgtgctcaaatatctgactcatttacttggactgcagtaataatggttgataatgwtcaaacgtgttgctctcaagactatttgaattttaacagataacttatgaagaaaacagtaacttaacagaaagaaatagcaataac

SEQ ID NO: 315006 - DNA, 639 bp, Homo sapiens
acagtcaaccagtgaggtctcacgtggcaatttggtatttagaaaatctatgagcaagtgagaagtaagaataaaattaacaaaataaatgtgaaaaagatggggtgaattttattttaaagatagccttacaaagtttgtgagtttatcagtttcttcctgtaagaaatgttggcaattgacctgttatgtcctgaaactgaaaggtaagtatatatagttacattacatttgttttctaaatcccaaagaaaacataagacaaaataggtcacttaaactcagaatatgtgatccattaaatctgtcagtttggtgaaagatgatttcaggatgtaggcgtcttgtgactgtgtttgatgtgaaagaggggacagatcaatggcgctamgattattctaaactgctttattttaaaattgtgctttggggaagtttttgtcttttgtattttaagtctgtggagcattcacaaagaagtcataccattgatgacatgcttgtatttttatttttggtctctctaggtataactttaccgttgtacttctgaaagtatattgattgttaaatatttaattttctcaacatagagatcattttaaacataggaggagattatttttaattgtctatatt

SEQ ID NO: 315007 - DNA, 520 bp, Homo sapiens
cacatagaataatgcctccagctccatccaagttgctggaaaggccattatttcattcaattttatgtttaagtagtattccatgtggtgtgtatataccacatttcctttattcactggttggttgatgggcatttaggttggttccatatttttgcaattgcaaattggactgctataaacatgtgtatgctgtgtctttttcatataatgacctcttttcctttgagtagatacccagtagtgggattgctggattgaatggtcgttctacttttagttctttaaagaatctccatactgttttccatagtggttgaactagattacagttccaccagcaattgaaaagtgttcccttttcaccacgtccatgccaacatctattcttttttgatcttttaaattatagtcatacttgcaggagtaaggtgatatctcattgtggtatgaatttatatytccctgataattagtgatgttgaacattttttcatgtttgttggttcgttgtatatct

SEQ ID NO: 315008 - DNA, 598 bp, Homo sapiens
taagaataacaaaatgaacacccatgcatatgaccatccatttacgtgattaaatatcagtgtctttaagctgcctatgtgccttccccatcacaacacctacttttccttctaagggagcactatccaaaattttgtttattactcccttgctttcatctataatttaaaaccatatatatgatctgtaagggatattactttcttttaaaaagttatttctctaccagttgactcagtaatgtcatgattgaaaatacacaagattagccgcatagwgttcctgcccaaaatattttatctgcatctaaagtggtaaatcctagatttgtccattttaaaggtacattttttacctttgtaatttagtatttaatctacagagtaatactttgaaactatgtgaatatcctattccccaataacgttgcattcatgccttaatcaattattatatttgtagttctaaaatgatgattttgtttacatcattccttctattttattagctgtcattcatctgtaaagaaaagcttttcttcccaccctctttttgagtgtcattatggacgcgttaattattttctaatatgttaca

SEQ ID NO: 315009 - DNA, 587 bp, Homo sapiens
gggaatccatccctttttgaaattaacacacaactcagtatgaatgataggcaggatgctgtgcatttatgtckattaggatagagaattgactgcatatttaacatgtgcacttgtgaaaaaggtctgaagcctcacctgtaaacagaagaaaatcactaacataggcacatcttcttttaaatattcaagattcctgcagttggtgtgggagaatctttttgttgaccagggagattatattggatgacaaataatgatggaatatttcccagtgtagaagatgcttacagggtcctggttcatgatagtagtagaaatgtcttgcacttcctcttatttacctcttgattattggagtttataagtatcttcatgaagccagagctaaaacttgaataagctagcctttggcagtaagcaacacctctaagaggctttctgtttgatcagagtatacaaatcctccccattatagaatgttcagggatacttaaacagggattatattatgtttccttatatgaattttgtccagggctctcatggaggagaaaataactctgtatatagctggggttcagatt

SEQ ID NO: 315010 - DNA, 584 bp, Homo sapiens
cattatgcaggtcaagagcataagcatttcctcttcctgttatatctagcattgattacatggattttggatatctctcctaatagaaatactataactgccccacaggaaagggaaatcaaatggcaagtcagttgattccttgcttcaggccagagtccctaggctctcaagaaagatgctctgttctcatcccatcttttcattgttattcctcccttacatcatgccaacatcatgatcttcacaatcagtyatcattgacatcatcctcatccttattgttaagatttattgagcatttactatgtccctggtatggtacatagtagatggagtttactttctcattcaaaccttacaacagccccaaaaggtaattattgtaactatctcatgtttttaagggcaaacaatatgcatctcacaaatttctgcattccccacaacgtttgctgcaaatgcagaccacttctatattgtcttctgtaagataaagataacaggtctctccaactgttactaaaaggattatatgaaataccacaaagcatctagcaccatgtctgacacataatgtatcc

SEQ ID NO: 315011 - DNA, 577 bp, Homo sapiens
gcatccctgcgtaagtgggctttgaagtagagctgaaaagtctgaacagtatcacaggccttcctcaggcctgggcttgcctgtatgaagtatttcaaataaagtgcctgcaaggaaaggccatgttaccaaacacatcccccstcccaccccaagattttaaacagtgagtttcccaaaagcagagacctctatcttatacatgattagatccattgtatgtagtgaggtttctggcatatagtagacactcaataagtgtaaggtgaatggttcaatacatatttttgatttcttaagcatgaacgaagaggacattttatgttatttcaacaatactcctgaaaaaaaggaagattatttattaactctgtcaaatacatcaatagataaagtaacttttgctccaaaaagtttgggtttaaagtgtagatgcagaataacaacaaagcaaagcctctagaagaaacatatcactggccacgggaacagaaaagttaagaagaaagccatggtaacattttatgtgcagttatacttcagtcatcttgaaatagttccctcctgaggtacaagc

SEQ ID NO: 315012 - DNA, 646 bp, Homo sapiens
tgaggtttctggcatatagtagacactcaataagtgtaaggtgaatggttcaatacatatttttgatttcttaagcatgaacgaagaggacattttatgttatttcaacaatactcctgaaaaaaaggaagattatttattaactctgtcaaatacatcaatagataaagtaacttttgctccaaaaagtttgggtttaaagtgtagatgcagaataacaacaaagcaaagcctctagaagaaacatatcactggccacgggaacagaaaagttaagaagaaagccatggtaacattttatgtgcagttatacttcagtcatcttgaaatagttccctcctgaggtacaagcaacttctattctcttctcctctggaaaatggttacaaaarctttaggagatggttcatgagaagcagggggcacctgttctttatttctcctttacacccagcgtcctgtctttctgaccctgagcttgctttttgtactttgctaagccgaacatccaacagaataatgagttagtcttcgggtgtttcaatagtgttctttcttactattttcattaaaataatgaatgtcagtcttcgatccactgtgactgaaggttaattggtaagcatttttttctgggaggagttgt

SEQ ID NO: 315013 - DNA, 481 bp, Homo sapiens
agtgttttgcaaactgtaggttgtaatccattggtgggttgggaaatcaatttaatgggtttgacaaacatttaaaaaaatggaatggaatatattacacatttttctaatatctgtttcaattgtgtgtgtgtgcacgtgtgtgtgtgtgtgtgctgggtcataatataaaatgtattttttattgttggttataaagttacaagtgtaaaagctaccagattggccttctaccrttgtcataacaattattattttgctttagttcataagtaaagaggcctgtttttccatgagtaaattagggagttctataaataagtaggatttctaaacaaagaacttcaagcaaccagtttgcatatattgctcattcttaatcagtgcagaaatgcagctattttagcatgcattcatccttgcatcttagtaaaaaggcatatcttgcataagaacagcggacataattaattaatatctc

SEQ ID NO: 315014 - DNA, 572 bp, Homo sapiens
tgtacatatatgtgtatatatatgcatatgtgtattcccttgcatttaacatttggagggcataccttttatttttaagaacacatggaacaatcataagaattgaatacatattaaatcataaagaagctggcaaaaattttagagtgtagggatgtggagaataaaagkctccacagatcatccccccattcaaggacactcatttaacaactgtctacacagaaaaatcaccttcataaaaatcaaaaatcaggtgagcactcatagtgtctggttttaacttcatatcactgaaagaggcactgaagagacaaaacaaaagaaacaaacaaagaaacagtcctgaattgctggcaccatccctcccccaccacccagtagaagcagcatgacgcagagagcatctctggtcactgggggagggagagcacagcaatcgtgaggcattgaacttagagctgctgtgttagagcagaaaggaaaaccggaccaaactcagttgatgactgcccatggagtgaccatttaaaccagctgtagtcacaggggatttgctgatcccagtaact

SEQ ID NO: 315015 - DNA, 580 bp, Homo sapiens
aaagtgaacaccagttattaagtttttatctatgaagtaacacatgtcctttctgctcatattttgttggtcaaagtaagtcacgtagcctcaacaaaacacaaaggggtaaggatgtacaatcaagtcctaccatgtagcagaaggaagagaaacagtatttgtgaacgatcctaaagactgtagagttttgcactggggagtagttcttaaagagaccatcagtatatccccacctaagaaagaagcaaacagcacttcagttgaattattttgtttataagcaactttgaggaatagtatttatttttatagtgagaaatgcctaacatattgagaaatatctggaaaaaaattatcaagttcattattataattgcctttttgaaagaataggtaggtcagccaacccacagtggaaatacttaaacaattttcagaggcaagactattaaaagcaaagttctaattagctaatttggcaccaaacaacttccttttggcctayaaaattttcaaacattatttgattgagttcagaatacctgggattaaaattgatatttctagttcaatgtcc

SEQ ID NO: 315016 - DNA, 506 bp, Homo sapiens
ggcacactgagaaactggagaaaaaaataatctgaaagccagatttctatattaggaagtctttcaaattaytggctgaagtagttattgttattttaaacaggctgctgttgccatcaaatctaatgctctacttcttattctccccataaaaataatattttgtgaagtttttttttctgaaaaacaaggcaaaataaagtattacattttgaaagtatctgcatgataaacagaaaagtgaaaccaaaggaatatgtgctccccttcttacattattataactgtagaatctgtgattagctggagactatcatggggtgtactgtgtgtacatgtttgtgtttcttaaaagaaggtgatgccctgcagctcacagataacacaaatagcatatgatgcagtagttgctaagggcaaccacacgtattttctgtcatttctttatccctaaatggctgaacttaatgatgttcccaataccaaaaaatctgtggatctgtcct

SEQ ID NO: 315017 - DNA, 486 bp, Homo sapiens
acctaactattctaagagtaaacaaaacggtgtactccatgaagacaaaagcattgtattctatcagtcccaatgtcattttaagacttcctactacaataagtgtattcaattacagcatcccaggaggatagtttccacagtcaaaacatttgagaaagtatgagacgaagtcacacaggtctctttgcttcctgcaacttgcctcaagtctttaagatgttcacaaacactgagaacctctaggagggagacacaggatgcagytgacaaaagcctaccaaaattagccgggcactgtggtgcatgcctgtaagtcccagcgactcgggaggctgaggtggaaggatcacttgagcccagggaggtcaaggctgcggtgagccgtgatcgcgctactgcactccagcctgggtgagagtgacaccttgtctcaaaaaaaaaaaaaaaaaaaaaaaaaaaaaaaaaaagaacaactaatataaa

SEQ ID NO: 315018 - DNA, 573 bp, Homo sapiens
tgtccatttttgcttatattgcaattgcttttaatgtcttcatcataaaatctttgcccatttctttatccagaatggtattgactaggttgtcttcaaggtttakggttttacatttaaatctttaatccaccttccgttaactatgtgcatggtataagaaatgggtcaaaattcaatcttctgcatatggctagccagttatcccagcaccatttatcgaatagggagtccttctccattggttgtttttctttttccagctttgttgaaaatcggatagttgtaagtgtgtggccttatttcctggttctctatactgttttatcggtctatgtgactgtttttgcagcaatataatgctgttttgatttctgtagccgtttagtgtaatttgaagtggagtaacatgatgccactctttttaaattaggattcccttggctattcaggctcttttttggttttgtatgaattttaaaatagtattttctagttctctgaataatatcattggtagttgaacagcaatagcattgaatctataaattgctttaggcagtatagccatta

SEQ ID NO: 315019 - DNA, 522 bp, Homo sapiens
caaccgatttgctacggcttaagactagcctcactaattctttttccaactaataacaactttacagaggcgataagcagtgatttttaccattccttcaactggtttgcacagagaggggaaagacaagggagaaaatcrttgtcttcagtagggtggggaaggtgaggtgctcaaggaggccagagaaagacccatccatccctgtaacactgaatcaaaagttcaggcagccgcttgtcaatctcaaaggtatcttttccagcagtcccagcagctctcagttttacccctttggggaggaaaaagctacccatgacttataatcctgtgcatgcctaatcctgtcatctatagctgtcagcaaagagtgtaaggcagattaatccaaagagaatggcagttaacagcccatggtgccaaacccattcttagccgagaaggactttaccaagagggggcctctaatgccctaaatcttaggaaggactctaactttcttaaattgggcctcaaacccaa

SEQ ID NO: 315020 - DNA, 522 bp, Homo sapiens
caaccgatttgctacggcttaagactagcctcactaattctttttccaactaataacaactttacagaggcgataagcagtgatttttaccattccttcaactggtttgcacagagaggggaaagacaagggagaaaatcgttgtcttcagtagggtggggaaggtgaggtgctcaaggaggccagagaaagacccatccatccctgtaacactgaatcaaaagttcaggcagccgcttgtcaatctcaaaggtatcttttccagcagtcccagcagctctcagttttacccctttggggargaaaaagctacccatgacttataatcctgtgcatgcctaatcctgtcatctatagctgtcagcaaagagtgtaaggcagattaatccaaagagaatggcagttaacagcccatggtgccaaacccattcttagccgagaaggactttaccaagagggggcctctaatgccctaaatcttaggaaggactctaactttcttaaattgggcctcaaacccaa

SEQ ID NO: 315021 - DNA, 452 bp, Homo sapiens
attatatcgattcttccaatccatgaccatgagatgtttttccatgggtgtcttgtgattctttatgtagagatctttcacctcccttgttaaatgtatttctagctactttacttattttgtaatcgatgtaaatgggattgccttattgatttcgtyctcagcttccttgttattggtgcttagaaatgctactgatttttgtattttgatttgtgtcctgagaccctgaagaattcatttaacaaatctagagtctttttggggaatctttagggtgttttggtataaaatcatatcatcagtaaacagaaagaatttgacttccacttttccaacttggaactcctttatttcctcattttgcctgaccgatctggctaagacttccaccagtatgttgaataggagtagtgaaagtggacatccttatattgttccagtttctaatg

SEQ ID NO: 315022 - DNA, 452 bp, Homo sapiens
attatatcgattcttccaatccatgaccatgagatgtttttccatgggtgtcttgtgattctttatgtagagatctttcacctcccttgttaaatgtatttctagctactttacttattttgtaatcgatgtaaatgggattgccttattgatttcgtcytcagcttccttgttattggtgcttagaaatgctactgatttttgtattttgatttgtgtcctgagaccctgaagaattcatttaacaaatctagagtctttttggggaatctttagggtgttttggtataaaatcatatcatcagtaaacagaaagaatttgacttccacttttccaacttggaactcctttatttcctcattttgcctgaccgatctggctaagacttccaccagtatgttgaataggagtagtgaaagtggacatccttatattgttccagtttctaatg

SEQ ID NO: 315023 - DNA, 591 bp, Homo sapiens
tgttcccagtttcctccctttacagcctcagcatctgcttctcttctccgtccacatttggcattttctgtccaaagatctgttcaatttatgttggtgtagttgaaatcatattttctttccgtgggagcaggacttctcagctgcatctagtcaggctgcttgctcagaatttttttgrattttttgagacttgctttgtggagtaatatttggtctatcctggagaatattccatgtgctgatgagaagtatgtgtattctgcagctgttgcatgaaatgttctataaatgtatattaggttcacctgatctagagtgacgattaagttgaacctttctttgttgagtttctgtctggttgatctgtgcaatgattaaaatgaggtgtttaggtcacctgctaccattgtctctctcttttttaatagtattttctttatatatcggggttccatacaacggttatattctcttcctgatttgaccactttatcatcatgtaatgatcttctttgtctctttgtgtagtttttgtcttgaaatctattttacctgatataagtgcactactcctagtgttatttgatt

SEQ ID NO: 315024 - DNA, 585 bp, Homo sapiens
ctgcaggacactccacccaaaaacaacagcatatgtgctattctcatcaacacatggcatatactctgttaatcataaagcataaagtaattttcaataaatttaaaatgactgaaataatatcaactacaatctcaatcttagagcacagcagaaaataaagatggaaatcaattccagaaatatctttcaaaaccatacagttacatggaaattaaacaacccaatcttgattgattttggggtaaacattaagattaaggcagcaatcaagaaattctttgaaactatgaaaacaaagatacaacctaccagaatctttgagacacaactaaagcactgataagatgtaagtttttagcactaaatatctgcattaacattaaaaaaaagttagaaagatcacaaattaacaacctaacatcacatctagaggaaatagaaaagcaaaaaacaacctcaaagctagaakaagaaaagaaatagcccaagccagggctgaattgaacaaaattgagatgtaaaaaaagacacaaaagattaaagaaactaaaagttggcttttggaaaaataaataaaacaga

SEQ ID NO: 315025 - DNA, 558 bp, Homo sapiens
gattttagcagtaagttcacttttagtgctcgttttgtttttaagattctttcattattattattattattgtgtgtgtgttttcccatagatattttagtgtaaatttaagaaaagtggcaataggggctgtggctaggtgttatcttaaaggagaaatgtctagtctgtttttgtgtcaggtagaacattatataacctttagaaggtatgtgttcatttgcatcagaaactccttgtagaagcaattctttataacatgtcaccatgtgatagttcttatgggaaggccacagtttttgtccccagggcyctcagaaatgaaatctgtcaatttttctcttgactgacattaaatttccatgttcctcagtcttaaaattaaggtttaataactccctcttggcagcagctaaactagggattccaaggtacttagagaaatctcaaattgttcactatgtatccaatcttcaataaggcaaaatgccaccttttttaaattaaggccttgcaatctccctgagtagcatgggaatcatctagctatgcaaattg

SEQ ID NO: 315026 - DNA, 500 bp, Homo sapiens
gtctgttacttaatacacacttctatcagggcatcttggccatattttgttattgtaattgtttatatacatttcacatatctactgggggaaaatataattattaagtttgaaatcagtgtctgattccgggaggctgaggtgggagaatggcgtgaatccaggaggtgtacagagcgagactctgtctcaaaaaaaaaaaaaagaaaaagaaaaagaaatcagggtctgcttcatttttctatattgccttctagagtaatttccttaaaaatattcaatacatatttatcaatttactaaattactttggaaatacaaatgaycaaataattgccataatgcaaaaaagcagaactatcatagcagactgtcttactctattttgttttgctataaaagaatacctgagacttagaaattgttaaagaaaataagtttatttagcttcaagttcttcaggctgagaagtttagtggcatggttttgatttttggtga

SEQ ID NO: 315027 - DNA, 610 bp, Homo sapiens
attcttgaagtttaacaactgtggaatgatacaaggaaaagtagtgataaatgtggcaagctaattctttattatattaaacttctgtgtaaaatagaaaaaacaaaatttccaataagaataatcatctgataacctctgtctactatttagaaatattttaataattgaaaattaaaaaaaaactatgactcaaactaataaaatacatgcattacaaaagccaaatcctgactatgtgctttaataacatggtgaatttgatggaataaatatgctatgaatgattaatgtaattgaattacatgtatttgatgtggtagtgaatataggcagctactacacattgattagaaatagtccaataatattwaaacaaaaaagatacagaattatacattaaaaatgatagatggtaataccctagaatatgcaagcattttaacctaaaaatggaaatgcatggccttaggtttcttttcaatttaagtgtaaggaagaataaattcaaaagatctattgtgcatcatggtcaccataatcaatacaatagattatgaacattgctaagagagtagatgataagtactctaaccacaaaattcataaa

SEQ ID NO: 315028 - DNA, 594 bp, Homo sapiens
taattcaaaacagtatcattcctgaactcagaaccatctccccaagagtagcagagaagtaaaacacttttattactgactaatatttatagtagaatataatgggcatccaaggcaatatgctcagatagcaaacacagaaacagatagcacccttacatatagccaaccagatacaacccatttcataaatgtttccaagataagcaataactagtcttcattaagataacatgacagcaccattttcacgcagacttgatgccaggttcatctagtaattatagtgwccatctttgtcagctaactggctttaccaagagtataaacaaacttctcttatctttataatgaaaaggtaattttgcaagttggagcaataagttcaccaaagttggactcctatctccatacagaaaattagacgtaggggtgttatctcccttgatgtttacctttcaaagagatggtacttaagctttagagaaaggtatttctgggtcaacataaagctggctggaattttataacattttgaaaaggatttacattcatttaaggaaatgtgacattcatttcaaagaaaggaaaaat

SEQ ID NO: 315029 - DNA, 594 bp, Homo sapiens
taattcaaaacagtatcattcctgaactcagaaccatctccccaagagtagcagagaagtaaaacacttttattactgactaatatttatagtagaatataatgggcatccaaggcaatatgctcagatagcaaacacagaaacagatagcacccttacatatagccaaccagatacaacccatttcataaatgtttccaagataagcaataactagtcttcattaagataacatgacagcaccattttcacgcagacttgatgccaggttcatctagtaattatagtgaccatmtttgtcagctaactggctttaccaagagtataaacaaacttctcttatctttataatgaaaaggtaattttgcaagttggagcaataagttcaccaaagttggactcctatctccatacagaaaattagacgtaggggtgttatctcccttgatgtttacctttcaaagagatggtacttaagctttagagaaaggtatttctgggtcaacataaagctggctggaattttataacattttgaaaaggatttacattcatttaaggaaatgtgacattcatttcaaagaaaggaaaaat

SEQ ID NO: 315030 - DNA, 490 bp, Homo sapiens
ttatcttctcatggagtatcttactggagttctctgaatttcctgaatttgaatgttgaactgtctttttaggttgaggaagttctcctgtatgatactctgaagtatgttttccaacttrcttcccttctccctatctctttcagataccctaatcagtcataggttcagtctttttacatagttctcagagtttgtgttcattcgtttttattcttttgtctctaaccttgtctgcctatcttatttcagcaagatagtcttcaagttctgatataatttattcttcttagtctatttagttacttatacttgtggttgcactgtgaagttcttgtgctgtgtttttcagctccatcaggtcatttattttcctctctaaactggttattctggttaacagctcctgtaatattttatcatggttcttagcttctttgcattggattagaaaatgctcccttagctgagtaaagttcattattaccca

SEQ ID NO: 315031 - DNA, 543 bp, Homo sapiens
tcaccagtggaggcttcagaacagcaaagatggctgctcctttctctgggatctctgttccagtaaataaccgacctggtatcggtggaatgttccttatgacatgtctggcaaccactgttgaggggtcttatccagtcaggaagcatgaggcccgtaaacagcactctggctgccccttggaggaggggatgcgctgtgtcgggggaaatctacctgtccagatcgtccagattcctcagagccagcagggcaaaagattaagtctgctgatcagtggagattacagctgcccctccccgcaggggctcagtcccagggagatcagagttatgtccstaaacccctggctgaagttgctgaaattcctgccgggaggccccacctagtgaagacagatgggtcagaatctggcctagagaagcagtctggccaggatctgccacagccgctgtgctgtgctgtgctgtactgtgctgtggggaattcctcctgggttcaaattgtccagtctcccctggcagcagcaggggaaaaaaaggc

SEQ ID NO: 315032 - DNA, 546 bp, Homo sapiens
tcattgtgggtttatctacctttggtctttgatgttggtaacctttggatggggtctttgagaggacatgctattcttttctgtttattagttttccttctgacagtcaggcccatctgctgcaggwctgctagagttggtggaggtccactcctgaccctgtttgcctggatatcaccagcagaggctgcagaacagcaaagatctttcctctggaagcttcatcccagagggcacctggcagatgccagccaggtctctcctgtataaggtgtctgtcagtcactactgagaggcatcgcccactcaggatacacaggggtcagggatccacttgaggaggcagtctgacccttagcagaccttgaatgctgtgctgggaggtctgctcctctcttcagagccatcaggcagggacatttaagtctgcagaagctgtgcccacagctgccccttcccccaggtgctctgtcccagggagatgggggttttatttatcagaccctgaatggggctgctaactttttatcagagatgccctaccca

SEQ ID NO: 315033 - DNA, 616 bp, Homo sapiens
gcaattcaagtcctttaagagactatattatgtatttattcttgagtgatttatggtagttttgcctttagggaattgataagtttcatttaagttgtctattttgtttggcttgagtctttagtcaataatacttttaatgccttctttcattcctgataagagtaaatgtgtctttacttttttcttggttagtctggtagacttttgtcaattgtttctgattttaggaaggaagcattcagtcttttattatttttagtattagctatgggttttatgtagatcttaaccaatttaaataatttattttatattcctttttgttgagtgtttttatcatgaatgggtgctaggttttgccaaatagtttccatgtgtctattgaggtaatgatacatttttttttcctgtgtgtatgctttttctatcaacagacttactatkttaattgatttgcaaatgtttacccgattttgcatttgtgggataaatgccactgggtaattttttggaagaacattaaaaaatttgtgtgatttaatgtttgatagaagtcacctgctaacatatctgggtctgggctttcgcttttgtttgttggaatattttaaaa

SEQ ID NO: 315034 - DNA, 616 bp, Homo sapiens
gcaattcaagtcctttaagagactatattatgtatttattcttgagtgatttatggtagttttgcctttagggaattgataagtttcatttaagttgtctattttgtttggcttgagtctttagtcaataatacttttaatgccttctttcattcctgataagagtaaatgtgtctttacttttttcttggttagtctggtagacttttgtcaattgtttctgattttaggaaggaagcattcagtcttttattatttttagtattagctatgggttttatgtagatcttaaccaatttaaataatttattttatattcctttttgttgagtgtttttatcatgaatgggtgctaggttttgccaaatagtttccatgtgtctattgaggtaatgatacatttttttttcctgtgtgtatgctttttctatcaacagacttactatgttaattgatttgcaaatgtttacccgattttgcatttgtgggataaatgccactgggtaattttttggaagaacattaaaaaatktgtgtgatttaatgtttgatagaagtcacctgctaacatatctgggtctgggctttcgcttttgtttgttggaatattttaaaa

SEQ ID NO: 315035 - DNA, 559 bp, Homo sapiens
catctattcccctgcatactgtagggttaataaagagaggtgaataatgaaagaattgtagatacaaaataaatactgtttagaatataaaaacattaattttgtttttctctgaagaaaagtgtattttctttcctaatttattgtggaatgcttattaatttggcaactattctctgacctttctttgccaaaaagaagtaaactgattctattctgagaatcatacaattctactgcacttgtgtcagctgcaatgtaaccaatctcaaatgagggaacgtgcaccaaagaagtatatcagtaagccatgaaaatgcaaaaaaattatttattatacaattcaaaatgctaacaaataaaaatatgaactgtgatataaagggctaataaaccagtgatcggaatataaaagcattcattgyatttccatacactttcactgattcagatattattgtgttctgtacaattgatatcaactgttatggaacaactgaaatttcagcaatcctcattaataataaaaatagtcaaagccattctcttccctacccca

SEQ ID NO: 315036 - DNA, 499 bp, Homo sapiens
acttaactaaccttgagctaaaattattaatgaaattactacttaacatatatatcacaaaatagycaaagtttagatctgtcagtaattaacttaaataatagacactagtatatgagctgatataaaagtaaatatggaaataaatatacctacatttaatttcttaatgaaaatttactgggtaacaaacaatagaaaaattcaactttataaggatagttttgataaaagagtattaagtaaaatgctcaacaagaagataaataaaattttcatttgagcatttaagaagcattcagaaagctgaaatgatcataacagaaaatttgttcaacaatgctgtacaagttttatacacatattcctaatttaaatgttagctttcttttgtttatatattgaaaactactcagctaatattattaaatattttacagaagcaaaacatctatttttctcctgttttaataaaataaacttatttcaaatttaatag

SEQ ID NO: 315037 - DNA, 499 bp, Homo sapiens
acttaactaaccttgagctaaaattattaatgaaattactacttaacatatatatcacaaaatagtcaaagtttagatctgtcagtaattaacttaaataatagacactagtatatgagctgatataaaagtaaatatggaaataaatatacctacatttaatttcttaatgaaaatttactgggtaacaaacaatagaaaaattcaactttataaggatagttttgataaaagagtattaagtaaaatgctcaacaagaagataaataaaattttcatttgagcatttaagaagcattcagaaagctgaaatgatcataacagaaaatttgttcaacaatgctgtacaagttttatrcacatattcctaatttaaatgttagctttcttttgtttatatattgaaaactactcagctaatattattaaatattttacagaagcaaaacatctatttttctcctgttttaataaaataaacttatttcaaatttaatag

SEQ ID NO: 315038 - DNA, 616 bp, Homo sapiens
tatcttttctttatgtatattaatatagatatgttctgatgcatactcccaatcaataatctttttttctgcttaaatctactattaacacacctattgaattatttcaattattattatattggtctagaatatagttctagaatttaaataaaaatacaaaaatttaaattatctggtgaaattatttctcatcttgaacactttaatcatagttattttaatattagtttctgaataaattatgaatttgtatctattgttcttttatctctcgattgttaatcatctgatcctgcttactggcatgcttggtgacatttgagagaatgctggacattaagtakgaaaagatgatgcttggtgatgttacttattccagggttgatttatttaccttctcttaggctctttgaaaacaggcagactaccttcattcagtccacgctaggtttcaggttttgtagaactcatctgtttctagttttctcttcctaccatagccctcactaataacctaagtatttaccagctttcctccatctgtcatgtcctgaagttcaacccctgtcttgcttaggtctgcaaaatgcttaacatttgcttaatgatatag

SEQ ID NO: 315039 - DNA, 480 bp, Homo sapiens
ctgtgtcttcactgaaacgtacactccgttcatatgtagttatacttctmctgccggtaatccttctgcctgtacaacaacctatggacttcctaaatgccatattcactatccttataaccaaaagagcattatttctgtatgtaagttattttataacaaaataaatgagaaagtgagaaaaatctcacaccattggatttaccagtccatccatgtatagtatatcatccagaggtcgttggacagctagatgggtgaaatggtctaatgaagactcattgatggcacttgctgggagaagttggtgttcttcaacaaaaagtggaatatactctttttacaaaattattttactttaagttctgtgatatttatgctgaatgtacaggtttgttacataggcatgcatgtggcatggtggtttgctgcatctatcaacccgtaatctaggttgtaagccccacatgcattagctag

SEQ ID NO: 315040 - DNA, 473 bp, Homo sapiens
ggacagctagatgggtgaaatggtctaatgaagactcattgatggcacttgctgggagaagttggtgttcttcaacaaaaagtggaatatactctttttacaaaattattttactttaagttctgtgatatttatgctgaatgtacaggtttgttacataggcatgcatgtggcatggtggtttgctgcatctatcaacccgtaatctaggttgtaagccccacatgcattagctagttgtcctaatgctctccctccccttcccctcccccaacagttcctggtgtgaaatgttccccttcctgtgtccatgtgtttttattgctcagctcccccttatgagtgagaacatgtgatgttttggttttctattcctgtgttagtttgctgaagatgatggtatccagcttcatctatgttcctacaaaggacatgaactcattcttttttaaggctrtataggatcccatggt

SEQ ID NO: 315041 - DNA, 570 bp, Homo sapiens
ctatatttggttcatgcttgtgaaaccacatgatgtctatccttatgccaataccacattcttttgattactataacattgtagtaagttttggagtcagagaatataagaccatcccctttttaattttattttttcaagattgttttggctaatagatgccccttacaattcaacataaattttaggattgcttttatgaaaaaagctattggaatatgataaagttgttttaaatgtactttgggtaattttgatatcttactattaagttttcctaaatatgaaaaggagatgtatttccatttagtcagatcttatttaattatgttcagcattgtttcatagttttcagtttacaagtcttttacctccttggttaaatttatttctaaatgttttattcctttggatgcttcagcaaagtgaattatcttattaatttcctttctatatgttaatttctagtatatagaarcacacgtgtttttgagtgtagaccttttttattaagtctagaagtttagttttcttgtggattatttggggaaatccacacacagtgtcatt

SEQ ID NO: 315042 - DNA, 599 bp, Homo sapiens
ttaagaaataaaatattttacttaaaaatacaaaaacaaaatggaaacattgttmctgatataaagtatattggagaatctggcttggttgtgaaaactaaaagggcttgctgatcatctactctccagtgcaaaacttgaggcagcccactgaaagatagattgactcgacaaagcagatattcttttctaggtcactgcctttaataggtcaagatttttcccatgttcaaaatttaaagagatttatttccctaaataaagaaacataaacaaatgctacctgctaccaccatcattaggtcacttgctccaacactatctacagaaaaaaaaaaaaaaaaagaaggattttgtcagaatccaaagagaatccctccactttgaatggggaaggagtggcatggtgactttttaataaggtaactagagggctgaattacatttcccagaattcccttttcattatgttttcaataagggtgaaaaacacgagagattctttggagatttggagggctaggggaatcagcagccattttgtaatttatacacacagttgctaacctgatgacttacctgtgtctgaaagaagtagc

SEQ ID NO: 315043 - DNA, 616 bp, Homo sapiens
aggcactttatacaggtatgataatatgacagaacactgaaagtctgattccaatgtatttttgcttcacagggaatgtataatcacaagttgtattcatattcrttaactaagatgagtttgcagacttcactagttctagttgcgtgattttgcatggctaagtaatatgtaactaaaataatacaatgtaaaaaacccaagttgtgttatgtgtgtgtttatacacataaacacataggcataaatatatgaattattttataattgcatgggaattctgctatatatatatacacatatacatacatatttaattttattattttaatattcagaaaactgtaggtttgccattacataatctgctggttattacagctattttaggtgagttcatcgtttgatctccaatacatttttgataaatgcctgtgtacacaaggagtaattgaatataatctgtgttaaattttgattatgaactagaatgtttgaaattcctggatatcatgaccttgacaggctatggttgttgtactaagcaagtaagccccaggaggtgttccagtgactcatttgaatctcagacatacttatcactgctccattgtgt

SEQ ID NO: 315044 - DNA, 616 bp, Homo sapiens
aggcactttatacaggtatgataatatgacagaacactgaaagtctgattccaatgtatttttgcttcacagggaatgtataatcacaagttgtattcatattcattaactaagatgagtttgcagacttcactagttctagttgcgtgattttgcatggctaagtaatatgtaactaaaataatacaatgtaaaaaacccaagttgtgttatgtgtgtgtttatacacataaacacataggcataaatatatgaattattttataattgcatgggaattctgctatatatatatacacatatacatacatatttaattttattattttaatmttcagaaaactgtaggtttgccattacataatctgctggttattacagctattttaggtgagttcatcgtttgatctccaatacatttttgataaatgcctgtgtacacaaggagtaattgaatataatctgtgttaaattttgattatgaactagaatgtttgaaattcctggatatcatgaccttgacaggctatggttgttgtactaagcaagtaagccccaggaggtgttccagtgactcatttgaatctcagacatacttatcactgctccattgtgt

SEQ ID NO: 315045 - DNA, 487 bp, Homo sapiens
cttgccacactcctctagatggctttagcctttgttggctgttgtatctgaacagtacaagggtatcttgcctgtgggatggggccaggctgatctgagtacccccatcattttctggcctctcttargattcctgtctggctgcatccaattttagtacagcctcagatgcccaactgcggcacttcccagcagctaccaacatagcttttacaccggttaccggttttaccctacaaaaccatcagactgcttttgcagacaggcctgtactggcatgtacatgtccacagctttgccccatcactttgctgacatgtaatcaactgaagcctgcccccactcctttcctggcacacatgaatgcatgaatctcactgcccttctaccactggtatttgtacatataagcagacctcactgctgcaacctctccatcatatgcacatgtggactccaccatggctggcactcatatggaccctga

SEQ ID NO: 315046 - DNA, 541 bp, Homo sapiens
ggggtaaaattggaactctccagatgaacaaagacatctaaatatctgtagatagaaacatttatctatctaaatatattgatagacctgtcattgtattgattaatgacaaaaccctttagataattatcttccattttaaataaaattttatttcacaaatatgagccaagaaagaggaaagttgatttgaagtgaggattagaagtgaatgacaataaagtctgkcagccaagcacgaaccaagactggcactatttttcttagtgtatataattgtttaaactgcaaggttgacatttattgtgttgtgtctaagttaatttcgatctaatgtacctgattctagcctctgtgaacaacaagaatatgtttgtgtatgttcacatggtgcttataatatttcactatcaattcaattaattcacataaattccatgtgaaatgtattcaacaatggaatattttctaaaacatttagtatacatttgaatgtattttaaaccatgccaaactactgctttaatgtcaagtttgcaga

SEQ ID NO: 315047 - DNA, 570 bp, Homo sapiens
aatgacaataaagtctgtcagccaagcacgaaccaagactggcactatttttcttagtgtatataattgtttaaactgcaaggttgacatttattgtgttgtgtctaagttaatttygatctaatgtacctgattctagcctctgtgaacaacaagaatatgtttgtgtatgttcacatggtgcttataatatttcactatcaattcaattaattcacataaattccatgtgaaatgtattcaacaatggaatattttctaaaacatttagtatacatttgaatgtattttaaaccatgccaaactactgctttaatgtcaagtttgcagaattgtctctgaaaataaaaaccctgactttagttgtaaaacaataaaagttagctacttggtatacggagatgttaatttgggatatggaggcatttttatcttctgtcactactacttaaaactctgatgattatgttagatttttttgctaactaataaagatttcaaatggcaatttatattcattgtgtgtatctggaagtttcttgcctttcttagactctgagactggtgaaa

SEQ ID NO: 315048 - DNA, 541 bp, Homo sapiens
ggggtaaaattggaactctccagatgaacaaagacatctaaatatctgtagatagaaacatttatctatctaaatatattgatagacctgtcattgtattgattaatgacaaaaccctttagataattatcttccattttaaataaaattttatttcacaaatatgagccaagaaagaggaaagttgatttgaagtgaggattagaagtgaatgacaataaagtctgtcagccaagcacgaaccaagactggcactatttttcttagtgtatataattgtttaaactgcaaggttgacatttattgtgttgtgtctaagttaatttcratctaatgtacctgattctagcctctgtgaacaacaagaatatgtttgtgtatgttcacatggtgcttataatatttcactatcaattcaattaattcacataaattccatgtgaaatgtattcaacaatggaatattttctaaaacatttagtatacatttgaatgtattttaaaccatgccaaactactgctttaatgtcaagtttgcaga

SEQ ID NO: 315049 - DNA, 552 bp, Homo sapiens
cacaatgcttcaccaaccatctaggaatccttcaatcgagtccagttaatacctaacagtaagcatcacaatatggataaacaaatacctaatttacatagttacctaaaagagaaatgagacgggggcattgcagaaactagacttctgtgtttatacccttgtgggtagttttgtattttgaaccacgtaaatacactacttattaaaaataaattttagttgaaaaagctgacaacaataaacacaataacgatgtaagtcatgggcagtatattgtattagttttctattactgctgcaacaaattaccacaaacatagtggctgaaaacaacacaaatttaytctttatagttttgtaggttagaccttccacacaggtctcactgggctaaaatcaaggttttggcagggctgaggtcctttctggagcttccagggaagatttattcctcacctcttccaacttctagaggctgttttctccatcttaaagccagcaatactgtgcttttcttccattgtcacatctccctgtgactctcttctg

SEQ ID NO: 315050 - DNA, 619 bp, Homo sapiens
ttcgggtaatgacttccagcttcttggtaagtctcatcaagcactatcttcatccttcttattttattcagatcacctttgcaaatacacagtgataattctcarccttttttgtgttatctgaacttcccaaatgttagaaattttggcagcacacttaacaagattgaattgtatccatttattgagctattcacttgtcatccttcaaagatgactttggctaccgtgtgggaaaaatgtactggatgaagatgctgcgttagcagctctgagtcccttccccacgattaatcccaaattaactacagagaaaaaaaaagcactatgaaggaagaaaactgggaaaatatggagtgaagggatggggagaagtgtttaaactgatgtatgacatggaaggttttggctttggcagaaggcaggtaggcttggcaatgcaaagaagacaacgtagaaagggaaccataggggttctgcaatctgctctccccgactttggcctttggacctctggcccagaaaacctgaggggtgagttggggcagcacagaagccctgtctcacacagtccagatttctccttcaggaccaaggcattcaagcctacagctgcctg

SEQ ID NO: 315051 - DNA, 585 bp, Homo sapiens
ttctaagagaagtaactcagggaaaaaaaacaaacaaacatcgtatattataagcaggagctaagctatgaggatacaaaggcataagactaatatcatggactttggggactgtattagtcaggattccctagagggacacaactaataggatagatgtatatacgaagggaagtttcttaaggagcattgactcacacaatcacaaggtgaagtcccacaataggccatctgcaagctgaggttcaaggaagccagtccgagtcccaaaacctcgaaagtagggacatcaacaatgcagccttcagtcagcggccaaaggcccaagagcccctggcaaatcactggtgtaagtccgagagtccaaaagctgaagaacttggagtctgatgttccagggcagaaagcatccagcatggaagaaagaggaaggctggaagactcagcaagtctgctcatttcactttcttccayctgctttattctagccccactggcagctgattaaatggtgcccacccagattgagggtgggtctgcctctcccagttcactgacttaaatattaatcttgtttggcaacac

SEQ ID NO: 315052 - DNA, 629 bp, Homo sapiens
gtctaggccagtggcagtggcttcagcccaaacaacacccacattataggcattgcttgtggatctaaggtatagcagcaaagcatttggattgcttcagaggacaggagtatgggcttgagatacaaccttttgagggctgagccaaaacgctttctcatctttcttgtcagtttctgcattttgcatacaaggayattagggtcctcagagagggaatcttttccctacctttggaaaagagcaaaaacccaggctttcatctcataaccctcaatctagccaactaaatccccaattagcaattcaaaaagattaatttgcactcttctctgctcttgagcacagctccagatagggctggtggggttttcagcatcttatttttgtaaccaattaaagggaactagctggattttcacagaagaggctgatattttagaggtttttgccccccagattataactatgccttgtgcattcaaacacagggcatccaaacaggaagatccttggagacagctcgatgagtccaaacctcccactttccagatgagaccactgaggccagaggggctctctggagaccccaactgcctcttttcccctgggttggtgtgatagttcca

SEQ ID NO: 315053 - DNA, 336 bp, Homo sapiens
taatggacttatagttccacatgcctggggaggcctcacaatcagggtggaaggtgaaagaggagcaaaggcacatcttatatggcagcaggcaagagggcatgtgaaggggaactgccctttataaaaccatcagatctgctgagacttattctctgtcatgagaacagcaygggaaagacccacccccatgattcaatcacctcccaccgggtccctcccatgacacgtggggattatgggagctacaattcaagatgagatttgggtggggacacagccaaatcatatctcctgccctccctgtttgttgctgcctctgtagttgttactgtt

SEQ ID NO: 315054 - DNA, 336 bp, Homo sapiens
taatggacttatagttccacatgcctggggaggcctcacaatcagggtggaaggtgaaagaggagcaaaggcacatcttatatggcagcaggcaagagggcatgtgaaggggaactgccctttataaaaccatcagatctgctgagacttattctctgtcatgagaacagcacgggaaagacccacccccatgattcaatcacctcccaccrggtccctcccatgacacgtggggattatgggagctacaattcaagatgagatttgggtggggacacagccaaatcatatctcctgccctccctgtttgttgctgcctctgtagttgttactgtt

SEQ ID NO: 315055 - DNA, 455 bp, Homo sapiens
aattcacacatattcaaactgaaacaatattcaaactggaaacaattcaagcctscagctgatgaatggatatgtaaaatgtggttcctccatacagtgggtttctcttcagcaataaaaaagaataaactgctaatgcctgctaggacatggatgaacctcaaacatgatgctgagtgaagaagccagtctcaaaagatcccggactgcctgattcccatctacgtgaatgtccagaaaaggcaaatgtgtaggaatggaaaaccggttcgcggttgcctgggctggggcgagaatggagattgagtacagatgggcattagggcctttctgagggacggaaatgttggaaactgaattgtagtagcagttgcataattatgtatttttttttacaaaccattgacttatacacttaaaataggtgaacccacagcatgtacaattattatcac

SEQ ID NO: 315056 - DNA, 455 bp, Homo sapiens
aattcacacatattcaaactgaaacaatattcaaactggaaacaattcaagcctccagctgatgaatggrtatgtaaaatgtggttcctccatacagtgggtttctcttcagcaataaaaaagaataaactgctaatgcctgctaggacatggatgaacctcaaacatgatgctgagtgaagaagccagtctcaaaagatcccggactgcctgattcccatctacgtgaatgtccagaaaaggcaaatgtgtaggaatggaaaaccggttcgcggttgcctgggctggggcgagaatggagattgagtacagatgggcattagggcctttctgagggacggaaatgttggaaactgaattgtagtagcagttgcataattatgtatttttttttacaaaccattgacttatacacttaaaataggtgaacccacagcatgtacaattattatcac

SEQ ID NO: 315057 - DNA, 455 bp, Homo sapiens
aattcacacatattcaaactgaaacaatattcaaactggaaacaattcaagcctccagctgatgaatggatatgtaaaatgtggttcctccatacartgggtttctcttcagcaataaaaaagaataaactgctaatgcctgctaggacatggatgaacctcaaacatgatgctgagtgaagaagccagtctcaaaagatcccggactgcctgattcccatctacgtgaatgtccagaaaaggcaaatgtgtaggaatggaaaaccggttcgcggttgcctgggctggggcgagaatggagattgagtacagatgggcattagggcctttctgagggacggaaatgttggaaactgaattgtagtagcagttgcataattatgtatttttttttacaaaccattgacttatacacttaaaataggtgaacccacagcatgtacaattattatcac

SEQ ID NO: 315058 - DNA, 581 bp, Homo sapiens
atgtaacgtgtctgcctttttttcatttttctaaggaagaagtagcattgttgtcatataataaaaagcaattgcacaggcctgatattcaaactcaatttcacatcagcatctcctaattccttatcctgtgttatataccaacaatgccccttccccacctcccacctgacccctcacaccctttwtttaaatactgtaaaaggcccccttgtcaaaagtcagaaaatgccaagtccaggctgaagctgggcaatctatagtcttgaaaaagaaatttctaaggcaacacaatgccaagagtccaggaacatcagccttagctgtgaatttcctcagtttgagtgagttcccaaaaatatcactgacaagagctcttcagtgcttgagaaagttagatcacgaaagatggggaaaagcctctattttctcccttcgctgattcctgaatcctcctttgaatctttggaaaatagttttgcagatgacctgagaaacatgatgcagatacttttcaaaacaatctctgggaaacttcatgcagataaaagaaggaaaccaccaggtcttacaaaggaaca

SEQ ID NO: 315059 - DNA, 598 bp, Homo sapiens
aacccacaaactgttcatctggcaggttcaagggtttttctatttatgctttgcatagtattttgaaatactaacttattttccatttttgattacctcactttcccagtctcctcaccatttcccaaatctggggaagtggaaccctgtattagagaggtcccccagctctgcagtgactgatmcacttggctgtcccggagcccaggggaggagggcaggtagcaagtcctggtggatgaggaggtcgggtaagtgtgagtctcagcacaggggaagcccagggagcccccagccccggcaccaccgaggaaggcagagctgctgagcctgacaagatggaacagccgcctttaccccgacaccacccaggatggcagagctgctgagcctgacaagacggaacagccacctgcaccccggcatcctcaccccacacccacacctcttcatcccatctaagactttggacccagtaaggccagagttaaattctctaccagcccagagtctctaaaagcaacatggtgaagagcatgccatcctgtgtgtggactctgctcctggctctgatgcctacaaactgggtgaccctgcc

SEQ ID NO: 315060 - DNA, 598 bp, Homo sapiens
aacccacaaactgttcatctggcaggttcaagggtttttctatttatgctttgcatagtattttgaaatactaacttattttccatttttgattacctcactttcccagtctcctcaccatttcccaaatctggggaagtggaaccctgtattagagaggtcccccagctctgcagtgactgatccacttggctgtcccggagcccrggggaggagggcaggtagcaagtcctggtggatgaggaggtcgggtaagtgtgagtctcagcacaggggaagcccagggagcccccagccccggcaccaccgaggaaggcagagctgctgagcctgacaagatggaacagccgcctttaccccgacaccacccaggatggcagagctgctgagcctgacaagacggaacagccacctgcaccccggcatcctcaccccacacccacacctcttcatcccatctaagactttggacccagtaaggccagagttaaattctctaccagcccagagtctctaaaagcaacatggtgaagagcatgccatcctgtgtgtggactctgctcctggctctgatgcctacaaactgggtgaccctgcc

SEQ ID NO: 315061 - DNA, 538 bp, Homo sapiens
taagttaaaaatttctatacgccctaggtttaatatgaaagtctacagccctttgcctgtttacttcactacaatgtaacagccttttttcatttcataaatatcctctcatctaattccacyctaaataacagtgagttagaactataataattcaaaacagattgcaaagataaatgcttgagaggatggaaaccccattctccatgatgtgcttagttcacactgtatgcctgtatcaaaatatcacattgccccataaatacaaacacctattatgtacccacaaaaatttaaacaaatacttaagaaaacagattgcaaaactaacaggtgtacacaaggaatactaacattactatgtaaccatcataccttctgatatccacagtatccttcctatactaacaattttgtacagctgtctctataatacaaataattatagaaatacaagttaattgtactttaacactgcaatcatgtagaaaagaataagtcttttggatattttgtagttcttttttcctccagatgg

SEQ ID NO: 315062 - DNA, 658 bp, Homo sapiens
gtgagggaagagtttcacatttcctttaaagtctgttatctctcaaatataaaattttaaaaaatatccaagaaaggcaggaagaaaatgtgccagaatattagtagtgtttgcctctggatggtgaaataaaaagtaggtttttctctatgtgcatatttatctctttttaattaagaaaaaagttaaaaacagatgcaaactttagagctggacagaatgggccacaaattctagctctaccatgtactagctatgtaaacttgagcaagtcactttgagtctgttttcttacctaaaaatggagaatgtaaaagtatctatctcacgggactactatgaggatacattaaataatgtatgcaatgtgcatagcacagtgtctttcacatggtgttagcattcagtaaatattgttatgtatgattagcatttgttatacattttccacaacacaaatacrtctttaatgatcagaaaaatgtttaaatcttaagaataattttcaaaatgtattattacatcatagcattgaaatagatcacgatcaaccctaaatgctggtgacaaaggggtctaggtatctattagcatagacactacttgcagtagttttcgaagtctaactcactactctcccgtagccataccaagcaca

SEQ ID NO: 315063 - DNA, 639 bp, Homo sapiens
tagtaaataataaaacaagcaataacaatagattaccttatagttctagagggcagaagtccaacagagatctcactggactaaaatcaaggtgttggtagggctcagttattttctggaggttctaggggtgaataatttttttttttattttgcagcttcaggaggtcatctacatttcttggctcatggcccctttccttcatcttcaaagccagcagcatggaatgttcaaatctctctcccactctgacattcttatctccctcttataaggaccattgtgattacactgaggctattcggacattccaggaaaatcttcccattttaagrtccttaaattaatcacatttataaagtgctttttgccacataaggtaacatgttcacaggtccagggaatcaggatgtgaacatcttgggggtctttattcatcttaccacagcatattttcataagatgaagctcagtgcctaaagtgaaaaaatgcttaaaggaagggttagatgtttgcaagaccttgtgagtacagagaataatggggtgccccaaatattaacaccaccttaagctgtgttaataagtatagaatgtccagaatgtgggaggagacagtgctgaactaggccaagaga

SEQ ID NO: 315064 - DNA, 550 bp, Homo sapiens
taaccagctagagatctatacttgaaggccattatcagcaaagacttgatatacccaataaaggagcttgctgaactcatctcagctgtgatgggcatgaaactcttccacagattatctcagctcagtcagttaagccacatttattaagcacccactttgcagaattcrttgtggaaccaggactttgaataggattaagcagacaaaaaggaatggagatgctgggatgatgggccaaaaccaagaagaagtttaattggaatatacatgtaaggttatgcacttgtttctaaacacagaaacaaacaaacaacaattataacaaaacgatggcagcaaagaaaggaaatgcgcttagtattggcctctatactcaaaggttagggaatttacttacctgcaaatttagtatgagtcagtggaaaaatgtggctaatgaaagaaatgtgttttaaactgtataaatagaaacataactaaataatgtttaaatattcatagtagtctaaatatagtaaaatggtgcatatttattttaaagaataaa

SEQ ID NO: 315065 - DNA, 476 bp, Homo sapiens
ccataattaatgaggggtacagagaaacagaaatatatccacagggaggttactgagctgaggaggaagtcagaaaccagttcccttgagctggggaagtttggcttggaggagacttaggggaatttagtctctgtcttcagagctctgaagatctcaagcctgacagacggtcaaagcagggatgaatggatataaactgcacagacacagttttcagctcataactaagcagaacttkctaaaagaactggccaaagatggaataggctcacttggtagcaagtgagatttctattactagatatatttaagctgtgtcttcaggaacacctgtttagtttgcagagtgaggtctttcacagtttcacccaacactgatattccatggttctaaatcaaactgcaattggcatcatgtgaaaaatgacaggtcaggagactatgcaaaacccatggtttccaaactgaggcac

SEQ ID NO: 315066 - DNA, 575 bp, Homo sapiens
gatagtactagtcagcactctctccccatccttacccccgtatcagcgggaccaaggggaatcttgattttctgtcttctgcttccaccatgcagcaacagggcagaatgaggcaatatgacatgacactctattcaatgatactctgcctcccccaatatccatatcagcaaggaccaaggaaaagctgaacttccactcccagctgccaacaacaagacacaataaggtagggctaggcaacattcatcaatacttttacttcctgcccaccccacatagtgttagtagggtgtagcagagagctaatatttaactccaaccaacttagcgagtgtcattgctgcagaaagaagccatgcaagtttgtggtagttcacctttcacctccctcctactctcctcttccctcctatcagagggagcagaatgtggagctgaatttcatgctctcaaacagaaacagtaagttctcaaacakaaacatatgagtcagtgatctaattttgcttagaggtgtaagcagggccaagaaggaaactgaatttcaaccaccactgcttgacaatgagaca

SEQ ID NO: 315067 - DNA, 585 bp, Homo sapiens
tttctgcttataaatctgctgttaatctgataggttttcctttgtaggttacctggtgctgttgtctcacagctcttaagattctttctttcatcttaactttggataacctgatgacaatgtgactaggtgaagatctttttgtgttgaatttcctgggtgttctttatgcttcatctatttggatgtctaggtctctaacaaggccagggaagttttccttgattattataccaaatatgtttttcaagcttttagaattctcttcttcctcaggaacactgattattcttaggtttggtcatctaacataatcccagacttcttggaggttttgttcatactttcttwttgttttttatttgtctttgttggattgggttaattcgaagaccttgttttcaagctctgaatttctttcttctgcttgttgaattctattgctgagattttccaggacatttcacatttctaaaagtgtgtccagtgtttcctgaattttttattgttttttctttaagctacctatttccttgaatatttcttccttcacttcttgtatcatattttggatttccttgcatt

SEQ ID NO: 315068 - DNA, 586 bp, Homo sapiens
tttgattattgttgcattagttatccttttctgcaaaacaaattaccataaacctagcaacttaaagcaatattcatttattatgttaccatttcaatgtgtcaggagtcagcttaattggatattctgctctgctcaggtctcactagattacagtaaagttttggccaatcctgtgcttctcatttaggtctcaagatcttcttccagtcttattcaggttgttggcagaattcagttccttgcagttgtatgactgtggtccttgttttcttactagtgtctgctaggaatttctctcagttctttcaatcaactgctttccttaagcagttcacagcatagatgtctgttttcttccttcaagacaagaggagaatgcttactgcttttacagggtttgtctatttaggttaggcccagacagaatgatctcccttttgattaactcaaaatcaactaaattgggaccttkattatatctgcaaaatccttatggtcataaaacataatatagtcatgagattgctagtaacatgattctttattttaatatctattttaaaatttatttcaaattgacaaa

SEQ ID NO: 315069 - DNA, 588 bp, Homo sapiens
gagtgcccatattcttaggatatacatgctgaagtacttcatgaatacaggtcaagcattatgatgtctaaaattaactctcaactatctcaggaaaaagtataataaccactataaaatacatacacatatacacacacacatacacactaaggcgggaggaaattgggagactacttatgagcatacatgaggaaaaatgctaacaattaatgaatttaggtaaaagatatatggtgttcattggactgttctttcaatctttctgaaagtttggaatttttcagaattatgttatgaaaagaaaataagagatgaaatcatgtatgtaaaatgtgtctactaaagcacctgacaaatagtacacattcaattaatggagatactgttgtcactgaaataaatactcagataaagtcacatacgcagctctctaccctctgaggacccaaaattcagagctgttgaaacatgagcccawgatcttccagtccacttactgcaagagccaaagtatacatgccttccattctaggatgtgcattgcctgaacagtcactagacatttgccatcccaagtccactctg

SEQ ID NO: 315070 - DNA, 551 bp, Homo sapiens
ctgtagataccagaaccactgaagtaatgtttggaaaacacaagaactgagccaccttgaccttggaatctacaaagctagcctacaggaaaacaaataggttatttagtcaaatagtcatatagatcttggttaaaactttggctctgcccgtttataaaattgtgaaattcaatttacttctgagactatcagtttttttccatgtgtaataatggggataacaactcttgcctcayaaaattattctgaatattggatgatgtcaacatgtataaagcagcttagtacattacctgcacagaaactgcccagtaagtgaaattttcgtctctactaccatcaaaccattggccatccccttaaggggtcatgtttgttgactttcttacagtcctaccttcacttcagtactgcacatcctttttcagtcttgaaagatacactcatcaagattactcacttgggaaaaaaaagatgagatttgcatagctttgtttgttttttgtttgggtttttaatttttgtttgactcaggatttaaaaactga

SEQ ID NO: 315071 - DNA, 551 bp, Homo sapiens
ctgtagataccagaaccactgaagtaatgtttggaaaacacaagaactgagccaccttgaccttggaatctacaaagctagcctacaggaaaacaaataggttatttagtcaaatagtcatatagatcttggttaaaactttggctctgcccgtttataaaattgtgaaattcaatttacttctgagactatcagtttttttccatgtgtaataatggggataacaactcttgcctcacaaaattattctgaatattggatgatgtcaacatgtataaagcagcttagtacattacctgcacagaaactgcccagtaagtgaaattttcgtctctactaccatcaaaccattggccatccccttaaggggtcatgtttgtygactttcttacagtcctaccttcacttcagtactgcacatcctttttcagtcttgaaagatacactcatcaagattactcacttgggaaaaaaaagatgagatttgcatagctttgtttgttttttgtttgggtttttaatttttgtttgactcaggatttaaaaactga

SEQ ID NO: 315072 - DNA, 551 bp, Homo sapiens
ctgtagataccagaaccactgaagtaatgtttggaaaacacaagaactgagccaccttgaccttggaatctacaaagctagcctacaggaaaacaaataggttatttagtcaaatagtcatatagatcttggttaaaactttggctctgcccgtttataaaattgtgaaattcaatttacttctgagactatcagtttttttccatgtgtaataatggggataacaactcttgcctcacaaaattattctgaatattggatgatgtcaacatgtataaagcagcttagtacattacctgcacagaaactgcccagtaagtgaaattttcgtctctactaccatcaaaccattggccatccccttaaggggtcatgtttgttgactttcttacagtcctaccttcacttcagtactgcacatcctttttcagycttgaaagatacactcatcaagattactcacttgggaaaaaaaagatgagatttgcatagctttgtttgttttttgtttgggtttttaatttttgtttgactcaggatttaaaaactga

SEQ ID NO: 315073 - DNA, 583 bp, Homo sapiens
atccttccaaacctttctttatatacatacatacttatatacatacttacatatgtacctctataaatttggtcaatgtgtgaggttatatttatttatttttatataaatggcaacattctgaacatactgctcttcaattttttaacctccttatggtgtcttggatatctttctatactacacaatagctttacattttgcatatgacycagattatgaaggtaccagtttgtttaacaattttcctatctatgggcatttacattttctctactgttttcattattgcagtgtaacaatagtgaaagaacatccacatacatatcttattgtgaacattttaaatttattatccagtgccaatattaaaaactgaaaccattgtgtcatatagaatattatttaaaatgttaataggtatctcactcccacttataagtgatgggatcattgggatcccaagcctcagtgtcacataatatacacactaacaaaccttcatgtgtaccctttaatctatgaaaaatagttgaaactataaaataaaatagacactgccaaaatgtaccacaaaatacag

SEQ ID NO: 315074 - DNA, 594 bp, Homo sapiens
gtaccttcacatactcacagtctacttgggtgacagacatgtcaacaaattattacaatatagtgtgttcatgtaaacatggaagtatgtacaaaacagaaatagtagaggaaagtaataaactgtctgagggggtaagaaaatatttcaaagagtaagttatggcatgaataaggacaaacaggaatttactaggcaaaccaggtgaggacaaggcattatagaaaagagaaacagtagggtcaaaggaacagaaacayaaaatagcaggtatcttcagggaattgcaaaggtcaagggcaggtatgatgccaagagatggtcaggacggggatattatctcgtacctatagaaccattcaaatatttcaagtaagggagttacgttgttagatccaggttttggagagaccattctggcagcagtgtggagaatagatctggaggagtaggtcgacagaatccactgagaatgccattgtaatagttcaggcaatagtaatgagggcctgaaactaggctgtcacaatggagactcagaaaaaaaggaaaaatttaagagctaacgggaaaataaaaacagaattccacccc

SEQ ID NO: 315075 - DNA, 518 bp, Homo sapiens
agtttggcagtttcttacaaaactaaacatagtcttattgtatgatccagcaatcataytactagatatttactgaaatgaattaaagatttatgtctacacaaaatctgcatatgaatatttgttataaatttattcataatcgacaaaagttggaagcaaccaagatatcctttcaataagtgaatgggtaaacaaactgataaatccatacaagataatattattcaacaatgaaaagaaatgaactattaagcctcaagaaggcaaggagaaatcttaaatgcatatcggtaagtgaaagaacctggtctgaaaatgctacatgctatatgattccaactatgtgacattctcgataagacaaaactatactgactgaaaatcagtggtcgtcatggatagtaggaggattaaataggtgaaacacgggatttttagagcagtgaaactgtgctatactattattgtaatagtagatacatggctttatgtacttggcaagcctggtagaactg

SEQ ID NO: 315076 - DNA, 595 bp, Homo sapiens
aatcagtgttttgcttctctaggtaccagaccatgctggactgctggcacggggagcccagtcagagacccacgttttcagagttggtggaacatttgggaaatctcttgcaagctaatgctcagcaggtttgtcacctccatccaagaagcacctacaaagagtacttagatgtcaaggactttcctactgcctgaactgtctcatggctaccatgccatcctctcagccattgaataatctactgtattcttctacatctgagtaataatgcttttctraaagctgtaattacccttttagacagataggattctaatttataacccgggagcagaccactctgatttctacctacttatctttttgttatattttcaaatcctcttctaaagttaaaacaaagaaaaaatctggttgatccacagaagatcaacaatggaagaaatttcaagaaatttttaataaattctgcaggcaaaaatacatctaagctatgcaaaagagatggtttctgtcttggtatcatcccaggttcttataacttccactggaagattttagagttgtagtgtttactattagaatgttattt

SEQ ID NO: 315077 - DNA, 617 bp, Homo sapiens
gcactgttacccttccagctcaaagacgggaaggaaaaacaacagtgcctctgtctctagaatttgatggcaccaattacagcccaatccaattaagcaagtaatgcactccaaaagggcaagttcaccattatattcagggcgaccggcctgccgttactactacgctaggaaacaccccaggcttaaaagcaactcacttctttgtggaatacagagcaaccacatgttccagaccttcattctctgcccagaaagggggagagagagggcttgtctgggacaaatgagtgtccatggtggactggacccgttgaaccaagtcattataaagaaaattcagtaaccatggacagatgatcctggtactgtatgtgggtgtgagtgtcttctaagacatgtgattcttgtcttaggragtaagaaatttttttccctgaattattcgactttttttttttctttctctgaccctttcccctttctcaccctgcaaagggtggaaatctggatatcagcaaactggctgcaggaaagaaatattatctaaggggttgagagagaaaggaaagtgaggaagaaaagacagacagctattgcatgaagaacgtgtgtgt

SEQ ID NO: 315078 - DNA, 417 bp, Homo sapiens
tgcaaactgatgactcctattcctgggcttccagcctttctgcaaagcgctgaagatctggcagcacagggcccatgctgcaccagcaggcacaattgcctcagctggggctggacagtgccagctcatttctggcatgcaggcactcaggtcccaaccagtccacttcacccaactgtgycagtggcccccacaggcatttgagtttttgctccctatcctagaaatgttcagaccagtgctgcatctcctctgaccattgcaaactggtacagattttgaaatcaatttatgccagttgagcaggggtttcctacagtgtaaagctagacatctggagttggggaattccaatttcaatgcccttctggctttagaccaactgtagattttacaatcccacatcaaggtctatga

SEQ ID NO: 315079 - DNA, 552 bp, Homo sapiens
ctctgaccttgaggcaggcggggaggatgagctttcattaaatgattttttccgtagtccttttgaaaaaggactcagtattgagttccttagcttctgggtccaaccacacataaaccagcagagtaaaaattattattttcattggatcactgcacaaaatacaatcaaacaggaaccaatatatcagcaaaggaaytcttttcatgaaatatcctagttatccttagtgacccaacagttatctccaggtaatattaagcatcaaaatgttattcacccaaactcctacatattaattctgaggctcccatattattggtatagagccaactcttaattattggcagacgcagaatatggaaattatggatcaagcctaaggtctcgttttagcaaagcgattcagactcttccagataaacttttaccccagctgcagcaagcaacaacactgactaatttgactttcacatctggcaaaacggctcccacacatacctagatagatatgtgggtcatacactcctcaacccacttcacagagtctga

SEQ ID NO: 315080 - DNA, 552 bp, Homo sapiens
ctctgaccttgaggcaggcggggaggatgagctttcattaaatgattttttccgtagtccttttgaaaaaggactcagtattgagttccttagcttctgggtccaaccacacataaaccagcagagtaaaaattattattttcattggatcactgcacaaaatacaatcaaacaggaaccaatatatcagcaaaggaattcttttcatgaaatatcctagytatccttagtgacccaacagttatctccaggtaatattaagcatcaaaatgttattcacccaaactcctacatattaattctgaggctcccatattattggtatagagccaactcttaattattggcagacgcagaatatggaaattatggatcaagcctaaggtctcgttttagcaaagcgattcagactcttccagataaacttttaccccagctgcagcaagcaacaacactgactaatttgactttcacatctggcaaaacggctcccacacatacctagatagatatgtgggtcatacactcctcaacccacttcacagagtctga

SEQ ID NO: 315081 - DNA, 625 bp, Homo sapiens
tgcagcagcatcactgggagttgagatgagtcagggctctagccctggcctgctgataagtggtataagacactgggtctaccatgtgtgttgtttgggccccgttcacatcacctgccaaaggagcagatttctaacatggataattctcttttcgcctgtaatatgtgtgagactagaatttatatgtcaaaacatacatgtaaataagcataattcttacatgtaagtaagtatattttctgcaattaggttgatgtgaatctaaaagcaaatttgcctggtgacactcaagtcacctacttatattaaatatattgtgaaaatgcaacttggttttttgaattaagttttatacttgaagcccggactccaacttgctcatcttgctccatgcttctgctataagaccatagtggacatctcttattttgcagtctcagcatccagtccctgcctcatgattttctytggggaaagtctctcctccaacctcagttcatatttaaggtaggctatatgaactcagactcactgattagtgcatcacatttctcaggtcatggacaatggttcagggacaggcacatgaccccattagaaccatctgagcatttttttttaa

SEQ ID NO: 315082 - DNA, 585 bp, Homo sapiens
tctccccatgttgtctcctatggttatgtttataaatgacttgtcttccttaatgagaaggggaacactcatctaaatatgtaactataattctgaaaggtttggggaaaactcagtaaaaaatactaacatttaaaatacctgtttttcttttcctcacattgtgcatctcgtctctgacatttcctgtgcttatatatcagcatccatcttaactttgtaaccattgcttctatagccctgattgtccctgattttaatcctgaaatttacatggggttttctaaaatgcacttcaagattccaccttgtttttcttctgtgtttaggaggaagaaaggcagggcactggtaaacacagcctggagagcttccccacacaggcagccagatactttgatcattagttatgttaagggtcttcctttctgctgccccagaggattgrttttccaggcctattttgaggaagcagaagtggccactccctacataatcagggagtcctgtgctgttttatgggtgtttatttattgtgaatttaattatttatactcaaaattctacaatgtagaacaggaatta

SEQ ID NO: 315083 - DNA, 494 bp, Homo sapiens
ccctcaccccactctcacccgcctcccctttcctttaatttagaaaaagatgatttccagaaatacttaaagaatgagggcagcaatttaatttttaaaaagcagacataagaagggcatttctaaactctgttagactgttagtatcaacgaggcatttatggcacagctagagtttgcgaggcctatgtggaagaaaaaagacctcacaagcyccagttaagtttgaagaaccagacatagtctcataagaaaacaaccaagtataccacgccctacacatgataagggggtttgataagaaaatgctccaggagagttgttttcctcaatcctttttttttcttttaaataagaagaattatgttagctttattaaccctgatggcttcaaaaactcaaggcaggaagccaaaggcaggagaggaggttgaatattttcagaggactggtttggaagttcacagtggccatatccaaggatttaagtcttt

SEQ ID NO: 315084 - DNA, 627 bp, Homo sapiens
gtgcggtggttcatgcctgtaattccagcactttgggaggccaaggtgggagaattgcttgacaccaggagttcaagaccagcctgggaatcatagtgagaactccatgtttccccccaaaaaaaacagccaggcatggctgatgcgcctgtagtcccagctaatcagaaagctgaggcaggaggattgcttgagcccagtagtttgcagctgcagtgagctgtgatggtgccactgtactccagcctaggcgaaagaatgagatatcatatcaaaaaaaaagaaaagcataactattaaaataattcggatatttagaaagtggtaaaaaccactttggaaaaacgtttagcagtacatgctaacataaaacatacatctatcctgcgacccagcmgttcctcttctggacatatccccaacagaactgagtgcacatgttcacaaaaaagatatttacaagaatgtgcatagcagctttattcataataatcttcaaatgggaacagcccaaatgtctattcacaggagaatagagaaataaattgtggcatattcataaaatggaatactacacaaaagagcacatactgtataattccgtctatataaagcttaaaaacaggc

SEQ ID NO: 315085 - DNA, 627 bp, Homo sapiens
gtgcggtggttcatgcctgtaattccagcactttgggaggccaaggtgggagaattgcttgacaccaggagttcaagaccagcctgggaatcatagtgagaactccatgtttccccccaaaaaaaacagccaggcatggctgatgcgcctgtagtcccagctaatcagaaagctgaggcaggaggattgcttgagcccagtagtttgcagctgcagtgagctgtgatggtgccactgtactccagcctaggcgaaagaatgagatatcatatcaaaaaaaaagaaaagcataactattaaaataattcggatatttagaaagtggtaaaaaccactttggaaaaacgtttagcagtacatgctaacataaaacatacatctatcctgcgacccagccgttcctcttctggacatatccccaacagaactgagtgcacatgttcacaaaaaagatatttacaagaatgtgcatagcagctttattcataataatcttcaaatgggaacarcccaaatgtctattcacaggagaatagagaaataaattgtggcatattcataaaatggaatactacacaaaagagcacatactgtataattccgtctatataaagcttaaaaacaggc

SEQ ID NO: 315086 - DNA, 658 bp, Homo sapiens
tgtagacagtttacatgatagcccactgatggcttttctttctttccattgcattggggtacaaggatagaaggaagtgaagaaggcttggagagggtttcccggagaatgggcaagtgagacatggtgtgatttctagggtccatttcagattggtgagcataagtttatagtgaaggcattatatactttttacattggcatgtgcaccagaaactatgtcaataatgagtaaaaattcctgataaagttgaagttaggatttttgccttttgaagaagaaaaattattaagtcaacaattaggaaaagcaatctcaagaaatagaaggagttagttgctctttcacattagaaaaattgttttcatccacagaagttttaaatagctttatggagatataattcacatattgttcagttcagccacctaaaatgtacagttcagtggtttttagtattcacagatatgtgcaaccattaccacaatcaattttagaacattttyatctccctcaagagaaattctgcacctcttagccaccacctcctcccctaacctcctcatccctgtctcgcctgccccaccgtaggcaaggaacaatctacttactatatatacagatttgcctaagtttggacatttcacataaatggca

SEQ ID NO: 315087 - DNA, 551 bp, Homo sapiens
ataaaattacaccttttatcctttccaggggartcactgccaccagccttgctccccgcttggtgtttacaacctttggaatagttgtaacttgtcacgtccccatctcagcctttgtttggcctacttttctaattttagctcttttaatcgctctcatctgaagcctgtccttcctcgtttctaattatactcctaacaaatactttttgatggatgttgatgaatgtaaaataaattaaaaatgattctcatgccaagatatctgtaaggctcagcccctcccctttccaggtcattgctcaaatgtcaagttcttagtaaagccttcctcgtctaccttgtttaaagtagatgtacacacacagagaagcataaacatacacaagtgcattgctcctgtgtattctataaccctttcttgctttatttccccatagcatttactctcatctaacctacaacacgttttacttgtttatattgcttattgtttgctctacccactagaactgtaaactccatgaaggtgaagagctttgcctgattgt

SEQ ID NO: 315088 - DNA, 551 bp, Homo sapiens
ataaaattacaccttttatcctttccaggggaatcactgccaccagccttgctccccgcttggtgtttacaacctttggaatagttgtaacttgtcacgtccccatctcagcctttgtttggcctacttttctaattttagctcttttaatcgctctcatctgaagcctgtccttcctcgtttctaattatactcctaacaaatactttttgatggatgttgatgaatgtaaaataaaytaaaaatgattctcatgccaagatatctgtaaggctcagcccctcccctttccaggtcattgctcaaatgtcaagttcttagtaaagccttcctcgtctaccttgtttaaagtagatgtacacacacagagaagcataaacatacacaagtgcattgctcctgtgtattctataaccctttcttgctttatttccccatagcatttactctcatctaacctacaacacgttttacttgtttatattgcttattgtttgctctacccactagaactgtaaactccatgaaggtgaagagctttgcctgattgt

SEQ ID NO: 315089 - DNA, 575 bp, Homo sapiens
tacattttctttgatttctttcatcagtattgtgtagttttcatcacataagttttgtgcataagttttgytaccaagctgagaaagtctctctctatgcttatttttttcggaaagtgtttaacacaaatgtgttgaattttgtcaaatgctttttctctgttgattgatatgatcatgtaaccttttttccttagcttgtaatatggtagattacactgatgaattttcaaatattgaaccagattatatcattggaataaacctcacttggtcatgatgtacaaatttttaaatatatttctgaattctatttgctaatattttgttgagaatttttacatttatccatgaaagctactggcctatggttttcttttaatgtactgtctttttctcattttgatgtcaggtatcagagctttataaaatgaattagaaaatattcccttcttttatgttgctggaagagattgtgtggaattgctcttaattctttaaatgtcttgtagaattctccagtgaaaccatctgtgcctggagaggtgggagtgttgggatttctacgatttgtg

SEQ ID NO: 315090 - DNA, 548 bp, Homo sapiens
ggctggtctgtaggggaaaatgatggctgcacatctgttagggtagtaaagattcaacgcgatgaggcatgtgaaaacacttagaaatctgcaaagatcctttacaaatgctggctgttgttatgttaaacatgtctttgtacagtgtgtaatggtcttccctacttacaataacatcaggaatctaaagcagactatggtttttctcactagtagacaatccctctgtgaggggtgtagtcattggtagcaagagtttrtagaggtcaccaccccctctgctgtgactcacagaccccatgcaccaatcaaggtgcaatcctgaggctccaccaggtttcccaaggccaaactcgatgctagcacggagcagactgtggtgtgatttctagtgtaaggcagggagtcagaattctgctctcccacttacttgttttgtgactttcggcaaataagttcatttttctgagtctccatttcttcttatgcatgtgccttcctcctatccattcacatatatcccaaaatgaaatgtgaatattgaccct

SEQ ID NO: 315091 - DNA, 559 bp, Homo sapiens
gttaggaatgttgagctttggagtcaggttgcctgagctaaaatctctgctctgcctcttactagcggtgtgaccttggccaagatacttgactttctaaatctgtttgtctgcaaaatggcgataataatgaagtcaccccatagagttgtgaggattcaatgtgataatgcaaatagagaccttggaagagtacctagcttatcataagtatttaataatgttgctgttctggttattgttgctattgtcttacctaaaacatggcgggacgtgtttcgtatagttctgtgacatttgagcttcagtgccatctagtggccaggacatttcagagggtgctattagcccaggtgttgcacccacaggtgatgcgagggctcttattctgtagcttaatgaytcgctgctaactgatttcaaaggtgagtgctgggtatgcaggccaggactaggaatattgtgtgatctgacctcattactggttaagttgcatgaagagagtaactttgtttttacagacagaaaaggaaatcatcatggccacgggatctcggat

SEQ ID NO: 315092 - DNA, 577 bp, Homo sapiens
aacttaaacttgatatgttcaaaactgagcttctgatgttccagctgtgatccatctcctgtattcttccttatatcagaaaatggcaactccatttccttggccaaaaacttggagttatcctggattgtcttctttctcttacatttcacatccagtctttcagcgtatacttttggctcttactatcaaaatatatccataacctaatcacttcttgctatcttcaaaccacagtcatcttttaactacattgttgaagtagacgtttaacaggtttgtctgctcatgcaactccgtcagtctgttctcaactgagatcctgttaaaatgaaagtcacatccctttatttctctcctcaaaaccctcccatggcttcccatctcattcacagaaaargctaaaatccttatggtttcctagaaggcctttcatgatctggttcttggttacctctctgaactcattttctgctactcttccagctgtctgtgttccagctagctgaaattgtagctgttgcttgaatgcattggttttaactaacttaaagacctctgcatttgccatttgact

SEQ ID NO: 315093 - DNA, 577 bp, Homo sapiens
aacttaaacttgatatgttcaaaactgagcttctgatgttccagctgtgatccatctcctgtattcttccttatatcagaaaatggcaactccatttccttggccaaaaacttggagttatcctggattgtcttctttctcttacatttcacatccagtctttcagcgtatacttttggctcttactatcaaaatatatccataacctaatcacttcttgctatcttcaaaccacagtcatcttttaactacattgttgaagtagacgtttaacaggtttgtctgctcatgcaactccgtcagtctgttctcaactgagatcctgttaaaatgaaagtcacatccctttatttctctcctcaaaaccctcccatggcttcccatctcattcacagaaaagrctaaaatccttatggtttcctagaaggcctttcatgatctggttcttggttacctctctgaactcattttctgctactcttccagctgtctgtgttccagctagctgaaattgtagctgttgcttgaatgcattggttttaactaacttaaagacctctgcatttgccatttgact

SEQ ID NO: 315094 - DNA, 597 bp, Homo sapiens
tgaagacttccgtgatccacaatgatagcatctccagcaattgcttctataatgaatagcatgagtcattctgcaggatrttgatcttcctttttttactcctagactgaatttttccaccacctggatgaacatagcagaaagaacatagtgttttagagtcagacacaataggaatcaggcactttggaatcttggctctaccacctttgagctatgtatcccaaggcaagtcacttcccctctctcagctttaaaatagtaataggattgctgtagggattaaagtaaatcaacatatgtaaagtgcccacacaggacctggcatatagtagttgcattttaaattttttaaacaaaatgtaagcatactatctttccagggtgttcagaagcctgaaaaacaccttggatcttttctcagagctggatcacaaagatgtcacactgtctcctgttctgacacactgagtggttcctcatggctggagcctggggcgtgtggtcaggtgtttgttgagaaaggagtcgcttgatcaggtgtttgttgagaaaggagtcactgggaaatcccaaatattatctgattgaactcat

SEQ ID NO: 315095 - DNA, 607 bp, Homo sapiens
tgaagacttccgtgatccacaatgatagcatctccagcaattgcttctataatgaatagcatgagtcattctgcaggatgttgatcttcctttttttactcstagactgaatttttccaccacctggatgaacatagcagaaagaacatagtgttttagagtcagacacaataggaatcaggcactttggaatcttggctctaccacctttgagctatgtatcccaaggcaagtcacttcccctctctcagctttaaaatagtaataggattgctgtagggattaaagtaaatcaacatatgtaaagtgcccacacaggacctggcatatagtagttgcattttaaattttttaaacaaaatgtaagcatactatctttccagggtgttcagaagcctgaaaaacaccttggatcttttctcagagctggatcacaaagatgtcacactgtctcctgttctgacacactgagtggttcctcatggctggagcctggggcgtgtggtcaggtgtttgttgagaaaggagtcgcttgatcaggtgtttgttgagaaaggagtcactgggaaatcccaaatattatctgattgaactcatgtggtgccaa

SEQ ID NO: 315096 - DNA, 491 bp, Homo sapiens
agtgcagtggcacaatctcggttcactgcaacctacgcctcctgggctcaagcaattctcctgcctcagcctccgaagtagctgggactacaggcgcctgccaccacgcccagctttttttttttttttttttttttttttgkatttttagtagagacagggtttcatcatgttggccaggctggtctggaactcctgacttcaggtgatccacccgcttcggtctcccaaagtgctaggattacaggtgtgagccactgtgcccagccaggaggttattttaggtccttttgcttttatgcataaaagataataaaatgaaaacatactactcataagccttggtcactgacatgagcatatttggaatgaaaaattattgagaattgcaagaccaggtatgttcctgtcagtgtcatttaataaaaagaccataacattttaaagtacagaatgttgatgaatggggctatcaactcttagtaacgatc

SEQ ID NO: 315097 - DNA, 616 bp, Homo sapiens
actgagacttcacttttgcataaaattcttggtcagtattctaacaatcctcagaataatggaaaaatgacycaatctaaactgaataaagttaagttcaattgggcaagcagtaagtttgaggtggggaagtgaacagtgcaattgggttatatgtaaaaggcctttctgcaattcagtagggtagaatgaggatgaggggtcatactagacaccacctccaccaccatcatcaataaaaataatggttaatatttattgggttcttaattttatactagatactataaggggcttttatgcaacaaatcctttaaatttttacttaattctcgaaaaaaatcttatgaaataactattactgtgaactcaattttacaaatgaggaaactgagacttaaaaggattaaataattttcccgaggttaggatcacacagtcattaaacggaagagcctcttatccagatctgactgactccaaatgccatgccaccatctactgcaccatgctggctctaataatggtattagttccatttcttgaactcaagacctgaaattcatgtttattaaccaacctattgggtaagtacttttatctttcccattaagta

SEQ ID NO: 315098 - DNA, 616 bp, Homo sapiens
actgagacttcacttttgcataaaattcttggtcagtattctaacaatcctcagaataatggaaaaatgactcaatctaaactgaataaagttaagttcaattgggcaagcagtaagtttgaggtggggaagtgaacagtgcaattgggttatatgtaaaaggcctttctgcaattcagtagggtagaatgaggatgaggggtcatactagacaccacctccaccaccatcatcaataaaaataatggttaatatttattgggttcttaattttatactagatactataaggggcttttatgcaacaaatcctttamatttttacttaattctcgaaaaaaatcttatgaaataactattactgtgaactcaattttacaaatgaggaaactgagacttaaaaggattaaataattttcccgaggttaggatcacacagtcattaaacggaagagcctcttatccagatctgactgactccaaatgccatgccaccatctactgcaccatgctggctctaataatggtattagttccatttcttgaactcaagacctgaaattcatgtttattaaccaacctattgggtaagtacttttatctttcccattaagta

SEQ ID NO: 315099 - DNA, 580 bp, Homo sapiens
tgagttttgtgaagcaaattcaaatctgcttcacgatgtacccctggtgggggggaacactgagatatagcatagaactacagtagatcagattccctattatttatctgggtcacctgtactattcatccttcaaaacatttaaggctaaaatttagcaatgaaggtcttaaatgttcaaggttaccacttagggcctcacctgtaatttttacagtttaaatgtccattactatggcatgggttttgttagcttcatcccaggcaatgatatccatgaaattgtgatttgttgtactaattgtatttttactattttaacagtaaattccttaccaaagaaaatcatcaagcataccaccctgtgggaaacatctaacaagtcacactttgggaaacactgtcctcactggcacgtagtatctacataatattaaacagtcatctcaggtgttaatgctgaacatgaggtgagaacattaaagatcccctgagctatcttcccagtcctgctggagtcagctcgatcacattcyctccacagtcattcagtctttgaacacctccgttgacagggatt

SEQ ID NO: 315100 - DNA, 596 bp, Homo sapiens
ttggttcaggcatgagctacagggctattggctgagagttcaatgctaattaatcaaaaatgtatattaaagaagatgtctttaaacaaaaacatacatgaaacaagcttatggattgatcatttgatgaaaatgttgtaagcagaagctcacagaaacctaacyctatacagtcatgcaccacaaaacaatgtttccatcaatgtcagacagcatatacaacgatgctcccataagatcataacacgtttttttttttttgagatggagtttcactcttgttgcccaggctggagtgcaatggcgccatcttggcttactgcaacctccacaccccaagttcaagcgattctcctgcctcagcctcctgagtagctgggattacaggcatgcaccaccacatccagctaattttatattttttttggtaaagacggggtttctccatgttggtcaggctggtctcaaactcccgacctcaggtgatccacccgcctcaacctcccaaagttctgggattacaagcgtgagtcaccgtgcccggcttataataccatatttttattgtaccttttctatgcttatatatgtttatt

SEQ ID NO: 315101 - DNA, 525 bp, Homo sapiens
tgttttgtcctctaataatttcatatgtacatgtcctgtcttctctatcagtctgtaataattttcagggctggatcccatttcttgaacaatttatctacctatcagtgcctaacataggacatgttattagagtaraattggtttgaacttgaaaccaggaacacattttgacagctcagagctctgggtttgcagtagaaaataatgtctgtgaatttatgtctgtaaatttcactgtaggtggtcacagagcaattttaagagtcgagggctccaagtttgcagtgcagaatattaggagtaaatctttaaaagaaacaagtaaatgatggacctgtgtgtctgaagatttcaatttaagtagaggggcttaaagccaagatgaggattatcaagaaagcaaacatggctatttcaacaggatttaaccaagttaaatcctggggcatgatcctggcattttaattgaaattaaaatttaacatcaatgaagtaagaacacagcactgaataagagtggca

SEQ ID NO: 315102 - DNA, 531 bp, Homo sapiens
agctcctggagaccttcagagagcctctggatcagtccacaggcagcgaacaggctctgcatcgggctggggcttcccttgggaagagtctggctcaggggctrgtcccctacacctctccttcccccttaacttgatccttgaagcccccagttctcttgtttctttttagatgtaatcatgtttttcctctccctgcccagtaaggccagcggccaggaccctggtgaggtccagaactggagcccaggaaggggccatcccgcccgcaaacgagaatcgggtactccagtggaaatcgcccgcggaagtttgaggttattgaacttttccacagaaaccctgacctaaattcttgacctcaggctgtttacaacacaaatccccgcctaaatgaagcctcgtggtgcccccctccccccgcccgccgcccccagccccgggtgtacgcgcgctcacgccggcgttcagctcccaccctcccgccgctcccttgccgcctcggcgtgccgcccgtgtctggacagcgat

SEQ ID NO: 315103 - DNA, 555 bp, Homo sapiens
gtttctggtgaaggcttcaggaagctttcactctttgtggaaagggaaggggagctggtgtgtgcagatcacaagatgagggagaagcaagagagaagcaagagagagaggagggaggctctttctaacaaccagatcttgtggcaattaatagaaagagaatgcattcattacctcgaggatggtgccaagccattcatgagggatcagccyccatgaccaaaacacctctcactaggtccccaactccaacactgggggtcacatttcagcatgagatttggaagggatgaacaaccaaactttgtgtgtcttccactttttgcctggcaacctagatctcaccacagggatctcacctctggatcccagtccagtgagctcatgaatcctacctggggtggtggaattgtctaatggaaaggcagagcgcatgtcaccatctgattttcagggtttgtctgcaccttagttattgatgcctgcttctctcaggatcatagtcaggtgaatccagttgtctcagagactgaccatggcctagattggaaaagg

SEQ ID NO: 315104 - DNA, 589 bp, Homo sapiens
  misc_feature (1)...(589): n = A,T,C or G
ttatattacatctatataatgtcatatctattacatagatataatgcaaagagaattaaaatatatgagagagatgttngggcatccananncgcgctaatnntccnnacancnatatgtcagagatggggggtgttacatgttttgatatacacatacatagtaaaatgattactacagccaagcaaattaacatattcttcaccatacatagttccttttttgtgtggtaggagcacttagaatctactcttttttttttttttgagatggagtctcactctgtcgcccaggctggagtgcagtggcatgatctcggctcactgcaagctcctcctcccaggttcacgccattctcctgcctcagcctcccgagtagctgggctacagcgcccgccaccacgcctggctaattttttgtatttttttttagtagaggcagggtttcactgtgttagccaggatggtagaatctacccttttaacaaaatttcagtgtactatacaatattgttaactatagcsctaaccctgtacatttaagatctgtagatgtgttcatcctatctatatagctgcaagtttttac

SEQ ID NO: 315105 - DNA, 571 bp, Homo sapiens
tctaaactcaatgactgtgtcagccattgtgggtgatggaattggtgacagcaagtgggcctcagcctgctgggtgggatgggggatagccccttcaccacgaggagtttttctgagtgttgtgccctatcaggcttctggtgagaagtgctctaagacagtaaatatttcccctttttatcaagaaataacaatatcccagttgaaggtgtaaaaggcaatttgcataggcgttaattattgaggctgcacagcactctccttggggcaccatccagaggcggctcacagccaggaacacaaaggatcctctctgggagtgcagccagggccagaccttccacccagkcttggttcctgaagtgagcagttggagctgaacatcctgacaacagactcagtcccattccttgaagccgtgcgtctcatggagggtggtattgatgccagttgcagctcagcacagagctatcctgggagcttcgatggggtctcggtggacagatggacttgcagttgagatggggggtcatttcattccagatgtgggcacgctttgtcatgggggtca

SEQ ID NO: 315106 - DNA, 528 bp, Homo sapiens
attggaaagacaaataaaagaagaaactaactcatggtttcacttaaatctctatcaagaatgcatgtttaaaattcattttaygatgcatgttcaggctgggagacaagctccccagaagtaagttattgatatgcttgcacagaaaaatgggaggccattactaggaagaagttgcctggaaccatctgctatttgcagcatccattaagaaaaggggtttcttgttctttattagtaatctgaaatttccttgcttctgactgggcagaaggtgtaaaaagaaattgattgttatgttttgaaaagcaaagacatatttgccattttacttcttgaagagaaaacagagagatattcacgggatttaattcattccattagaaaactctaggaataagccagaaaaggagcaatcaaggaaaaaataataagagcaccaataagtattttaagttataatgccccgtgttggcagacatgtggggaaatgagcttgcttgtacactgctaatgggagtataaatt

SEQ ID NO: 315107 - DNA, 528 bp, Homo sapiens
attggaaagacaaataaaagaagaaactaactcatggtttcacttaaatctctatcaagaatgcatgtttaaaattcattttatgatgcatgttcaggctgggagacaagctccccagaagtaagttattgatatgcttgcacagaaaaatgggaggccattactaggaagaagttgcctggaaccatctgctatttgcagcatccattaagaaaaggggtttcttgttctttattagtaatctgaaatttccttgcttctgactgggcagaaggtgtaaaaagaaattgattgttatgttttgaaaagcaaagacatatttgccattttacttcttgaagagaaaacagagagatattcamgggatttaattcattccattagaaaactctaggaataagccagaaaaggagcaatcaaggaaaaaataataagagcaccaataagtattttaagttataatgccccgtgttggcagacatgtggggaaatgagcttgcttgtacactgctaatgggagtataaatt

SEQ ID NO: 315108 - DNA, 613 bp, Homo sapiens
cagattaagatatgcaaggctatgtaatttgccgagggattcagttggtgagcgtggagttgggattcatacccagcttcagagcgtaggctcctaacttctatttttttgccccatatttacctaacttacagttccaagttcctccccagatactatgttgattcttatcacaggcttctgtagggcaggttatattattatcctcattgtttatgtgagaaaactgacctagagaagtcaagctaaaggttgcttgactagcaagtggcagaaatgtagcctgaacccagagcttctgataccagaatacggactctttcaactcctcygcagagactcagactgacttagtgcacactccatatttgaagctgtgttttccttgagtcttggtttacattcagaatgcaccagcctgttaaattgctgttggacattagcccatccttgaacagtcaccataacaacataggcacatggagaggaatgtggggtaggcaaaaactgatgccagtccaggggagaatagagctttgcagggagtgggggtgggtcagggaacacttcctgggtgtgttttgctatgttcttttcatgatatagactggaa

SEQ ID NO: 315109 - DNA, 623 bp, Homo sapiens
acatttcattaaccatgtatttggcttaatctttgagtttcatttctctatatagtgagcaaacctcctaaatcttygataatcagatatatcctttgatactcttcccattagagtctatatttcttccctttggatatgaatggaattgtgactcctccaacctagagtattctgaaggctgggtcatcaggccatgcagcttttctttggttgctggaacacttgcacttggagctctgagctaccatgtacataagaaatctgactaccctggggacccgggcccagggagaggtaggtatatggaggcattccaatctacaatcccagctgagctcagtcttctggctatccagacatgcatgtgaatagccaccaaatgtttccagaaccccacctttcaagtcactcgcatttgttatatcttctcagctgaggcaccagacatcctgaaacagaaacaagccatccccactgtgcactgttgaattgctgattcacagagtctgcgaggataataaatttgagagcagtatattaggcagcagtagataaccagagcatactctaaaataggttttaaaaacatatcgagcctcgatcacaattttaatgaagca

SEQ ID NO: 315110 - DNA, 584 bp, Homo sapiens
gtgggggcattggctactataaaaggaaggcttaaaagagtcttcaggcccctggaaggtgaaaaaaaaatagagaacctcagctagttgaaacaaatctggaggtttgggcagtacatggggttggtgcaggggggaggtgcacatccccttggttgagtcctgtgttttgtgaatttygttaacttaataccactgtatgcatggcatgagctcagtgtcattaacaagacacaatcttcaaggaacttggggtacagagggggagatggatgtgacagaagataactacaatacagagaatcagcagtggatgtgcaggagtgcaggaaaaagccaagggtccactttgaggggatagagcagacttcttggaggagcagcctctcggtctcctagcagcatcacagcaggtgactactccctcctccttgaaacactttcttcacttaattctcctcctccatccacccttccttacctcccttgctggcgcctcgtcctccacaccttcgcatgtgggaatgccccagtcctcaatcctcacacctcttctgtcgctcttactcccttgaggagttcac

SEQ ID NO: 315111 - DNA, 584 bp, Homo sapiens
gtgggggcattggctactataaaaggaaggcttaaaagagtcttcaggcccctggaaggtgaaaaaaaaatagagaacctcagctagttgaaacaaatctggaggtttgggcagtacatggggttggtgcaggggggaggtgcacatccccttggttgagtcctgtgttttgtgaatttcgttaacttaataccactgtatgcatggcatgagctcagtgtcattaacaagacacaatcttcaaggaacttggggtacagagggggagatggatgtgacagaagataactacaatacagagaatcagcagtggatgtgcaggagtgcaggaaaaagccaagggtccactttgaggggmtagagcagacttcttggaggagcagcctctcggtctcctagcagcatcacagcaggtgactactccctcctccttgaaacactttcttcacttaattctcctcctccatccacccttccttacctcccttgctggcgcctcgtcctccacaccttcgcatgtgggaatgccccagtcctcaatcctcacacctcttctgtcgctcttactcccttgaggagttcac

SEQ ID NO: 315112 - DNA, 634 bp, Homo sapiens
gtaagatttttaggttcgtagggagaaaaagaaaggcaattaggagaagtgggattagttagaggggtctccgttgccattagggaggattgaatcagactctcttgatttgcatgccagtttctgaggagtcggcacagatctcaccaggtatgagggcggtctctgatgcagatgtctcttccctgtggttttcattgttagtattcacatgaagtttcagcctcttagtgggcacccagacaggggattgatgatctcctggtgaaacgtaaacataacctcttccccatgttayaattgttccaggttcccaggtattggtttgggagtttttccataacactggcttgccttcatttagggagaattttttgcctgtgtaatggctttcagctgcggtcagagtattgtctttaggaacatttagaaagtttaaagtaacaatgctaaatgtaattgggattggggagtggttaaattatggttttgttgctcagactgtttggacaactgagtttttaaagtgcgattggcccattccaccacagcctgtcccttaggattgtaagggattctgataatatgggaaattccccattgttgcataaataaatcaaaagccttactaata

SEQ ID NO: 315113 - DNA, 475 bp, Homo sapiens
ggttggatggcacccataggtttaattacagcattaatggcccttaaatcagttaccatcctccacttgcctgatttctttgttactagaaacacaggagaattccagggggaaagagaagattccacatttccaagttgtaactgttcagaaaccaattgagttaaagcctccagtttttctttagagagtggccgctgctcaatccagacaggtgcttcagatttccattgtaggggaacaggattaggaggcaagcagtggccgycattgaaaaggataacctaaaccagccctgtcttcttttacagtaacttgaagagctttagtaattccttcatgtcttggactgagaccaagtctgggaacaaaccccatgttttccattatatgctgactgggagcactgtaagagtgatgtggaatattaatttcagcccacctttgtgccggcaaatctctaccccaaagatta

SEQ ID NO: 315114 - DNA, 646 bp, Homo sapiens
ccgctgctcaatccagacaggtgcttcagatttccattgtaggggaacaggattaggaggcaagcagtggccgtcattgaaaaggataacctaaaccagccctgtcttcttttacagtaacttgaagagctttagtaattccttcatgtcttggactgagaccaagtctgggaacaaaccccatgttttycattatatgctgactgggagcactgtaagagtgatgtggaatattaatttcagcccacctttgtgccggcaaatctctaccccaaagattaatggggattggtgtgatataaggctgaattgtacccttttgaccatcagggccagtgcaaggcaagataaatgtgctctggtgaacttcatcagcttttccaacacctactagtcccacgttagtgggatgtttaagccaggaggaagccataaattagaggaaataatagaaacatcagccccagtatctattatgccctcaaacttttttccttgaatgtgtatggtgcaggtgggccattgtttagaaattacattaatccaataagcagctttttcactgctggagcccatcccagggccctgtgtcttatctcctttgtttaaaacaatattaggtagtaaaagtgattgagcaattgac

SEQ ID NO: 315115 - DNA, 475 bp, Homo sapiens
ggttggatggcacccataggtttaattacagcattaatggcccttaaatcagttaccatcctccacttgcctgatttctttgttactagaaacacaggagaattccagggggaaagagaagattccacatttccaagttgtaactgttcagaaaccaattgagttaaagcctccagtttttctttagagagtggccgctgctcaatccagacaggtgcttcagatttccattgtaggggaacaggattaggaggcaagcagtggccgtcattgaaaaggataacctaaaccagccctgtcttcttttacagtaacttgaagagctttagtaattccttcatgtcttggactgagaccaagtctgggaacaaaccccatgttttccattatatgctgactgggagcacygtaagagtgatgtggaatattaatttcagcccacctttgtgccggcaaatctctaccccaaagatta

SEQ ID NO: 315116 - DNA, 646 bp, Homo sapiens
ccgctgctcaatccagacaggtgcttcagatttccattgtaggggaacaggattaggaggcaagcagtggccgtcattgaaaaggataacctaaaccagccctgtcttcttttacagtaacttgaagagctttagtaattccttcatgtcttggactgagaccaagtctgggaacaaaccccatgttttccattatatgctgactgggagcactgtaagagtgatgtggaatattaatttcagcccacctttgtgccggcaaatctctaccccaaagattaatggggattggtgtgatataaggctgaattgtacccttttgaccatcagggccagtgcaaggcaagataaatgtgctctggtgaacttcatcagcttttccaacacctactagtcccacgttagtgggatgtttaagccaggaggaagccataaattagaggaaataatagaaacatcagccccagtatctattatgccctcaaacttttttccttgaatgtgtatggtgcaggtgggccattgtttagaaattacattaatcyaataagcagctttttcactgctggagcccatcccagggccctgtgtcttatctcctttgtttaaaacaatattaggtagtaaaagtgattgagcaattgac

SEQ ID NO: 315117 - DNA, 465 bp, Homo sapiens
gctgaatgattcattcaagatcarattatcatagataaccaatccaagactcccaaccatgtgtaggctccccagggcaccttgaacacagtaaaaatcttgagttttctgggtcctcaataaatgcctgttgacttgagacttaattttgaatttgaaaccccatctctactaaaaaatataaaaattagccgggcatggtggcaggcacctgtaatcttagctacccaggaggctgaggcaggagaatcacttgaacccaggaggcggagattgcagtgagtcgagattgtgccactgcactccagcctgggtgacagaatgagactccacctcaaaaaaataaaataaaataaaataagtaaatcctttaatcatagaatcatatcactttaaagctaaaagaaatttgaaagaataaatcattgaatcaccccctctggtccccataattgtaaggaaggc

SEQ ID NO: 315118 - DNA, 570 bp, Homo sapiens
agacatgtagtggtgccttgttaaggttttaatttacatttcttaacaaccaacaatagtgagtgtactttaatgtgcttatttgccacttgtttgaattcagtttgctgaaattttgtttcagcaaacaaactatttttgcaactatgtccatgggggatgttgatttgcagttttcttttcttattatatcttttgtctggttttgctatcggacttttctgttttctatgtaattgattttagctttgatctttattattttcttgwacttactttgggtttactttgctcttctttcttttatttcttaagatggaagctgaagtcaccactttgagatgtttcttcttttccaaaataagcatttagtactataaagtttgtgtctttattatttgcagtatgtttcttgtaggcaggatgtagttgggtcttgttttatccaatctgacaatgcctctttcaagtgcggtatttattgataagttttttcctctttttctgccttcttttggataaactgaatattttgtattgttctattttatttccattattggcttatta

SEQ ID NO: 315119 - DNA, 529 bp, Homo sapiens
agaagtatattaaagttttgatattacatatgaagcagtataatagtattcaaagatagactgtcattagttaaacatgcatattgtaaaccctagaacaaatatcactctctctctctctctctctcacacacacacacacacacaygcacactattaagctaatggtggggagcaaatagaatattacaaaataaccgagaaaaggtaggaaaaagaggaaaatatgaacatatgaacaaagaacagataaaaacaattttgaagagaaaacatatagaaaaataatagatttagacccaactatatcaataattacattaaatgcaagtggtctaaacagtcccattaaaaggcagagattgtcagtcaaaaaaaaattggaacacaaaagcatgtgctgtctataagaaatcaacactaaatataaagtcaaagataagttaaaatgaaacagatgtaaaaaggtatatatgatgaaaatactaatcaaaagaaacctggagtatctatgttaatatcagaacaa

SEQ ID NO: 315120 - DNA, 529 bp, Homo sapiens
agaagtatattaaagttttgatattacatatgaagcagtataatagtattcaaagatagactgtcattagttaaacatgcatattgtaaaccctagaacaaatatcactctctctctctctctctctcacacacacacacacacacacgcacactattaagctaatggtggggagcaaatagaatattacaaaataacmgagaaaaggtaggaaaaagaggaaaatatgaacatatgaacaaagaacagataaaaacaattttgaagagaaaacatatagaaaaataatagatttagacccaactatatcaataattacattaaatgcaagtggtctaaacagtcccattaaaaggcagagattgtcagtcaaaaaaaaattggaacacaaaagcatgtgctgtctataagaaatcaacactaaatataaagtcaaagataagttaaaatgaaacagatgtaaaaaggtatatatgatgaaaatactaatcaaaagaaacctggagtatctatgttaatatcagaacaa

SEQ ID NO: 315121 - DNA, 521 bp, Homo sapiens
catgtttatggattggaaaactcaatactgttaaaatgttatttctcccccaacttgatctgtagattcaatgggacacatatggaaatatcaacagacttttttatagaacttgagaagttgatttaaaaatgtatatggaatttcaaggaacttagacaaaacaattttaaaaagaataagattggaaaacttacactacttgattttgagagttactataaagctacagtaatcaagagagtacagtatcaagagaggatacacatgtagaccaatggaattgaagtgarggtccagaaatagattaaggcatatatggtcaattgtcacttttgacaaaagtgccaagggaatctaatagggaaaagattgttgtttcaataaatgctgctgaaacagctagctatccatatagaaaagaatgaatttcaacccttttttcacatcatacaaaaaaacactaatttgatacagaccatagacttaaatgtaaaagctaaaactataaaagttctaga

SEQ ID NO: 315122 - DNA, 507 bp, Homo sapiens
aatttagttttattattgagccctaaatctctctaggcagtaagagaaggggcgtttaaacatgctgtttaaagttgcttaagaccctgctgacttaaaacagtttttcagccatgctcagttgctcacacttgtaataccagcattttgggaggctgaggtaggaggatcacttgagctcaggcgttcaagaccagcctgggcaacatagcaagaccccatctctaaaaagcaaaatttttttaattagccaggcatgatggtacatacctacagtcccagctgttcaggaggctgagrtgggaggatcacctgagcccaggaatccacggctgcagttaggcatgatcgtatcactgcactccagcctgggagacagaacaataacctgtctcaaaaaaaattttttttttcttttgggatatctcagctttttaagagaaaaaaaactgaatcaattcaaagttgaatttcctccaaaaaaaaaaaacataaaataatgccaag

SEQ ID NO: 315123 - DNA, 462 bp, Homo sapiens
gcctatttaattcctaaatgttcaaaaggaagagaaatctattggagggcacctggagccatgatcaaggctggcttatgtgcgcatggcagtggggatggtgaccctgcacacaacatctctttggcctttttctcactgcctctggagagggccttggraaaagggcagacaggttggtaccccttaaaggagagtcttttcaaacaaaatcaagaaatctcaaagcaggggtgtttttttttcagctgcctggctaaaagttcatatgtgggggaaccaaggaaaccaactttgaaaggctgtgtgtggacgaaataatagaatctgaaactgtattcctgtattttaaaaataacaaaacttggcaggtaatggaagcacaccgtgatttaattgcttttggcattaattaaaaaggatagaacaggctttcagggagggatttttatgactgtagga

SEQ ID NO: 315124 - DNA, 462 bp, Homo sapiens
gcctatttaattcctaaatgttcaaaaggaagagaaatctattggagggcacctggagccatgatcaaggctggcttatgtgcgcatggcagtggggatggtgaccctgcacacaacatctctttggcctttttctcactgcctctggagagggccttggawaaagggcagacaggttggtaccccttaaaggagagtcttttcaaacaaaatcaagaaatctcaaagcaggggtgtttttttttcagctgcctggctaaaagttcatatgtgggggaaccaaggaaaccaactttgaaaggctgtgtgtggacgaaataatagaatctgaaactgtattcctgtattttaaaaataacaaaacttggcaggtaatggaagcacaccgtgatttaattgcttttggcattaattaaaaaggatagaacaggctttcagggagggatttttatgactgtagga

SEQ ID NO: 315125 - DNA, 433 bp, Homo sapiens
tctagtttaatttttatcaagagaccttcctgaagccaagggccctggaaatggctgagtttccctgtggcttggagcagagggaraaagtggaaatgatacctgtgttaagtaacatcaagcacccaggtccactggcatgtctgttaataaaaaaattttttaatgttttcattcatgtatcgtttcaactgaatcacatgtaccctaaaacttaaagtataataaaaataaataaataaaataaaataacaaaaaaatgttttcacaaagacagttttcaaagtaacaaaggacattgagaaaaaaaatcctttggttgttccaagtgtacagaacatcagataaaaataacatcaattttccacagagaaaccaaatatgtcgtttaaatgcttccagaattaaacatttgatgtgtatgttgggtgag

SEQ ID NO: 315126 - DNA, 534 bp, Homo sapiens
atgaacaaaagtttccctttcagtagtatttcagctaacaaacaaaaacagacatgagaaaactaggttatgctcattttgcattttctaaggaattaaatataaagaatgaccattaagggctactcacatcacaagacaactagacgtcacatcccctctgatggaaggacatggttctacctataatgtagtctggcctcccctacattgaacctaaatctggtcaaacctccagatctaacttctaatttacagaggagacagaggaacatgtcaggcactatcacaaggatgcaatcaacaaaacagttgttagaaacaaatagacaaatgactgagtttctttaagaataaaaaaccrccaaagacaaaaaggaatagaatgggaacctataggctaaaagagatttaagaaatatgttaaccagttgtaatgtattgggcctcctttggttcctgatgcaaagttttcaaaaggaagagtttttatcttttagaaatacatactgaaatatttatagattaaactat

SEQ ID NO: 315127 - DNA, 464 bp, Homo sapiens
ttttatcaaatgccatatatagaaaatgcactattcctcacagacacatgcatactcaaggccacagattgagcactccagtgctggttagagagataggaataaggacctgaataatgaagaaaaaataaaayaataatacaagaaaatgactgcaaagaatgatgataattatactccaggaacagaggaggatgattaacgctactctctaaacccaaaggcccccccaaattaaagaaataaaatacatgactgaaattaaaaatcatgactatgcattcagaaagcaatttgataattgggaggttaatgcaggaggatcccttgagccctggagttggaggttacagttggctatgatcgcactattgcactccagccctgattacaaagggagacctccatctcttttttttcttaaaggtaacttggggagttatatgtaacctactcattaacag

SEQ ID NO: 315128 - DNA, 578 bp, Homo sapiens
tctctacattcatctcctactcaacttcattttggtgtcttcaccccatcgaggcaaatctgtatgacaaataaaattgtgcaaccatagactgcacaaaaagcacgatatttttgttgtctataacagaacttagytcatgagccctcatttcctcctctgtagcagaaatcataatctttccaattcaaggttactcagtctcttttgaacttattgataaatacagttaatgtgacatgtacactctccatctcttttccttcccttcctgctgaggatgctctaaattcctacgttagggaaaggtgggtgttgtcctggcttctaagagagacatctgattgttgacttgtcctctgtcctggctaactccacagagggacatctcatcttctctggtcctcaccattcatcatcctgccatagcttctcaccaggaggcatgcatattctgcagcctccttgtagagaccaacttgaggctcttagggcctcccagcttgttaccagccccttctgcagccattgcaggtgccgtgggaattatttgcatgctctctgcctccacgctggag

SEQ ID NO: 315129 - DNA, 549 bp, Homo sapiens
atggtgccctatggtatggagcatgagtgaagaatgctaagctggagcagaatcacagatggtagggccaaaggaaaatttcaagacaatccaattcatgccttcattttaaagacaagaaatctttgactctgagaaacaactttctcaaggtcacagctagtgaggaacagcactaggcagttttttttacctctctcatctggaaagcagaagaaaaattawgcaagtctgttctgcactcctgagagagatagaacttgaagcaacatgacatttctgcacagttatcttagccttggccataaaaaatctccaagtttcccagagaagagcaactataatgattaggtaatacaagaaccaactgaagatgatcaaataacccatccagctaggttagttccatcagtaattatttaaaagtctgtgacaaagcaatgatttcatgtttaacaattaagtgttagtggtgcaaaagaacttgagtggcataagggaagataataggcagcagggatgaacatgaaattaagaaagaaaaaatta

SEQ ID NO: 315130 - DNA, 605 bp, Homo sapiens
tctccctctgtttcagtgcaaccgtttcttgtctgctgtgcactcatggtgccctatggtatggagcatgagtgaagaatgctaagctggagcagaatcacagatggtagggccaaaggaaaatttcaagacaatccaattcatgccttcattttaaagacaagaaatctttgactctgagaaacaactttctcaaggtcacagctagtgaggaacagcactaggcagttttttttacctctctcatctggaaagcagaagaaaaattaagcaagtctgttctgcactcctgagagagatagaacttgaagcaacatgacatttctgcacagttatcttagccttggccataaaaaatctccaagtttcccagagaagagcaactataatgattaggtaatacaagaaccaactgaagatgatcaaataacccatccagctaggttagttccatcagtaattatttaaaagtctgtgacaaagcaatgatttcatgtttaacaattaagtgttagtggtgcaaaagaacttgagtggcataagggaagayaataggcagcagggatgaacatgaaattaagaaagaaaaaattaaggttgagtat

SEQ ID NO: 315131 - DNA, 595 bp, Homo sapiens
cctgccccctctaaaaacatacacatttaaataaaattaaaatatccgataattcaacaaagcactcatatataagaacaaattctgccatgcacccttttggcaatagtggttccacagattcctgtattctaacaacccgagtgatgtctgatgctggcagcaggtggcagcatgtggactgaggtctccacttagtctcactagatctgcaggaggctggccgcctttcaaaaggcccgctaaaaaaaaaaaaaaaaaaaaaaaaaaaaattggcccaatggcccttaaattcacccataaagcttcaaggttgagacaggtgttgccttacagaatatgttgctgatgctgaatgcggtgtgaatgccrgtgagactgttgtttgaatgtgatcacccctactaagtcagcatagctgcagggcacatgagacagaagtgggtgggacttgcaggactggttcctcctaccttgtcactcaccacagtccactgaccttcacataaagcaccagcagtcacccaggctctcaggaccccagcttcctcacctgtaaatgaagcagctagaccagatgaataataataatga

SEQ ID NO: 315132 - DNA, 514 bp, Homo sapiens
aggccactgtcattatggtcacaaatttattacaggaattatattttaagcatgagccattttaattgcatttgctcttggattgagcagagagtttagtaggtagcttgtcatggaaaagatcacacttgttatttcccagtctctatctttcccataaccgaagtctccaacccggtggcagtgagccaccctgaataccttctgcatagctctttcctctcttcttcctatctaccaaactactgattgtgccatctttttatgtatgtcaaatttagaatactttttgatgtctcatattctggagcagtttttccagggttactgtaagaaggagctaatacgtttctcctattcagtaagtaaatcagaataatagcatgattacattccttttcattcatracaagtgtatcttcatcctaaacttaaacttctctctgacatacatgctcattgagtccttgtcatgtgccacttactgtgttaagcccttcatatatgtttagtc

SEQ ID NO: 315133 - DNA, 531 bp, Homo sapiens
acacctttaataaaaaaactccttacttgtgtctatttacaaaaaagaggtatttgttaactcacaatttgaatggttaaattcgtatatattatatgctttgattctaagttattgataaaactaagtcaggagcataagtctaaatggggtgatatcaagtatccctaatgcagagaaaaacaatgagtgcctttatattaatggcaaaaaaattgtgaggaatacagatgaaacatctgtcctakaatttaccatcagcaggagaacctaatgtcagcattaatacctgactgatatcaaatagtgagtacaacagaaagggaaagccactgcacagactgtggcttctgtatccatttgaccattgttaagactaaatacccagtaaccaactctcaatccctcctcttgtacctcaggccttaaacatgcagcacagaaattctagtgcaacccatgattaggagctccctgttttctgaaaatgtccaaaaatttaaaggaaagcaacttaacttttgggagtag

SEQ ID NO: 315134 - DNA, 574 bp, Homo sapiens
agctcccactttaaaaatatatattttttccacattaatgataggaaatacagttaaccaatttactaaaccatcactgtggcacaaaattttatttggagccatttcccattaactactgtgaagatttctttaagaaaggtcctaccatttttaagtaaaaattgttatcttttgaggtaaacagtgattccaagtattttcataaacattgtgggaaaagattttcctccatagtctgctaattgatcagttcctggaaagtctcttagtggccacaagaatttgttttgtgctctgtactaccttataacttagaagagagaaacagggggtggagacacaaaagagagagtaatgtgcataraagaaccaagaaataaagaatagtgcgagataaaaatgctaattttgaggctgagtgctaatattgtgtccaagactctaagtcaacaaatgttcagtgaaggcttgtaccctacctcctaagaacacagccaaacaaagatatgttgaacagtaagcatgactcatatggatttctcttttgcaagaaatacttcttttcatctaa

SEQ ID NO: 315135 - DNA, 586 bp, Homo sapiens
gcacaagtgataatcttaaatgcagtagaaaggcccagctaggtcagggctgggaaatgccactagatatagaaagcaggatgcattgaggaccttagttaaagctatttcagtaaagttatgagaaagagagtcagaccacaatgagttatgaagtaaatgagaggttatgaagtaaatgagaggtaagaggtaaggaatggagacatttcattgagtagctgttaaatgtagaaacagggttaaaggtggatyggattgctttgctttttaaattaattgaaatttcactacctacagataaccaacactgacattttggtgatgatcttttcatatattcttctgtgtgtatgtgtacacacacaaagcagacagaaaatatttactgtcaacaagattattatgtactaagaaggcaaattaaatatttaccccaagccaccctttaagttatcagaattgtaaacatacacctaaaaggaagtgtagtttctcttctaaatcaaaacccaatgcttctatgtgacgcacactaatctgcttcttactactgagaaacaacacagcacagtcagcctaggaa

SEQ ID NO: 315136 - DNA, 586 bp, Homo sapiens
gcacaagtgataatcttaaatgcagtagaaaggcccagctaggtcagggctgggaaatgccactagatatagaaagcaggatgcattgaggaccttagttaaagctatttcagtaaagttatgagaaagagagtcagaccacaatgagttatgaagtaaatgagaggttatgaagtaaatgagaggtaagaggtaaggaatggagacatttcattgagtagctgttaaatgtagaaacagggttaaaggtggatcggattgctttgctttttaaattaattgaaatttcactacctacagataaccaacactgrcattttggtgatgatcttttcatatattcttctgtgtgtatgtgtacacacacaaagcagacagaaaatatttactgtcaacaagattattatgtactaagaaggcaaattaaatatttaccccaagccaccctttaagttatcagaattgtaaacatacacctaaaaggaagtgtagtttctcttctaaatcaaaacccaatgcttctatgtgacgcacactaatctgcttcttactactgagaaacaacacagcacagtcagcctaggaa

SEQ ID NO: 315137 - DNA, 620 bp, Homo sapiens
tttcataaactgagacatgacttggttgagttctcggatgtgaaatgtttcagcttccaccaaagaccatgaacccagcattcacacaacatatctcctatcagatatttcacacatggtcttcaaaggcatgaggaacattcaagtagatattagaaaagtgacactctgctaaaggcaaaatgaggtcacacagtcataaattccttttctgggcagctagccagctttctacattgygttcagtcattacatctcactccacttcttgccctggacaataattagagtgcttcctttaatttgcaggttggttttctagatatacgtttatatgttcttggatgaacaactgaactccccaccttctctgcaagttttgctctccttgtcagcatgtgcccctatgagaatgttctacctgtagcttaagctgcactgatagtaatcaagtgtgctagaccttatgctagaccctttcttagcaaaacaatatagctccaacaaaagcaattaaaatttgcattagttttacacaggtacctctggagaagtatgtataacacgataacaaaggaagacagaaaagtagaggatgaaaggtaaaatgaaaatgcctg

SEQ ID NO: 315138 - DNA, 581 bp, Homo sapiens
tcaattgatcggaaaaatgtaaataagagaaaatatttccattatatacagatagcatctagaaattgacaagaacaagcaagccaacaacagaaaaaccaacagaaagtatgattttaatccacagaagagcaagtccgagtggtgaacatatatataaaaagagagccctcagaatcactgatagggaaatgcaaattaacgcagcaataagagctttatatygattacgctggtgaatattttttaaaacataataactatggttgacacagatttggagaaatggtattctcacacatccatgatagaaatgagaattgctatggactttttggatagcattctggcagcatctattaaatcaactccacttctgtgaactgagtttgactgggatgcaacgcaatcacttttcccctacattttttccctaagattatttagttttggtaattgcataggaaatgaaaagaatcaggaaaacaatgttatcaaaaatgttttggagaagtgaaacatattagaaatcacagaattctacagaaacaatgaacaaattaatgatatgtacaggaaag

SEQ ID NO: 315139 - DNA, 581 bp, Homo sapiens
tcaattgatcggaaaaatgtaaataagagaaaatatttccattatatacagatagcatctagaaattgacaagaacaagcaagccaacaacagaaaaaccaacagaaagtatgattttaatccacagaagagcaagtccgagtggtgaacatatatataaaaagagagccctcagaatcactgatagggaaatgcaaattaacgcagcaataagagctttatatcgattacgctggtgaatattttttaaaacataataactatggttgacacagatttggagaaatggtattctcacacatccatgatagaaatgagaattgctatggactttttggatagcattctggcagcatctattaaatcaactccacttctgtgaactgagtttgactgggatgcaacrcaatcacttttcccctacattttttccctaagattatttagttttggtaattgcataggaaatgaaaagaatcaggaaaacaatgttatcaaaaatgttttggagaagtgaaacatattagaaatcacagaattctacagaaacaatgaacaaattaatgatatgtacaggaaag

SEQ ID NO: 315140 - DNA, 581 bp, Homo sapiens
ttattttttattatacttttaagttctagggtacacgtgcacaacgtgcaggtttgtyacatatgtatacatgtgccctgttggtgatatgtactttattacccatcaacccctggatctatgtccagagagaattaaactggacttttaatttctcttcttagtcattacagtgaagtcaatatttacacagatattcaatagaaaaaatgaaatgacattcaaactatcacatgtgcttctccccatgtctggaagtgatctgtgaatttctattatttattcactagtgtctgtacatagattctaaacttcaacagactctgaagttgtgtcgtctatctcttatctaattaccccaaatgtggcacttcagtttatgtattacatgtaaaaataattaaatatttttacaaacgtgtccatttacttattaatatttaaagccaaaaagtgacaaattgttcatcagcttcgtttcatgcaatgcacaggaatttatcaacaatgaagtcatctttggggaactctccatgaatggaacacaaatataattatatttgtgaacacacaacatggtt

SEQ ID NO: 315141 - DNA, 480 bp, Homo sapiens
cacagttgagttcttctgcgttgcttttccacgcagctgcagatgtccatgtatttccacacaatatggtcctctgtgccatcaagagcattgttgatacagcatttcttaggaatgccactgttgtctacagaattttcttccaagctactgacactcattctgtaagttctatgggtatgcacaggcaatgrggatacatcacaaccgccatctgctcagcaatgattgtaggatacattccaattttggagattcattgtagaatcaaaacttagtattgtactcttaaaggaaggaacaaaatcaaaggctgagatttcttaacttcatcacctttaatgaggctcaccattacattttctgaatgtgcttgtgttaattattagtaatggtaacagagtacagacagtatactaattacaatattaagcagggctggctggttaattctctcttgagaatttgaactaggacata

SEQ ID NO: 315142 - DNA, 616 bp, Homo sapiens
ggaggggtgagtaaaattcacagtctacctgatctactataaagttaatttgaagcttctttggtgtggcactaaaagattctcttaaagctatcttgttgtttcacttttagcaactgccaccacaacactgataaatacaactatttatagagtcctcaggtgctaaattggcagagtgatatgtacttttttaattattattttttattatacttttaagttctagggtacacgtgcacaacgtgcaggtttgttacatatgtatacatgtgccctgttggtgatatgtactttattacccatcaacccctggatctatgtccagagagaattaaactggacttttaatttctcttcttagtcattacagtgaagtcaatatttacacagatattcaatagaaaaaatgaaatgacattcaaactatcacatgtgcttctccccatgtctggaagtgayctgtgaatttctattatttattcactagtgtctgtacatagattctaaacttcaacagactctgaagttgtgtcgtctatctcttatctaattaccccaaatgtggcacttcagtttatgtattacatgtaaaaataattaaatatttttacaa

SEQ ID NO: 315143 - DNA, 581 bp, Homo sapiens
ttattttttattatacttttaagttctagggtacacgtgcacaacgtgcaggtttgttacatatgtatacatgtgccctgttggtgatatgtactttattacccatcaacccctggatctatgtccagagagaattaaactggacttttaatttctcttcttagtcattacagtgaagtcaatatttacacagatattcaatagaaaaaatgaaatgacattcaaactatcacatgtgcttctccccatgtctggaagtgatctgtgaatttctattatttattcactagtgtctgtacatagattctaaacttcaacagactcygaagttgtgtcgtctatctcttatctaattaccccaaatgtggcacttcagtttatgtattacatgtaaaaataattaaatatttttacaaacgtgtccatttacttattaatatttaaagccaaaaagtgacaaattgttcatcagcttcgtttcatgcaatgcacaggaatttatcaacaatgaagtcatctttggggaactctccatgaatggaacacaaatataattatatttgtgaacacacaacatggtt

SEQ ID NO: 315144 - DNA, 556 bp, Homo sapiens
tgccagtcccaggtgaattttcaccagcttattgtgaaataagaagtataaggaccacatagtattttttgtaacattaaattcattcagtttaaagaattgtcttttgcattgaattaagaccttcttttgtttttttggtgctaaaatatccttttatagaatgatgttgataaggatgtttttaccatctttgtatgttttttaatttggaatcctatattgtcctcaatattttttaaaatctcctggtttatgaaatcctaaatactgagtgtctctgatctaatcatccttggaaactgttttttaaattatttggaatacaggttcatagagggtccaaagcccttggaactagacaactctcagaattcagaatttttcaggtttaggaagatgctttctctgttacgaatgcctcartgtgtctgatgcagcatccttagtcacccgatacattaatatttctgagcaaaacaggagtattcacactaagtgggtagataaaggctgtatatagcttcatatcagttcaggccaaattttactgtcc

SEQ ID NO: 315145 - DNA, 503 bp, Homo sapiens
aacaggaaaacaaatgcctagtttcccttctagcccaaagatgtcactgcctctttgttcaaagttggacataacaattgccactactggcgaccatgtattaagtgcctattatgtgccaggcagtattttaaaaatctgtcgttatagttccaggggacaggtgctgcacctttacaaatagaggttatttgtaaataaagtgcaggccaatggcacaaagtagtgaaggtgggattcactcaggtctgtcacttccaagcccatgttttctactttgcaaccytatttgaaaggaaaactgcaactaagattatgacccatgagacaacttatgtgtgagacaaaaagtttcacacctccccccaccccaaacacacacggtataacacagtgacccaaccttaggcaaaagggtaccactgccagcaaatgcatttaacattttattgagattctcaacagctgccatttggtttgtatagcaaattttttacaaagta

SEQ ID NO: 315146 - DNA, 605 bp, Homo sapiens
tgccagttttggtcagctgttttaacttctccgaagctactgttttgctgtatttccctgcttgatctacactgctcttttcaagcagttttctccgcttctccttctcttttattttcatacgcttttgatatttctttttccttcgctctcgtttcttgtctgtagctgttttttcagcagctgtttttatatctccagctttatttttctcctattaaaaaaataaccaccaacatattcattcatcaagtttaacaactaggaaactggaatggaagaaactgcagggtagccagcaagcaggctgtgcatctgtggccaaatgcacaaagatgcagagcaatccccacctgcattccaatragcgttggtaactcagctctttaaaacctgaaatgcattctttgacaggcacagactcttatagtgacggttcagttcccaaactaattcacaagaaggcaacatggagagttgggttctcaacctaacagcacaagaggagccagccctccacagcatttagattccaatgggcttcagggacatgccagaggcagcctcagctctgagctgctaatgacagcaactggactgaggcc

SEQ ID NO: 315147 - DNA, 562 bp, Homo sapiens
attccatcctttccccaacaatctacaatgcaacttctgtctcattccaagtttccatgtgtcatgggtcttttgctgggttcctgttctcttccagtggtcgatttgtaaatccccttgacaacacatcactgtcctaattcctatgacattatagtatgcacacaaatcttaaacgttccattacccaccgacctctatgttactctcattctttaaaaatattttyacttgtggctgggcatggtggctctcacctgtaatcctagcactttgagaggccaaggtgggcggatcaagaggtcaggagatcgagaccatcctggctaacacggtgaaaccccatctctactaaaaatacaaaaaattagctgggcatggtggcgggcacatgtagtcccagctactcgggaggctgaggcaggagaatggcatgaacctgggaggcggagcttgcagcgagccgagatcgcaccactgcactccagcctgggcgacagagtgagcctccatctcaaaaaaaaaaaaaaaaaaaaaaaaaaaaaaatatatatatatatat

SEQ ID NO: 315148 - DNA, 559 bp, Homo sapiens
gaggcttactgactttgatgctctccaagcttggggcagtgtcaattgcaaaaatattgccagtcgctgtcaatgtttattggaagggaacccagtctgggaccaaagtaagaagctttctaaattcttatctattttggggggaggtgggaatgtttaatgggtacaaagcaaaaataaaaaataatgaataagacctacgatttgatagcacaatagggtgactatagtcaataataacttaattgtatatttttaaataacttgaatgtaattggtttgtaactcaaaggataaatgcttgagggaatggacactgctattctccatgatgtactcatttcacttcttgtatgcctgtatcaaaatatctcatgtaccccataaatatacacagctaycatgtacccacaaacattttaaaaaataaaatataaaaaaaatcatctatttcagtcatcactgatttgccatgtgaacctaaacaatttgcttaaaacaagcaagcaacctagcaaatgaaacatacccagaatacaaatttgttcatttcaatgat

SEQ ID NO: 315149 - DNA, 570 bp, Homo sapiens
cttcaaactaacccaggggcctgggaaagggcaaagcaagctgaaacaatgtcaccagaacttggacctagaaaccagagccaagaaggatgacataacactagagcgttccgcttctgcaaaatgtctatcattctctccactscctgctctcagcagctcacacaaacgccacaaagattgggagaaggcagtacagcactagtattcatttgtatcaagaaagagcaattcacttcattactccgagcgtccgttgtagcctgctccatccagaggaccggaggcagactcaagcaagaaggatgaaaagaaagagctgatgctgctatgaagtgaccccctagatggggacgtgagcagtgtcccttgtgactcttggaacatccaaatcgctgcaataaacagccgggccagcaggacagcctctcccacgctggggacagcccggagcccgcagcctagtggctgactttccttccgctaagtggatgggcgccggggggcgttatttacaccattccaaaatctggaacctgggggtgtagttgtgggtgaaagaacgcctaa

SEQ ID NO: 315150 - DNA, 537 bp, Homo sapiens
aaattttggttttgttggtcttttgtatggtttttcacatctcaattttattcagttcatttctgattttagttatttcttctcttctgaaagctttgggtttggtttgctcttgtttttctagttcctcaaggtgtgatattaggctgttaatttgagatcttaccaamgtttttatgtggacatttacagctataaactttcctcttaatattgctgtagctgtgtcccagagattttggtatgttttagtattattctcattagtttcaaataatttcttgatttctgccttaatttcattttcattcaggggaaggttgcttcattcgtatgtaattgtatggttttgagagatgttcttggtattgatttctattttttattgcactgtggtcagagagtgtggttagtgtgattcctttttttttttcaaatttgctgagtatgtttttatggctgattggttgattttagagtatgttgcaagtacacatgagacaaatgaatattctgtttttttaggaaggagatttc

SEQ ID NO: 315151 - DNA, 520 bp, Homo sapiens
tagttgtttaaaaaatgattatcatattttgatggtaatagcattaaatttgtagattgtttttggcagtatggttattttcacaatattgaygctagccatccgtgagcatgagatgtgtttccatttgtttgtgtcatctatgatttctttcagcagtgtttagcagttttccttgtagaggtctgtcatgtccttggttaggtatgtttctaagtattttatttatttatttgtttgtttgttcatttatttgtttgtttgtttgtttatttatttattttgcaactattagggttgagaactcaaagaaacttagtttttgatttgattgtcaacttggtcactgtttatatataacagtgctactgatgtgtgtacattgatttcatattttgaaactttattgaattcatttatcacattactgaattcatttattaaatctggaagctttttggatacattattagggttttgtaggtatacaattatatcatcagtgaacagtgacagtttg

SEQ ID NO: 315152 - DNA, 547 bp, Homo sapiens
ggtctttcttggagtatgttccatgtgctgatgaatagaatatatattttgcagttgttgggtagaatgctctctaaatgtctgttagtcatttgttgtaaggtatagtttaagcccattgtttctttgttgactttctgtcttgatgacatgtctagtgctgccagtcgagtatggaaattccacactattattgtgttttcgtctctctaattttttaggtctagtagtaattgttttataaattagggaactccagtgtttggtacatatatatttaggattgtgatattttcctgttggactagtcattttatcattatataatgcccctctttgtcttttttaactgttgttcctttaaagtctgtttggtctgatataagaatagctattcctgttcacttttggtgtccgtttgcatggtgtatctttttccacccctttaccttaagctatgtgagtgcttatgtgttaggtgcatctcttgaagatagaagaaacwtgatggctgaattctcatccattcttccattctgtatttttt

SEQ ID NO: 315153 - DNA, 562 bp, Homo sapiens
ctttgttcattatttttaaattctttttttctttttctttgttgaattgggctaattcaaaagccttctcttcaactgctgaagttctttcttctacttgtttataactttcttctgcttgtttgattctattgtaactttccagtgtattttgcatttctctaagtgtgtcttttatttctaaaagttgtgattgtattttatttatgctatctatttctctagagatttttttctgtttatatcctgtatttwtttttttaattttataaagttggttttcacttttctctggtgcctccttgagtagcttaataatcaaccatctgaattctttttctggcaattcagagatttcttcttgcttggatccattgctggtgagcttgtgtggtcttttggggttgttaaaaaactttgctttgtcatattaccagaattgtttttctggtttcttctcatttggatagaccatgtcagagaaaagatctggagctcaagggctgatgtcatatttatttgtcccacagggtgatcccttgttgtggtgctcttccccttc

SEQ ID NO: 315154 - DNA, 555 bp, Homo sapiens
gaggatgtgtgtttggagacagaccttgcccctctcacattttggccactcacagatttttggctgtctcacggagtttccagcagcaagacacttctttcaaagggtctgtgaattcttttggttttcctggtatgtttctatggtacttcttggagcaaaagttcatgatgcgagtytccacatgctattctgctcatctgagtggaagctacaagtcagtccttcctgctgtccactattattttcccttcccagttcctgtattgtattactgtaatccttagatttctttggttgggttttgactttcccctgaatgtcagtgattttctatccatattctgaattctatgtctgtcatttcagtgatttcagctgggttaagaaccattgcttaggagctagtgttgtcattggaggaaaaaagacactgcctttttgagttgccagattcttgcactggttctttctcatccgtgtgggatgatattcttttaactgaggtatattttgagttcagtcagttgacttcttcagagggctgatgttttg

SEQ ID NO: 315155 - DNA, 555 bp, Homo sapiens
gaggatgtgtgtttggagacagaccttgcccctctcacattttggccactcacagatttttggctgtctcacggagtttccagcagcaagacacttctttcaaagggtctgtgaattcttttggttttcctggtatgtttctatggtacttcttggagcaaaagttcatgatgcgagtctccacatgctattctgctcatctgagtggaagctacaagtcagtccttcctgctgtccactattattttcccttcccagytcctgtattgtattactgtaatccttagatttctttggttgggttttgactttcccctgaatgtcagtgattttctatccatattctgaattctatgtctgtcatttcagtgatttcagctgggttaagaaccattgcttaggagctagtgttgtcattggaggaaaaaagacactgcctttttgagttgccagattcttgcactggttctttctcatccgtgtgggatgatattcttttaactgaggtatattttgagttcagtcagttgacttcttcagagggctgatgttttg

SEQ ID NO: 315156 - DNA, 548 bp, Homo sapiens
caagtcacatcttacatgtatggcagcaggcagagagagagagcttgtgtaggagaactcctctttttaaaatgatcagatctcatgagacttactcactatcacgagaaaagcgtggaaaaaacctgccctcatgattcaattacctcctactgggtacctcccacaacacgtgggaattcagaatgagatggaggacaccagcaaaccataaaatcctctcatggcacttccgaaatctcatgtcctcacatttcaaaaccacggttttgaaacaacaagacggttgccctcccaaccgtcccccataatctcaactcatttcagcattaactcaaagtccacagtccaaagtctcatctgagacaaggcaagtccctttcatttaggagcctgtaaaatcaaaagcatgtyagttaattcctagatataatggtgggtacaagcattgggtaaatacagctattcgaagtgagagaaattggccagagcaagggactacagtccctgtgctagtccaaaacccagcagggcaatcaaatcttaaa

SEQ ID NO: 315157 - DNA, 547 bp, Homo sapiens
agttctcacattttctctagggctaaaatctcttttgggagtgagttcagcctaggagggtgactgttcctggctgtgctctgctacagatgctctggcaccaaatcctctgggcgccacatcagctggcttgctcccctgtaacttctctaagcagctctcccagccaactccagtgtccatgatggctgatrggtttcagaggcctgtggtgagagtgggttgttgcttgccagttcaacttacctattcccctggagccattgtgggccagaaatgagtcctagttcatggtaaccctgtgcagggttcccagctttctcccctttcaacctagtttctgtgtctttcctccgtccactctcaatgccttccctctgaagataggttaggagcatgccagttgtcttgctccctcagtgggagctgttccacctggctgcacctagtcagccatctttcccgctgacagtatgttttatttggatagtctatttcctgatagatagatattgctggaacatgtgaagcagcaccagataattgt

SEQ ID NO: 315158 - DNA, 314 bp, Homo sapiens
acaaccaaaatcagagctgaactcaaggaaatcaagacacaaaaaaattcaaaagattcaggagtgaattttttgaataaatgaataaaatatatagactgctaactagataaattaagaataaaaaagagagaattccaataaacaaaatcagaaatgacaaggaagattttaccactgacctcacagcaatacraagaaccatcagagaatatcatgaaaacctctatgcacataaactagaaaatctagaagaaataggtaagttctggacacatacaccctccaaaagctaaagcagaaaaaaatagaat

SEQ ID NO: 315159 - DNA, 300 bp, Homo sapiens
agcagcctttgacactcactagakgcatatgaccaatcctgacctttttcagacatcagaattgtaagacaaataaacctttttattgttataaattacccgcctttgatactcctttatagtaacacaaacagaccaagacacatattaaaccctttccagtgagcagtaacacatgatcatccagaattcatcccaagccttttacctgacagatgactaccatcattcatgataggatcttttaatatcagcaaaaatatacatcgtttattgtatttaacaggtatgtagtatttc

SEQ ID NO: 315160 - DNA, 574 bp, Homo sapiens
cctacaagtagtaagtagctaatattatactttttaaaaaagtccacagtgsttataatggcctaaaaatgactatgtaaatctggccccttcctatccctccatcctgttctctatgctcttttgcttgctatattccagatatagtcatcttttttgttatttatctacccatttagtcatttattatagacatttactatctaccatttgccaagtattagtaaaacagcagtgaataaagcttgtaaaattgtgccctcatggagctaacactttattataggaaggcggacaataaacaaatatataatatgtcagatggtgctaaatgctaaaaggaaaacaatggtattttatataggaaggccaggaaatacatctccgagcaggtgagaagtgtgtagagacatgaatgcagttagaaggaaagtcgtctggtgggaaatggcagtaaaatgtaaaagcgctaaggtagcaacatgcttgatgtatttcaggaatagaaatgaggtgagagaagtagtgaagatgagggccaggtcacagagggatttgaaaaagagaggaatta

SEQ ID NO: 315161 - DNA, 559 bp, Homo sapiens
cagactgtggagcaaccactggctagaaaaattagcacaatgagagtcctagtgctaacatccaagataatgggaaaaaaggcctaaaaggcatttcygagattttcaaggcagcctctcccatcacagacccagaggctaagaggaaagaatggtttcaagggccaggcctgggttcccactgccttatgcagcctcaagacactacttcccatatcctggttgctctggctctagcctcagctcaaagtgctccagatacaactcaggctgccatcccagaggttacaagccataagctttggtggcttctatgtggtgttaagcctacatggacacaaaatgcaagagtaaaggaggcttggaaacctccacctagatttcagaggatgtatagaagtttgggtgcccaggcagaagccggctgcaggagtaaaaaccctacagggagcctgtcctagggcaggggcaaggaaaatatggggttgaattccccacacagagtccacagtgggcactgcttagtggagctgtggaaatggggccaccaccttccagt

SEQ ID NO: 315162 - DNA, 559 bp, Homo sapiens
cagactgtggagcaaccactggctagaaaaattagcacaatgagagtcctagtgctaacatccaagataatgggaaaaaaggcctaaaaggcatttctgagattttcaaggcagcctctcccatcacagacccagaggctaagaggaaagaatggtttcaagggccaggcctgggttcccactgccttatgcagcctcaagacactacttcccatatcctggttgctctggctctagcctcagctcaaagtgctccrgatacaactcaggctgccatcccagaggttacaagccataagctttggtggcttctatgtggtgttaagcctacatggacacaaaatgcaagagtaaaggaggcttggaaacctccacctagatttcagaggatgtatagaagtttgggtgcccaggcagaagccggctgcaggagtaaaaaccctacagggagcctgtcctagggcaggggcaaggaaaatatggggttgaattccccacacagagtccacagtgggcactgcttagtggagctgtggaaatggggccaccaccttccagt

SEQ ID NO: 315163 - DNA, 549 bp, Homo sapiens
gagacaatttaggagaactcagtgaaatacaggggtagaagaatcagtgagaagagacatgtgggctctctcagtccccagggatgcyatttctgactttgtcttgcagaagtcctataggagggctgccggaggaactggaaaaagaccacacagaaagaaaacttccaattgaactttgtaacaattttgaccaaacatagtatcctggacaaaactcagtctggtatgcagacatagcacagaagccaagccctgcttgctttcacagcttggaggctggtagcctggggcaagttttcagttctgctcacccactgcctggaaacaaacttagagctgttggagcaggcaaaataggagtgagaccagtctttttgtctgcgtgacagctgggtgagggctgtaactgctaactttcccctattttcctggtgacctgcatgacacaatgaggcagctatagtccccctgggtacataaatccattggcctgagaaccacaccctcatcccccaaagcagctgcaacaagcactgcccaaagaga

SEQ ID NO: 315164 - DNA, 686 bp, Homo sapiens
caattttaatacagggatgtctgtctttttcaagtccatgacaagctagatcacatgctcattttgagtgggagtcaggttttaaactttctttgtcctcatatcctctaagtgagtacagcgggataagaactgaataataccaataatgacaagtacttgctatgggtcaagcactgttctaagcactttataagtacaaacaaattttagaccctccatagtcctgtgaggtactaatgttatcatctccaccttaaaataaataaactgaaaaagagctgttaacttgcccaagcttacacagcactagaattcacactctctcgtctcctctcctgcttttattctcctctgcttatgtccctgtctccttcttcctctgtttctgctttcttcttcccttttttcttcctttcttgtatctcttctgtctcttttatttattcctccttctcttctctaatctcttatgtttatgttttatggtatagcccattttgtgaaaaggttctactactcaagaataaaaaggtgtataaaccactggatttwctgttctctgtatttctagtccttaaatatttcaatgaatatcatttactgactattatgtagaagaatatattctaaaatgtagcacaacataaaaaatgagaatgagtaggagattccctgagttagag

SEQ ID NO: 315165 - DNA, 686 bp, Homo sapiens
caattttaatacagggatgtctgtctttttcaagtccatgacaagctagatcacatgctcattttgagtgggagtcaggttttaaactttctttgtcctcatatcctctaagtgagtacagcgggataagaactgaataataccaataatgacaagtacttgctatgggtcaagcactgttctaagcactttataagtacaaacaaattttagaccctccatagtcctgtgaggtactaatgttatcatctccaccttaaaataaataaactgaaaaagagctgttaacttgcccaagcttacacagcactagaattcacactctctcgtctcctctcctgcttttattctcctctgcttatgtccctgtctccttcttcctctgtttctgctttcttcttcccttttttcttcctttcttgtatctcttctgtctcttttatttattcctccttctcttctctaatctcttatgtttatgttttatggtatagcccattttgtgaaaaggttctactactcaagaataaaaaggtgtataaaccactggattttmtgttctctgtatttctagtccttaaatatttcaatgaatatcatttactgactattatgtagaagaatatattctaaaatgtagcacaacataaaaaatgagaatgagtaggagattccctgagttagag

SEQ ID NO: 315166 - DNA, 537 bp, Homo sapiens
aatataagaatcaaacaatatctaaacaagaaaataagatacattattattccacagaagagagtccagtcttacagagatattccctgcagttgaactcttggtatatgctcatttaaaattgtggatggggtatacttggattagttcctatcaaagcaaattactacctaagtaactcttatttccttacagtatagaagttacaagtacaccctgttctctctacccttctcattcttggccaatcttccaagattcacccagtaaatatttagtaccctstctaggtcaggagtaatactgggattcatcacatttaccaagctttttgaaattatgtgtttactcatttttctctcccagtaagccagttttaatccagggatgtctggatgggtgggtctgtgtgatgacactttgtgagattatatgcaacactttatgtctttgaacatataatatgtcattttctgggcagagattcaatatacttcaccagaatttcaaaaggagccatgtgacataagaagtacc

SEQ ID NO: 315167 - DNA, 571 bp, Homo sapiens
ggaatgcaccaaaggcactggcacaccagcaggccacacaccagcaggccacacactggaaactttttggtttgaagaaatcccacttgtatatttttggctttgttgcctgtgttaaagtgtcatatccatgaaatcactgccaagaccaaagtcatgaacctttcctcttctattttcttcagagcttatgtttagttctttcatctattttaagttaatttttgtatggtttaagacaaggaaccaattttattctattgcatgttgatatctagtttttcyaacatcatttgttgaagagacttttcttcccccatcatgtagtgttggaaaccttgtcaaagattacccgatcatttaagtgggtatttttttctaggctctccattctgcttcactggtctatatgtctgtttttatgccagtattatatccttttattttttttattactgtagctttgtaatagattttgaaatcagaaagcgtgaggcctctagctttgttctcctttctcaaaattgatttggtcattcctggccttttgtgattccatatgaattttaaa

SEQ ID NO: 315168 - DNA, 571 bp, Homo sapiens
ggaatgcaccaaaggcactggcacaccagcaggccacacaccagcaggccacacactggaaactttttggtttgaagaaatcccacttgtatatttttggctttgttgcctgtgttaaagtgtcatatccatgaaatcactgccaagaccaaagtcatgaacctttcctcttctattttcttcagagcttatgtttagttctttcatctattttaagttaatttttgtatggtttaagacaaggaaccaattttattctattgcatgttgatatctagtttttccaacatcatttgttgaagagacttttcttcccccatcatgtagtgttggaaaccttgtcaaagattacccgatcatttaagtgggtatttttttctaggctctccattctgcttcactggtctatatgtctgtttttatgccagtattatatccttttattttttttattactgtagctttgtaatagattttgaaatcagaaagcrtgaggcctctagctttgttctcctttctcaaaattgatttggtcattcctggccttttgtgattccatatgaattttaaa

SEQ ID NO: 315169 - DNA, 592 bp, Homo sapiens
atgtagtaaacatttgtacaaaatagaaccttggtacaaatctatatatttatgggcagaaaaatggagcgttaagatgtgtcggatagaaaaaaaaggtgttgtgaaaatggaaatcaggccgttcgggtggctttcttattttattartggcatggatttttgaaatattattttacaaaaattcaaatgatatatttttagatgttattttatattgtatacttgaaaatttttaagagagtggactttaaaattttattttttatttttaaattttagatttagagggtgcaggtggaagtttgttacattgatatattgtgtgatgctgaggttcaggcttctaatgatcctattgcccaagtagtgaactatccaataggtagatttttaacccttgccctgctccccatccccacttttagaatccccagtgtttattgttaccatctttgtgtccgtgtttacccaatatttagctccagctcccacttataagtgagaacaggcaccatttgtttttctgtttctatgttaatttgcttaaaataatggcctccagctgcatctatgttgcagcaaaagacat

SEQ ID NO: 315170 - DNA, 591 bp, Homo sapiens
attgtgtgatgctgaggttcaggcttctaatgatcctattgcccaagtagtgaactatccaataggtagatttttaacccttgccctgctccccatccccacttttagaatccccagtgtttattgttaccatctttgtgtccgtgtttacccaatatttagctccagctcccacttataagtgagaacaggcaccatttgtttttctgtttctatgttaatttgcttaaaataatggcctccagctgcatctatgttgcagcaaaagacatgattttgttttatggctgcatagtattttatagcatatgtgtatcatgtattctttaccaatccaccattgacatgcaccctggttgattccatatctttgctattgagaatagtgctgcaataaacatacaartgcaagtgtctttttggtagaatcatttattttcctttggatacatactcagtaatgggatttctggatcgaatggtagttctgttttaaattgtttgagaaatcgccaaactgctctccacagtgactgaactaatgtatatttccaccagcagtgtataagcgttctcttttttccccaacct

SEQ ID NO: 315171 - DNA, 591 bp, Homo sapiens
attgtgtgatgctgaggttcaggcttctaatgatcctattgcccaagtagtgaactatccaataggtagatttttaacccttgccctgctccccatccccacttttagaatccccagtgtttattgttaccatctttgtgtccgtgtttacccaatatttagctccagctcccacttataagtgagaacaggcaccatttgtttttctgtttctatgttaatttgcttaaaataatggcctccagctgcatctatgttgcagcaaaagacatgattttgttttatggctgcatagtattttatagcatatgtgtatcatgtattctttaccaatccaccattgacatgcaccctggttgattccatatctttgctattgagaatagtgctgcaataaacatacaagtgcaagtgtctttttggtagaatcatttattttcctttggatacatactcagtaatgggatttctggatcgaatggtagttctgttttaaattgtttgagaaatcgccaaactgctctccacagtgactgaactaatgtrtatttccaccagcagtgtataagcgttctcttttttccccaacct

SEQ ID NO: 315172 - DNA, 633 bp, Homo sapiens
atgggatttctggatcgaatggtagttctgttttaaattgtttgagaaatcgccaaactgctctccacagtgactgaactaatgtatatttccaccagcagtgtataagcgttctcttttttccccaacctcagcagcatattttattttttgactttttagcaatagccattcttacttgttagtatctcactctggttttgatttgcaagaagagtagagtttaaatgttctcaccacaaaaaaagtaagtatgtgaggtaatggatatataattagcttgatttagccatttcacaacatacatgtatcaaagcatcatgtttcatactctaaatttatacaattttatcaggcaaaacattaaattttaaaaattttatgtgttattaattctctggaattacaataaaagttcacaagcaagcctaatttgggtagtcccccaaaacaatttgcaagacaaaaatggtatcaaaaatgacctgcttagtttagtatagcaccatagtggcacatgcaaaatagyacatgtggataccaagaacacactaaaaatatgtatgttggaaaaccacactaaacacacactggtagaaggatattttctcattttaagggagcacacagtga

SEQ ID NO: 315173 - DNA, 604 bp, Homo sapiens
gagaattttccaattctgtatactctgcttcccttttgattaaaaaattcatctttaaattatttttctcttcttaaattttctagtagtaatygagacaagtaaagccacaccctcaacactttacttaggactgtcctcagccgccaaatatctaatttcatcacgcaaaagtttctaccttccacaaaacacctggacggaaacacaattcagtcgtgttctttgcttctttacaacaaagatatacttttctccaattgtcagcaatatgttaatcatttctgtctaaaaactcatcagcatagcctttagtgttcatatatctgttaacactgtttgtgattatttaaatattctctaagaagtttgagatttttgctctagctcttctagtttctttctaggctcttaatagaacatcccttaatgatctattcacagcaatgtcggatttttttagcatgtaccacatactcttctagcttctaccccttatccagtttcacagccatttccacatttttaggtatttgttatactagcaccctactttcaataccaattttctgtttagtccattcaggctgctgtaacatagtac

SEQ ID NO: 315174 - DNA, 611 bp, Homo sapiens
cgtctatttcagaaaaattggatttatcaaatgaatctacaaccaaaaattgttcgagaacaatgttaacatcacacacaggaatcctacattttctaagatttgacattttcagcgattgagaattactacattttataaatggaaatagcactactaaaaacagaatgccataaagagaatgatgcattttgtttctaaagtcaatatactagagtggtgcaaacataataataaaagcgagatattttgtggcaaagttatcttggggtaaacactgcagccgcaagtgtcactggtgcgtattcttggggcaagcaggaaaagggttaaaatggagatgtttttagtgcaaaaggratgaactaactcaactctggaggaaataaaatgaaagtaagacaaaagatgatatacagatggcaaataatcaagataagatgctctacttcatatgccattaaggaaatgaaaattaaagcaaccgtgagctacactacacacctattacaatggtcaaaatccagaaaactgacaacaccaaattctattaaggatatagagcaacagtaactcatattcattgctggggggaatacaaaatggtgccc

SEQ ID NO: 315175 - DNA, 600 bp, Homo sapiens
ctagaatcccctgctttgagttgtgctgcctttctggaccaaatcaatgtatttcttaaatgtatttgattgatgtctcatgcctccttaaaatgtataaaaccaagctgcaccccgaccaccttaggcgcatatgcccaggacctcctgagggctgtgtcgcgggccacagtcactcatgtttggctcagaataaatctcttcaaatattttacagagcttgactctttgtcgacagcccttcagaaatgcaaatataacctttcacctatcccctcacagacattccctacaggttaagttcttctgattgtgtgctccaagacagatctctcttccagagttgacagttgacttgcagaccaaagcatacctgacaaggaactttcacctacagggagttggcccagaacttccattcttcaggagccacctgggaactcacwcctactaggaggatatattgaaagcatgcctacttggccacttttacaacttacttttgcccaggagggtgccaactcaactgtccagtagataactgcctggtagcagggggacctctgcccttgctcattttctccccttaccttattaaag

SEQ ID NO: 315176 - DNA, 529 bp, Homo sapiens
taaaggtaggacacattctgcttctttccctaagctagccttagaataaattcacttttctttttttgtatcagatcactcttgttaattggactctacatgcagtgggcactaacctgctatttagttacaattgcagtaatgttttaaatagctgtgttactgtaggatgcataatactgtgaaagaaaaattaatctcagggccccagaatcactaagccaaagaaaaagtcaagcttggaacyataacatactaacctgcctgccattttatttttaaataagagacctacaaagatttaaaaaaaaaaaaagataaaaagatacataccttccttacaatttgcccaccaggaaattccttgtggacaaaggacagacagaattcaaagtcatccctctgaggttcccgtgagacaaatgcatatctgattacttcctttgcccttttgttctaccaagccagactaaggcataagtgactattttctctattctcctttcacacgcaaattgtgtattcagtg

SEQ ID NO: 315177 - DNA, 574 bp, Homo sapiens
gactattttctctattctcctttcacacgcaaattgtgtattcagtgaaaggctaatcagagactcaaaagaatgcaaccatttgtgtctaatcttcctatgacctggaagcccctccaccacatcgagttattccacctttccaactgaaccaatgtatatcttacagatattgaccgatgtctcatgtctccctaaaatgtataaaaccaacctgtgtctcgaccaccttgggcttcctgaggctgtttcatgggtaaatacttacgtttggcaaaataaactttctaaattggttgagacctgtctcagatattttgggttcacaamgtatattcatatattgcatcaagctttataaataggtattaggctttgtgtcgaggtccattttttgctaccacactcactaattagaatagtgcaagtgggcactaggttattttgacagatggggagaacatagtgacaagaaatttaggagaagatcatgctgagaaatccagctaggttagcagttgaactcagaaaaggtcatcagtaggtagacttgccgatctctccgattttaaat

SEQ ID NO: 315178 - DNA, 564 bp, Homo sapiens
ctttcagaaccctggaatatatgagatgtgtgtaatacctcactatagccaggcacggtgggtcatacctgtaatcccagaactttgggaggccgaggtgggtggatcacttgaggtcaggagtttgaaaccaacctggacaacataataaaacaccatctctactaaatataccaaaattagcctggcgttgtgccacacacttgtagtcccagctactcaggaggctgaggcaggaggattgcttgagcccaggaggcaaaggttttagtgagccaagatcatgccattacactctagcctgggtgatgagagtgaaaccctgtctcaaaaaaaaaaaaaaaaaaamaaaacccaaaaaacaaaaacaaaaactcactgtaagcatttcatgtgttatctgcttttttaaagctttttgattagattattgttttccccaactcttacctactgccttaggcaaccgtgatgtttaacaattgcctctgattgttcctgagaaaaatgtcaaggaaaaagtgcttgtaatgggtgagctctgaatcatgtagaatataagag

SEQ ID NO: 315179 - DNA, 569 bp, Homo sapiens
cttacttttaaaatggaaattttttttgttgagtattatattcagtttcctctttgtgttgtgttagttactgatgtttgtggagatgctggaactgtttttgagctgcacctttctatttgttataaatatattcccatagatttagggagcattaacaaatgattagtgctaaatgtgagccaactctgatatttgccattaattccttaattattactgtgttggaaagtggatcttgtacagatatgcacattagattcttgtacatttttatcaattccaatatgtattgcaaagcttgcaatctcagttatagcatttaatagatttcaaaatcactatatatatgggaaaatagtaaaaacattttaaagaaaagctgtttatgtagaaaactattgtcttttttctagataaatgctaactagataataatgttaggatagacaagtcaactaattaatgtttgacgtgttaaggatagtgttttgtttgggttcctttccccttttttwtaaaaaaaaaaatgtacagcatatccagtaattgtgtttattatacatgtt

SEQ ID NO: 315180 - DNA, 569 bp, Homo sapiens
cttacttttaaaatggaaattttttttgttgagtattatattcagtttcctctttgtgttgtgttagttactgatgtttgtggagatgctggaactgtttttgagctgcacctttctatttgttataaatatattcccatagatttagggagcattaacaaatgattagtgctaaatgtgagccaactctgatatttgccattaattccttaattattactgtgttggaaagtggatcttgtacagatatgcacattagattcttgtacatttttatcaattccaatatgtattgcaaagcttgcaatctcagttatagcatttaatagatttcaaaatcactatatatatgggaaaatagtaaaaacattttaaagaaaagctgtttatgtagaaaactattgtcttttttctagataaatgctaactagataataatgttaggatagacaagtcaactaattaatgtttgacgtgttaaggatagtgttttgtttgggttcctttcccctttttttwaaaaaaaaaaatgtacagcatatccagtaattgtgtttattatacatgtt

SEQ ID NO: 315181 - DNA, 573 bp, Homo sapiens
tattcactatcacaagaacagcatgggtaaaatccacctccatgtttcaattacctcccaccaggtccctctyatgacacatggggattatgggagctataattcaagataagatttggatggggatacagccaaagcatattatccagttataaataaaaagagtggcctttattctagtttctgatattttgctgctcagttctatctaaaacctcactagatgatctttactgtccagatttctatcagcatttttgtcataaacacttaaccaatctctaaggatttccaaacttttcttagtcttcttgttgtctaagcccttacaagaatcttggctttttctagcctgctcctccaaattctttcagcttctgcctaatacccagtcccaaagcagctttcacattttcaggtattcattgttatcattgactatttggtaccaattttctgtcttatttcatttactgctacttttaacagaatacttgaaactgcgtgatttgtaaagaaaagaaatttatctttttatttttacacatatagaggctaataaaagtctaaggt

SEQ ID NO: 315182 - DNA, 542 bp, Homo sapiens
gaggtgccagacttttaaacaaccagatcttatgagaactcacttgctattgagaagacagcaccaagctatgagggacctgcccacatgatccaaacacctcccttgaagccccactccaacactggggattatatttcaacaggtgatatcagtggggacaaatattcaaactattagtgatactgtgaatttctttttttgttgttgtttctctgttttgagatggagtctagctctgttgcccaggctggagtgtagtggcgtgatctcggctcattaaaacctctgtctcctgagttcaagggattatcctgcctcagcctcctgagtagctgggattacagtcgcctaccaccacgcccagctaatttttgcatttttagtasagacagggtttcaccatgttggccaggctggtctcaaactcctgacctcaggcaatccacccacatcggcctcccaaagtgctgggaatacaagcattagccaccacaccaggctgtgaatttctttatatgctttttggccacatatatttg

SEQ ID NO: 315183 - DNA, 579 bp, Homo sapiens
tcctagtaaattagattgcatcagccaaagttcaaacataaacgtcaccttaaaataagagaaggtgccgggtgcagtggctcacgcctgtaatcctagtactttgggaggccagggcaggcagatgacttgaggtcagtggtttgagaccagcctggccaacatggtgaaaccccatctctactaaaaatacaaaaaaattagccaggcctggtggcggacatctgtaatcccagctacttgggaggctgaggcaggagaaccgcttgaccytgggaggcagaggttgcagtgagccgagatcgtgccattgcactccagcctgggtgacagagcaaggctccatctcaaaaaataaaaatgaaaaataataagagaagttttgatatgaaaagcattgcttctcattcccctacccagagagtgaagaacaggtaacatgaatgatttttgaagtttaacttatgatactagtcttgaattaagatttctcaaatgtagttgttttaataccaacagcaacaaaggtcatataaaagcttttacagcatgtgctagcctgttacttcatgtacgcat

SEQ ID NO: 315184 - DNA, 552 bp, Homo sapiens
caaattggtatacaaaaaggctattacctacactcacaaagcagaggaaagtataagtcactaatatcaagtgracttgtgatctctacaaaaacgaaacagccaacagtgctttgaaaaagaatagcatagatatgtaagtatgaagtatctaagaggatgaaaacataaatacagatgtttaaataaatatgtgtatgtttagaaggcaggtaagagatacacatattttttaaattacatataaatcatacttgttttgcaaaggaattgtggaatcatgatgatattagacaccccacctctacatgtcaccttaatttttcctgagatcatcttgaaagtaattagctcctaaattttcaagtccatctgatgtattcttttgaataccagaatattactgtggtctcccttctccctagagaaaaaggaactcaaggagctttgaaaatattaaaaaccctttccgtgtcttctagatttttactttgaattctgaaacacagtttaggaattcagtatgactgttaggtttgcaagaaaaacatt

SEQ ID NO: 315185 - DNA, 552 bp, Homo sapiens
caaattggtatacaaaaaggctattacctacactcacaaagcagaggaaagtataagtcactaatatcaagtggacttgtgatctctacaaaaacgaaacarccaacagtgctttgaaaaagaatagcatagatatgtaagtatgaagtatctaagaggatgaaaacataaatacagatgtttaaataaatatgtgtatgtttagaaggcaggtaagagatacacatattttttaaattacatataaatcatacttgttttgcaaaggaattgtggaatcatgatgatattagacaccccacctctacatgtcaccttaatttttcctgagatcatcttgaaagtaattagctcctaaattttcaagtccatctgatgtattcttttgaataccagaatattactgtggtctcccttctccctagagaaaaaggaactcaaggagctttgaaaatattaaaaaccctttccgtgtcttctagatttttactttgaattctgaaacacagtttaggaattcagtatgactgttaggtttgcaagaaaaacatt

SEQ ID NO: 315186 - DNA, 552 bp, Homo sapiens
caaattggtatacaaaaaggctattacctacactcacaaagcagaggaaagtataagtcactaatatcaagtggacttgtgatctctacaaaaacgaaacagccaacagtgctttgaaaaagaatagcatagatatgtaagtatgaagtatctaagaggatgaaaacataaatacagatgtttaaataaatatgtgtatgtttagaaggcaggtaagagatacacatattttttaaattacatatamatcatacttgttttgcaaaggaattgtggaatcatgatgatattagacaccccacctctacatgtcaccttaatttttcctgagatcatcttgaaagtaattagctcctaaattttcaagtccatctgatgtattcttttgaataccagaatattactgtggtctcccttctccctagagaaaaaggaactcaaggagctttgaaaatattaaaaaccctttccgtgtcttctagatttttactttgaattctgaaacacagtttaggaattcagtatgactgttaggtttgcaagaaaaacatt

SEQ ID NO: 315187 - DNA, 534 bp, Homo sapiens
actacctgctcatttatctttttgtttaaatacagattttaatatacttcatttgtttaaagcaaaagcctttctagagctaacatttaatctttaggacttttggggattgattgtttctttgcaggctgaacaacataataacagttatgtcccaccaacattgtggtattattatctttacattgcaacaaagagaggaaggcacagttgcttctggtcatgattccgagatcagtcacctgcctccttcatggatagtaaggtagaggatcgttgttatatgagttctggttcagtgtccttttcactgctctactgtctactgcamgaaagagaaaataggtgtatgaaaaatagagaagtggctgcttaccatgtaagtcatgagaaagcctatcagtgactttgaaatcggctcataaagggaaaaacagagactatactaataaattcagtgcctaattagcataaatctttttacagccttgggatttttccatggtttaatcctttgtgaaataaaatgctcca

SEQ ID NO: 315188 - DNA, 615 bp, Homo sapiens
ctatgttatgaaatccaaaataagtaacttggaaatgtatatatgcacacaaaagactagaaagaaattcatcgtaatgtaaaaagaggttctctctagatggtgggattataaatgactttggttttcttctttatacatttctgtttgttgcagaaagaacatattgcagaaaaacagaatacttattktaatcaataatctagagaagaaaagaaatgaagatgtaattaatcataaggttagtgttatttacctacacttagaaatcaactaaaatctttgcctcagaatcctaaaattcaaagttcataccaagaaaaaaatggaagagacaaaccaaaattgacttaaaaacagcatactgtgattttagaaaaggctttttttagtactttaaaaaaatgtaaaccattttagtcaggtcttagctaagccagtaactcaattcctgaagctcttggtttattagtattgtacacctcggccagattaacacttgtgaaaattttcaatttattgccacttatttgaaataagttgccttggatttttgagagatgagagacagagagaaaacacctcccaagggtaaaaagttatctaacaaaagac

SEQ ID NO: 315189 - DNA, 574 bp, Homo sapiens
acactcgggagactgcttgcttccctacaaccattttggaagctctgatttttttatttgagttcagtgcaaagttaaagggactgtattagaagattctttgtgaattgttctgcagactgggcctttctgttttctccgcacttgaacaagaagtcatgttgaccccaattttttaaaagagcagaaaaaatgaaactactcatcgaaaacttatgccacaaaatttgggtcacacattagttaagtgggaggtacaataccaattacttcattgttcctgtcaaggaagccatgagtctatcctgcaaaaataaaaaaaattwaaaaagcgaagtaaggcagcattcttgacaggaacaattccctcaccattacccccgcccccgcaaaaaaaatgtctggtgagatcaaaacattaaggaagagaacatatttaaacataaaagaggaccagaatgttcctcatagatgactgttctaggccatcttccttgtaggaattctaggtcaggaaactgatacctgatgaggaaaacagtttgaactttctaaagcatgctaataattagta

SEQ ID NO: 315190 - DNA, 582 bp, Homo sapiens
gtaatcatcagttccccttctccactgtcactttttggtaatatattgcatagaaaagacttatagtaccggttttataagcttgcaataaaaatataacaactgttgtattaaattatttaagttgtaaaccattgtgaaaaaggagaaaaagttttatcgacatggaggctgaaaaactgattatgatggagagcaaaatgtattgtactgattactcccaagtttttccctggtttagcatattgtaaatcttcagggtatctttcaaatcaaggtctgggtatgagaagttcttttatttattgataatttagaactggccggtggcaagaaaaaaaatggtacctrtgtgtttccaggttaccaatttattttagaagagttataaatgcaaataaactaagtaaaaaagaggtaatatagactcaagtaaatgtttctttttgatgaaaagaaacctagtaaatatgaaataactacatttacccagggaaatttagactctagagatcgtctaatgtttctagaaatatttttttcttaccttatattggttttatgggcacttattacctctac

SEQ ID NO: 315191 - DNA, 561 bp, Homo sapiens
caccaattatactcacaaccacgaactgttaatagcacaaatctattctatgaacttttgtcgtctgatattgaaatacccacacccccatccagcaccatattatattcagagacgtaaccaaagaggcttccaaagactgtggccatttcaagcaaatcaagggttaataggtctatctagcatcttccattagtgggtgtcactgtgatgaaattaacaaagccctattctgaagactttccggaccagcttggaagcattttgtgataatggtgctcattgtaaccagatttgacctgtggtttagtatcagcaactaaaaatgcaggcatttaactacactgaatttaattctagcccaaaccaagctttttagtcagcctacgatatcacaagaaatattgtagaattgaatagttagytgcattcaatcagactcaatagattttttgtgtatttttaggtgagaaatgtgaaattaaggtgtatgggatgtctgcatttccttctcttcctggctatctttatttaatatgctcaaatcagttattaggttat

SEQ ID NO: 315192 - DNA, 575 bp, Homo sapiens
atatcaccatgactgccaatcatctactaaatgcatctgccttgaaatttggttgtcatgaataaactaggtccattacaccaattatactcacaaccacgaactgttaatagcacaaatctattctatgaacttttgtcgtctgatattgaaatacccacacccccatccagcaccatattatattcagagacgtaaccaaagaggcttccaaagactgtggccatttcaagcaaatcaagggttaataggtctatctagcatcttccattagtgggtgtcactgtgatgaaattaacaaagccctattctgaagactttccggaccagcttggaagcattttgtgataatggtgctcattgtaaccagatttgacctgtggtttagtatcagcaactaaaaatgcaggcatttaactacactgaatttaattctagcccaaaccaagctttttagtcagcctacgatatcacaagaaatattgtagaattgaatagttagttgcattcaatcagactcaatagwttttttgtgtatttttaggtgagaaatgtgaaattaaggtgtatgggat

SEQ ID NO: 315193 - DNA, 578 bp, Homo sapiens
agtcccatttaagaaagaaatcaaaattcacaaaacgaagagggtgagagtatctaccagaagaaattccagctgaaaattcagtgacacttcaaaattcaattttggattatattttctaagagtcgtaaaatmaatgttataaactgagatggcattttctatgtattttaatagttggaacactgtgtacaaatttttgctggctatcttgtttaatattttatatacgattctaaaattatataaattttgggatgaacctttaaatatgtattagttctatttattatcagaaattaaagaatgctcttgtgaaatggaatagaaactaactcaacttgtgtagcctttaatagaaatcccgaataaatatatcaaaaaaaatgaagagctttatttggaagctaggcattgacaggtcagcatcccatgctatttctaggatggttttcataagcattgctcatgccgaaagcccttcaatttttaacataaagcattatcactatcctgccatcttcacttccttcttttgcaatgacttgtctctgaaggatgtgacttttaacaaagta

SEQ ID NO: 315194 - DNA, 645 bp, Homo sapiens
taattgttgcctttagaccccctgtaagcagaatcacctgagggttcttgagaacatatacgtttctgggccctatttcagctatagggaatcagaatccccaaggataggaccaataaattagcatgttaaacaagtcttccagaacattcttactcaaagggaagtttgagaaatattgccctgggttaaatatttttcataaagtaaatatatatttcagttttaacatttccctattaaaaagaagttgttgcaaaaaactgtcattgaattattttcagaactgacacagtcccatttaagaaagaaatcaaaattcacaaaacgaagagggtgagagtatctaccagaagaaattccagctgaaaattcagtgacacttcaaaattcaattttggattatattttctaagagtcgtaaaataaatgttataaactgaratggcattttctatgtattttaatagttggaacactgtgtacaaatttttgctggctatcttgtttaatattttatatacgattctaaaattatataaattttgggatgaacctttaaatatgtattagttctatttattatcagaaattaaagaatgctcttgtgaaatggaatagaaactaactcaacttgtgtagcct

SEQ ID NO: 315195 - DNA, 552 bp, Homo sapiens
cagtaagaacaatagtagccaactcaatatagatttgtatactgtatttggagataccctcacatatacttatgtatttgtgyatgtatgtgtgtctgtgtatttagatctctttctcctactatagtgttatagttttaagctaattgtctcttgggtgcttataatcttaaggaagatgcttttaaaacactgcaattgaacattgaccttctttttcttaatttattatttacctaatgcatacttttacctataaaagaatcagtgtaagatggaaaacttttaatttgattacttatatatcaattgccaaaaggctgatttcagcaacaaaaagtacagcactaacctttttgtggaatccactctttgattatcctttcctaattacctatccttcgacacctaaagcttttaatttctgtttttttcttgatgggtgatctattatagtctttcaagccaggtggttctgctgatatgtttaataatttcagttactatgctttgtaacattttgatcatatataatactacgccttctaaatt

SEQ ID NO: 315196 - DNA, 552 bp, Homo sapiens
cagtaagaacaatagtagccaactcaatatagatttgtatactgtatttggagataccctcacatatacttatgtatttgtgtatgtatgtgtgtctgtgtatytagatctctttctcctactatagtgttatagttttaagctaattgtctcttgggtgcttataatcttaaggaagatgcttttaaaacactgcaattgaacattgaccttctttttcttaatttattatttacctaatgcatacttttacctataaaagaatcagtgtaagatggaaaacttttaatttgattacttatatatcaattgccaaaaggctgatttcagcaacaaaaagtacagcactaacctttttgtggaatccactctttgattatcctttcctaattacctatccttcgacacctaaagcttttaatttctgtttttttcttgatgggtgatctattatagtctttcaagccaggtggttctgctgatatgtttaataatttcagttactatgctttgtaacattttgatcatatataatactacgccttctaaatt

SEQ ID NO: 315197 - DNA, 568 bp, Homo sapiens
ttgttctgctccaagagaacagagctccttttaaaaatgtagcaaatagtttcagcatgatcttttcctttatgttttatttaaaatgttaatggagtaaatccacaattcacataatttattttgaaatactattgttcagaataatgcatcatgagaacagtgrtatacaggcaagttcccttaaagaacatgcatcagttcagttcccttttgaagcatattgcaaatgccctctaacagggcacagcaacattacataaatcatcttatatgaaaaattaacatgacatcaaatatttataaatattaatgtgtatgttaatataaccaaagctgtaacaaacaatcgtaaccttgccaagttacctaggacaggcgctgctgataatcatatccattatctctggaggaacgtacaattatgaaagttatacacaggatgctatgtttttagctgcttttaaatttatccattagatgtctgccttacatataatattaaccctttgcacatacattcttaagaaatatgtagaaggcagctcatgtggataaatactttaaa

SEQ ID NO: 315198 - DNA, 565 bp, Homo sapiens
tgcagtctttcccatctcagtcaatggcagcactgacacttcaagttattccagacaaaacccttggtggtcttatttgactcccccacgctrtcactcttctcctctaattcatcaggaaatagagttgtacttgttttattgtgctttgcagaaatcacatattttacaaattgaaggtttgtggtaaccctgagtcgagtaagtctaatggtaccatttttccaacagcgtgtgctcacttcgtgtctctgtgtcacatttggtaattatagcaacatttcacatttttcatgattattacatctgttatggtgacctgtgatctttgatgttactattgtaattgttttggggtgccatgagccatgcctatataagactgcacacttcatcaataaatgttgtgtgtgttctgattactccactgattggctgcttccccatctctctccctctcctcaggcccatctagtccctgagacaagaatattgtctttaggctagttattaacactgcaatggtctctaagtgttcaagtgaaaggaagagttgcacatctct

SEQ ID NO: 315199 - DNA, 392 bp, Homo sapiens
gaaagaagagtgtataccatggatggaatttttctagctttacggtcaagactttaagaactgagaaaatgtgttacttgtggcctgggctggggtcttgagaragaagctgaattaaatgttaactctatttacaacaaattggtcaccaatccttcctctatggctccaccttcctgagtaaatctgttacagcaaacagagcttggatcctccagcctgtcttgaggtatgccaagacagcttccttcaagataaggaaataaatctcttacaactgccttccttgaaatggggaaactggccttaggtggcagaatcccaatggtatgttagaaaataaaggacctaaggaaaagactcctttgctgtctgcccatagaagcatgtcc

SEQ ID NO: 315200 - DNA, 576 bp, Homo sapiens
gtaaatgaaatcaagcatatcctgtaacagaaggatgagagacaaggttgctggtgccaggaaaatctggcaattgtgacaggggctcaaaatctggaattaaagggaaggactcaggaaatcaaaatcaagtcctcagaaaccagaatagcgactagcactcaaccaccagccaagagctctgctagctgctttacatgtagtatttccaattgttccaggagtgaatgatgttttattttgaccattttacatctgaaaaaaccggagttcagagargttaaatgtcttgcctcagctcacagaactaataattgttggagctgggaatttgaccagggcagtctgataaaatgcctatattccaagtagtatgttatcctgcttcaggatacctctagggggcccaaggctttgtcataataaggaaggaaaacatacagttattggaactagggtgggaagttctaacaggaatgggttaatgatgatttaatggctggagaggtttgagcttttctgctgaggtcatttggagaaattggtctcaacatctagggtggggttgtgttggca

SEQ ID NO: 315201 - DNA, 594 bp, Homo sapiens
tgttgcatagcccattccattttaggtagacctggaaattcagtttcttctttctctgctaagtgaataaatagactgaggaagtcttctacctgtctgccgctggtaattgaattactgtccaacacattaagcaaagaaaattcagagcagcagcaatcaaattatgttctcatgttccagagagtgggctcttcacagagaatgaggagacaaaatgttgtaaagtgatagacaccaatattcggaagggaagaaagaagacaattcattaggccttgtgctaggcccatcccacgaacaactcagaagatataatgactcagacagactttagtctgacttrtttcctttttgggctgcttccagctcagccaacacacagtgcagaggacacgtgagatcaacatacaagtctgcaggcaggactccctagatttccttagggaagggcctcagattcggagatcagttgagcttgcacaaagtgaacattgagccgcaggcgctggggggccaaggggcgtccagagcagagctgtcactgttttacattcacctctaattaggaaagggacctcatcctcattccag

SEQ ID NO: 315202 - DNA, 475 bp, Homo sapiens
gagctaaagagagagataggccctaatacaataatagctggagacttcaatactccactttcagcattgacagatgttccaaactgaaaatcaaaaagraaacattggacttgatatagtttggatgtgtgtccttgcccaaatctggtattgaaatgtatttcccagtgttggaggtgggggcctggtgagaggtgattggatcatggagcaagagggggaaatgttaaaccattcatgagaaccccctgatctcatgaatggtttagtacctcccctgcttgttctcttgatcctgcttttgccatgtgatgtgcaaattcccgcttcaccagctgccatgattgtaagcttcctgagttctctgcagaagctgatgccagacgtttgcttcctgtacatattgcagaattgtgagccaattaaagtgcttttcttataaattgcccagtctcaggtattatttattcagcaa

SEQ ID NO: 315203 - DNA, 475 bp, Homo sapiens
gagctaaagagagagataggccctaatacaataatagctggagacttcaatactccactttcagcattgacagatgttccaaactgaaaatcaaaaagaaaacattggacttgatatagtttggatgtgtgtccttgcccaaatctggtattgaaatgtatttcccagtgttggaggtgggggcctggtgagaggtgattggatcatggagcaagagggggaaatgttaarccattcatgagaaccccctgatctcatgaatggtttagtacctcccctgcttgttctcttgatcctgcttttgccatgtgatgtgcaaattcccgcttcaccagctgccatgattgtaagcttcctgagttctctgcagaagctgatgccagacgtttgcttcctgtacatattgcagaattgtgagccaattaaagtgcttttcttataaattgcccagtctcaggtattatttattcagcaa

SEQ ID NO: 315204 - DNA, 475 bp, Homo sapiens
gagctaaagagagagataggccctaatacaataatagctggagacttcaatactccactttcagcattgacagatgttccaaactgaaaatcaaaaagaaaacattggacttgatatagtttggatgtgtgtccttgcccaaatctggtattgaaatgtatttcccagtgttggaggtgggggcctggtgagaggtgattggatcatggagcaagagggggaaatgttaaaccattcatgagaaccccmtgatctcatgaatggtttagtacctcccctgcttgttctcttgatcctgcttttgccatgtgatgtgcaaattcccgcttcaccagctgccatgattgtaagcttcctgagttctctgcagaagctgatgccagacgtttgcttcctgtacatattgcagaattgtgagccaattaaagtgcttttcttataaattgcccagtctcaggtattatttattcagcaa

SEQ ID NO: 315205 - DNA, 635 bp, Homo sapiens
gtagtcccggctactcaggaagctgaggtggaaggatcgcttaagtccaggagtttgaggttacagtgagccatgactgcaccactgccctccagcctgggtaacagagtgagactctgtatctaaaagtaaataaataaataaaagtagtctatggcagcagtccccaacctttttggcaccagggaccaatttcatggaagaccatttctccatggatggcagacgctggtggatggggtatggtttcaggttgaaactgttctayctcagatcatcaggcattagattctcataaggagcatgcaaccgagatcccttccatgcacagttcacaataggattcacgcttctgtgaaaacctaatgtgccgctgatccgacaggaggcagagctcaggcagtaatactcactggcccaacactcacctcctgctgtgtggcccagttgctaacaagtcacgggcccatacaagttcacagcccagacattgaagacccccggtctatgggttacctagaaccatcacctaaacagattttctatagcaaataccaatttaaaagttcaacttgtaatacacacacacacatacagaaacataaactgaggatgaattttgaaataccttaaaa

SEQ ID NO: 315206 - DNA, 407 bp, Homo sapiens
tatttcctttctggcattaaaatatcagcattccatggtacagtattttgatgttatattacattgttttgtatcataacatcatgaaataaattcaacattttcartaccctcttccttgggcctcattttgctcactgtaattagaagagatgagcaggaaggacttgatcagaaccaaatttccagaaattccttctagcccccttctaccatatatcactgatgcttccttgttgggcccctcaactagaatatgcaccccatttttatttatttgcccctttgtcagatttagtcttgtgttcaaaccctttattttcaaaattctgcaggtgtgttatacaccaagtaaatgtcagtgctttcttcttattaccaaacctgggacatccctcaggaaaata

SEQ ID NO: 315207 - DNA, 605 bp, Homo sapiens
aggtagcagattttcaattacttatttctctgaattccaatgattgagaagtgtactgtctgaaagatgactcaggctgtagacagaggtacagatattccacaacatcctcacttgctacaatttgggggtacctttcctctatgtctaactcctggttccttcagagcaattttccrttcattgcttctgttgacattgctctcttcctcttccaaggacttgaacttcaggactccttttacctccattccagccaatgcactaacttccctcttgaggatgagcccagaaacctcaggacccactttcaaagccatctccagctactgacgcttgaattaagcaaagtgttggtccctttttcccaagaagaacaaaaacttacttcacaaaaataaattcaggaagagcatactatttcaagactatggatatattcatatagatggatgttttattttccaaataagttcttatttgagccagtgcctgacacattgcttcgtaaactcacactagagcttggagtttatggattatctcaggaatggcttgagacatctccaaatgtgaacaattataattattccaatatctgctca

SEQ ID NO: 315208 - DNA, 605 bp, Homo sapiens
aggtagcagattttcaattacttatttctctgaattccaatgattgagaagtgtactgtctgaaagatgactcaggctgtagacagaggtacagatattccacaacatcctcacttgctacaatttgggggtacctttcctctatgtctaactcctggttccttcagagcaattttccattcattgcttctgttgacattgctctcttcctcttccaaggacttgaacttcagractccttttacctccattccagccaatgcactaacttccctcttgaggatgagcccagaaacctcaggacccactttcaaagccatctccagctactgacgcttgaattaagcaaagtgttggtccctttttcccaagaagaacaaaaacttacttcacaaaaataaattcaggaagagcatactatttcaagactatggatatattcatatagatggatgttttattttccaaataagttcttatttgagccagtgcctgacacattgcttcgtaaactcacactagagcttggagtttatggattatctcaggaatggcttgagacatctccaaatgtgaacaattataattattccaatatctgctca

SEQ ID NO: 315209 - DNA, 605 bp, Homo sapiens
aggtagcagattttcaattacttatttctctgaattccaatgattgagaagtgtactgtctgaaagatgactcaggctgtagacagaggtacagatattccacaacatcctcacttgctacaatttgggggtacctttcctctatgtctaactcctggttccttcagagcaattttccattcattgcttctgttgacattgctctcttcctcttccaaggacttgaacttcaggactccttttacctccattccagccaatgcactaacttccctcttgaggatgagcccagaaacctcaggacccactttcaaagccatctccagctactgacgcttgaattaagcaaagygttggtccctttttcccaagaagaacaaaaacttacttcacaaaaataaattcaggaagagcatactatttcaagactatggatatattcatatagatggatgttttattttccaaataagttcttatttgagccagtgcctgacacattgcttcgtaaactcacactagagcttggagtttatggattatctcaggaatggcttgagacatctccaaatgtgaacaattataattattccaatatctgctca

SEQ ID NO: 315210 - DNA, 605 bp, Homo sapiens
aggtagcagattttcaattacttatttctctgaattccaatgattgagaagtgtactgtctgaaagatgactcaggctgtagacagaggtacagatattccacaacatcctcacttgctacaatttgggggtacctttcctctatgtctaactcctggttccttcagagcaattttccattcattgcttctgttgacattgctctcttcctcttccaaggacttgaacttcaggactccttttacctccattccagccaatgcactaacttccctcttgaggatgagcccagaaacctcaggacccactttcaaagccatctccagctactgacgcttgaattaagcaaagtgttggtccctttttcccaagaagaacaaaaacttacttcacaaaaataaattcaggaagagcatactatttcaagactatggatatattcatatagatggatgttttattttccaaataagttcttatttgagccagtgcctgacacattgcttcgtaaactcacactagagsttggagtttatggattatctcaggaatggcttgagacatctccaaatgtgaacaattataattattccaatatctgctca

SEQ ID NO: 315211 - DNA, 543 bp, Homo sapiens
tagaaattatttgactatagagccttttccaggaatgagaagtgaggactaatcaaggaatgttacctttgccagagatagggcccatccaacatctgctcagtgggatttagaattgctatgaactagtaactatatgatgtctcctctcctccaacccacccctttttaaatgagaatgctgaagttgtcctgtttgccttccatcatggtatactctatatgtgactgtagtggttgtggcagggtgaggatgtaaaaaagaaaaaatcacttgtttttgtacttcgtaggtgtttagaacaagaagaattatatgtgttcctggtatcaacattttccccattacctcttgatgcattgactacaagttcacccaaagatcytaggccttgacttgatgctttgacttgatggaacttggggtggccttccttgagaaagtggtgagtctaatttgtataagagggagagtgaagcaaatatttagtggcaagaagggagaactattggggatgttcacaaatacgttgcttgtccttc

SEQ ID NO: 315212 - DNA, 579 bp, Homo sapiens
cttcgtattgcctattatgggtaatagtatatggtgaaaatttgatttcacattgattgagccattagacaaattaactttaaacattctttgaaaagccatatcagtatgaatagatggataagtagatatgctggttgcataataaaatatttttagaagcatgtaggartctttgggggtaggaggtgccgaacttttaaacaccatggatacctacgtggacttctctagggttcaacacaattctggtacacttatgcctgcccttgcactatcaaaagtgtcatagtataaacaattgattagtggtcaccctaactacatgctatcttttgatctgcatgcataaatctcatatctgctgtgaactgaaaatttgtgccctactctcatttatgtgttgaaatcctaactcccaatgtgatgatatttggacatggggcctttggaaaataattatggttaaattagatcatgagggtggagccaccatgatgggattagtgccattctatgaagatgaagggagcagagtgctctctcgccaccatgtgaggatataagaacaccactttc

SEQ ID NO: 315213 - DNA, 579 bp, Homo sapiens
cttcgtattgcctattatgggtaatagtatatggtgaaaatttgatttcacattgattgagccattagacaaattaactttaaacattctttgaaaagccatatcagtatgaatagatggataagtagatatgctggttgcataataaaatatttttagaagcatgtaggagtctttgggggtaggaggtgcygaacttttaaacaccatggatacctacgtggacttctctagggttcaacacaattctggtacacttatgcctgcccttgcactatcaaaagtgtcatagtataaacaattgattagtggtcaccctaactacatgctatcttttgatctgcatgcataaatctcatatctgctgtgaactgaaaatttgtgccctactctcatttatgtgttgaaatcctaactcccaatgtgatgatatttggacatggggcctttggaaaataattatggttaaattagatcatgagggtggagccaccatgatgggattagtgccattctatgaagatgaagggagcagagtgctctctcgccaccatgtgaggatataagaacaccactttc

SEQ ID NO: 315214 - DNA, 610 bp, Homo sapiens
tgatagagttggagtgggaatcttgattgcagggaaaataattgccaccttgatatattagtgctatagaataatccttcatcagaacacacatgctgccccagtttgcctgtttgtgtatacacacacatgcatgtgggtggtaggatacagttccactaggctcctctccacacccctcccagcaactctaggtgaacactcaatgccgcttccatgtmcacaagcagagctgactaatgatttatcatatcacctttgaataggcagagaagagactgggaaatggatgaaggtgaaaccctgtcagaacaaaagagatgatcctgccaattgacataaaccaaaacaaatgctaaatccatgtggctcttcagccccatcttacacatgcctcctgaatcaagagaaaggtggggtagttatgtaattacttttctcttatccataccctctgtagttattatcaggacaagaggaaagtctatattcctgtctttctgtctctttttctctctgtctctttctctctttaggctttttaattttaatttaaaaaatttaaaattaatttaaatttaaactaaatttaaactaaatttaaacttaa

SEQ ID NO: 315215 - DNA, 387 bp, Homo sapiens
atattatacaccactttggtatccagcaatttgttttgtgttgctgtcagcggtggtggtggtggtggtggtgtgtgtgcatgtgtgtgcttcattttcatatattttaatttagatagttttgtttgacccatctttaagattattgatattttcaaatgcagtgttaaagtttttatttctctgttgtgattacttatttattcactcgttatgtccatatttctatttaaggcattggatatgtttctaagagctctttkaaagtcttgatctgctaatttcaacatctgcatcatctctatgtctgtttgtatgagttgttttttaaacttcctcttgaatacaggtcacattttatcgcttcttgtatctagtagtactttt

SEQ ID NO: 315216 - DNA, 627 bp, Homo sapiens
tataatttccatccttttactttcaatctatttgtgccttggatctaaagtgtctctaatgtagataccacatagttggatgatttttaaagagtctgttttcccagtctgtacattgtatgtggagtgttcaattcacttacatttattataatgacttgcaaggtaagattcatgtctgccattttactatgtgttttctatatggcttatgtcttttttgtttctttgttctcttacaatttttgcatgtcaaatagatatattatagcttaccactgatttccttatcatttattttactatgtattttacagttataatcttagtgattgctttgctctgggattacaattaatatcttaatttataacaatctagtttggattaaaacaaacatgaattcaatagtataaaaagcctatatacgtatctctctgttttgttcccattctttggtgctattttcataaaaatcagatctttatacattgtgtrcccattaaaacagattttaatgggtgttgtttaaattagacaggaggaaaaacagagtaaaaaataaaaatacctttataatgtcttttatatttacctagtaggtatctttaatagttttgtatttct

SEQ ID NO: 315217 - DNA, 549 bp, Homo sapiens
ttttaaacttctttattcttttttggtgatgcggagtgtgtgcctatgcatgtggattttatatttatttctcttttttatttttgccatggtcattgccacttcattgttaagtaatatagtacatttattctaaaaaaaaaaaaaagaaaaaagaaaagaaaaaaggctatctgtgaaagcatatggggtttccacgcagattaaactatgtgttgaggaaagtttaaaaaaaatctgaaaaatactttttcctcttcctttttctttgcacaatttkcaagggaacaagcagtctgcaacaaggatgacagtagaaaatgaggtaattaactatacaactgagagtcagaagataatccaaagagaagttgagaaagcttaggccagctgggtaatttaattttgtcattagtggtaatcagtgcttgctattcatcaaaataatcctaaaatgggatcaaagagaaagttcatagtcctgatgatgttaacctgaagattcctatttttttatttgtatgcatgtgcataagaaaattagctatg

SEQ ID NO: 315218 - DNA, 511 bp, Homo sapiens
cctttacctggaattttcgtattgggtggccttcctggctctctacttttcatgggctttcccttccagtttctactactgcagatatgtacccctttgtactgactctggctgcccacagtcctgtgctggatgtctcacctggatgcatcctatcaaaatagctgtgtgcccccttcttaacatacacttccctgccctcactgattttgccctatgtcctagccagccttgctgtgcaagaaatcacasatctcttgaatccttcatgacttttttatagatgcatgccctgaaggatttcccaagtaataaaaatcctaaatagattcaaagatgtaactagcaataggagttaagatattatattcacccagaagagcatgagcaaaggcaatattgaaatgaacgtgagatgaatgacaccagcattggctgctaatgccacctaaacagttatttgggtgactccttttcctggaagtaagttccacagctcattcagcaagtt

SEQ ID NO: 315219 - DNA, 484 bp, Homo sapiens
cattgctcttgttttttctattcctataatcattttytactgtttctacaatgtatcaaaccaaatttgggaacagttttctataagacaaaataacttattatgcggtttctttaaatcacaaatacccctgatgcacttagaacttgatttgattatacatattagatttacactttttttttttttttttttttgagatggagtcttgctctgtcacccaggctagaatgcagtggggtgatgttggctcactgcaacctccgcctcctgggttcaagcgattcttctgcctcagccttctgagtggctgggactacaggtgcccgccagcactcccagctaatttttgtatttttagtagagaccccatctctataattcactatattggccaggctggtcttgaactcctgaccttctgatccccccgcctcagcctcccaaagtgctgggattacaggtttgagccaccgcgcccagc

SEQ ID NO: 315220 - DNA, 499 bp, Homo sapiens
ttagttattaccagagtaaagaaacaaggcagggaatagtgacttggctagaacggcagcagaaaaccactcgaggcaaagccttacatcacaagcattgtttctatctcatccttcaggtgatgaggcaccatttatagctatgagtagaaaattcacctgacaaaaattatgttagaaaattaattccatcacaagtcatttaaaaagaaatctacatggaagataaatgaaatataatataatatataataaaataaagataaataaaatgaaatataatataaaatataatagccaagaggctattataaacaatgaargtcttacctaaggctttgtagacgaaaagaatgcccactttcaagaaatggttagaagctattgtcaactagattgtgtgatacagttgaatagagggctgggagtggggagtaattgttgtgaatcccagtctgaatggagagtattcgcttttgttttgcttgttttttgagac

SEQ ID NO: 315221 - DNA, 605 bp, Homo sapiens
aagtatgactgcatttcaatttcaacatatcaaattcccattgattgaagtcagactctacttagctcttgcttttataaacatattattttcaaatttcctgttagataccaacatgatgcagaaatccacagcaattaatgtggttgtttggtcttttaaaatgttattttgtgtccaaggaggttaacagaaactttaaaatatgggttcaagtgcaaaaagtgtcttgaggaaatggtttagaaatatgttttatgccaaaaggtaaaattaaataaataartaaacaaatgaacaaaactttccccagccaaacttcatttgtatatggtgtggaaattatagtgtagctaataaaatgagggtgtcatatacctactataatattgtataaatcatgaattatacaacaggcaaaaatgagaagctgcaaaggaatcaaacctgtatggaaataaataaaacatacaagcaaagtagcaatcatgttcgttctgctaataaaatgtgcatcacagggggcttcttataaaataatggaatatgttcatagtaattattattttagaatttcaaagtaactatgaaatagttggtaatta

SEQ ID NO: 315222 - DNA, 605 bp, Homo sapiens
aagtatgactgcatttcaatttcaacatatcaaattcccattgattgaagtcagactctacttagctcttgcttttataaacatattattttcaaatttcctgttagataccaacatgatgcagaaatccacagcaattaatgtggttgtttggtcttttaaaatgttattttgtgtccaaggaggttaacagaaactttaaaatatgggttcaagtgcaaaaagtgtcttgaggaaatggtttagaaatatgttttatgccaaaaggtaaaattaaataaataaataaacaaatgaacaaaactttccccagccaaacttcatttgtatatggtgtggaaattatagtgtagctaataaaatgagggtgtcatatacctactataatattgtataaaycatgaattatacaacaggcaaaaatgagaagctgcaaaggaatcaaacctgtatggaaataaataaaacatacaagcaaagtagcaatcatgttcgttctgctaataaaatgtgcatcacagggggcttcttataaaataatggaatatgttcatagtaattattattttagaatttcaaagtaactatgaaatagttggtaatta

SEQ ID NO: 315223 - DNA, 460 bp, Homo sapiens
ggacttcccgcaccgcctcctgcagtgtgtagcgagagactttgctactcatggcttcttgagccggctaaccggaaaagagcctgtcattattttataataaagttcatatagcatggcatctactctggaagtttgggctgttcttatggaaagaggcttaaacccattgtctctgaagaaataagagtgctaacaggatggctcttcatacaagtgaaactgagaatttgcatggattacttgtgttggtttgttagtctacctgccctctgcaatgcataaaatcactttgccaagtcagtaaaggccattagagttgctggagtgatgattagatgggtttctgcwtgcggagaattcatatcagcaatagatctgctggcagcatttgtgttgttcaacttttagaaaaaaatcaagtaataaacatgaatatcagtggtttgagtaagaaata

SEQ ID NO: 315224 - DNA, 583 bp, Homo sapiens
agtttaccattcagataaatggtagatattgtgcaactgctcagaataaagccgttcagaaacagttctgaaaagtaaatttgggggagcatatttccaaatgtattagtgtgctggcttttggtcatagagttgaaagatctccaaaatagagcagcatttcattgtcctctatacatatgtgctatttaagacctaggtaataatgctagattaaaagcataaaaaccaccagcctggcattttccagggtgttatatgtatacttctggtgttataggaaatgattgttttttggtggtggtggtgggacgtgtttgtgtgtgtgtgtgtrtgcatgtgtatgtgtatatgtaagtatatatatatatatgcacacacacatatctgaagagttcattattgtagtaaataataaatagaccttgtttaaaaggaatattctataaggtaagactaagttcatttaagtattgaacctttgtgagttgattaaaaatattacattagtagtgtaggtggtatccagatgtgacaaaaattgtgatattaaaacatgaattaaatttgaagaaaaatagca

SEQ ID NO: 315225 - DNA, 601 bp, Homo sapiens
agagaaggttttaaggctgcttcctaaacaagatttccaaataagatatggacagttgagaaaaagcctaactgaaaaaaaggtagctttaaaaaacaaaaacaaaaaacaaaaaacaaaacctgtacctggyatccccacatatctacttctacttgaaaaccttacaaagaaaaatgtgctttaatgtcatcaagttccctatgtatttgaacatctgccaaaatcattcaagtaatgggccttcagaatccattcttaagatttccataaacagaaaaaacaaaagcttaaaaaaaatccttaaatattcaaaacagagatgacagatgaaggcaggtttttattggttgattgggttttgcttttgtttgaggaataggggaaacaaaacggaagaacagaaaatgacaagttttggcaggaacaagtagctagtttattgtttctttttttctttctagtatgagtgaaaggaactgtaatgaaaccagaagagtagatggcgtacttttaaaaattgttaggctgaagtttctagttttctgaacaagcccagcatctaaactgtgataccgttgatacatggcacttccatggt

SEQ ID NO: 315226 - DNA, 601 bp, Homo sapiens
agagaaggttttaaggctgcttcctaaacaagatttccaaataagatatggacagttgagaaaaagcctaactgaaaaaaaggtagctttaaaaaacaaaaacaaaaaacaaaaaacaaaacctgtacctggtatccccacatatctactyctacttgaaaaccttacaaagaaaaatgtgctttaatgtcatcaagttccctatgtatttgaacatctgccaaaatcattcaagtaatgggccttcagaatccattcttaagatttccataaacagaaaaaacaaaagcttaaaaaaaatccttaaatattcaaaacagagatgacagatgaaggcaggtttttattggttgattgggttttgcttttgtttgaggaataggggaaacaaaacggaagaacagaaaatgacaagttttggcaggaacaagtagctagtttattgtttctttttttctttctagtatgagtgaaaggaactgtaatgaaaccagaagagtagatggcgtacttttaaaaattgttaggctgaagtttctagttttctgaacaagcccagcatctaaactgtgataccgttgatacatggcacttccatggt

SEQ ID NO: 315227 - DNA, 601 bp, Homo sapiens
agagaaggttttaaggctgcttcctaaacaagatttccaaataagatatggacagttgagaaaaagcctaactgaaaaaaaggtagctttaaaaaacaaaaacaaaaaacaaaaaacaaaacctgtacctggtatccccacatatctacttctacttgaaaaccttacaaagaaaaatgtgctttaatgtcatcaagttccctatgtatttgaacatctgccaaaatcattcaagtartgggccttcagaatccattcttaagatttccataaacagaaaaaacaaaagcttaaaaaaaatccttaaatattcaaaacagagatgacagatgaaggcaggtttttattggttgattgggttttgcttttgtttgaggaataggggaaacaaaacggaagaacagaaaatgacaagttttggcaggaacaagtagctagtttattgtttctttttttctttctagtatgagtgaaaggaactgtaatgaaaccagaagagtagatggcgtacttttaaaaattgttaggctgaagtttctagttttctgaacaagcccagcatctaaactgtgataccgttgatacatggcacttccatggt

SEQ ID NO: 315228 - DNA, 577 bp, Homo sapiens
acactgccacttttttgccatcgagagaaagaaaacactgggggcatgccaattactgaatcgttaaaatgtggggagaacaacggtcttacagtcaatgaaataccattgtcattttgtagtttagaagggcctgataggctgggatcaaagaggtgggtagcctgtgaagttagaggtaatgggggaaatagtagagctaaagggtaagaagttgaggttaaagaatggattttggaatttgaagatttcgaggtgcagctgctccaggttcagttaatactytctagatgttgtacaagacccatgatattcctgttggtagaggacggtggagagtatataacgtggccaaataatagagcttcttgaaaagtattttagcccctccacttcatttaatttcactcattaaatgagacccagatgaaatgaaaggcctagaatttaagtacttgcatgagatcaaagaactatttagcatttgaaccaagattaggccacagttaaagttttgtaactggaaggcagggaatttttagttgaacactgaaactttgcttcatacattcctgtc

SEQ ID NO: 315229 - DNA, 577 bp, Homo sapiens
acactgccacttttttgccatcgagagaaagaaaacactgggggcatgccaattactgaatcgttaaaatgtggggagaacaacggtcttacagtcaatgaaataccattgtcattttgtagtttagaagggcctgataggctgggatcaaagaggtgggtagcctgtgaagttagaggtaatgggggaaatagtagagctaaagggtaagaagttgaggttaaagaatggattttggaatttgaagatttcgaggtgcagctgctccaggttcagttaatactttctagatgttgtacaagacccatgatattcctgttggtagaggacggtrgagagtatataacgtggccaaataatagagcttcttgaaaagtattttagcccctccacttcatttaatttcactcattaaatgagacccagatgaaatgaaaggcctagaatttaagtacttgcatgagatcaaagaactatttagcatttgaaccaagattaggccacagttaaagttttgtaactggaaggcagggaatttttagttgaacactgaaactttgcttcatacattcctgtc

SEQ ID NO: 315230 - DNA, 580 bp, Homo sapiens
agtataataaaccatgcaattagtatgtgttaagtagaaaaataaaataggacacaatagaagtaaccaaattatattttggatgttgyatgccatttgctggttgatatactatctaaaaatttggtgaaaaaaatcttttaaaagtttggcaaaacagaagtcaacataaaaaatttgaagcactttattgatacactcaatacttaagaaagttttcctctttgttataaattatatgaattgtatctgcagggaagtctgcctaatttaatggtttctcattaaaaattacaacttcagtttataatatggtaaggattcccaacccccaggccgtggactgttaccgtggcgaagtatatactgttacatactttacctttataggcacaattttcagtagctgatgacatggagagggattccaaaaatttatgagatgaatataactagatagcaaaattatttacttttctttttcagttctttttttctttctttcttttttggacacaaagtcagtctctgtctcccaagctgaagtgcagtggcgccatcatggctcagtgcagcttcg

SEQ ID NO: 315231 - DNA, 597 bp, Homo sapiens
cactccttctcctcactttccacctcttccaccaaagacattagctaactcttgggaagtttgtgttatctttgccactctagtgactgggacccagcctctttacatattacctgtattacacgatgaacagaccacacaactggacaaccttgtctgtggacagcctccataaaattcactcatccaagcacacagggtttagcaggccccacactgaagatttgatggagtcctacaatacagccatgccacataccacattgccttttcattttctcccattcccccatacctttttctctctcatatttacagcagtatttttttcattaaaaacccaagtagtttgttgggattgcatttcttcctctgtgagtacaatagcttgccctaatgccactcaaagggaaaattaaggttaacatgctcaacttcatrctaggtgccactagtgtagtactgaaccatgcctttcttctgaaaaaatttatttttctcaggaattctgaaatttgttcttttgcattaattttatttagcatactcttgagttttttctaagctcaaacatttattttattctataaagtcttc

SEQ ID NO: 315232 - DNA, 605 bp, Homo sapiens
ttgcactactcctttctctaactctacactgagtcaattcttatgaatcatgattccaaagtcctgccagaaatgcaatggaaaacactggttaaagcmctactggagaagttcactcacgtaaaaaaaaatgtcttcacaactgtctccacagtaggcagactcaaaaataggtcaacaaactttcctgcttcgttaatgactcatcatggacaccaggtagatcagagagcttagcctactgctatctttgtaaaacaagatctttgggtaagtaaacaagtacttgtagcccgggattcaacaaaagtcagaatgataccttaagaaaaacacatcaagggaggttaaaacaaaacaaaacaagatttggagaaaggaaagtaaaaaaaatgaaagaaacatagcctaaaggaagattgctcatgaacaggtgaatggcagtttttcttctctttgtaccaagttataataacccttttaggcctaattaggaattatcacacagctgggatgagtcactctgtcggtcaggggaaaccattcaaaagcattcatttggaaggaattcaaaaactgtgtgctatgaaaatcacagtacagat

SEQ ID NO: 315233 - DNA, 605 bp, Homo sapiens
ttgcactactcctttctctaactctacactgagtcaattcttatgaatcatgattccaaagtcctgccagaaatgcaatggaaaacactggttaaagcactactggagaagttcactcacgtaaaaaaaaatgtcttcacaactgtctccacagtaggcagactcaaaaataggtcaacaaactttcctgcttcgttaatgactcatcatggacaccaggtagatcagagagcttagcctactgctatctttgtaaaacaagatctttgggtaagtaaacaagtacttgtagcccgggattcaacaaaagtcagaatgataccttaagaaaaacacatcaagggaggttaaaacaaaacaaaacaagatttggagaaargaaagtaaaaaaaatgaaagaaacatagcctaaaggaagattgctcatgaacaggtgaatggcagtttttcttctctttgtaccaagttataataacccttttaggcctaattaggaattatcacacagctgggatgagtcactctgtcggtcaggggaaaccattcaaaagcattcatttggaaggaattcaaaaactgtgtgctatgaaaatcacagtacagat

SEQ ID NO: 315234 - DNA, 437 bp, Homo sapiens
gaaaaaaaaaaaaaagaaaaaagcacgtgagaagatggataatgtggttatgttttaataggggacaaaagacaacatgaacagaggtaaataaagagaataagaggaataaagtaaggaaacagtgagaaaaggtagaacatttcaggcagagataataacaaatgcaaagactctaagggaacagcatgtttcagyaggtttgaagaacagcataatggccagtgcagctaaagaaaagtgaactagttgccgggtgctgtgactcacacctgttatcccagcaattgggaggctgaagtggaaagattacttgaaagttcaggagtctgatacctgcttgggcaacacagtgagatcccacaactacaaaaaatccaaaaattagctaggcgtgttgggatgcacctgtggtcccagctactcaagaggctgga

SEQ ID NO: 315235 - DNA, 582 bp, Homo sapiens
tgactgagttctaataaaactttatttataaaaacaggtacctggcccactgagtcttgcagataatgaatcatttgtcaaacacatgtattacaaattcattcccctctctgtaggtttytgttttactctcataatgacatatttttgaaaaatagatgttaattttgatccaattgatcactttctttttttggagttagtgtttttacatgtcctagtcaagtaatctttgcctaatccaaggccacaaagatgactttgtgtttccctctaaaagttttattagtttacttcatgtttatcatcatagtttattatttcatatgcagcccatctgtaactgatttttgcatatggtatgatgtaaaagtcaaaataattttttttcttacagatatctaacagacccagtgccatttgttgaaaagaccatccttttcccactgcactgctatgtcacccttgtcacaaataaggtcattgtattcatgtgtcaggtttattatttatattactgtcaaacccacaaaatgcatagcaaatgataataataataaacaaactgcatttattatcaac

SEQ ID NO: 315236 - DNA, 599 bp, Homo sapiens
cagccaggaacatagacttcatctsatctagtgtgtgaggggcagtctccctaggaaaaggttggcgaagaaagaaaagctatatttgataaaaattcttccaactgggatagtaatttatgatagctgctaaaaatggctttgccctttaagattctagaaggaaaataattaaatatcctagctaaaacaacagcttctaggaagagtatattcctggagaaaggctcagtatatatgaacacagattctaagaaaaaaaaagtatcagttaagcatttcattactatcccaaggaaaggactgaattctactgcactgaaggcttgacactgtacagaattttaagaatcaaaaaatataagatttgcaactaaaagtatatcttttcagaggagaatgaaaggcaaaaaaggaattaaagacttctgcacataagtccatcataggtaataataattggcaaccaataattaacaacattattcaatatactctcacaatcccgaaagaaactaaaatgtctccaataaaaccacactcatattgaggtcagcattactgtgatacctgaactttaagctgctgggagacaattt

SEQ ID NO: 315237 - DNA, 532 bp, Homo sapiens
ggtgtaatctagaaatgctcattttacttctttgagtactaattaatgttcagccattaaataaagctggtaagtatccaaaaagactaggaagggatagcgagtgagaagaacagttatatttccttttagtcagtaaaatgttgggccagaactcagacctggtaagccagcttcccatgacacttttaacttcggttacatgaattctgctagaatacactttcccccaaatctctacrtgacaaagaaacatcagggcacacttggcagacatttttcaggtttttcttgaaaacagaacctttgaaacctgtatcaaagactcacaagtctaaaaacagaaacaaaagaccaagttgttctcaatctcctctgttgcttttgcttggaatgagtctcctaaatttccttctggtttcagtaataacactagattaatttctatatgcacagctctaaattagccactgatttgctgagacaccctgctcacataaacaactctatgaaacacatttagtagtattaa

SEQ ID NO: 315238 - DNA, 517 bp, Homo sapiens
agatccaagagctttaatgaaactcaagcacaggaaacaaggaaagtagagccatactcatcataatcaaattgcttaaaatcaatgataagagaaaaatgttaggatcacaaagagaaaatagacacattgcatacacaagaacaaagataaggatgacagcagatttatttcaggaacaatgcaaaccagaagagtggagtgacatctttagaagttttggaagcaaaaaagctgtcaatctagaattctttgaccagtgaaaatacctttcaaaaatgaagtttacataaagacatgaaaagggtaaaagaattcatcgccagcaaatctgcactataagaaatatcaaaggaatataaagaaagtttctgaatcagaaggcaaaatgataccagatggaaatamggatctattcaaaggaataaagagtaccagcaattataactacataagtaaattacataaagacttttcctcattgtttaaatctctcctagacaattgtttaaagcat

SEQ ID NO: 315239 - DNA, 536 bp, Homo sapiens
tttttcacatttgatttttaacacatactggttagtgactttttgcaaattattatcattacatagcaactctatcttattcagtgctctttacatttcattttgctgggtattaacagagtaattctttcctgctttgttatttgcatttgcctggtattttttcttgactttttattctcaatttttatcacatttgttaaatgtgtttatttcttgtatgtgtgtgtatatatatatatatacacacatacacacacacacatacatatatatatacaagaaagcatataactgtctgctttttattttaccaaatctaatagtctcttttaagaataattctattcacatttaataatacattgaattttattgcttctattttacttaatatttattacttatttaagcccccttgatgttctttatattaattagttatcaagttkctgttcaattattttctttctcttcttaatttgggagctctagtctagtttttcattctaccaggtccttctcctttttgtcac

SEQ ID NO: 315240 - DNA, 301 bp, Homo sapiens
gggcttcttcagagattcaggatttcacagctcccacccctctgaaactgccttagcaaagattataatagtgtgaaaattatgacagtgaaagaaatctgacctaactggctccatcttgcttttaacctccaagctkccctcgttctttcctcaaagtaggctgaactaactttggaaggaacttatagtttaactgtttaacaacgttgatatcagcccctccccaaaatgaactccctcctggcttgggaagcacagcacctttgtaaaacaaaaaaattagccacaagattagaag

SEQ ID NO: 315241 - DNA, 598 bp, Homo sapiens
cttctattccatggttaatggtgggtattgctgagagatgatcagtcaacagtaactgcaatgaatgttaggataaagagaagcccagaaggctccacggtgttccagctgctcacagggtaatctgcytgtcttttttacttccgtatctccaatgcccattatcataccaggcacaggaagtgctcagttaagtgtttactgaattaaatgaagatctgaatgatgctgagtgtcaaccctccctctcagtggctcctccccattggccctaaacctgatacctggatgaaaagagataaggatacatgacagttcttcaagtaggtcacagaacgtttgagttgggaggaaatggacaaagctttttacatcactgccatcccctcccagtcatcatatccccacagtgggggtactttatgaaacacttggaccttcatgctttcctaatttcttcttatcctgtatgctcttctaagaatactgaagttggtcaatgttcctattaaaactcaggaatctaaactttgactcagaatttctgattgagatgtcacttcagtttccttgtgcattctcagaggctctaccctgg

SEQ ID NO: 315242 - DNA, 506 bp, Homo sapiens
aagtctctctataggtctaagactcaaggacatggttctcaaccaaggtctgttctaaccagctgtgtgaacttaggcaaatgacttaaccactctgaatctcaaattcctatctgaaaatgataaggttggacaatctgtgagccatttcctattgctcagattttgagtttctataaaagacctttgcccagactagamctaaaggccatgttctatcctgggacataataggcaacccctataataaggagtagtgcctccaccatttgtgtaaacatcccctcaacaaatcacttcataattttcttaattttcaaagcccacagagagaatacagggctcaagatcagacaaaactcaaacaggtttgtgacctcaccacatccgtatcagcttataattatcattattttcattccccaaacaatattctagctactatttattgtgtgtttacatcacactaggtgttctggagtatttcctcatttaatcaacccaga

SEQ ID NO: 315243 - DNA, 519 bp, Homo sapiens
gcctccctcaggttcaccatgaggagggcattagaagccccagcaattctgtgcattttccacaaggtgatgataaaacttctctaagcctcaattttgttaattttcttacctgtaaaatcaggctsataatgcctatacctacatccaggagtttgtcaggaaggattaaataagacaaggagtgctaagagaagagcccagtgactggacatgttgagtcctatacaaatggtggtgatagtgattcataatatagtgttgttgctgctatcatcgtcatcatcattattattgtcatcaccagttacatttactccttttgttctatgaacactgaggtacatactatgcttagctgcttattgggtcccaaccagaatttcttttgaagaacctgaagaaagacaagtatggtgtgaggcctgaaattaatgttcaacattatgggctgccttgacatctggtaaaattgggaaagcctcaaatggcctaaccacaagttcccctcccattctc

SEQ ID NO: 315244 - DNA, 604 bp, Homo sapiens
aatgatttatgtatatttttggacattataatttgtcagctaactctcccatggattgaaatttccctgtgtgcatagcacagtgcttgttataaaacagggaaaatagattcaagttaaatgaggatttggtcattacttagtctatctcaaaacaagaaaagctcacccacttcaaatttctgcctgggagctaaagaatgctgccccatctagagatactcctttctttcaagagcacttagtatgtgccacgtggttggtacaattctctgcattgggagccctgtaatgtgggcccatctgggctcargatgagaggcaagtagcatacacgttgtacacagattgacctttataaaattgcttaaaaattgtaaaatattaagtccacttaactgaagactttttagaggatttttacactaaccaaaaccagggtttctaaatcttggtactattgacatttggcgctggataattctttgttgtggagggctttcctgtgcactgaaggatgtttagcagcatccctggcctctgtctatgagtttccactacaactcccttgccacaaagtttgacaaccaaaaatgtcactaga

SEQ ID NO: 315245 - DNA, 545 bp, Homo sapiens
actattgacatttggcgctggataattctttgttgtggagggctttcctgtgcactgaaggatgtttagcagcatccctggcctctgtctatgagtttccactacaactcccttgccacaaagtttgacaaccaaaaatgtcactagaaattgacaaatgtcttatgagggtcaaagtcactcctgattgagggctactcatacgtttctctgatatgagagaaactgaagaaagaacaccctagagtatgccaataaccagcttataaaggaaacygcagctttgaaccagtctttggaccaataacataatatttcatttatttaataactattcttatatctgcattatagaaatatttctagcctagtaatggctattttttgagcaatttctctgtgctgagtgttttacatgctttggctcatttaaatttcccaaggaccctataaggtatgaaggtgagtagtggtaaaacctggatttggattcaggtttcatttaccctccaagctcttaaatagtacccttactgctggtggtt

SEQ ID NO: 315246 - DNA, 470 bp, Homo sapiens
actacaacctccgcctcctgggttcaagcgattctcttgcctcagcctcctgagtatctgggattacaggtgcatgccaccatgtccagctaatttttatagaggcggggtttcaccatgttggtcaggctgatctcgaactcctgaccttgtgatctgcctgcctcagcttcccaaagtgytgggattataggcatgagccactgcgccaggcccagccaatcttttttaaagcagttatcagccacataacttgtattgccagaatggattgggatgatgagccctctgtttatcagtgaggtaactgaagctcagagaagcagagaaacttgtgagggttccattcctcagtggtgggattttacgtggaacctaggcttctttgtatctttggccatgtctcatactcctgcagtagatgtatttcctcccactcctcaaaataatctcttgcttttattttgtaa

SEQ ID NO: 315247 - DNA, 597 bp, Homo sapiens
tctctctctctctctctcttcattttccaaacatggtagtttattctctcagactagctttttccatggggccaaaatctagcatccagcagttcagggggccattaccttcccaactttacctccagagaggagaggaatcacttaattccagaaggaaaactctggagaattataactggtttgggaaatatgtcacctctgtgtccagggataatgggaactacaactggagccctctctagacccccatgatcgggaggctacggtgtgaaagtggctgttccccaaataaatatattgttctcaaaagacagaagaggttctaggcagaaccaaacaacagatatccactctgtargtgtctttgtgttttacagaagaggaggcagagaatgagagagtggcaacttgtctgtgcatattcaactacatactgcaaaaaaaaaaaactaagaacatctgggaatagttacacagttttcaatctaaaagcaaagacaaaattctgagaatgagtctgaaattggggcagaatatacgaaatcaggacagtcttagaaaatctggagttttttcttaagaaccatatactcc

SEQ ID NO: 315248 - DNA, 596 bp, Homo sapiens
ctacggtgtgaaagtggctgttccccaaataaatatattgttctcaaaagacagaagaggttctaggcagaaccaaacaacagatatccactctgtaggtgtctttgtgttttacagaagaggaggcagagaatgagagagtggcaacttgtctgtgcatattcaactacatactgcaaaaaaaaaaaactaagaacatctgggaatagttrcacagttttcaatctaaaagcaaagacaaaattctgagaatgagtctgaaattggggcagaatatacgaaatcaggacagtcttagaaaatctggagttttttcttaagaaccatatactcctaaaaaattgcttcacatacagtagatgctcaaacacgctgaatttcacaacttgacagtgttttattattttttctttattcttaatctctcttcctctccttgctagagtttagggtaccatccaagggggaaattaaagatttggcacgtcatgtgtgtataaccaaggatagcaactcgctcctaaaccgtgtaaccttttctcagtctgcctgttgcagtcagctccccaagtcctaggagcaagactcagaaagtg

SEQ ID NO: 315249 - DNA, 508 bp, Homo sapiens
agatgactttgaagcagcttgttaaacgatgccctaaaatgacaacgtagggcaggtgatcatctttttsccttacttccaaatttcaggtaacttttcttaatactccccattgtgtttctaggtattctccaaagattatttaaaatcacatgcatgcaaaaaaaaaaaggcaggagtcattatgtgtttgttatttggcctggtccacatacatagaaagagcagcaagtggtcttaggacacataagcctctctattgtgtgatcatcaagaggtgagcatctactaaagccagacaattcgcttctttccagcaagttcttaaggaatccaagtttgctttctcaatagcctccatcattccagagattttaaaaatcactcttatttttttcagttattccaaggctacaaaaccaaaattcatctccaccagatttcatttgtagcagctataagttaatacttttctccttggtggttcccacatttcctaaattcctgg

SEQ ID NO: 315250 - DNA, 597 bp, Homo sapiens
aatttttgtatttttagtagagatggggtttcatcttattggccaggcttgtcttgaactcctcacctcaagtgatccaccttcctaggcctcccaaagttctgggattacaggcgtgagccaccgcacctggtggatattatttttaaagtgtttcagttagtgagaatagagtctagtaaatcaagaactaggaatacatcaagaaacaaaagtggctctttatatgcccatcagaaaacagaatatcaaaacaatgccaacaatatttaaaacaaataaccacattttatttctttcattggttaattcagacatacttcatcaagtctttatttgccagatcttgaatcarcagtctgctttcgggagttcacatgcatctggactaaagagcttcctgggaagtctgatgcagtcccaatgtcatctttcagttgtctacttgtggccgtgggtctccatgagtttactccttgtggaaacaattgatagtatcacttgacacagtgttttctagaattagcctaagacactgcaatggactgactgtttatgtcccctcaaattcacatgttgaaatcctaacccccaagg

SEQ ID NO: 315251 - DNA, 497 bp, Homo sapiens
gatggtgttaggaggtagggcatttgggaagtgttcagattataggggcagagttctcattaatggggattagtcccttataaaagagacccccagagagatcactctcccctctggctggacaagtaaggttacagtgagaagacagctttcttccagaaacccagttcttaccagacaccaaatctgccagcacctcaatcttggacttcacagcctccagaactgtgagacatcaatttctgtkgtttgtaagccactcagtttatgttattttgttatagccacctgaagagactgctatattttgttatagcagcctgaagaacctccgtttcagaatttccagtgaatcctaagcagaatgaataacatcaaatccttgtctagacaaatattaacaaggctccagagcaccaaggcaaaggagatcttataagcaattagaaaaaagagacaaattatatactaacgggtgacaattaggttgacaagag

SEQ ID NO: 315252 - DNA, 507 bp, Homo sapiens
ctctccattctctgccctgctctggttgtcctctctcctgctctggctgagcccasggcttttatgaacctcagaggggaggaagtatttgctgattggtccatgaggagctatggccaggcctggaagaggcaccacgagtccctactctggtctgcaagactggcagtccagcccccagccttcaggccctggcctgaaccctgccattcatggccccagggctccaccccaaccgcccactctgagagcagagccagcacagggagtggagagaggccaggcagcaggagtagacacctctgagcctgcaggggttggggggggggattcccaggccccccagggtgcaggctggagagacgcccaggtcctgcacctctgtgtgttgctattccagatctgtatttgagcaacacagcccctggcacttggtatacagctgttgacttaaataatgcttttctccctcatatcaatttataagaaccaccagaaccaaaccac

SEQ ID NO: 315253 - DNA, 597 bp, Homo sapiens
acttgctcaatattcctgtaactaaattggacatggtatcaagatagaggttatgtgtgggccaaaatatggcctctccttctccaaagctgacctgaataatgccactgctgattgcctactctgcagatagcagagactgacattgagccccaaaatggcaaatttttttggttgggctaaccagccagctggtcacaggtgttgattacattggatattttctatcatggagagggaagagatttgttctcactgaaatagatacatatccaaatatggatatgccttctctgcatcaaatgcttctgctagcaccaccatctgtggactcacagcattccttacccatcgtcatggcattacatgcagcatcactattgcttctgatcaaggaactaatttcacagcaaagaacatattcagcattggttcatgcctatgtaataaactgcttttattacatacctcatcactcataagcagctggcctgattgaaaagtcggagggctccctgaagctttgayaatgatatcaatttggagataattctaaaaattttagttttgtcttatagaatgcagtatatgctttca

SEQ ID NO: 315254 - DNA, 566 bp, Homo sapiens
attgataacaattatgtagtgctgtttccataaccagaacacatgagtccagaaataaaaaagtggaaatgagattggttcctctcaatattatacccggtaatgtactctcaaaaatttgcttcccatcttggcaaccttaagctctgctagttggcaatcttattccccaaggggaaatgctcctgctagggacacagcaatggctccatcaaattggcagatgaaactaccctckagccccttgggctccttatacactgaatcagaaagcagaaaaatggctggaataattgattctgattactaaaagaaaatcggattgctactacaaaatggggccaaggagagctctatctgaaactcagtgggtactctaggatgtcttttagttctttcatgttcaataaaaaatggctacagcagccaaaaatttctttaaaagacagaactactgaggactcagacctttgaaaaacaaagtttttggttacttcaccatataaacaataattatcagccaagttgcacgctgaaataagggaactatagaatgggtagtggta

SEQ ID NO: 315255 - DNA, 584 bp, Homo sapiens
ggggaaaccaacagcagctccaagtcatgagtgctgaagaacctcagggatcctgttcaatttttttcttgatggagagaggtagaactcattcttaaatgaagcamaaacagaaagacatatgatgaatgactgagaatttggtcagccctagcaaaaacactgcaagctgtctgggtaggaatgagttgtctcatctcagatctgagtcagaagcagctggataatggggccagacaccggctctctgagtcactccctaccttctccatcttttgcatctgtggaagggtatgcctcagaagaacggctctgttccctagagatgtcataatcagagggtagaaatgtgggctgccttttccctcctcctcagtccatctccccttctgctgcctaagtgctcctgtcaaaataagccgtttctcaaattaccactctcttccaccccagctgactgttctgattgcctcgcttttccttgtagatgctacaaccagctatgaggaattttatgctaagaaaagtgtcaggaataattaaagagagggaaggagaggagaaaaagatagaaaggaagagaa

SEQ ID NO: 315256 - DNA, 592 bp, Homo sapiens
ataaagatagaagtaatccatccacttttaggcagtgggagcagaatataaagaaaggtgaggccgggaatggtggctcatgcctgtaatcctagcactttgggaggtcaaggtgggtagattacttgagcccaggagttggagaccagcctggccaacatggtgaaatcccatctctactaaaatacaaaaagtagctgggcatggtggtgtgcacctgtggtcccagctactagggaggctgaggcaggaggatcractgaacctgggaggtggaggctgcagtgagccgggatcaccaccattacattccagcctgggtgacagagggagacactgtcttgaaaaaaaaaaaaaacaaattaaaacagaaaaagaatacaaaggagggtgaggtaaagttcccaactacagaggaataaggatgggggcttttcaggaaattcctatggaaaaacactgagagaggaaggtagcgtggcagaaacaagactcggtgaagagcacacactctgaagtcccttctcccacttctgtgtgacttccaacaattaacttagccttttattgcctcagtttcctcacctgtaag

SEQ ID NO: 315257 - DNA, 426 bp, Homo sapiens
tgaaaaaaaaaaaaaacaaattaaaacagaaaaagaatacaaaggagggtgaggtaaagttcccaactacagaggaataaggatgggggcttttcaggaaattcctatgraaaaacactgagagaggaaggtagcgtggcagaaacaagactcggtgaagagcacacactctgaagtcccttctcccacttctgtgtgacttccaacaattaacttagccttttattgcctcagtttcctcacctgtaagatgaagattaaaaggttaccaggtacaaactccataaggttgctgcaaggattaaatgtgatgaagtatgaggttctccccattccaccacacatttccactgttatctttatttttctggcatctgctaaaagcagatattgcccctgtgtttcatctaattatgaaacatacag

SEQ ID NO: 315258 - DNA, 426 bp, Homo sapiens
tgaaaaaaaaaaaaaacaaattaaaacagaaaaagaatacaaaggagggtgaggtaaagttcccaactacagaggaataaggatgggggcttttcaggaaattcctatggaaaaacactgagagaggaaggtagcgtggcagaaacaagactcggtgaagagcacacactctgaagtcccttctcccacttctgtgtgacttccaacaattaacttagccttttattgcctcagtttcctcacctgtaagatgaagattaaaaggttaccaggtacraactccataaggttgctgcaaggattaaatgtgatgaagtatgaggttctccccattccaccacacatttccactgttatctttatttttctggcatctgctaaaagcagatattgcccctgtgtttcatctaattatgaaacatacag

SEQ ID NO: 315259 - DNA, 580 bp, Homo sapiens
gggctgacggtgttagattctggccctgctactcattaattagtgaccttgggcaagttacttaatttccwtgtctcctctcctcatctgtaatatgaaggaaatcatagtgccaaacatcaaaggattattatgaaagttcaaggaattaatatgtaaagtgctgcaaagagagtctagcacatgacaagctctctgcattgctgtctattcatataatttaagcccagtggaggctgacacggccatcctgttggtgagggaggtgtctaaggaagtgctgagctggggaagtcagaacacattagaacaaacgggcagcactgaaagctatgaaggcagggaagatttctttccccacaaaccaaaccaaagaggttacctttaggatacttttttccttttcacaaagatgtcagctaacatcctgagcatttcaggtatcatgtctgagtgccaatgcagggaatgagcctgtaattctaggacttgagcagtgctctcatcaattcagctcccaaccacagcttactctgggttgaattaaggtagcaaatggtttacagagaagaggcagccc

SEQ ID NO: 315260 - DNA, 557 bp, Homo sapiens
ttgcccaggctggtctcaaactcctgggctcaagtgatgctctcaccttggcctctcacagtgctgggattacaggcgtgggcccaccacgcctgaccacaatggtccttttaagagtgcagtaggagtagggagagtcaaacagaagatgatgggatggaaccagagatgagtgatgtgcttttaggacgtaggaaaaggtcacaagccaaagactacaggcagccactagaagctgaaaaagtcaaggaaagagattctcccctcaaagctctcagaagaaaattctccccaaagtcctcataagatgccaacattgccgatgccttgactttagcccagtgaaactgattccaaacttctgccccagaacygtaggagaatacatttgtattgtaccgtttcaaggcactaagtctgtggtcatttgttatagcagctataggggactagtatacccagcctcttaactgagtaaagccagaaagatgtacatgaacaaaaggaacgatggagaataattgccctctggtaataccaagtggcagaaactatgc

SEQ ID NO: 315261 - DNA, 557 bp, Homo sapiens
ttgcccaggctggtctcaaactcctgggctcaagtgatgctctcaccttggcctctcacagtgctgggattacaggcgtgggcccaccacgcctgaccacaatggtccttttaagagtgcagtaggagtagggagagtcaaacagaagatgatgggatggaaccagagatgagtgatgtgcttttaggacgtaggaaaaggtcacaagccaaagactacaggcagccactagaagctgaaaaagtcaaggaaagagattctcccctcaaagctctcagaagaaaattctccccaaagtcctcataagatgccaacattgccgatgccttgactttagcccagtgaaactgattccaaacttctgccccagaaccgtaggagaatacatttgtattgtaccgtttcaaggcactaagtctrtggtcatttgttatagcagctataggggactagtatacccagcctcttaactgagtaaagccagaaagatgtacatgaacaaaaggaacgatggagaataattgccctctggtaataccaagtggcagaaactatgc

SEQ ID NO: 315262 - DNA, 606 bp, Homo sapiens
tggcttggtgccctccccttggtaatgagtgagttgttgctctattactttacacaagagctggctgtttaaaaggacctggcacctcctcccttctaactcttgcttcatctctcaccaggtgacacccctgctccccattcaccctccgctatcagtaaaagcttcctcagacctcaccagaagctggacagatagatgctggtgccaagcttgtacagactgcagaaccatgggccaaataaacctcttttctttataaattgctcagcctcaggggtccctttatagcaatgygagaatagactaacacagcaacccagaagtttgtggagtgaaatctaaagcagtgcttttaaaagtgagatcctaggaccagcaccacctgtaccacatgcatcacctgggaacctgttagaaaagcaaagcctcaggctccatcccagaccacctcaggcagaagctctgggggtggggtccaggaatctgagatttaacaagctctccaggtgatgctgatgcatgttcagtttgaaaacaatggacccagagagcctctaaagtgcaacctgccctgacaattttagtccaaaatcttgcatgggt

SEQ ID NO: 315263 - DNA, 432 bp, Homo sapiens
cggccctgctcctggaaggcagcagtcacgggcacatccctcccaccccagggaagagaatgaaagattcttctttggagaaactaatcggctccagaggaatgatctctgcacaatgaaaattgagagtttaccaatggaaaaacaaaaataaaacccatatgctccttgataccttacagaggagactacagtttgacaaactgcacccgktacgagtgcgaagacagccaaggaacaagtgagggtggaataagacatttcaaacacagaactcacaaacttcttctcccacatactgttcttcaaactccgggtagcctgtgctttggcaaaaataaacaagaaaaccaacaaagaggaaaatgtgggatccagtaaacaagagttgtaatacagaattgcagtgaagggaagtcctgggatcgcaac

SEQ ID NO: 315264 - DNA, 533 bp, Homo sapiens
ttggaaagacaacatgagacttccgctttgaaaggaagcactttaaccaacatttttgggtatttactcctaaaaacatgtgtgcttccaattatttttggaaatgttcaatgcaggtcttgctcttggctgtatgtacagcatcccctgggaacgtgatgttccactccttcatttagaattcaaacactgagataatgcactgctccagtctttatttctcttctcactggtccatagaaggcagaagggaacaagatagtatagatgatgaaatgttataagaagaatgttgaaaaatatgtctctactcagaaatttagtagatgtaaaataaacatactgaaacaaaaacagccagaaytactgattaatggcagcaaatttcatacttaagatagtatataaatctgctagcctttaacacatagccactgtgtaaccttgggaaagttattcactcccctgagcttcagctcacgtaaatgaaaagtgagtataaaaatacctttctggattgtttgactttagta

SEQ ID NO: 315265 - DNA, 603 bp, Homo sapiens
taggagatagtggaaataacttccttgtctcagaagttgagtgatgagtagcaggccctcaaaaaataacctcagtgcttgcacatttgagtcaataatttatgtttttaaatttgttgcgttctgccctttctttgtactaaggtataatatacaggagaattatcctttttrtaatacaattatctgagttttgacaattgcacacccacctccatgatgaagataaagaacagctccatccatcagtctccaaaattatctggtgaccctttgcagtcagctgttttctccaccccagattctggcaattactgatctattttctgttcctacagttttcactttgcaaaactgtagtaaaaatgtgtacatacaggatgtagctttttggatctgactttttttccttagtgtaattcatttgagattcatccatgttttagcaagtatctatggttttattgctgaataatactgtactttatattagtaccatgatgtgtttatccagtctctagttcagagacattcaaaatgtttccagtttggcggttaaaaataaagtaattttgaacattcacatacatttttgtgtgtaga

SEQ ID NO: 315266 - DNA, 603 bp, Homo sapiens
taggagatagtggaaataacttccttgtctcagaagttgagtgatgagtagcaggccctcaaaaaataacctcagtgcttgcacatttgagtcaataatttatgtttttaaatttgttgcgttctgccctttctttgtactaaggtataatatacaggagaattatcctttttataatacaattatctgagttttgacaattgcacacccacctccatgatgaagataaagaacagctccatccatyagtctccaaaattatctggtgaccctttgcagtcagctgttttctccaccccagattctggcaattactgatctattttctgttcctacagttttcactttgcaaaactgtagtaaaaatgtgtacatacaggatgtagctttttggatctgactttttttccttagtgtaattcatttgagattcatccatgttttagcaagtatctatggttttattgctgaataatactgtactttatattagtaccatgatgtgtttatccagtctctagttcagagacattcaaaatgtttccagtttggcggttaaaaataaagtaattttgaacattcacatacatttttgtgtgtaga

SEQ ID NO: 315267 - DNA, 577 bp, Homo sapiens
ctgaataattttggattatatcctaaatatttggattattttgttttaagtctgggttttatttaatttctatggaggattatatttttgtttagcagacaatcaacctggttagattcaggcaagaggttaaatctcacttcctgtgggcagttcactttcaaaagcttttgcagactactcagatctgtcctgtaatggtcactctgttcattcagttttcaaagtctttgatatgctgtgtagaatcagatccacacatatgcagctagagcactaaggcatttataaataagggagttgttttcttgagtttttcccttgctgcattttcctcaatcttttttgagcagttttcttcttactctttatctagaatgcttgagttttgcttatctcactctgccatgtatttctacaatggctcccacatccaastggaataacaaagagagagagaaaaaactaaagcaaaacagaatagaggttggattcaccatcttggaaacacatttctgtaaaattgacagggaaaggttttccttccacaaattttttctctttcagtctctcactg

SEQ ID NO: 315268 - DNA, 626 bp, Homo sapiens
gttttccctgtttgaaaaatggggcgggaggaggagttcactttgtaaaaataatattttatctgtaggtatcaaattgatggttaagagagggaaattattattaaattttcagagaaggggaaatatgatgttattttatattgctctgttattattacttgaactgcattaccagatattcattgaataaccatatataataaattgatcagatagcatatctgggtataaatgaggacaataaatataaaagcagtgattttttaaaatattttattggactaggatttaaggccaaacttgtgtaaaacatctctttattccagttcagtcgaatctggtggcaatattaaaatggcttcagggtttgacttgcccccrtccattagtagcaaatgaatacagagtagctagttacagacaagagaaacagcctctgacacagataagatgttcccaatttttcacttatctttttagtggaaagcacacttatcttttgttccttctcttgttagtgtatttgttttaacaagacaaggaacaaatttaagggaatattagtggcacagaaacctttagtaggtgctcaatttcttccatccagaagttcaccctgcacc

SEQ ID NO: 315269 - DNA, 612 bp, Homo sapiens
acggttgtgctaaattcaagatactcaaatttggcttagtcttttctcrctgttagttaattaattaggaatgcagttgttacataaaatcttacaataatgaaatatatacaaatgctgaagagctctattggccatacattattgtttatatgtttaatgtttactctaatattatgaaatattttaaattaagctattcaggtatgcctttattcaacatttataatgtgaggttctggtacaagcaccaaaaaaaatgcaatgaaaatcataaatcatagttttgcaaaatgttttttacgagaagtaatacctaagagatcttctggccaaactcttcattttagggtcaattatttgagatgtcgtgaggataggggcctgatgccagtacaggaaatagaggtagacttggccttttcctgtgagaatttgtaatctcatgaaatggtaagatacatgctcatcactactatctttttaggaacaaataaagagtttcaaggagaaaagtgagataagatgggtctcataacaggagtatgctggaaaatgttgatttatagtgttatctctatacttctaagctttcttctgtattcagaggca

SEQ ID NO: 315270 - DNA, 612 bp, Homo sapiens
acggttgtgctaaattcaagatactcaaatttggcttagtcttttctcgctgttagttaattaattaggaatgcagttgttacataaaatcttacaataatgaaatatatacaaatgctgaagagctctattggccatacattattgtttatatgtttaatgtttactctaatattatgaaatattttaaattaagctattcaggtatgsctttattcaacatttataatgtgaggttctggtacaagcaccaaaaaaaatgcaatgaaaatcataaatcatagttttgcaaaatgttttttacgagaagtaatacctaagagatcttctggccaaactcttcattttagggtcaattatttgagatgtcgtgaggataggggcctgatgccagtacaggaaatagaggtagacttggccttttcctgtgagaatttgtaatctcatgaaatggtaagatacatgctcatcactactatctttttaggaacaaataaagagtttcaaggagaaaagtgagataagatgggtctcataacaggagtatgctggaaaatgttgatttatagtgttatctctatacttctaagctttcttctgtattcagaggca

SEQ ID NO: 315271 - DNA, 587 bp, Homo sapiens
aaaagtgatgtgttcacttaaaacattaattaagtgaatcacctaatcttatgatgagatttatcattttgtttaccctcaaaaaaagtagagtgagcaacagaagaccttggctttgaataaatctgaatttgaattccagagctactcgtaatctttgtgaccttgggcaagctacctaatttctctaaggcttagttttcttatctgtaaactgaagatgataatgcctaccttctaaattcaggtgagatcgtgtatggaaagcattagaacaaaataaacgcttgcccttgcccttctgaatgaaagtttttgctcttttctctataaycatatctgcaagacatattaaagaatgaatctataactgtataatatggctgcttaataggcacacaataaaagccactgttttataaagcatgacatgccttgaaataagcaacttgtttctttaaccattccttgtacctctctcatagtctttttgtccttccatactttgataggctcctattttgctaaagattttgccactttcttaagtcactgtttcagcagaaactttcttgtcaccatggcta

SEQ ID NO: 315272 - DNA, 512 bp, Homo sapiens
tcacagtaaaaggagcagctagcatccctatgtctgaaagggcagagaaagaaagcaaatacaaaaatctctagagatgtagctaaacgaagagaatcctaaaggtgcaaaagccttcagtagaggaatatagtcactgtcaacccatggactaagaggaaagaagtcagacggatcatatacaccaaccttactttcctcccatcttctagtgcttcccattagtcaaatcacctggaagcaaaactcaagggagtcctgtgttgtagtccaaaatttctacttccaggaacagaaaagagatgcatagtagtggatccagatgggcaaatagggaatatccaacaattagtgagaattaaactcaaggtggacaggggaaactgagcacatttacatgcccagcccaatgggatgttaaacaagcagcagsctgagccctcaagaaaatcctaattggcaggaatagataaaccatgtgtgggctgagttgtcatcagcatctgtgggtc

SEQ ID NO: 315273 - DNA, 629 bp, Homo sapiens
aactgaaaagaaaccctccagaacaaacagtatttgatccaggattattggatatgttctcccatagatataatagagattacaagtttcttaagtagacacctatctgcacaataatcataatattaattccactggatactcatatattttctcattttcaataagtagtaatttttatttaacattttatcaataagaaagttaaggttgtgacagtttccagaaattagataaagtcaacccactaaaatacaacaaatatatctgattaaagagtcatatttttactttttatgtttcatttctttttggtrcttatttttatttccactattattttctaaagtttgtactaattaatatttgctgccagcaatactcaaaacttaatcctttatgccaacctcactaacaatgttatattttatttttaattttgaaataattacatactcataggcaatggacaaaaatagtatagagagatgctatgtattcttcacttagtttcccctgatggttatgtaagtttagcataataacaaaaccaggaaactgacattggtacaatgtgtgtatgtgttcagttcaatgccattttatcacgtcaattcatataaccacta

SEQ ID NO: 315274 - DNA, 540 bp, Homo sapiens
ggaggctaagttcctgataacacaccaagtgactatgctaagctgtcataaactgagtagtacttggtctacaaaaccataaatatggtaattcctaagtatactctatcaccaagtggaattatatagtgtactgggagctgggctagtcctaaactcaggtcttagtttaggcacaaatgcacacatttccatcatacttcctcctcctctgctgccacttcccctcaatatatacccatgggttatgggtcattttctattatcttttatctgagaaaagaaataatcagatgcacaaatgactctgcataatgtcttagcataaatcaaaatcatgatgatgtagcataaatcaaatatagacttctacaytatgggcattctaccctaggggcccctgaaagagagtgaaacaaagaaatacttccagcttgcaaatctttaagtaatacctctcttcatcaattgatagtcagagaagatgtggcacaaagtaaagatacacataatttttggccagtagctgatgactagtta

SEQ ID NO: 315275 - DNA, 540 bp, Homo sapiens
ggaggctaagttcctgataacacaccaagtgactatgctaagctgtcataaactgagtagtacttggtctacaaaaccataaatatggtaattcctaagtatactctatcaccaagtggaattatatagtgtactgggagctgggctagtcctaaactcaggtcttagtttaggcacaaatgcacacatttccatcatacttcctcctcctctgctgccacttcccctcaatatatacccatgggttatgggtcattttctattatcttttatctgagaaaagaaataatcagatgcacaaatgactctgcataatgtcttagcataaatcaaaatcatgatgatgtagcataaatcaaatatagacttctacactatgggcattctaccctaggggcccctgaaagagagtgaaacaaagaaatacttccagcttgcaaatctttaagtaatacctctcttcatcaattgatastcagagaagatgtggcacaaagtaaagatacacataatttttggccagtagctgatgactagtta

SEQ ID NO: 315276 - DNA, 600 bp, Homo sapiens
cagcacaatgaacttgtctttgactgtctgaaactgacactttatatttacttcttttttccccactgctttccattaatgatcttgaacactaataaagttttacaagagttgtgacttcctgaccaagcataatgttgttcaccagtgataaagcagaagggcggagctctccatcttaaggccacactgaattttacagaaacatgtactttagctttaactttcttttcttattctaaatcaattattaaaatttaacaaatactaataaataatttcaactatgtattcataagtctaacctgtagattcaagttccaaaatcaagctgtcatcttaagatgaacctgattgtataaccttctgtgmatcaaatagcaacagaagacagatgttgagcagaactatttcctagatgaattttgtgtcacaaatttcataagaaaagagagatggagagagaaagaaggagagaaaacacaggatcatcagatcactaaattttgtgttgctgggccccttgacaagttctctgtgtaagcagtctagagagaacactctagttagatggatgctttttcatgctctttaacatct

SEQ ID NO: 315277 - DNA, 559 bp, Homo sapiens
agtcactggctctttttctgtaagccatctcatttttttctcttggcatcttgtcacacagcaggaatgaatgagaaaaacacactgtttaggccatacaagaaggggctaattctaagatagccaaatcctttaatcctttccctcatcaactagggctttagttctagcaccaagtataatraaatttttgtccttcaatatgacccattttgaaggaaaggtgtaaggtgtgtgtgtgtgtctgtgtgtgcatgtgtgtgcttgcatatgtgcacgcacgtgtgtgtttgcatgtgcacgtgtgtgtgtgtagtcttaagttttcatcattgtactgttattatactcaacattattagaaagaaacattatgtaaaatcattgagctacatgtctttccttccatactttttatttctaaagtaaaaatgcaatgtcacatgaagggaggaaggaaaagaaaaaaaatgaacattcttcaaatatttatttaagatctacaaatgccaggtcttgtattagactgagaatgcaatagtgaacaaggtatagttca

SEQ ID NO: 315278 - DNA, 572 bp, Homo sapiens
ttaaactgtccttattctatcatcttcaacaaatgtcagtgaagatctatgaaccaatatttgagtctatatattattaactatatattgccatatagttacttgtggtaaattgattataattaacaactccaatcctcttactgtatctacacacattgctacggaagcttggaaagcctctccagtttgacaggccctgtgacttgctttgaccattgagttttaggcatgaagagtgcttgtgtgattgggcttgccgtagtatacccaggctagctgtggagaattagacacaaaagctaatttacccactgtcccaagccaacgcccagccactccccacatatgtgagcgtattttttaaaaaaccagatcttccaagctgagaccagtctaaatcaatgacttacagacttgtgagctaacaaagattacttattttttgatcttttaagttcaagggttcaagtgcaggtttgttacacagtacacttgtgacattaaggtttgttgtacagattatytcatcacccagggattaagcctagtactcattagttatttttcct

SEQ ID NO: 315279 - DNA, 586 bp, Homo sapiens
taaattgataatatcaatttctattggcaatgttgtctttatacagaaaccttctaatgatacaactttaatttaagaactggttaaacgataagaatttcagatctgatctcaggctggagagacttgtttctggacaggtaagccacacagagttcttcaaattccagaaactaaatgataacttgtctgcctaagagacttgctggccacacctacagcaaacattgcagaatttccaaggccaaatagcttaatttttatccttaaattcagttacagcatgtacatacaattccacttaactaaaattattttaaatatggttggattcagccaaacaaatgtctgtattaaatcaataacaccaattccctgaatacagctctttccagctggtcattgtggctgtacgtaatcaccwagtacaggagattgggatgcataagtagcgtgtgattgttccactcaccttctctatgattgggctctcaatttcctcccttgtgggccacaatctgcatataaacacgaacaaatagatttttttgaagaagacagtaaggcacttaatttgactgtgtga

SEQ ID NO: 315280 - DNA, 463 bp, Homo sapiens
tgattatttattcaaaaacgtttctgtttacatcacccttcyggctaccctggctttcctgatctacattctgcctacctgttctccttcatccttctatgttcaaattaagtatgtcttcctctgtaaaagcttccctgatcttgcccggagtcaactaacagacaatcctgccattttggtgctcaggcttatggggggaaaagacgtgataaggtggtgataaggcaacttagtatgtgaaaagtgctacatggcccaaaggagaaaatgacaactttcttggaaggttcacagaaagcttcactgagaaataaatgcttggttttgcatctcaaagtataagtcagaattcactaggcagacaagaatttgaagggaatcaaagtaaagaatcacaagagcagaagctgagaagttggtggcgttgggtagtactgagcagttaaatagggccacagtg

SEQ ID NO: 315281 - DNA, 520 bp, Homo sapiens
agctggagcaacactgtctcgcttgttcatcttcctcctctcatgaccagcaggatagactaggcatatacttccggtggcgatggcagaagcacaagagtaaatcaggccagtaatccaaatagttttcaagatattgcttgtgtcacatatgctaatatctctttaactaaaacatgtcatgtggttgaacatagagtcaaggagtgaaggagtgaagtgagccccaccctcagtgagagagcactgtgctacatggataccagaaatattatatcattggagatatcaatatacatgataagtaactaagaggtgagtctggggatgaggtgtgaacaagatcatgagatgcactgtaaaccatactattgaaattttcacttcatttcccatcttacaggaaatatgacactaaagtattttaracgaagaaatgacatgcttgtatatgcattttaggaagatctatctggcctctgtagaagacactttggaggatactaaaagtagagacagt

SEQ ID NO: 315282 - DNA, 567 bp, Homo sapiens
aagagaacaatgtatgaacaaagggagaatgtcagcaaaaaaccagaaaatattaaaataaaataccaaacagaaatcatgaagctgaagaacacattaactgaactaaaaaagtaactagagaaatttaacacaaggttagttcaggcagaagaaagaatcagtagacttgatgatagttttttgaaataaatcaatgagaggagcaaaaataaataaataaaaataaaaagaataaaaaaggatacagaaagctgaagggaattacgtggccccaccaagtcaccaagtggaccaatgcatacaaaatgggagtcccaaaaggaaaagagaaatcgaaaaaggaccagaaaacttattcaaagaaatcatgactgaaaacktctcaaatcagaggaaggaaaagggcatacagatccaagaagccaaaagagcagtaaatcagatgaacctaaagtgatttacgctgagacacattaaaaattctcaaaagttaagacaaagaattttgaaagcagcaacagaaaagtgactcgtcatataaaagagaaactcctttagactatc

SEQ ID NO: 315283 - DNA, 567 bp, Homo sapiens
aagagaacaatgtatgaacaaagggagaatgtcagcaaaaaaccagaaaatattaaaataaaataccaaacagaaatcatgaagctgaagaacacattaactgaactaaaaaagtaactagagaaatttaacacaaggttagttcaggcagaagaaagaatcagtagacttgatgatagttttttgaaataaatcaatgagaggagcaaaaataaataaataaaaataaaaagaataaaaaaggatacagaaagctgaagggaattacgtggccccaccaagtcaccaagtggaccaatgcatacaaaatgggagtcccaaaaggaaaagagaaatcgaaaaaggaccagaaaacttattcaaagaaatcatgactgaaaacgtctcaaatcagaggaaggaaaagggcatacagatccaagaagscaaaagagcagtaaatcagatgaacctaaagtgatttacgctgagacacattaaaaattctcaaaagttaagacaaagaattttgaaagcagcaacagaaaagtgactcgtcatataaaagagaaactcctttagactatc

SEQ ID NO: 315284 - DNA, 436 bp, Homo sapiens
tgcatacaaaatgggagtcccaaaaggaaaagagaaatcgaaaaaggaccagaaaacttattcaaagaaatcatgactgaaaacgtctcaaatcagaggaaggaaaagggcatacagatccaagaagccaaaagagcagtaaatcagatgaacctaaagtgatttacgctgagacacattaaaaattctcaaaagttaagacaaagaattttgaaagcagcaacagaaaagtgactcgtcatataaaagagaaactcctttagactatcagtggatttctcagcagaagctttgcaggccaggggagagttggactatatattcaaagtgctgaatatatggrgctggatggagctggaggcccttatccttagccacctaatgcaggaacagcaaaccaaatactgcattttctcacttataagtggagctaaat

SEQ ID NO: 315285 - DNA, 547 bp, Homo sapiens
gataaatattgcatgttctaacttaatgtgggagctgaataatgtgtacataaagacacagagtatggaatgataggcgatgaagactcaggtggttgagggggtaggaaggggatgggtcakgagaaattacttaatgagtacaacatacataattagggtaatggatactctaatagccttgactttaccgctacataatctatgcatgtaacaaaattaccctgggtcccataaatttatacacataaaaaattagatcaaatcactttctccactccttgaatccggtcctgttcacatggcctgatctggtgcaatggatcagaagcaaatgtgaaacaaccagaggtctaagaagtgttttatgcattagtcttatcttttttataaccatcccatcttcatgtagggaaactagaagctagagaagaggctgtgtgagaaagtaacctcagctataccagtcaaacagactttactggctgaggtcccagacttgggaatgaagttatgcaggaccaaacagcaccaaatgaactagtcc

SEQ ID NO: 315286 - DNA, 542 bp, Homo sapiens
aaatccttaaggttgatccatgttgactcatattgcagaaattctctgtttttaaggttggctaataatctacagtgtgtatgtatatgctacattttctttatctgtacatattgatagaaatttaggttgtttccacatcttagctattgtgaattwtactgcaaagaacatgggagtactaatatagcttctagatcctgattttaattattttggataattatgcaaaagtgggattgctggatcatatagtagttctatttaaaaaatgtttagaaacctctatactgtttccatagcagctaaccattttcattgccagtgtaatggttacaatttcttcacatcatgacattttctcctacatttgtcatatatatatatacatatatacacacacacacataaacacatatatgtatatatagtatgtgtatatatacaggcatatgtatatatgtgtgagtgtgtgtgtatatatatatatatggtatgtgtgtttgtgcatgcacgtcagatagctgccctgacagcaagtg

SEQ ID NO: 315287 - DNA, 651 bp, Homo sapiens
cttttcagactgaagttctattcttcttagtgcctcaaactagattctattcagacacggtggaacaaattagtttgaggctgttttggtgcaaaatattttgaaatccatgcatagttttttcataacacacattttcttggaaccttttgaagactgctcatatatgtggaatctaaagaaagtcaaatttatgaaagcagagagtaggatagtggtttccaggggttgaggggtaggacaaatgaggagatgttggtcaaagctataaagattcagttatgcatgatgagaaagttctggaggtttaatattcagcctggtaactagttattaataatgtattgtataattggaattagtaaaggaagttgattgtaagtgttctcagcatacatacaaaaactcataattatgtaaggtgataggtacattacttagcttgtttgtggtaatcattttacaatgtttmctgtatcaaaaaatcacattgtatacctgaaaatatacaatttttccttgtcaagaacagctcaataaagctgggggaaaaacagaatgtgagtctagtcaataaattgataaacatatagtgtctctcaacgtgaatcagagagagattctgaagatggaaagataaataaagcataa

SEQ ID NO: 315288 - DNA, 550 bp, Homo sapiens
ggataattttttaattttttgtagaaacagggttttgccgtcttgcccaggctggtcccaaactcctgggctcrggtgatcctcttgtcttggtgttcctaagtgctgggtttacaggtataggccactgtgccaggcctattttgtttttaattgacaaataaaaattgtatatatctattgtgtacactataaaatttgaaatacgtgtatgttgtagaatggctcaattgaactaattaacatatgcattacctcacatatttatcattttttttttttgtggtgagagcaggtaaatctactcacttaaagattttcaaaatataattgtcactatagctgttaaacatgtcactatagttgtcacaaattcaccatgttgtacaatagatctttaacttatttctcctatctaactgagattttgtatcctttgactaacatctctctaacccatcatcccagctggtggaaattaccattctactctctacttctgtgtgttcaactcttttagattccacatatcagtgagatcatgtggtat

SEQ ID NO: 315289 - DNA, 576 bp, Homo sapiens
ctgactttcaaatttaggaatacttcatgtatcagtaaggctgctggaggcccagacttctcatcattattttaggcagtatgaaggagaaagagggaaaggcaaaatacaatttcctgagctgaatcagttgtcttaaaaccaccttcctagaaatctcattcaactcgtttattcttctctcactggctagaacttgtcacatgtaaataacaacrgtaagagaggatggtaaatttcataactaggtgtgttacagactcaaataaagtagagttacttactaacaagaaagggaaaaattgattttgcatggaaaatgggaaattttagtataaattgatacttttgcctgcaaatagcaggtaatctaaataaaaatgactccaatcttagataacagctatcttagattactgtcatctaaaaccttagataacagtaaataacaatatggtagttttagggttcagcatggttgtgtgatcctcgatgttggcatatcctcttgggcagtttcctcagggtccaagttccatacttcccttgtagactgccatgtgcacaggcagaaaa

SEQ ID NO: 315290 - DNA, 570 bp, Homo sapiens
tatctgcttttgtaaatgtcttttcaaatctttttattgttttttgcttgtttgtcttcttattactgagttgtattttccatgtattctggataaaagtgtagatatacagtacagatgcattgatgtgtgtgtgtgtgtgtgtgtttatgacctataaactgaactactatgtactctcccacagatctctgaaacagttcattcttcatcaatttgctttctttcttttcttcatgttgcttaatgtcaattgatttatcttcaagttcactaattcttctttcatcaatgttttttgggctatctcaactagttttttatttaagttttgtatttagatctagaatttccctttttatagtgttcatayctgttgagatttcccatatgcttactcattaaaatgttcctttaattctttgaatataggtacttttaatcatataaacatatttataatcgatgacttgatgtttgtctgctaatgcaacatctgtgggctttcagaggtatttcagaaagtagcaaactcaagtcttaacttacgcagctctgtctttccaggtt

SEQ ID NO: 315291 - DNA, 575 bp, Homo sapiens
agacagtaaggcaaagttttgaacagatttggggtttctttcctttctacatttctctcatttccataatttcatccagccccaatctctaaatttgttaccacaagttgatctggctgtggttttctgctgtcattaccaggacattgagtaatatcctcagggggaagaaaattagccaaaaactcagaactcttggtattgcagttgaagtttttctggagtaaactcttytctaagttccatttgcttttggatgttctggtgcctttaaatatatttttaaaaaattttctctgatatataacctttgacaaggttaaattatgactcattccaccaacattaccaaaattcactctaatatttcattttaacttaaaatacttaaaagatatttatttaggccaaagatttttgtttgtttctagcttgctgattagattctggttattattcttgcataaatcataaccataaatggtctttgttaatgtctagtttttgttactttgaagtggaatgataatttaaaatatttctgaagctatttgagtgccaaatcctagctgtta

SEQ ID NO: 315292 - DNA, 594 bp, Homo sapiens
attcaatattaactcaaacccaaacaattttcctgcgtctattacatagattgtttaagcctaaatccatattttcggtcccctaataaaatggaatgtccaacatctttttatagctyatttgacacccgtctatattcttcgatgtggtgtctgttaagatcttttgcccattttttaatcaggttatttttcttattattaagatttaaaatattttttatattttcgccaagagttctcttagctatatcttttgcaaatattttctttcattctgtgacttgtcttctaattctcttgagtttaataagtttttgtctttaaataaataattttagaccaacagaaatttgcaaagatagtatatagattcccatgtatgccattcccactttccttatttttagtatcttaagttcatatagaacatttgttataattaataaaccaatattatcattaactaaagtttatgctttattcagatttccttgttttttaccgaatgtcttttttctgttccaggatctcattcagggtaccacattatatttagtggtcatgtctccttaggctcctctacactgtgac

SEQ ID NO: 315293 - DNA, 522 bp, Homo sapiens
attaaaaaaacctagctccaaacatcacctggccagaatttgttcacattcctcccacatgcgaaatgtgctttttcccattctaagacctaaaaaagacttttytcattacttcatcagattgaaatccaaggcctaatcaaaattaagtccaaatgtggataagtctccatatttgctaccctttgagtataattcctctcatccagagactttaaactatgaaagatgagttctataacacacaccgaatgagcatactatggtgaggtggtgctagacaactgacaatagatacagtcatttaaaaagaaatacataacacgcctatatcaatcactggtctatagaatttctgaaatccacctgggcacacattataagatcactctgttctgtgagcagaaaataatacttgagctgggcccagttctgctttgtggcagtgtcagtatagcccattggtctccaaggatttgagctacagcttctaacattgtattccttcacataagaaatgcc

SEQ ID NO: 315294 - DNA, 545 bp, Homo sapiens
cactctcccagccaaagaaagtggtgagtgattgtgcgaccctgcccgggaagccatgcttcctcctatcgatctttgccacccgtggatcagtagatccccttgtgagcccatgccatcagggcctagggtctgatacagagagctgtgtggagtctcagcagagcacccactcaggcgcatacagagacccaggagttttacatactctggccttggggtccctggaaaggtgggagatccatctgtacataaccgtaagaaggggattaaatccaaggagtcattagcatcgttctgtgagtcccatttccacagcacttcacaagttaaagcccactggcttggaattccagtcagccaatggcaacaggctggggtccgcctgagacaagacaaagtccttgagggaagggacagccaccatgtctgcagttcagttgactcagtcattttagcctgccagckttggagagttcacacggtccggactaggaagggccttccacaatgcagcacagctgctctgccagatcatggtcaga

SEQ ID NO: 315295 - DNA, 574 bp, Homo sapiens
gctgttaggcaaatggtgtaaggagagagcagagagcttttttttggcatctgctgttcctcagttgttttcagttcaaaatagttctcatgccaaagtggtgtattttggagtgagatatttgatcccttacactagtctgctccaagttctttacacgtattaactcactgaatccttacaacagtcctttgtgttaagtattttcattattcccacttgctaggtaagaaacctcacatggagggggttaaaataaaaattttagacaaattaaacaattgaattgaacacagaacaattcaagaattggacaacccccgaacaagaataggttcagtgacttaggcacattggcmtggttggagagtatttatgaacagaaaaaggcaagtgatgtacaaaaaaaatgaaaggtccagaaacagtcagattggttactactccatgtttgccttatttgaacatggtttgaataacaatttgctgcctgtgagtgatatgtagttgaagtatggtggctgtgattagctgagacttggcttactgctataacagcaggttacagtcttgt

SEQ ID NO: 315296 - DNA, 605 bp, Homo sapiens
catttggtaagagttgctctaggaggaaaagagctactcacctctaaaagtatgtaagtagcaattaaaaacccacttgctgggcatgttgttaaaagggagatcaagtatgtataaggggaagttagactctaagactaattctccaattctataaaattcttaaaatatgaattcttcagaaaaaaaatactaagattaatgattttggattctgttgaatgtcctgagcaatggctttcacttctcctggacccttcactgtgcttcaaatagagccagacacagtatcaatcaacagtacacatttgttaaaattgaataagcttcaaatcatttagagtatatgtatctcattaagaaaattaagacaatgaagcaattgactttctactcaatttcctctgctgccaaacttttcttatttctattgcaattctcatttactttgcttaagttggatgagcttcctctctccacctattcaagactmatctcatgcttccaattttcttcactcacatataactaaaaccacatcctcttttgcctttcccattaactaacttctttccttacttgtttccttcttttgcccttcttcc

SEQ ID NO: 315297 - DNA, 565 bp, Homo sapiens
caggccctaaagcctgacagtcattctcatctccttaatttgttagtccatgaccctgggaaagttgcttaatacctgtgagcatcaggttcccaatctggaaaatagggataataatagtctctaaatcatagggcagttaagaaaattaattgarttataatatttgaaaaaccctcagaacaggtgcctggctcttagttcatacaatgcagtgcaattgtttgatacattaaagaaaataataataaaatcaacttgtcttgtctgcaaaggcttcacagtctggggtacagtaatatacaaataaacaaaagagtatgacaaatatttgatcttaatattcatacaatttggagtctagaataccaaggatgatgcaaagtatgttttcctggaaacatggaaatctcacgcatttttctcagaaaagtgtcttccaaaccactgtgaggaaggagctgactcatcatctcccaagtagtagaggtggatgaaatcatgacatgagttctttgtcatcctctacaaaatctagtgtattagaaatgggaaaaagacaatt

SEQ ID NO: 315298 - DNA, 611 bp, Homo sapiens
atagggataataatagtctctaaatcatagggcagttaagaaaattaattgagttataatatttgaaaaaccctcagaacaggtgcctggctcttagttcatacaatgcagtgcaattgtttgatacattaaagaaaataataatraaatcaacttgtcttgtctgcaaaggcttcacagtctggggtacagtaatatacaaataaacaaaagagtatgacaaatatttgatcttaatattcatacaatttggagtctagaataccaaggatgatgcaaagtatgttttcctggaaacatggaaatctcacgcatttttctcagaaaagtgtcttccaaaccactgtgaggaaggagctgactcatcatctcccaagtagtagaggtggatgaaatcatgacatgagttctttgtcatcctctacaaaatctagtgtattagaaatgggaaaaagacaattcatttttcatagttcctgcatgtactcttttttgtgggctggagtctctaatgctttattttaggccatttccagttcttctataagatcaatatttcaaactaacaatagattctggacatgtgtacaagttcttttgtgtgtgtgtgt

SEQ ID NO: 315299 - DNA, 558 bp, Homo sapiens
gtaaaaaatgagatgaaagattgaggaacagctaattcaggaactatcagaagaaaataatctggtagaattgtgaaggagcatttgtactctcagtattaaattgcaggatgcaattcagggtcctagtgtggtctatacaacaccttacatttaagagtaagatgaagctttccacagtatcaagcattcacagtcatcatctcttattctactttcaattcaccctccactctagacatacctgcctctcagtgtgacaccccttcacaccatttttcatatgtctctctctctctctgtgtcacccgggctagttttctcacttcttttctggaaactgacatcaagttattcagccactgcttgttcctgcagctcattcaatctttcattcattcagctatrtaactgaatgtcatcatgtaactaagtccaccagccagtgcttattatgtgccaggtgcagaaagtactccttaacacatcatattttgtgtattctaacaatggcattataagatacatatttttatcccatttgtatacatgaatgta

SEQ ID NO: 315300 - DNA, 599 bp, Homo sapiens
gaacgcttttggtgtctccaaagtctatgccattaacgcctgggctctatggccaatatgtgttaggaataggacctgggaatattgaacttgaaacagccagctcccctctggagcttcatcaagttcagtgggctagaaagtgaaactgatgatttctatagaggaatggagaccatagtggggtggaaggtcagtttgggatactgggaggaaaattgatcttgccaggcttttgaacacaatcttgaatattgggtgaagaaagccagaaaatkgtgtctcaggcagagttcatagagtgtattaagatatacactggggaactgaaaacgattcactggacttggaaaacaaggtgtaaggtgagaagttcataaggaaataatgccataaagttaggggaactagtataaaaaaattggtatgccatgctaagaatttaaaaaaaaaattatccagagaacaatgtgtagccatctgtaaaacatctggaaataattgacttcttttgagacagaatacgtggcagacaattaactagttgcaagacggtatgatattgtaacgtgttagaggttttcatgacacgccgaagg

SEQ ID NO: 315301 - DNA, 599 bp, Homo sapiens
gaacgcttttggtgtctccaaagtctatgccattaacgcctgggctctatggccaatatgtgttaggaataggacctgggaatattgaacttgaaacagccagctcccctctggagcttcatcaagttcagtgggctagaaagtgaaactgatgatttctatagaggaatggagaccatagtggggtggaaggtcagtttgggatactgggaggaaaattgatcttgccaggcttttgaacacaatcttgaatattgggtgaagaaagccagaaaatggtgtctcaggcagagttcatagagtgtattaagatatacactggggaactgaaaacgattcactggacttggaaaacaaggtgtaaggtgagaagttcataaggaaataatgccataaagttaggggaactagtataaaaaaattggtatgccatgctaagaatttaaaaaaaaaattatccagagaacaatgtgtagccatctgtaaaacatctggaaataattgacttcttttgagacagaatacgtggcagacaattaactagttgcaagacggtatgatattgtaaygtgttagaggttttcatgacacgccgaagg

SEQ ID NO: 315302 - DNA, 581 bp, Homo sapiens
gtcttttctacagctctaatcaccagttctatagattaaacaaattaatgtttttacaggtcttgtatggagattgatgaaaatactatatcgcagttttcctttggagtagcaaagagccacagatcaaggacattttcctttcaaaagctagataagcacattgcacttgtgatagtatttgcttttttaacagatgaaatagacttatgtgaacttattgacataatagaaaggaataatgttattcacagtccaaaagataaacataataatatagttttatacaacattgctaagaaccctttagtcctttatcagtatcaaaacacaagaatctgtgacccatgaagacttacctgggattcaggcacccatgtgaagaaagtcaacatagtatttaataacatggataaaataacaaaaagaccctataggagatgggatgtgggacaggcagaagaggaactagagggcctgtcatatgagtacrgaacacagggaactgaaagccatatcttataagataaatgaaggcaacaaacagagtataaatagacttgttcaataaatgctagaat

SEQ ID NO: 315303 - DNA, 593 bp, Homo sapiens
acttctttccttctgaaataattaccttttcactcactattatgaactaatttcatatacattttagttgcatgaattattatatacaggaaaaagatacagtttacatttattattaacmcagtagtatttgaaatatttaattttagaaagacattattgtgagatgatgttaaattttcttattgcaaatgatttcactattggaaaagcaaggaaatattgagtaattatagctctgttgcaatttacattccttatcaaggcagtggcttttgttcaaatacaaactcattgggagtggatttgttactgaccatgtaacaggttcaaataacatctttctttttccaaagctatagaatatttgcacttccacttacagcctgattttccacctctgtaaaatggaggttgtatcaatatttccgacattcattttagacctggacctattctcaagagaggcccttttaaatgtgctggtaaaaaattagtcttatggcaaattaccataaggtaaaatcttgctgtgttctgactacatgtatactataaccttcatcaaatcaagcgtggggagaaaaagaaac

SEQ ID NO: 315304 - DNA, 593 bp, Homo sapiens
acttctttccttctgaaataattaccttttcactcactattatgaactaatttcatatacattttagttgcatgaattattatatacaggaaaaagatacagtttacatttattattaacacagtagtatttgaaayatttaattttagaaagacattattgtgagatgatgttaaattttcttattgcaaatgatttcactattggaaaagcaaggaaatattgagtaattatagctctgttgcaatttacattccttatcaaggcagtggcttttgttcaaatacaaactcattgggagtggatttgttactgaccatgtaacaggttcaaataacatctttctttttccaaagctatagaatatttgcacttccacttacagcctgattttccacctctgtaaaatggaggttgtatcaatatttccgacattcattttagacctggacctattctcaagagaggcccttttaaatgtgctggtaaaaaattagtcttatggcaaattaccataaggtaaaatcttgctgtgttctgactacatgtatactataaccttcatcaaatcaagcgtggggagaaaaagaaac

SEQ ID NO: 315305 - DNA, 570 bp, Homo sapiens
agtaggcagctgtaattctaacctgtagaattaaacatttagttattgtctgaataaattatcatttgaatgtgctattcatttcttttagaagagcagtacaattattaggagtaaggatagaatggtgaaaagtattaggtatccaagtatcttaacacttggtttgccactaacaagctatgttaccttagtcacttaacttctctaggtgtcaaatttttcatttctggaaataattatttagatttaaatatctcaaaggtcctttctttttatattaaatttatgattctattcaaagtcatattaatagtgacaataagtatctgaacatttagcatgtactgttttagatatacaacttttaaaattactgtgaattgatgcccmtgaacagaagtaaaagctgtttttctttctttacataaattcatttgtaaagaaaaactgattttctatttttctaagtatattataagattgctctgaggaaaataaatatttaaattatcactagctggtattcacacctaaattgtcaaaggggtatgaacatttcaaaatata

SEQ ID NO: 315306 - DNA, 247 bp, Homo sapiens
ttctactccaggccctggctcctggatggcatttctggactcacttgagcccagggggaaacgtgcctccctgaagggaaggacacagtctggctggccccatcaggtgcttattgtagaaaactacagccttgagttaacatagatggtagccaggcagtggttaccacaggccgtaagggagatccagtgctctgctggcttcaagtctaaccaagwgcacttctagtagtggtagccacaaggg

SEQ ID NO: 315307 - DNA, 597 bp, Homo sapiens
attcctaaccacatttattcaattggttctgataggaaggtatttattcttcttctaaaggttgagcacaaaatagggctgagtsattatattcctctctgtcatctgtcattatgtgtctaggaaagggcctcgcttgtcctggattttattcttttatttaacacagttatcaaagcccattattctgtcctcagcatttttataggtctctgcacattttgtgcttaacctttctgaccatattcttgcagaatattttgtatttgtccttcattgtacgtattttgctgcctttgcatacatctctgaagacgatatggtcatgagaggtttcccagtgcagccacatagttgtttttagatgcctctgctgttccaaatgttgttaaaaatccttccttcttatttagcctttttgtgtcttatggtctctggcttctcatctggcgtatggaaatctgatttctaaagtcaagagtgcctttgaataccaaaccttccctcctttgtctttctcctcactttcagtgcctttttgggtcagtatgtgccagtaaaatacacagcactttcttcaagagcagtgttgccaaa

SEQ ID NO: 315308 - DNA, 651 bp, Homo sapiens
atctgtctaacacttcttgtcaaaacaaataagagtaaagatctttactaaatttattcattccttggtgtcaatgtttcctgaatttttcttaagtttctatatccatgtattttaaattgatctcaaaaaccaacgttgtaccagatcataagttgcccatccagtgtaaagattgtggttgctaagataacaaatctcataacttagatgtccctccatttccaaaatagtgtcaattcattattattgtcataatcttgaaattgatgtttgcaatataggcagactgttgagctttcagtctgttggagaacattatattttattaggctcattataaagatggaaaagtttaccatgctgttcattaggaacataaagataacatcttgagtttcagatttcaagcatattactaaagacatatcttttggtaacagasaagtcacggtgtggaattatttaaaaattatagtttatatatgattgtcaataaagtgaaaaattattaatccattgacataatttagtttttaaaaggtttgctgacttattgtctgaaagctagtctctctacccccccaatacattatatagcatttagttatttttattttatggcattaagcttctgaaaccacatggaat

SEQ ID NO: 315309 - DNA, 564 bp, Homo sapiens
tataatataatatatacatttacctaaagaagctatttatatcattatgctgtacattgggtaacaaaagttcttaagtatgcattacagtaagaagcagtcttcatttatgttgtatatgcagggaataaatccagttcttattattgcagaaagcataagggttccattttagttccctaagaacacagtaagatatcaagaaagaagatatactgttgacacgtttgctttcagattagtcattaattctgagttcgtttgatagctaagaaaattaaatcatcaaaatgtccacactgaactcttctatccagtccaaartgctacctatagtagatctacaaatgcctcaatctctctattaagagaaatggcttttagtggcacaatttgggatgataggcatttattaatcatacactctagttaatatactaattaatatgttatctacatagggattaccaaatatattaaaatagattacagtaaagtaaataatattaaaatgtctgcaactacattttgctgcttctatatttattttatttaattctctca

SEQ ID NO: 315310 - DNA, 579 bp, Homo sapiens
tgaagggtcatttgaaataaagtgaaaagcattatatatccaattccttttagccccaacagtatcattaactcaatctgtcctacccctcagaattgaaagaaagagtggtaggtagygaggtgggtaaaatgttttatgatattatttttccaaaacagaaattaatcagaaaaggataactctgaaggttttattcagtgacaatctgacatgaagtcaatgggagttgaatctgaatgaggagatgctcaattccctttccatatggtgaactgatatcaatgaaatcttccacagttagccaagaaaaccttctggttatcatccaaggatgcatttctgcacagcctccctcagtcaataagtaaattttgcagtgatggagaggtcaggttacctagtaaataatgtatctagtcatttccttcaaagagcatatagtctaaaaatggtagttagggaagagacacaggaactactagaaatacataattatactttcttgcctgaacatacaatatgcacccaatcaatgttgaatcaatattgaattaaactgaaagacgttgcataagt

SEQ ID NO: 315311 - DNA, 579 bp, Homo sapiens
tgaagggtcatttgaaataaagtgaaaagcattatatatccaattccttttagccccaacagtatcattaactcaatctgtcctacccctcagaattgaaagaaagagtggtaggtagcgaggtgggtaaaatgttttatgatattatttttccaaaacagaaattaatcagaaaaggataactctgaagsttttattcagtgacaatctgacatgaagtcaatgggagttgaatctgaatgaggagatgctcaattccctttccatatggtgaactgatatcaatgaaatcttccacagttagccaagaaaaccttctggttatcatccaaggatgcatttctgcacagcctccctcagtcaataagtaaattttgcagtgatggagaggtcaggttacctagtaaataatgtatctagtcatttccttcaaagagcatatagtctaaaaatggtagttagggaagagacacaggaactactagaaatacataattatactttcttgcctgaacatacaatatgcacccaatcaatgttgaatcaatattgaattaaactgaaagacgttgcataagt

SEQ ID NO: 315312 - DNA, 538 bp, Homo sapiens
ggatcatcagtaaggattctccagagaacctgagccaatagattagatatagatatagatatttatctttctatatttatatcagatatttgtttatgtccatatctatatttatacttgcacctatatttatatctctgtatattaatatccatctatagataaaatttatttttaagtgattatcacactcaatttggggagcaggcaagtatgaaagctgtaacaagttcaacaggttagaaacttaggcaggagttgattttgcagtcyttaggcagattttcttcctctctaaaaaagctgagattttgcccttaaggccttcaaccactaggtgaggcctacccacattatcaagggtgatcttctttacttaaacccagtggactgtagatgttagtaaatctacaaaatgctgtcacagcaacacctagattagtgtttaattaaataacagtgcctgcccaagttcacacataaaattaaccatcacagatgataaagaaataatctgaattcgctgaaacgggactgg

SEQ ID NO: 315313 - DNA, 414 bp, Homo sapiens
tgtgaggctactgttccaggccctagctcctggaaaacatttatagacacactgagccagaaggaaacctgctgcctggaagggaagaactcagtcttggcagcattcatcacctgctcactgaagagcccttgagccctgaataaccagctctggtattcaggtattacatcgaaggccttgggtgaacctctgagacttgctggcttcagagaaggctcagcacattttcaactgtggtggctacaggataagcctcctacttgagaaaagcagaaggaaaagtaaaggggaatttgctcrttttaagtaccagcatggccacaaggaatttgagcaccaagtgggcacttgagttctccatttccagaacttcactcttgaacaagatgtctgcacctgccctgagccaga

SEQ ID NO: 315314 - DNA, 565 bp, Homo sapiens
  misc_feature (1)...(565): n = A,T,C or G
nnnnnnnnnnnnnnnnnnnnattacattcaaacacatgttacaaggccaggcacagtggttcacacttataatcccagtgcttttggaggccaaagcaggaggatcacttgaggccaggagttcaagaccagcctgggccagtaccatgatctattctraagaactgcaacattactagaaaaatagtcaaatatttttgagtaaaggtcagtaaacgcatcagccctatttataatcatgcaacatagaatgattatgctgttacactgaattatgagatgaagtgaaacccaatgctatttttgtaagctattgttatgtcttcagttgaaatattaaacttctttttaatatagatatatatccaatgtaattctttaaacacagatgatagtcatctacatcactattctatcttatttgtttgaaagcagtggattttgttgattgtgcaacaaaagcaatatgcattagccaaatgagttccattgtacattgaaataaattgtgttagtatttacatatacccactctaatatgctttcaatataaattaatcatgtc

SEQ ID NO: 315315 - DNA, 565 bp, Homo sapiens
  misc_feature (1)...(565): n = A,T,C or G
nnnnnnnnnnnnnnnnnnnnattacattcaaacacatgttacaaggccaggcacagtggttcacacttataatcccagtgcttttggaggccaaagcaggaggatcacttgaggccaggagttcaagaccagcctgggccagtaccatgatctattctgaagaactgcaacattactagaaaaatwgtcaaatatttttgagtaaaggtcagtaaacgcatcagccctatttataatcatgcaacatagaatgattatgctgttacactgaattatgagatgaagtgaaacccaatgctatttttgtaagctattgttatgtcttcagttgaaatattaaacttctttttaatatagatatatatccaatgtaattctttaaacacagatgatagtcatctacatcactattctatcttatttgtttgaaagcagtggattttgttgattgtgcaacaaaagcaatatgcattagccaaatgagttccattgtacattgaaataaattgtgttagtatttacatatacccactctaatatgctttcaatataaattaatcatgtc

SEQ ID NO: 315316 - DNA, 565 bp, Homo sapiens
  misc_feature (1)...(565): n = A,T,C or G
nnnnnnnnnnnnnnnnnnnnattacattcaaacacatgttacaaggccaggcacagtggttcacacttataatcccagtgcttttggaggccaaagcaggaggatcacttgaggccaggagttcaagaccagcctgggccagtaccatgatctattctgaagaactgcaacattactagaaaaatagtcaaatatttttgagtaaaggtcagtaaacgcatcagycctatttataatcatgcaacatagaatgattatgctgttacactgaattatgagatgaagtgaaacccaatgctatttttgtaagctattgttatgtcttcagttgaaatattaaacttctttttaatatagatatatatccaatgtaattctttaaacacagatgatagtcatctacatcactattctatcttatttgtttgaaagcagtggattttgttgattgtgcaacaaaagcaatatgcattagccaaatgagttccattgtacattgaaataaattgtgttagtatttacatatacccactctaatatgctttcaatataaattaatcatgtc

SEQ ID NO: 315317 - DNA, 565 bp, Homo sapiens
  misc_feature (1)...(565): n = A,T,C or G
nnnnnnnnnnnnnnnnnnnnattacattcaaacacatgttacaaggccaggcacagtggttcacacttataatcccagtgcttttggaggccaaagcaggaggatcacttgaggccaggagttcaagaccagcctgggccagtaccatgatctattctgaagaactgcaacattactagaaaaatagtcaaatatttttgagtaaaggtcagtaaacgcatcagccctatttataatcatgcaacatagaatgattatgctgttacactgaattatgagatgaagtgaaacccaatgctatttttgtaagctattgttatgtcttcagttgaaatattaaacttctttttaatatagatrtatatccaatgtaattctttaaacacagatgatagtcatctacatcactattctatcttatttgtttgaaagcagtggattttgttgattgtgcaacaaaagcaatatgcattagccaaatgagttccattgtacattgaaataaattgtgttagtatttacatatacccactctaatatgctttcaatataaattaatcatgtc

SEQ ID NO: 315318 - DNA, 552 bp, Homo sapiens
gagccaacaatctcactactgggtatataccccaaacaaaggaagtcagtttatcaaagagatatctgcactcctgtgtttattgccacaccgtttaccatagctaagatttggaagcaacmtaagtgtccatcagcagatgaatggataaagaaaatgccgtatgtatataccatggagtattattcggccataaaaaaggataatatcctgtcatttgtaacaacatggatgagtctggagatcattgtgttaagagaaataaatagggcacagaaaggcaaacactgcatgttctcacttgtttgtgaaatctaaaaatcacattaattgaacccatggacatagagaatagaaggatggttaccaaaagctgggaagggtagtgggtggttcaggtgggatgtggcaatggttagttagtacaaaacaatggaaaaaatgacaagacctactatttgatagcacaataggatcactatagtcaaccataactttacatttaaaaataatgcatctggattatttgtaactcaaaggataaatgtttga

SEQ ID NO: 315319 - DNA, 552 bp, Homo sapiens
gagccaacaatctcactactgggtatataccccaaacaaaggaagtcagtttatcaaagagatatctgcactcctgtgtttattgccacaccgtttaccatagctaagatttggaagcaacctaagtgtccatcagcagatgaatggataaagaaaatgccgtatgtatataccatggagtattattcggccataaaaaaggataatatcctgtcatttgtaacaacatggatgagtctggagatcattgtgttaagagaaataaatagggcacagaaaggcaaacactgcatgttctcacttgtttgtgaaatctaaaaatcacattaattgaacccatggacatagagaatagaaggatggttaccaaaagctgggaagggtagtgggtggttcaggtgggatgtggcaatggttagttagtacaaaacaatggaaaaaatgacaagacctactatttgatagcacaatakgatcactatagtcaaccataactttacatttaaaaataatgcatctggattatttgtaactcaaaggataaatgtttga

SEQ ID NO: 315320 - DNA, 501 bp, Homo sapiens
attttatctatggcctaggtgggagtcatcaagcctcgtgatcacaatattaatgctttagcatgctggtaagcagcagtgctaagcaaagtccagccatattggctaggtgtttttcattgggagagtaattaagttaccttgcttagtgtttttgaaggcgctggtaccaaatacttctcctttacttttgtcatcaatgcctgggcgatgaactgccatgaatattcaccgtgatatctttgagggtcaggagagcagcaagagaagcagcagcacaggagatgggtaaggctgcctctttgcttgagcaacaaaaactgttgttaggcagctgggatgccatagttaattgtaccctgggatggtagtcttcttcttttccactaacctcacaacgggccattctcaggtccattgtaaggatgcrcaatgacaaacaatgtctatatagtggtggtcatggggctagacacagtgctcagaaagctctaacctgtc

SEQ ID NO: 315321 - DNA, 585 bp, Homo sapiens
aactaattttttctcttgagatgaataaatcaatatatacatttgaactttatgattttgtcaccaacccacaaaacgcattttgtcttctaaccctagctttgaaaagtcagtcacatcactgaacaccattcactaaataataaaggtgaagaataaacaatgaattctacattaataataataaatttcatattgcattacagtctatagaaggtttttaaatatgtactctcatgatcatctgatctacccccaaaatctcagaaggaaaccatagatgaaaaatcataattttaaaatgaaaaaaacataagtctcatagaaggtaagtgttaacaattactggccgtgaaaattagggccacattaaaaactcaagttttctgaatatgtgtcaatcagattgartaagttgacattgcgtaccagcattccatgaccttagcatatgaaaagtttacttctcactcacaccaagtccactctgagtttgggtttatctcctggacttttgcccatttcatcattcagtattctgggatactggctgagtctcgtttcctcacctccaatataacaaac

SEQ ID NO: 315322 - DNA, 570 bp, Homo sapiens
tgtgaagcatgaattcatccttaaaatgacactaatataatctgcaaacttattttgtataaatcaacaaaygcatacaaatggaaataaattatcgacctaaggtgaagagacaaaattattacttaagcaccatcctctgctaattgataagcacttactgaaataatattcttcatacaaatattttttaaatattctccttaccccattatcattttttaggaaagtggtatgtttattatggctgtcattaattaaaatttggcctacttttcctctttccaaagtgcaggtgaacttttgaaatctaactgaaataaattacaaatgataatctttgccttccttttctgaaagaaactaaatttcttttaaaatccattttttatagagtctcccacacgtgcccattctgagaaatgaatttccaagattgtctcagtaaagtcatctttccttgctaatttacactgagtgaattttgcacccctatatgagggtgataacatcaaaataaattgctacagtaccaccagattgcctcccaactttaaagtttcataccag

SEQ ID NO: 315323 - DNA, 570 bp, Homo sapiens
tgtgaagcatgaattcatccttaaaatgacactaatataatctgcaaacttattttgtataaatcaacaaacgcatacaaatggaaataaattatcgacctaaggtgaagagacaaaattattacttaagcaccatcctytgctaattgataagcacttactgaaataatattcttcatacaaatattttttaaatattctccttaccccattatcattttttaggaaagtggtatgtttattatggctgtcattaattaaaatttggcctacttttcctctttccaaagtgcaggtgaacttttgaaatctaactgaaataaattacaaatgataatctttgccttccttttctgaaagaaactaaatttcttttaaaatccattttttatagagtctcccacacgtgcccattctgagaaatgaatttccaagattgtctcagtaaagtcatctttccttgctaatttacactgagtgaattttgcacccctatatgagggtgataacatcaaaataaattgctacagtaccaccagattgcctcccaactttaaagtttcataccag

SEQ ID NO: 315324 - DNA, 570 bp, Homo sapiens
tgtgaagcatgaattcatccttaaaatgacactaatataatctgcaaacttattttgtataaatcaacaaacgcatacaaatggaaataaattatcgacctaaggtgaagagacaaaattattacttaagcaccatcctctgctaattgataagcacttactgaaataatattcttcatacaaatattttttaaatattctccttaccccattatcattttttagkaaagtggtatgtttattatggctgtcattaattaaaatttggcctacttttcctctttccaaagtgcaggtgaacttttgaaatctaactgaaataaattacaaatgataatctttgccttccttttctgaaagaaactaaatttcttttaaaatccattttttatagagtctcccacacgtgcccattctgagaaatgaatttccaagattgtctcagtaaagtcatctttccttgctaatttacactgagtgaattttgcacccctatatgagggtgataacatcaaaataaattgctacagtaccaccagattgcctcccaactttaaagtttcataccag

SEQ ID NO: 315325 - DNA, 566 bp, Homo sapiens
accacatgcatagcctccccactatcaacatyccgcagcagagtggtatgtttgttacagtccatggacccacattgtcacattatcacacaacatcagtagtttacgttagagttcaccgttgatgttgtacatttcattggtttggacaaatgtataatgacctgtatccaccattgtagtatcacacagtagtttcacggctataaagaatactctgcacttggccaattcattcttccctcctccctaacccttggcaacctctgatctttttactgtctccatagttttgctttatccagaatgttatatagttggaatcatacagcatgtagcctcttaagattggcttctttcacttagtaatatgtgtttaagttttctctatgtcttctcatgattccatagctcatttccttttagcagtgactgattttccattgtctgaatgtcccacagtttatccattcatctacctaaacacatcttagttgcttccaagttttggttattatgaataaggctgctataaacatctgtgtatatgtgttttgtgtgaatgt

SEQ ID NO: 315326 - DNA, 566 bp, Homo sapiens
accacatgcatagcctccccactatcaacatcccgcagcagagtggtatgtttgttacagtccatggacccacattgtcacattatcacacaacatcagtagtttacgttagagttcaccgttgatgttgtacatttcattggtttggacaaatgtataatgacctgtatccaccattgtagtatcacacagtagtttcacggctataaagaatactctgcacttggccaattcattcttccctcctccctaacccttggcaacctctgatctttttactgtctccatagttttgctttatccagaatgttatatagttggaatcatacagcatgtagcctcttaagattggcttmtttcacttagtaatatgtgtttaagttttctctatgtcttctcatgattccatagctcatttccttttagcagtgactgattttccattgtctgaatgtcccacagtttatccattcatctacctaaacacatcttagttgcttccaagttttggttattatgaataaggctgctataaacatctgtgtatatgtgttttgtgtgaatgt

SEQ ID NO: 315327 - DNA, 618 bp, Homo sapiens
gtgggcctctaaaatggcccccttgggtgtggccgtcttctatggtygaaactgtagggatgaaataagccccagtctcccatagtgctcccatgcttattaggacaaggaaattcccgcctaataaattttggtcagaccagttgctctcaaaccctgtctcctgataagatgttatcaatgacaatggtgccggaaacttcattagcaattttaatttcgccctgtcctgtggtcctgtgatctcgccctgcctccatttgccttgtgatattctattaccttgtgaagcacatgatctctgtgacccacaccctattcgtacactccctcccctttcgaaaatcactaataaaaatttgctggtttcacggctcagggggcatcacggaacctaccgacatgtgatgtctcccccgtatgcccagctttaaaatttgtctcttttgtactgtgtccctttatttctcaacctggctgatgcttagggaaaatagaaaagaacctacgtgaaatcgggggcacattccccgatactccttgtagagttttttacctccttgcttagatgtatttctagatactgtacttttttgtgtgtagctattgtaaatagga

SEQ ID NO: 315328 - DNA, 618 bp, Homo sapiens
gtgggcctctaaaatggcccccttgggtgtggccgtcttctatggttgaaactgtagggatgaaataagccccagtctcccatagtgctcccatgcttattaggacaaggaaattcccgcctaataaattttggtcagaccagttgctctcaaaccctgtctcctgataagatgttatcaatgacaatggtgccggaaacttcattagcaattttaatttcgccctgtcctgtggtcctgtgatctcgccctgcctccatttgccttgtgatattctattaccttgtgaagcacatgatctctgtgacccacaccctattcgtacactccctcccctttcgaaaatcactaataaaaatttgctggtttcacggctcagggggcatcacggaacctaccgacatgtgatgtctcccccgtatgcccagctttaaaatttgtctcttttgtactgtgtccctttatttctcaacctggcygatgcttagggaaaatagaaaagaacctacgtgaaatcgggggcacattccccgatactccttgtagagttttttacctccttgcttagatgtatttctagatactgtacttttttgtgtgtagctattgtaaatagga

SEQ ID NO: 315329 - DNA, 521 bp, Homo sapiens
gtggtaataaatgttgtttttaagccaataaatgttgggacatttgttatacagcgatagctaactaatggagaggaaggacttggagatctgcagttcttgactttctaaaatagagaagaggccttgaaaagccctccttgagtctggggtcctgggtctcacctggcatggatctcattagattccagagtcagayagaattctggggaggaggggaaccttacctgtctgttttcactgatgtaacccagggtccagggcagtgtctggcatatagagagggattcaataaataaatatcagtggacacaggaatggctccatgtttgcagtaagattttggttatgacacagtacaacccacatggaaagataaatttaaaaagcatccctgaggcccagaaaagaaagttttttaaatccctccagagtgagtaggggctaaaagcaggggttcaagggaggaggccacacaggcccccaaaagcataatgaccagaggtgtttcctcaccgagt

SEQ ID NO: 315330 - DNA, 521 bp, Homo sapiens
gtggtaataaatgttgtttttaagccaataaatgttgggacatttgttatacagcgatagctaactaatggagaggaaggacttggagatctgcagttcttgactttctaaaatagagaagaggccttgaaaagccctccttgagtctggggtcctgggtctcacctggcatggatctcattagattccagagtcagatagaattctggggaggaggggaaccttacctgtctgttttcactgatgtaacccagggtccagggcagtgtytggcatatagagagggattcaataaataaatatcagtggacacaggaatggctccatgtttgcagtaagattttggttatgacacagtacaacccacatggaaagataaatttaaaaagcatccctgaggcccagaaaagaaagttttttaaatccctccagagtgagtaggggctaaaagcaggggttcaagggaggaggccacacaggcccccaaaagcataatgaccagaggtgtttcctcaccgagt

SEQ ID NO: 315331 - DNA, 658 bp, Homo sapiens
tgtagtcccagctactcagaggatgaggtggaaggatcagttgagcccacaaggtggaggcggcagtgagctgtgattgtgccactgtacacagcggcactgtacacagccttggtggtggagtaagacctaatctaaaaaaaaaaaaaaaaaaaaagaaagaaagaaaagaaaagaaaaagagrgggacagaaaaggaaatagcagagcaggtcaagccagtcaagccaagcctgacctggcccacctacagcacaatcagataagtcagagggtttacccacactccgttctttctccctgtcacaagcaaatgagaaaggggaagggtgggggcatgctaggattgatgaatggggcaaccaagcccagctctccactggctggaaattagggccaccccaggaaactcaaaagccaaggaagaaggcagaagaaaaagctaaggaggaagattgctcctcaagagttcatgagaaggaaggcatgtgacagctttgtgacccattctccatcttcacctcaggacctttctactgaaaagaccctttcagacaatctgtccagaaacaaacacatcaaaagcacaaataataagtgaagtgactttaggagatgaggaatcatgctagttcctggagagataaatggtggcagg

SEQ ID NO: 315332 - DNA, 658 bp, Homo sapiens
tgtagtcccagctactcagaggatgaggtggaaggatcagttgagcccacaaggtggaggcggcagtgagctgtgattgtgccactgtacacagcggcactgtacacagccttggtggtggagtaagacctaatctaaaaaaaaaaaaaaaaaaaaagaaagaaagaaaagaaaagaaaaagagagggacagaaaaggaaatagcagagcaggtcaagccagtcaagccaagcctgacctggcccacctacagcacaatcagataagtcagagggtttacccacactccrttctttctccctgtcacaagcaaatgagaaaggggaagggtgggggcatgctaggattgatgaatggggcaaccaagcccagctctccactggctggaaattagggccaccccaggaaactcaaaagccaaggaagaaggcagaagaaaaagctaaggaggaagattgctcctcaagagttcatgagaaggaaggcatgtgacagctttgtgacccattctccatcttcacctcaggacctttctactgaaaagaccctttcagacaatctgtccagaaacaaacacatcaaaagcacaaataataagtgaagtgactttaggagatgaggaatcatgctagttcctggagagataaatggtggcagg

SEQ ID NO: 315333 - DNA, 658 bp, Homo sapiens
tgtagtcccagctactcagaggatgaggtggaaggatcagttgagcccacaaggtggaggcggcagtgagctgtgattgtgccactgtacacagcggcactgtacacagccttggtggtggagtaagacctaatctaaaaaaaaaaaaaaaaaaaaagaaagaaagaaaagaaaagaaaaagagagggacagaaaaggaaatagcagagcaggtcaagccagtcaagccaagcctgacctggcccacctacagcacaatcagataagtcagagggtttacccacactccgttctttctccctgtcacaagcaaatgagaaaggggaagggtgggggcatgctaggattgaygaatggggcaaccaagcccagctctccactggctggaaattagggccaccccaggaaactcaaaagccaaggaagaaggcagaagaaaaagctaaggaggaagattgctcctcaagagttcatgagaaggaaggcatgtgacagctttgtgacccattctccatcttcacctcaggacctttctactgaaaagaccctttcagacaatctgtccagaaacaaacacatcaaaagcacaaataataagtgaagtgactttaggagatgaggaatcatgctagttcctggagagataaatggtggcagg

SEQ ID NO: 315334 - DNA, 658 bp, Homo sapiens
tgtagtcccagctactcagaggatgaggtggaaggatcagttgagcccacaaggtggaggcggcagtgagctgtgattgtgccactgtacacagcggcactgtacacagccttggtggtggagtaagacctaatctaaaaaaaaaaaaaaaaaaaaagaaagaaagaaaagaaaagaaaaagagagggacagaaaaggaaatagcagagcaggtcaagccagtcaagccaagcctgacctggcccacctacagcacaatcagataagtcagagggtttacccacactccgttctttctccctgtcacaagcaaatgagaaaggggaagggtgggggcatgctaggattgatgaatggggcaaccaagcccagctctccactggctggaaattagggccaccccaggaaactcaaaagccaaggaagaaggcagaagaaaaagctaaggaggaagattgctcctcaagagttcatgagaaggaaggcatgtgacagctttgtgacccattctccatcttcacytcaggacctttctactgaaaagaccctttcagacaatctgtccagaaacaaacacatcaaaagcacaaataataagtgaagtgactttaggagatgaggaatcatgctagttcctggagagataaatggtggcagg

SEQ ID NO: 315335 - DNA, 604 bp, Homo sapiens
catatcagttaatgaccatttcgttcataaattcattcattcattcattcacagccctctggattatatataccagggaacaaaacaggttaaaaaaatctctgttcttgaggagctaaaattctagtaggtggagaataaacataataaataagtaaaatacatggtattttaagccctttggaaaacacacaacatggtagggagatatggagagagcagactgcaattttagttggggatggttctgtgtcagtctcactgagaaggtgactttcaaaggcttgcaaaagaaaagtaggttagccaagcaaagggagtggcctgggcaggcagaatgaatggtgcaggagtcctgaagagrgagagaacaagtgggaggggaggggtgggggaacagcagtgcagctgtgagagggatgggggcccagtgagagtgaggtcagagaggtcatggggtggaggggtacagattacatggggtctcctggaccattatgaagatcttgacttagtctggctgaagggggagccattgcaggattttaaatgaagaactgttggcctctgacttttgaaggtcactctagctgccatgttgaga

SEQ ID NO: 315336 - DNA, 660 bp, Homo sapiens
attgggttgttttaaacatgaatgaacatggaaagaaaacatagatatttagcatattatggctcctgacaccgtccccggggcactttcagtaaccacaacacagggaccctgtaaccttgagcttcaaccatgtttgaagactgcataaaggggtcttctactcaacctaatcttagacttgggattttcatgatgcttccctttcaccttctcctttaaaatctttttatcaataccttgtctcgttttcacatataatattctttacacatgcccagctatttctttattttcttttttaaaaagagtaaatgcaaataataatcttctgttttaaaaccttctcggtttttgagcctatctatctggaattatagaaataccctgtcagtttggtttccaagcctcctgcagagtgagacagggtctcaccctgtcccaggctggagtgtagtrgtgtgatcacgcttccctgcagcctctacctcccaggctcaagtgatcctcccacctcagaatcctaagtagctgggactatgggtgcatgccagcaagcctggctagtttttccttattttttgtagagacggggttttctgtggacctctctgggcattctggttgcagtacatttagtaaaatgcagcacagaacgat

SEQ ID NO: 315337 - DNA, 603 bp, Homo sapiens
ctgttcttacaatagactataatgacccatcttgatatccccctatccatagcaagacatacctcctgattcacaggaggcccttacttttttatagaacagcatgagctgcatcacgttgtaacactgggtgtgaaataagttggaagaacaaaagaaggaaaggagaaaaagaggaagaaagagaagcagacaatcaaaaaaaatctgtattaaataaagggagaaaaacaaatcaagtgcrtgagtgagaaagagccaggttaggcgttgtattagactgggtgactttaacatcagacatttgtttcccacagttctgtaaaatgggaagtccaagatcaaggtactggcagatttggttattgttgaggatcctcttcctgtctttgcaaatggctgctttcttgctcatatggtgaagacagaaggagctctggtctcttcctctttttataaggacactaatcccatcatgggaacccaaccctaatgatctcatctaaatctaattacttcccaaagacctcacctccaaatattatcatgttgggagtagagcaggtatgtggtggtcctctgagcatatgatcatcacacatc

SEQ ID NO: 315338 - DNA, 502 bp, Homo sapiens
accattagtctctatggaattgtaaatcaaaaccacaagcagacactacttcacaactatgaggaaggctaaaattttaaaaaatgtattcatgaagatatgaagaaattaaaggtctcatacattgctgtttgaattgtaaaatagtgcagccactctgaaaatagtttggaagtttctcaaaatgctaaatatgtacaaagttatcatatgatccagcatttccactccctgctgtacactcaagagaactgaagacacgtattcatayaaaaacttgtaaatgagtgttcatggaagcattgttcataattgtcaaaaagcagaaacaacccaaaagtccttcaactgataagcagacaaacaaaatgtggtctatccacacacaatggaatattattcagccgtaaaaaggaatgaaatactgatacatggaacaacatggttgaacttttaaaatcattatgctaaatgaaagaagccagacacaataagccacatt

SEQ ID NO: 315339 - DNA, 529 bp, Homo sapiens
acttttaaaatcattatgctaaatgaaagaagccagacacaataagccacattatatgattacatttatgtgaaaagtccaaaaatatgcatgtccgtagagatgaaaagcagattagtgttgccaggggttggaggaggaggcattgtggagcgtctctgaaagggtacagaatttctttgtagggtgataaaaatgtcctacaatgagacacaggtgatggctgtacaaytttgtggatatattaaacaacaatgaattatgtattttaaaatagtgtatattaattacatctcaataaagctgatattaaataagaattgcttcctgaggcaaccatatgtcttgatttagaacatcaacactgttttcatttccttctttttaaaagaaaattaacatcataatgagaacatttgtgacttctttatgcacactgtacatctccagtttctgatatctagtagctcctatttttagggttgatttcatttagaaataggaagctctgctcatggaaaaacctggt

SEQ ID NO: 315340 - DNA, 236 bp, Homo sapiens
gatggaatgtaggtcaagtgtaaagctggtgtctggcacacaggaagcactcgctaacacaatccattatttgcggccgaggtatggatgctatacratagaaatacatttcactcatagacatcttagagtatctcgtgttcctattaaaaacctcaaagggctccctgtgtctaccaaataaagctcaaagtcccctgggcgtggtggcttactcctgtaatcccagcactttg

SEQ ID NO: 315341 - DNA, 609 bp, Homo sapiens
tgccacctgtgaaccagagactgggggttcaccagacaccgactgtgacagcgccttgatcttagacttaccagtgtctagaactgtaagaaataaacttcagttgtttaaaacctacccagtttagcgtattttgttaatagcagcctgagtggactgagacaggcccaagccctgactggcttaagccatcaatctccccaactcacagtagcaacaatgatagatttaaggagaagcctgtgacttaataagccagttgaatccaattgtgtaaggccgtgcagcccagactcatctgatgagtgagagaatgacttccaggatgtgcagtagctatgcagcaacaatgtttattcctatgaagttcatggtttaaggacatgaagtcagaaatttttgcagccacatagggactccctagaatggcaagaagggcaactgtgcctaatgacactataaaggaaatcagatcctggggaatgacrtgctttggccacctgaatgaagccttgcctgaagccatactttgaacttttccattacctgagccaataaatccttttattgtttaatccaatttaagttagttttcagttgattataacc

SEQ ID NO: 315342 - DNA, 607 bp, Homo sapiens
ttctttttctttaacttaaggaaggaaggggttggttgtgttgtgcttatttcctttttcatttaggtgtagatattgtaaatgttgtcaaaagttcttcctttgtaattctttaaaatccataattatcaaaaggctgagaatctaattttcatttccatacagttgtcccaagagaacagttgactatttttcttcacagaggaaatcctctccacagctacaaaatcagtatctacttctctaggggcyttattccacattcctggagtgagttttagaaagttggtttagaaagttataaatctttttttgtttccctgagataattgtctgaatgttaagatttactaatatgtttctcggcctttatccatggcttgcaatcctcatcacatcatgacttcataggcaactcctttttaattttagcttactttggaggtaagggaaactccaatctaggggataagataaaaatcatggaaagatggcaagcaggtactcctgaagtgacaattcttttttggtgttttttttttttgttcttttgagacagagtctcgctctgtcaccaggcgtgatctccactcactgcaacctccat

SEQ ID NO: 315343 - DNA, 527 bp, Homo sapiens
ttacattttactcaatgtttagacaggttttactactcatttctgaacctcaattttctgtaaaatagggaaactatatgaagagtttcctttaaaaatttcagctagcattacttaatcaaaaaatgaaaaggktatttattgatttagctaatagaacagtccaggtatagtcttcaggagtggcttaatcagggaatttaaatgatatcaacaagacctgtgctaaccatcttcaggttctgtgtcatctctgctggtttcatgtcctgactccatgtgatggcaaagtaaacaaacagcagctccctacctacatctttttggctttaattccaggaactacttggattatattgggtcatatgcccgtctgcaagccaatccctgtggactgtggtcagggggatagaatatcctgattagccaggcctggatcctaagtttcattcctggagccatgatgaaggccaacccaaaactcataacctgagtgtcaaggaattgtgtttctccaaaggaaatgt

SEQ ID NO: 315344 - DNA, 527 bp, Homo sapiens
ttacattttactcaatgtttagacaggttttactactcatttctgaacctcaattttctgtaaaatagggaaactatatgaagagtttcctttaaaaatttcagctagcattacttaatcaaaaaatgaaaaggttatttattgatttagctaatagaacagtccaggtatagtcttcaggagtggcttaatcagggaatttaaatgatatcaacaagacctgtgctaaccatcttcaggttctgtgtcatctctgctggtttcatgtcctgactccatgtgatggcaaagtaaacaaacagcagctccctacctacatctttttggctttaattccaggaactactyggattatattgggtcatatgcccgtctgcaagccaatccctgtggactgtggtcagggggatagaatatcctgattagccaggcctggatcctaagtttcattcctggagccatgatgaaggccaacccaaaactcataacctgagtgtcaaggaattgtgtttctccaaaggaaatgt

SEQ ID NO: 315345 - DNA, 538 bp, Homo sapiens
atctaggaatagaatgtaattactgtcatcaaagtatctacataaaacatataagatatattatcatcaatggcaaaatggtaaaagctttccttctgcaatgggaaaagagacaggaagacccattagtaccacttgattctacattgtcctaagtatcatagtcagcacaaagatgaaagataaataattacaatttaaatgagtaaaaagtagaagtattattatttacaggtaaaatagatatacatgtatagaatccaaaagaatctacagacaaactattagaatgaattwatcaagactgctagatgcaaggataatatgaaaggaatttcttgcttttctatcaacaattgacagttacccaacataatttaaaactttgccatttataatagaatttaaagcatcaaatacctagggggtaaaaaaaaaatcaaacaaatcatgtataagacatccatacagaaaaccataaaacaatgggagttaaattaaatgagatctaaataacttgaggactacacaaacgtgt

SEQ ID NO: 315346 - DNA, 560 bp, Homo sapiens
ttgactacttgcgctaaaatctttgtttctgcatccactgacgggagaacttgagagctcacctgcctccacagcagtgatcaagtagatcacttttagcaaagagtacagtagaagctggggaagtagattctcctaaaactccccgtgcatatacatactacttgggaaaaacttgtgtacttcaagggagcacaraacccagtttgaagtcacagagattcatacctctggaaaaggggcaattccataccctcctgctttgaaagcactgatcataggcctttatgagaagacagcatctgtattaatggatactaagaatgtgaatataatttatacattataaaggggagaatcaagggctctgggttgcagtcccagcctgattgttgacttagttatgcctccaccccacttttctccccagtttctcaatgtggacaataaaagagttagacaatagctgatttatttccagatagctgtgtctccattctctttgataagcccaaatgaatatgtgttcaaatacctctatacagataagaatgagagac

SEQ ID NO: 315347 - DNA, 589 bp, Homo sapiens
acagtggtatttaattaacagagtcttcattcaaaaggatagtatggggcagctctgccaagagtcttcctcacagaggaggaggcagtgacattgactgggtgcagagtccatgaagaagagggatcatctgtcagttcagcttttcttttgcctttcacgggaaatattttcagttgccacgagcaaactctggagtcccaaattagaacttccttccttgcccataaycttagggccacatgaatcttctacccatcattcctcctcagctgggtgcgccccataaagcaaacaggagatgggcaattgactgcccttgtgacagggccatgcgtgtgagagggggccccatgggggccttaagcttcctgccacctcggacacctctgctcttggaagttggctgtctggctacaattctgtcagtaattgaaagacaacctcagttgttgtctgggtatgtgtgtgtatatgcatgggctgcagagaacagaggtctgacaaccttgaacatgtctcttccggacaacacccagagaagcaggattgtaagaaaacgggggacattagaggttagctggtcctc

SEQ ID NO: 315348 - DNA, 589 bp, Homo sapiens
acagtggtatttaattaacagagtcttcattcaaaaggatagtatggggcagctctgccaagagtcttcctcacagaggaggaggcagtgacattgactgggtgcagagtccatgaagaagagggatcatctgtcagttcagcttttcttttgcctttcacgggaaatattttcagttgccacgagcaaactctggagtcccaaattagaacttccttccttgcccataaccttagggccacatgaatcttctacccatcattcctcctcagctgggtgcgccccataaagcaaacaggagatgggcaattgactgcccttgtgacagggccatgcgtgtgagagggggccccatgggggccttaagcttcctgccacctcggacacctctgctcttggaagttggctgtctggctacaattctgtcagtaattgaaagacaacctcagttgttgtctgggtatgtgtgtgtatatgcatgggctgcagagaacagaggtctgacaaccttgaacatgtctcttccggacaacacccagagaagcaggattgtaagaaaacrggggacattagaggttagctggtcctc

SEQ ID NO: 315349 - DNA, 646 bp, Homo sapiens
ctcttgggaatctgagcttctagttgttttcaaaacagatacttgtttttaaatatcacacaaaataacaggtgtctcagctactagaattacacacaacccccgccctacctcccccgcccaccccccatcacactttacaaagttattctcttgggaaacctcrtctcaatcaacagctttctgagcactactttatacacaaggtcctatgttaagtgctaggaacacaggaattaacatgacatgttcctgtctacaatgaattaaatataagacctcccagctattgagcaccaactaaatgccaggcaccggtttttctataataccttgtaatattcacatcaagccaatcccctgtaggtgctattagcatcttcattttacagaggcacagacggcaactaagaggggaagtgacttgctgacaaaggttgcccaattaggaactgatggcattgagatctcaaacccaggtcttcatgacgccaaagccagtattttttgctactatttcaacctacctgatttggtttaatgggggaggaagactaagaaagagatgattaaacagtaatgtggtaagtgttgtgagagaacccctgggtacacctaatggagatttgcatgaaactggcattga

SEQ ID NO: 315350 - DNA, 646 bp, Homo sapiens
ctcttgggaatctgagcttctagttgttttcaaaacagatacttgtttttaaatatcacacaaaataacaggtgtctcagctactagaattacacacaacccccgccctacctcccccgcccaccccccatcacactttacaaagttattctcttgggaaacctcgtctcaatcaacagctttctgagcactactttatacayaaggtcctatgttaagtgctaggaacacaggaattaacatgacatgttcctgtctacaatgaattaaatataagacctcccagctattgagcaccaactaaatgccaggcaccggtttttctataataccttgtaatattcacatcaagccaatcccctgtaggtgctattagcatcttcattttacagaggcacagacggcaactaagaggggaagtgacttgctgacaaaggttgcccaattaggaactgatggcattgagatctcaaacccaggtcttcatgacgccaaagccagtattttttgctactatttcaacctacctgatttggtttaatgggggaggaagactaagaaagagatgattaaacagtaatgtggtaagtgttgtgagagaacccctgggtacacctaatggagatttgcatgaaactggcattga

SEQ ID NO: 315351 - DNA, 646 bp, Homo sapiens
ctcttgggaatctgagcttctagttgttttcaaaacagatacttgtttttaaatatcacacaaaataacaggtgtctcagctactagaattacacacaacccccgccctacctcccccgcccaccccccatcacactttacaaagttattctcttgggaaacctcgtctcaatcaacagctttctgagcactactttatacacaaggtcctatgttaagtgctaggaacacaggaattaacatgacatgttcctgtctacaatgaattaaatataagacctcccagctattgagcaccaactaaatgccaggcaccggtttttctataataccttgtaatattcacatcaagccaatcccctgtaggtgctattagcatcttcattttacagaggcacagayggcaactaagaggggaagtgacttgctgacaaaggttgcccaattaggaactgatggcattgagatctcaaacccaggtcttcatgacgccaaagccagtattttttgctactatttcaacctacctgatttggtttaatgggggaggaagactaagaaagagatgattaaacagtaatgtggtaagtgttgtgagagaacccctgggtacacctaatggagatttgcatgaaactggcattga

SEQ ID NO: 315352 - DNA, 631 bp, Homo sapiens
tgtgtccctattgtgcaatggatccattatacaggtcatttccagaagcctcacttggtagaaacacctgcagggcactcactgagaacagtctaaagacttgtggtaaattgcccacccagcttgagacctcaacaggaaattggagttgttcgttggaaaatggaatccctgaactatggttttctgaactgtagcccacgaaacatgtcaacacagcttcgagaccaattactttctttcagcttagcagataaatgaaaggtgcgtggggagaagcgatgagagaagaaaactgtagccacagcttttggggcttccaggaagatgagcaaagcttgtgtacagatctcaaagtgaaaccracggcaatataatttttatgagaagtgatgagtgatactaactaaaaaagcacacactaaaaaacaaaaacaaaaacctaatttaccttagaaattaatattttgccaacactgaaatgttgaaatgaaaatgttacatgtgtttaaagttttatttttgattaattatttttcttaactggttctaactatttattttgcaattgattctaagcaagtctttgtgaatctctttcttggcaaagggggctgggtaatcaagaagg

SEQ ID NO: 315353 - DNA, 602 bp, Homo sapiens
ttccattgcggaaggcgagatgttttcctatgaaaaagatcttactgcgtaatttctgaaatactataattttcaccaaactcaatttccagcgcactcctggccaaacgctgcagaattgtgttatttttgaatgtcattgcccctgacctgaagttacctacaaagttggtcaaaaattagtaattgtcttagagaactagacctgaaaaatctcattccttccagggaarggctgataaatttgtatgcgaattagatgtaaagcagaggtacagattcagctttctggatgccaccaatcatgctggccattgtacatctatgggtcatcaagaagagtaagacaacaaaaatcaaataacattattttcctccttaatatactgcattctgagaatacaaagctcacagaaaatgccaaacaacagcttcataaatactttgataaatactcaaatatatcttctaataaactgtatttcataaaatggagcaaggagggataaagagaaaagaatatgcaaaagacaagaataaaagggttccactcttcaaaagcactcaacgaaactgtttatgggtccttttttatattgtat

SEQ ID NO: 315354 - DNA, 592 bp, Homo sapiens
aataacattagactgtggaaagaaatattcacatttcagcagaatggtttacaggtgttaaaaactttttatatatttggtgttatgtgtttccatctattcaggctgctataacaaaatatctcagagtgggtaatttataaacaacggaaatttattgctcacagttttggaggctgggaatyccaagatcaagacaccagcagacttagtgtttagtgagggcttgttttctgcctcaatgataacaccttttagctgtgtctttacatgatggaaggtcaaacggattccctcaaacttattttataagggcactaatacctttcataagggcagagacctcatgatctaatcatctcctaaaggcctctcttcttaatactatcacattggggattaggttccaacaagtagattttggggggacaccaacattcagaccatagccttatgcacatgttacatgtgactgtttactgagtacttaatctgattcaggcattacgctaaattcacaacacacattttctcactttaactcctataacaagccatgatatgcttactattataatcccccaaatcaccc

SEQ ID NO: 315355 - DNA, 592 bp, Homo sapiens
aataacattagactgtggaaagaaatattcacatttcagcagaatggtttacaggtgttaaaaactttttatatatttggtgttatgtgtttccatctattcaggctgctataacaaaatatctcagagtgggtaatttataaacaacggaaatttattgctcacagttttggaggctgggaattccaagatcaagacaccagcagacttagtgtttagtsagggcttgttttctgcctcaatgataacaccttttagctgtgtctttacatgatggaaggtcaaacggattccctcaaacttattttataagggcactaatacctttcataagggcagagacctcatgatctaatcatctcctaaaggcctctcttcttaatactatcacattggggattaggttccaacaagtagattttggggggacaccaacattcagaccatagccttatgcacatgttacatgtgactgtttactgagtacttaatctgattcaggcattacgctaaattcacaacacacattttctcactttaactcctataacaagccatgatatgcttactattataatcccccaaatcaccc

SEQ ID NO: 315356 - DNA, 592 bp, Homo sapiens
aataacattagactgtggaaagaaatattcacatttcagcagaatggtttacaggtgttaaaaactttttatatatttggtgttatgtgtttccatctattcaggctgctataacaaaatatctcagagtgggtaatttataaacaacggaaatttattgctcacagttttggaggctgggaattccaagatcaagacaccagcagacttagtgtttagtgagggcttgttttctgcctcaatgataacaccttttagctgtgtctttacatgatggaaggtcaaacrgattccctcaaacttattttataagggcactaatacctttcataagggcagagacctcatgatctaatcatctcctaaaggcctctcttcttaatactatcacattggggattaggttccaacaagtagattttggggggacaccaacattcagaccatagccttatgcacatgttacatgtgactgtttactgagtacttaatctgattcaggcattacgctaaattcacaacacacattttctcactttaactcctataacaagccatgatatgcttactattataatcccccaaatcaccc

SEQ ID NO: 315357 - DNA, 585 bp, Homo sapiens
aagcaatgtcttttttaaattaaagagtaactatraacatataaaaaatgcaggtaaacatgttatttactataggcagcagcaatagtaataattatttcatgggttaaaaacacagtagaactagaaggttagaaaatattatatgaaagagatgtgaggtaatccaacttaacaaaatctaagtttttgtttgttctggaggagagaggagatcctcaccaattgaaacatcgtaaaaaggcaaagggcaactactaaaggaatagtgtgtactttacatagagtatgaaaaaaaaaaaaggaatagaaaaacccaatcaatccaatggaagggaaagaaacgaagaaaaggagagagaggaaggaaggagggaaggaaggaggaagggagggagggagggaaggaaagaaagaaggaaaaaaggaaggaaggaaggaaagaaagaaagaaggaaggaaagaaagaaaggaaggaagaaaggaacaaagaaaaaacatgaggaataagagcatataaaatgatggtagaaatactccaaacttgttggtaagcaccataaattttaaaagattaaactatca

SEQ ID NO: 315358 - DNA, 585 bp, Homo sapiens
aagcaatgtcttttttaaattaaagagtaactatgaacatataaaaaatgcaggtaaacatgttatttactataggcagcagcaatagtaatarttatttcatgggttaaaaacacagtagaactagaaggttagaaaatattatatgaaagagatgtgaggtaatccaacttaacaaaatctaagtttttgtttgttctggaggagagaggagatcctcaccaattgaaacatcgtaaaaaggcaaagggcaactactaaaggaatagtgtgtactttacatagagtatgaaaaaaaaaaaaggaatagaaaaacccaatcaatccaatggaagggaaagaaacgaagaaaaggagagagaggaaggaaggagggaaggaaggaggaagggagggagggagggaaggaaagaaagaaggaaaaaaggaaggaaggaaggaaagaaagaaagaaggaaggaaagaaagaaaggaaggaagaaaggaacaaagaaaaaacatgaggaataagagcatataaaatgatggtagaaatactccaaacttgttggtaagcaccataaattttaaaagattaaactatca

SEQ ID NO: 315359 - DNA, 585 bp, Homo sapiens
aagcaatgtcttttttaaattaaagagtaactatgaacatataaaaaatgcaggtaaacatgttatttactataggcagcagcaatagtaataattatttcatgggttaaaaacacagtagaactagaaggttagaaaatattatatgaaagagatgtgaggtaatccaacttaacaaaatctaagtttttgtttgttctggaggagagaggagatcctcaccaattgaaacatcgtaaaaaggcaaagggcaactactaaaggaatagtgtgtactttacatagagtatgraaaaaaaaaaaggaatagaaaaacccaatcaatccaatggaagggaaagaaacgaagaaaaggagagagaggaaggaaggagggaaggaaggaggaagggagggagggagggaaggaaagaaagaaggaaaaaaggaaggaaggaaggaaagaaagaaagaaggaaggaaagaaagaaaggaaggaagaaaggaacaaagaaaaaacatgaggaataagagcatataaaatgatggtagaaatactccaaacttgttggtaagcaccataaattttaaaagattaaactatca

SEQ ID NO: 315360 - DNA, 620 bp, Homo sapiens
aatttgaggatctttttgaaggtgaagccagggttaaatcactcatctcccctcccccaccccacagtcataccctgctgatttgtcatgggcratgtatgtttttgctccctctttggactctaagctatgtagggtggcataatcattttctattgctatcgtaacaaattaccgcaaacttagtggtttaaaacaacataaatctattatcttataattctacaggtcagaaagtttgcacggatctcactgggctaaaatcaaggtggaggcagggttgccttatttttctggaggctcaatctgtttcttgctcatttgggttgttggcagaatccagttccttgaggttgtaggatcagttgctggctataaattgaagaccattctcggccttttttttttttttcctatagacagggtctcttcctgtcattcaggctggagtgcagcagtacaattatggctcactgaagccttgacctcctgggctcaagtgattctcctgcctcagcttcccaagtagctaggactacagacccacaccatcatgcctggctaattttatttttatttttgtagagaaagggtcttgccatgttgcccaggctggcctc

SEQ ID NO: 315361 - DNA, 599 bp, Homo sapiens
ttactattgcccaaacacatttccacatgagatgttgttgtattgaaacaggagagttatctgacccccctcgcaggaagtgcaacaggggtgtggcttgtctgttctggctgtggctgctgctcaaaccccttatgggatggggaacatgcagacgggcaggtgcaggagccggggtggacacttttgggctccagccccacggtggcaactaaggttgtgtggctgaaactctggaagccccagtgggcatgctacagtgctcttttagctctgctgtccatagacagcttaagtattaaccagcttagtgccctcttggtacccgggttcttgtccagcatccgagaagaatcaggtcacatatggacttgaaggatggtggatacggggattttattgggtgatagaggtggcactcagtgggatggattggggggtggaaagggatggaatgggaagatgatcttcccctggagttcagctatcccacacccgttctcctctccaaccgtccccagccaaactcctttcaacrttcagatgctccttttcttctctcctctgccaggctgctcttctgtttatctgctcgtctg

SEQ ID NO: 315362 - DNA, 599 bp, Homo sapiens
ctgcccttcccttttttataaaacccaatcttttatgattgtccagactattctctatatttactcttctgaaagaatcctagaatcatgttctcaaattccataaaatatcctatttttattgaaattgctttgaattaaaaagttaattaagagagaaatgacatatttaaaatatgagtgttcctttccaccaccattstacttccctccaatttttagctagtatttttatgttcctcagtaaatttgcatcattttcttcattaaggcatatgttttactagatttattcttgggccttttatactgattattgatactatcaatggttctttatttcacaaatatttttcgttggttattgccagtgtcaggctgtggttttatatgctgattatgtaactagccagcttgctgagttcttttattagttctagtagttggtcagtgggttcatgtgggttttctatgaacacagcaatatctgttctctgggtgattgattgggtagaattcacctgggggtagattctcaatgagcatttcagttttgttcatggcaattggtctgctcatgatttttatagcttggccaa

SEQ ID NO: 315363 - DNA, 599 bp, Homo sapiens
ctgcccttcccttttttataaaacccaatcttttatgattgtccagactattctctatatttactcttctgaaagaatcctagaatcatgttctcaaattccataaaatatcctatttttattgaaattgctttgaattaaaaagttaattaagagagaaatgacatatttaaaatatgagtgttcctttccaccaccattgtacttccctccaatttttagctagtatttttatgttcctcagtaaatttgcatcattttcttcattaaggcatatgttttactagatttattcttgggccttttatactgattattgatactatcaatggttctttatttcacaaatatttttcgttggttattgccagtgtcaggctgtggttttatatgctgattatgtaactagccagcttgctgagttcttttattagttctagtagttggtcagtgggttcatgtgggttttctatgaacacagcaatatctgttctytgggtgattgattgggtagaattcacctgggggtagattctcaatgagcatttcagttttgttcatggcaattggtctgctcatgatttttatagcttggccaa

SEQ ID NO: 315364 - DNA, 569 bp, Homo sapiens
ttatcaaatctcaaggattgatgaaaggtgttttttaacttttaattttcactgtttatatctttttggtattcatttctaattggactctaccataaaagaagaatgtgtaatcagtactataggttctttggaatgtgttgcagttccctgtgtttgaaaataatttatattctgtgctgtttatatctgaagagttttgggtccatatttttaacagatcatgctttcagaaatcccttttgttatttctttcagttagtatactgtgatcattatgtgactaaagaatcatattttatcttgttagtggattataatactttttggtatgaactcttatttactatattttaatgatatttattttactctgaatatctgtatattactgctaaacctgaacctrtttctttttttgttagcatatttttgatatattttccccttctcctgtgtcattctgttttaggagtgtttgtggcaaacaaacatcataatgtttataaacccaatttaagagtctttgcccttttaatatgtgaatctaacaacctcacagttattgt

SEQ ID NO: 315365 - DNA, 557 bp, Homo sapiens
actctggggcagaacccaggcattttagtttttgttaaaactccccaggtgatgttaatatgaagccaggttggcatccrctgagctgtgggacctacagggactcggctagactctgcctccctttcccacaccatcctgtgctgctctgccccagacccgctgtgctccatggctctgcctccaagcctttgaaaatgccaggcatggtgcccactcagggcttttgtttttcatgtgccttctgcctggagggctctggaccctggtcttcatgtggctgctccttcccaacatccacgctcccttcaaaaattccttcctcagagacccctggtacagctgctcttctcccctagccccactcctctggttttacttttcctttacatcagtatctggaatcattttattttcagtttcacctactgtattccagctccataggtcaaggactcctctatcgttcgtgacttcatctccagctcccagaaacaggcctggcctataatacaactaaaaccacccataacagtgacaaagctagcacctactgt

SEQ ID NO: 315366 - DNA, 539 bp, Homo sapiens
tatctcctcttctagacagtaagctgcctaagggcaggaaccagtatatctttatgtaatagcatagaggtacactgtaaatggtagttattaatgttctaacccaaattagtagctaatctgaacctctggattcggtaattggtagtacttacctcccactgtctcacagaatgcaacatttcatgggggaaacctgaccaaaactagcaatattgacaactgtagtgtgatgtgtcccctaccaggttacttaagagtgtatgtgtgttgcttggatcctgaatgctgggcagggagtcaaggccctggtgcccagctgaggagcagggatccctgagaacccaaacatcccagggcatacctgagaacatgtcaaagaaaacactgtcatcgtgcacacagagtaggcaaacagtcagaacattagctgaaaggcagcttaragacgggaggcagggtgactctagagctgcttaggaatgtccagtatgtaagtcctagtaaactcatctattcatcaagctggacttgcccaa

SEQ ID NO: 315367 - DNA, 608 bp, Homo sapiens
caccagcatctctcctttttagtattcatccagctccccatacttcccaacaaattccaccattgagtaaaagtgaagtggccatttctcttagtcactgtgtagtctgagcatgctgccctggggtgttttctgtatatggtgccatttcttagtgaatcacaggagtaggcaggtggggagcaagtaggtcctcaagaaaatgcaggtttgttatagctagatacctcttggccaactccagcctaaatcactgaagtattgtatacttctattctcaactactaataaagacacacccaaggctgagtaatttataaagaaaaataggtgtaagggcctcacagtttcacatggctgggaaagcctcacaatcatggcagaaggggaagcaaacgtgtccttctycacatggtggcaggcaaggggggaaaagccctttataaaaccatcagatctcaggagaactcactcactatcacaagaacagcagcatgggggtaaacacccccaagattcaattacctcccaccggatccctcctatgacacgtggggattatgggaactacaattcaagatgagatttaggtgaggacacagccaaat

SEQ ID NO: 315368 - DNA, 621 bp, Homo sapiens
ttcaacaaccacatgtttttgactaaataaaaatacaaattctgtagttcacataccttaaagtggaaaactatttcaaaacaatcttgaaataaattctattcaagggactggggtttgttttttgttgttgttcagtttgacaatagcatgtcggcacattaactctcttgaaaatttaatttaaatgaagcacaatggtaatgaaaaggattgatactctaaaccgctcaaaatttttgtataaaatcatagctgtgaaaaccatttattttgagaatgggttgacacttccaggagttttccagctaaactcagcactgacaattttcgagttaccatatatgagcaagaactgtaagcaaattgttaacacttaattttttaaaacaaccagtctgcaactgagtataaagaatgtgtccatgtccctctaagacatgcaratttcttatttttatcaagtacattctggaatgactgtgtaccttgaattgtgcccaatacattcaataacgaaaatccagcatgtttatccaaggtcaaaatctgctttcagctccagaacagcatcagagttaacctttttcatcactattttttgaagcttttgagagctat

SEQ ID NO: 315369 - DNA, 343 bp, Homo sapiens
agaaccccaaataggtaaataaaaaaattaaaaaaaaatcacactagacacatgatagtcgaactgttgagaacaaaagatatagacaaaatcttaaggacaggcacagctgtaatcccagcactctgggaggccaaggcaggtggatcacctgagatcaggagttcgagaccagcctggccaaccaacatggtgaaaccgcatctcttctaaaaatacaaaaattagccaagcatggtgttgcatgcctgtaatctcagctactcgggaggctgaggcaggagaactgcttgaacccrggagttggaggtgtcagtgagctgagattctgccaccgtacacc

SEQ ID NO: 315370 - DNA, 197 bp, Homo sapiens
tagacactttacaaactaaaccttttttagcccctggttcattgtaaaagttttttattttattttttacacttggtgtctcaatctgtcacccaggctgragtacagtggtgtgattatagctcactgctgtcttaacatcccaggctgaagcagtcctcctgcctcagcctcctgagtagctgaaaccacagaca

SEQ ID NO: 315371 - DNA, 564 bp, Homo sapiens
cataaggaacaggcaccaacacctaggcataacctggagatgtaagacgtgtaaggacaaaggtgggacacccagattgcttaaaaggaaaagcactcgggctaggtctaatatctgtcagttcctgtgggccttagttcctgctattttctcttcctgtaactctccctcctgtcacatgccacctgattctcttggcttgatgaactcttgttcattttcccaaaattccaaggggatcttcctgattccatataccagttaagtgtcttctgtgcatttttctgtatcaccctctactaaccctctgctggcactcaccactgcataatgtctatttaatttaattattcttactattaaaatgtgcacattttgaaggcaaagaacttgattttactagtctttattatatctccaccaagaacaagatctacctcactacagactatctataaatatttattgagtaaattgataacatatgataaagttattctatgaatagttctgggataaataactgaatttawtgaaagtaaatttgaatctctacttcacgtc

SEQ ID NO: 315372 - DNA, 395 bp, Homo sapiens
acgtcattcaccaacataatttccacatgtattatatacacatttaagataaaaaactagaaggtaatatagataaatatctgatatcagattggtgaacmcctattcaagcataagagtataagcaacatgatatcatgattcttgaccctttgaaaatatcagaactggttgaaatctattgaatctgataaaagcttcagattcaacgcctaaaaaaatgcttacttgtacacctacttctaatatttacatgcatctctgaaagtttcatggacaatttgaagctcttcaagagaattctgaacaaatttagccaaagagaaaaaaatttatatacttatctacataaaagtgaaaacccctgtatgtcaaaaagtacatgaaccaaattg

SEQ ID NO: 315373 - DNA, 395 bp, Homo sapiens
acgtcattcaccaacataatttccacatgtattatatacacatttaagataaaaaactagaaggtaatatagataaatatctgatatcagattggtgaacccctattcaagcataagagtataagcaacatgatatcatgattcttgaccctttgaaaatatcagaactggttgaaatctattgaayctgataaaagcttcagattcaacgcctaaaaaaatgcttacttgtacacctacttctaatatttacatgcatctctgaaagtttcatggacaatttgaagctcttcaagagaattctgaacaaatttagccaaagagaaaaaaatttatatacttatctacataaaagtgaaaacccctgtatgtcaaaaagtacatgaaccaaattg

SEQ ID NO: 315374 - DNA, 561 bp, Homo sapiens
aaccttaaaatcttaagatttaatctttaaatattaagagatttgggtttctgtatcaacaatctttaaatattaagagatttttccgaagattaatgactttcctagagttggcctacaaattcaccacctcaactggatgacttgctttggaataaatttctaacaccgcaagtgaattgaatattttcttccttttttatgtaatctaatatagtacatttttaaaaatttataggatgtccagacacttatagcttatcattctatgattcaaaagaatttggtataattgcattgataagcttactgccctgggcaccaaagtaacctagaatatggagaagtagcttttggtgacatgcatctatttatatctctagcatttactaattaattaatttgtttaamaaatacacattcagtaccattatatgtttggcattgtcatagatgttagaaaatcaaatataaaaaagaggtaatttcttcacaacacacggaaataagagtatctctaggaattgtctctagttgaaattgttttctcctacccacctc

SEQ ID NO: 315375 - DNA, 516 bp, Homo sapiens
gacctcagtaagcctacagattttgatctaccgaaaagtgtttattaaatcctgctgagtcttcttttgaaatgccccttatcaacatcccatcccttccacatcactccccagcccctcagtcatcacttcacacygggatggctggcatgggctcatagctgactaggtgaggcatccccctcctgcctaagtcatcctacatgccaaagttattcttcttcctcagacactcttattccacagatcactggtctccaaaccatcaaagattcccattttctcaaatatcaaatctaagcttctgttctgaattttccagacccataattttgtccatcctgctgattcttacttcctgttatttctttgctacccaacttcagctctagtttgcctaatctctctcagatccatcaatatgccattccaatgcctctctctgatgatactgctttccactcctggaatacttaccttcaaaccattctttcattcatttgtaacatatatatt

SEQ ID NO: 315376 - DNA, 508 bp, Homo sapiens
agttcactggttctttcttttacctgctcaaatctacctttgaatcattttagtaaacttatttcaattgtactttcagctccattaatatatattaaatattttaaatatttataaatagaaatattaatagagatagaatacctgcagagaaatatatatctaatataaataatacctacagagaaatacatatgtatacttttatatatacagaagatgtagagaaaataaacaacatatgaacaaaatagaaatatcaataaagagaatacctgcagagaaacattttgtattttcaataaatggtgctggaaaaactgaaatatttctctgtaggtatttcatctctttattaatattttgattatatatgcaaataaatacatatagttatctgaagtattctatctctttattaatatttctattttgttcatatgttgwtctcttgactttcttcacatcttttagttctttgaacatcttgaagacagttgttttaaag

SEQ ID NO: 315377 - DNA, 470 bp, Homo sapiens
ccattccactctctgcttctacgaactagactttttggagtccacatttaagtaagataatgcagtatttatatttttgtatctgccttacttcatttagcataatgtctttcaggttcatccatttgttgctgcaaatgacaggatttccttctttttaaaaattgaacaatattccattgggygtatatacgtgtgtatgtgtatttctttatctgttctttggtcaatagatacttaaattgtttccatatcttgactattgtgaataatgctgcaatgaacatggggtgtatagatgtctcttcaagacactgatttcctttggatatgtatccagaagtgggactgctggattatttggtagttttattcttaattttgatattaacatttctcttacacaacttctgacataggtcccaatgatccatgcttcttggtattcatgcacttgtgtaatcctctac

SEQ ID NO: 315378 - DNA, 592 bp, Homo sapiens
aatcaaagacctcccaacaaagaaaagcccagaacctgattacttcacaggtaaaatctaccaaacatgtaaagaaaagctaatgccaatccttctcaagctcttccaaaaaactgaagataagagaacatgtccaacctcatcctatgaggccagcagtaccatgagaccaaagacactactaaaaaagataattacaagccaatatccccgatgaacacagatgtaaaaatcctctgcaaaatactagcaaaccaaattcagtagcacattaaaagaatcattacaccaatcattacaccatgatcacttagtatttatccccagaatacaaagctgcaaatcaataagtgtaacataccatattaacagaataaagaataaaaatcatatggtcttctccatagatgcagaaaaagcatttaatataattcaacatcytttcatgataaaaagagaaacttccaataaattagacatagaatgagtttattttagcataataaaggccatatacaacaagccaacagctaacatagtactcaacagtaaaaatctaaaagctttttccctaagatcagaaaaagccacg

SEQ ID NO: 315379 - DNA, 508 bp, Homo sapiens
tgctcccccaatgtcccactgataggatggttaccctaccccaagcacagcaggctgagaatactggggtccmaactgccatttccccaggtcacttataataaagccgtatttatgaatatgcctgatgaatacagattttcttgaaatcctcgagaaaatactagcaaacggaatccagcaacctataaaatgaacatcatgattaatatggtttggctctgtgtctccacccaaatctcatgtcgaattataatttccaacgttgtgggagggacccagtgggaggtgactggatcatgcgggcagtttcccccttgctgtcctcatgatagtcagtgagttctcaggagatctggtcgtttaaaggtgtgtagcacttcatcctttgctctctctctcttgcagccatgtgaagacaagacatgtttgcttccctttcacccttccaccatgattgtaagtttcctgaggcctccccaaccaagcctcctgcacagcctataga

SEQ ID NO: 315380 - DNA, 520 bp, Homo sapiens
gtgaacatggtctattggttgttaaattcaagataaatgatcatgatttagcatattttgatactaaaatcatgctcaaaataagtatgtaatagatgctgttgaataaactctaaactccttgaagtcagaaactgatttgtttatctttctatccttagactgccaaattacctagcacatagcaggtacttccaaatgaacattaaacaagttaacagtggcaaaaagattcagctaaaatcacaatgacaatctaaacaaagaaatctcttgcttccataactgaaactggagattataagttagagttccaaacaaatcagaacggaattaaatacaaatataaacttccaaaaaggaaagtttgaactctgccaaaattaattccatgtgaccactggctgcagaacaaagtcagcgaatattttcaaaggttttgtaaaacaggtgctatcttgtattttcagcaccarttgtcagaatgtaatactccttctgaacatctataatgcttgac

SEQ ID NO: 315381 - DNA, 592 bp, Homo sapiens
tactaactcctgaccattgtgttgattattatacaacctaaataatggtgataagacataagtactagtgagaaggaaggttctagtttcaacaacactctcaagaaaactgcaagcttcttaaaacaaaccatttctctatgccatgccagtttctcctaacaaatcattacatgcttgtcctcatgcaaaaaccctgccttcctttcacatcacactatttctcatcaacyccctctaccttgctggcaacagctgactgaccagtcaccctcttcactgtggtttttggcatgtgaccaattaatgccttcacaatatcttaaatagccaagtgtccatcccacaagttaacttcaaagttatttgacctgttctttcccaactaccttcaccaacatcgcacaacagcaaccactgcatgaccacaccttagacctcaactctgaaaattcttatattgcacttcctgaccaaatcagcaacctctgacggcagatttttatccttcagctttctcattcctttgcccacaatctttgttcttcaatgttagccacatggaagtactttacacgctcctagactagtc

SEQ ID NO: 315382 - DNA, 626 bp, Homo sapiens
catacttgatgcccctacaaccttatttcagttcacttggttcactacatctggtgtccatcatactatgaaaacagctctcatcaagatccccaaagatcacctacagccaaatacaataactctttaaaaatcttactttgggaggccgaggtgggcggatcacttgagcccaggagttcgagattagcctgggcaacatagcgaaactcctgtctctactaaaaacacaaaaattagctgggtatggyggcacacgcctgtaatcccagctactcaggaggctgaggcataagaacagcttgaacccaggaggtggagtttgcagtgaactgagcttccgccactgcactgcagcctaggccacacagcgagattcagtccaaaaaaaaaaaaaaattccttcacctagtttccttgtagcaggtgacactgttaataaccccttgctcattctaactctctgcttccttaactttcataatactacttctcactagttctctatcttcttattcttcttctttcataatctcctttcctgagtctctcctaccatttagcctcttaaatctaaataactctataaagttccagtattatgcatcatcccacctacacaatac

SEQ ID NO: 315383 - DNA, 626 bp, Homo sapiens
catacttgatgcccctacaaccttatttcagttcacttggttcactacatctggtgtccatcatactatgaaaacagctctcatcaagatccccaaagatcacctacagccaaatacaataactctttaaaaatcttactttgggaggccgaggtgggcggatcacttgagcccaggagttcgagattagcctgggcaacatagcgaaactcctgtctctactaaaaacacaaaaattagctgggtatggcggcacacgcctgtaatcccagctactcaggaggctgaggcataagaacagcttgaacccaggaggtggagtttgcagtgaactgagcttccgccactgcactgcagcctaggccacacagcgagattcagtccaaaaaaaaaaaaaawttccttcacctagtttccttgtagcaggtgacactgttaataaccccttgctcattctaactctctgcttccttaactttcataatactacttctcactagttctctatcttcttattcttcttctttcataatctcctttcctgagtctctcctaccatttagcctcttaaatctaaataactctataaagttccagtattatgcatcatcccacctacacaatac

SEQ ID NO: 315384 - DNA, 628 bp, Homo sapiens
ggaattcaatattgatactattatgataccatacatacttgagggatatcaaagtaagggagaaattcaaaaaacttggtatgaattgaaatgtgtgtattttcccsatggaaatggtaagcacataagtcaagtcacaaaatacaacaattcctctttttcaaaaggtaatatccaatatcacgtagttaagtaggattgatcatatgttaaatactatttctaatagtaacagtaatccttaataacattccttaaagatatctatggtatttaaacataaagctcaaggttttattttaagaatggcctagatgtgttttttgtttttttcatttttctcttcttataagatgtttattatttcaagaatcccaagaatccacaagggctcttataggaattatcttggtggaagagatggatgctttttctgacctattttctccaatgaacaaacttcttggttccactatgcccatacctacggaatccaccactgtttagggcatccagtgccaatgaacccaaacaaggtcatgagtttaatcaccaattccctttgctctgtttcgtggacacaatctttaccctaaacctagccaagggcctcacagaaggctaacta

SEQ ID NO: 315385 - DNA, 472 bp, Homo sapiens
gactgaaaaactgttccagattaaaggaaactaaagagacatgacaactaaatgctatgtgtgaacctatattttatcctggatcaggaaaggacactactgtagtagcaaaatttgaataaaaygtatagattaagccatagtattttactgattttaatttcctaattttgattgttatactgtaactataaaagaaaacatacatatcaaattatatagatgaaaaatgatttattttttaatcagttgactttaagattcacagataagtatgtatatcatgtctgcaaattaaaaatgtttcacaaaaaattacatatatgtggatgtatctagaataaatgatgaagcaagtctggtaaaatatgaataataagggaatctaggtaaatgttatacagaaattcttcattctaaattttcaactttatctatgtctgcaatttcaaattaaaaagagtaccttaag

SEQ ID NO: 315386 - DNA, 601 bp, Homo sapiens
tctacattcccatattcattgctgaattattcacagtagccaagatatgtaatcaacctaagtgtcatccattaatggatgaccaaatgaagaatcatccattgttttatatataatggatatatgttatgttatatatatatatataaaactccttgatcttaaaaaaatcaaataattgaaataagccactaaagcaaatattgcatattagattatcagtagatgataacatatgacaggaaaggaaggtataaaagcaataaatatgttgaaatgttgatacytttgacaaacttgaaaaaattcatgcctcataaagatatatttggttatttaatattcttctcataatgttatacataatggatatatcttatatttattttatatataatgtatatatgttatattacataacatatataatatataacataattatattttatatacataacaattaactaaatatattataatgtatacataatataatacataattatatataacataatacatacataacaattaactaaatatatacattacacataaatacacacacacacacacacacacacacatatatatgtac

SEQ ID NO: 315387 - DNA, 601 bp, Homo sapiens
tctacattcccatattcattgctgaattattcacagtagccaagatatgtaatcaacctaagtgtcatccattaatggatgaccaaatgaagaatcatccattgttttatatataatggatatatgttatgttatatatatatatataaaactccttgatcttaaaaaaatcaaataattgaaataagccactaaagcaaatattgcatattagattatcagtagatgataacatatgacaggaaaggaaggtataaaagcaataaatatgttgaaatgttgatacctttgacaaacttgaaaaaattcatgcctcataaagatatatttggttatttaatattcttctcataatgttatacataatggatatatcttatatttattttatatataatgtatatatgttatattacataacatatataatatataacataattatattttatatacataacaattaactaaatatattataatrtatacataatataatacataattatatataacataatacatacataacaattaactaaatatatacattacacataaatacacacacacacacacacacacacacatatatatgtac

SEQ ID NO: 315388 - DNA, 527 bp, Homo sapiens
tctctgatccagaaatttctcagagtcatagtctaactcaccaccctaccattcccaatttgtggtctttatcttaggttgcaacatggtgtctaacccttctaggaagcaggttgggggaagtgataaataaggaaaacaaaggacaaatgtaagctatctcttaagaaatattccttgatgttgcttcaaaacatttctatttatatcatatttttgcaataatctaacaacattctcatacttagctacaagagagaatggaaaatatagtctttagtaaggacaacttgctaccagctaggaattctactatggtaggagaaggagtacatggatgttttggaaagatatgacaacctctgttacacatatttagtccaaaattgatgagtgaacaaagaatattcccttttaagtactagctagcaagagaaaagatattaggaaaaaackcatgattttattactgttactgatttttttgaattaattatattaaattgtagatgaattgagtgtatgtg

SEQ ID NO: 315389 - DNA, 561 bp, Homo sapiens
cttctggaacattgtctcctaccccagctacctaacacctcaagaatagctgcaactgggttgtgaagagagaggaggaatgtgatattatacctgtgttacccacagcacttgcccttcttagtattacagctttttggtctcctggaatctctattcaatgtgaaggagagtcatttggatgatttaattgccctcacacagcaagaatcacataatgtacatatcaaagtgtaaaaatktgtgtaattcctttgctcagtattacatatctgctttgaattttaaccccttctgatgtaatagtaaagtcacccacatcaatgatattaggggtaaggtttgaagggagcaacatctgcagagataggatgtagtagttccacctttttttttcctgctaagacctcttcagtgtccaccctatacattctcagtctgtgacgatctctaacatccaaggacaagcataaagcacctcatgtgccttagagtggccagatgaataccaatattgtaaatcttagctagacattacctgggaaatcctacagttttaca

SEQ ID NO: 315390 - DNA, 604 bp, Homo sapiens
catgcatttaatgtatttagagatgcaaaattgtactgattgattttcataaggtgtttttttctaaaaatattttaaatttttgtgggtatatagtgggtgtatatatttatggggtacctaagatgttttcatgaagtcatgcaatacgaaataatcagggagaatgaggtatttatccccctcatgaatttatcctttgtgttacaaaaaataccattacattcttttggttattttgaactatatgattaagttattattgactatagctatcttgttatgctatcaaatagtaggtctttttcattctttctatttctttttttacccattaaccatacccctctccctcctagccgcccccacatcccccactaaccttcccagcctctggtaaccattattctaatctctatawccatgtttaattgttttgatttttagatccctcaggtaagtgagaacatgtgatatttgtctttctgtgcctggctcaattcgcataacaatctccagttccacccacgttgttgcaaatgacagggctccatacattttatggctaaatagtcccttaacatggcataaaaagtcctacatg

SEQ ID NO: 315391 - DNA, 544 bp, Homo sapiens
aaggatttggaagaatggattttagctaaaagattaagaaataaaagacaatatttctgatgaaggaaataacatgtgaaaagctatggaagtaacttttggaagtgcattatgaaattacaaattattaaccagggtttcctgccttttcaggtgtagatcrgttaatctaacatccaattttaaattttggggaggtctaaaatcttccaaaatttcagttaatttcttgtgccattaggtggagacttaatgtttaatggttagttctagctgcaaattcctgctttatgatttttttggattatgtccattcaacataaattcaagtagacattgttccaacttcatctaaacaaacaaaaaaacagtttgtaaatttgcagatcagaactggctcagttaatttcctggataatttgggaaaggatgagggcagtccacatcaaaggtggtaaataacttgaaactgaatcttttgtagaatttgttgtctgaggtttttgtctggcttcttcactacacatcatcttcttagtcagat

SEQ ID NO: 315392 - DNA, 579 bp, Homo sapiens
gtctgtttttatgccagtaccatactgttatgattactgtagctttgcatatacagtcatgtgtaacatatacaatcttggtcccataaaattataatgaagccgaaaaatttatatcacctagtgacattgtagccattgtcacatcttaatacaacatgttactcatgtgtttttggtgatactggtgtaaacaaaccaactgctgcaccactcatataaaagtatggcacatacaattatgtacactacacaatattttattatgataataaacaactatgttagtggtttaagtatttactacaccatactttttatcatcattttggagtgtactctttctgcttaaaaagaaagtgtactcttttagcagtaaaacagccttagacaggtctttcaagaggtattctaggagaaggcactgtcatctagaaaatgacagctccatgtgtattattacccctgaggatctgtccgtgggacaagatgtrgagaaaaaagacagtgctactgatgatcctgaccctgtgtagacctaggctaatgtgtgtgtttgtgtcttagttttaaataaat

SEQ ID NO: 315393 - DNA, 404 bp, Homo sapiens
tgaagaaataaaataatgatgtatggcygtgcaatgtgtttgcattttaagctaagtgttgttataagtgtcaaaagtttaaaaaattgtggagtttataaagtaaaaaagttacagtaagctaaggttaattcactatttaagtaacaatttttaaaaaacaatttatagttatatctatgaagtctgcattagtgtatggtaacaccttgggccttcacattcactcctcactctctgacttaccttgagcaacttccaatcctgcaaactctattcatggtaagtgcccctatacaggtgtaccatttttaatttttttgtatgatatttttaccttttctttgtttagatatgtttagatacacaagtatcattgtgttctaattgtctgcattttattg

SEQ ID NO: 315394 - DNA, 606 bp, Homo sapiens
atcaacttcattgcatctcttgggaaagccattcagagcacatagatagctgcatgatgtaatcatattatcatattaggcttatcagagcttatgggtgacatagcacaactatctaagtttacaagttaaaaaaagctgagatctaggtgatttgaatttgctcaagtggaaatatgaagatgcagggatagttgaagatttgaagatacaagaactacaaacttcatcctaaagatgaaaaatgaaccacaaacttcatactaataactcctttaatgacatatgctatcatactcctcataccatcaacaaaatgttccttaccagaaatctttcaacaaccctaatacatagccttagaacagcaggcagtaggacgtgcttgttcacacaatgttaatgaatcctttgtggattaattaccacattctacattcaccaaaaggtagaagcttgaattgctaccaaagcccaaaggggaaaaaaattggaagacataaatgataaacaaaaccaaatctttgttgtgactctaagtattttaatcayttgctcactcattcattcattgagtgtcttccatgtggcaggcacaattttatg

SEQ ID NO: 315395 - DNA, 552 bp, Homo sapiens
caatgatcttattactaccttctcaaactgttggttacaattaattaaatcttcctataatatttcttaaactattatagcagctactgtatgtataaaaatatgggtgcagtgggtcactgagctaaacactgagaagaggaataatatataagagggaatttgtaacatatgtaaaataattttgaaaaagttaagaccctgagcttttaataaayatgagttagtgagggtcgcagctcttacgtttgaccagtagttgtctatcatataacctgtacacccatttttccattgtttataaagaaaggaattgaacctcatttagattgttttattctatcaacagtaatggatgggtagaccatattgataactgtcctctttggcaacagctggaacagatccattcaaaattcgaacactttagaggcattgattattttgttctttttgaggtggcttttgttgaagaagcaagtctactgtccatgaaatgattagggagcattgccaaacaaaataaaattaaatgctatattgtgtggcaaa

SEQ ID NO: 315396 - DNA, 574 bp, Homo sapiens
tgtcctctttggcaacagctggaacagatccattcaaaattcgaacactttagaggcattgattattttgttctttttgaggtggcttttgttgaagaagcaagtctactgtccatgaaatgattagggagcattgccaaacaaaataaaattaaatgctatattgtgtggcaaagacagtaattgtaaagtaattttgaagatgaggaaataagggaatattgaaataggaaagaatttttgtaggaggtgaaaactgaacaagacctggagaggttggcttggtcattcaggaacaggctagacatatatgaatatstaggtggcaattctgtttattattgagacattgggataaacttttggtacaagttaaaaaaaaagttgcttaaaggcaaatcatgggtgattttggaaatcaaaagagttaacaatcggcaacatcagcaactgctgcagcaacaccacacccaccaccaacacattgtctccatccataaagcgagactttaatgggattaatctgtcagtaacaggtgggataaattgtactctaaatgaaaataaaagtgat

SEQ ID NO: 315397 - DNA, 574 bp, Homo sapiens
tgtcctctttggcaacagctggaacagatccattcaaaattcgaacactttagaggcattgattattttgttctttttgaggtggcttttgttgaagaagcaagtctactgtccatgaaatgattagggagcattgccaaacaaaataaaattaaatgctatattgtgtggcaaagacagtaattgtaaagtaattttgaagatgaggaaataagggaatattgaaataggaaagaatttttgtaggaggtgaaaactgaacaagacctggagaggttggcttggtcattcaggaacaggctagacatatatgaatatctaggtggcaattctgtttattattgagacattgggataaacttttggtacaagttaaaaaaaaagttgcwtaaaggcaaatcatgggtgattttggaaatcaaaagagttaacaatcggcaacatcagcaactgctgcagcaacaccacacccaccaccaacacattgtctccatccataaagcgagactttaatgggattaatctgtcagtaacaggtgggataaattgtactctaaatgaaaataaaagtgat

SEQ ID NO: 315398 - DNA, 406 bp, Homo sapiens
ggactatgacaatacctaaaagggtaactgaagcaaaagaagtcctttaaagggcaagcagggactgttgaaaaattgagcacggaggacagaagactgtgttttgaatttgacaacatgaaggttgttgacaagagtgatttcagtggaatgacagaggttgaaaaccaacttaaatatgctgaagagtgaataaagacagttcagatagtttacagcttggtgacttcaagttatataaactactgaaataatgaggcatttwtgtagtcattaggaaatcaagagagagtttctttttagagattcaagagaccaaagcatgtttattggttggtacaaataattctatagagagaaatctattggtggcattggaaagagagggtagaggtaaagaaacata

SEQ ID NO: 315399 - DNA, 531 bp, Homo sapiens
agtcattagcatataggtcattctgtcaaggcatgagggaaattcaaatatagagagttgtgagccaatgcctttcaatttgtccgctgtagtagaatcggcaaaagtaagagtggccaaaaaacctagaaaggtaaagagagattgtatagcaagttagagaataagaaaaacataaatatcctatgatttgaattagtgagctgtaatacagttggcaagaaggatatggttggtaatactaagaaaattatttttttagaatgctgtaaaaacatgcaaaatccgatgtttaatttaraaaacgacaactttaccacaactataactgttgggcagtcgtctgatagctatcttcttatctgatgaatcaatttgaattaaattactatattcagcagtccagtggttctcaattttgactttatattagaattaccttgagagtcattattatttttaaaatggctcacacctacaaccgcaacactttggcaccttggatggccaaggcaagaggatggcttgagt

SEQ ID NO: 315400 - DNA, 626 bp, Homo sapiens
ttcaatgaccaaactaccttacaaagctttgtgggtcagaagaagtgggtgragtagatttagaaattcttgagttcattccaactctcaacaactctcaatgcttatgcatggtagagaacatagaggttcatagaatgctttgactatcaacccatttttgaatgctttttgtgacaataggtcaatcacttttggactgtattaaatccgtagttttcacgtggcagactaaactgctagattattgacaacaatccaagagtcagtaaatccataaggctcatcaagaggggtattgaccagagatataagaatgaattctgcccagtgcgtatagtgaccaggttcatgttagttttaacatgactaacgctgagcttgaacagccacagcagaccattgggtaccttcatcaaaccaggttcatatatttagaagtatctctatgaactgaggggccactgcaccagatagcagagtagaagataaattttctcctcaaaggaaaagctgccattttttaaaacgtaaagctgagatgcccttgggactgggctggatgcattttgaaaatgccatttccatttgacaagcacggccttgaaccctcctccccttattaa

SEQ ID NO: 315401 - DNA, 420 bp, Homo sapiens
tacagcaaacttttattacacagtgttttttaaagcttagactctggcctcagagagggtttgaatctcatatccacaaaagaacatgaagtcaggagtagttttagtatggaggaattacatatatttcaagagcttgacaactttttcagtggcaagtcttacagcattaccttaaatatttcatgatattttattttgtgattggcattagttcatcaactataktagcatatagttcatcgtaaatatatatatgtatatatatatatatactggctatttgtgtacatatatttagccaactctatgactattgcagctcaatctttcttagaaggctcctctgtttcacctccacagagtcagtactgtcattctgctacttggcatctcagatctcccagtttggtatcttaa

SEQ ID NO: 315402 - DNA, 618 bp, Homo sapiens
gtttttttctagcactttttatgaattatttaatccttgttaagtctctcatgagggagatacttttattgtctgcatttaagcaagcctataaataacttgtcaaagatcacatagttagcaaaggtcagaggtgtgtactttatgagatatgtgtaggtacaaagacttatctcacagtaaggtataaatatctttttccaagatagacatgaagcaaattcattataaagtatggaataaacacatttaattaatcttgcattgagatggagatattgttttgtcttcgcaattacatgtaattgtcatcaacatgtggtattatctcatgttcwataagatgtttgctttgctaactttaaatcattattattacagaattacctgaagtttcagaggttgtcacatttctacttgtttatattatctaatctactcaaatttatttctcctttttctccaacaaatgcaaattattttcttaggaggacataattactttcagttctttgctattttttattaataaatgtagacacttaattttgatctgttaggttaacttttttaagatgtcttacagaaatttgtttacaagaattattcatcatgagc

SEQ ID NO: 315403 - DNA, 552 bp, Homo sapiens
ttattaataaatgtagacacttaattttgatctgttaggttaacttttttaagatgtcttacagaaatttgtttacaagaattattcatcatgagccacaataaggattatattttaccttgtgacctagttcaaacacacagacacamacacacacaccacagtttcacacatataaaacattttcccttacatgaatgcactcctgtattttccattctagtcgaatgtaatctgtttattattaaaacattgattatgtcccactaaattaatttcatgatgccctaacagtttatagcacatagttttaaaaacactgttagaagtatttgctttcttagattactccttggaacccttttcagaaggaaattgttggtataaataataagcatacagctatactagttggcatacatcccaattaaccaaggtgattaatacctctacatttataatttgttcagtaattattgttcatgttttcctgtatatttgagcaattatggtgttctaaatgtactaaaaagtacatggttgatggaaaaa

SEQ ID NO: 315404 - DNA, 519 bp, Homo sapiens
gaaaaatataatctgtattagctatttaaaatgaatggaatttaatttggggaattgttacacaggcattgcatatgtaatgcataaagagtaaaaattaatgaagaagcaataactatgtagacagataccatccttttttcatccagaaagaaaagtaaaaactgtggtattaccagaacctaagagcttgcagtaaaaacagtctagacctggtgctcaaatttcaaaggaggaaatctttcatggttggtggtcacacctctgaggaaaggatgtgagcyagcaggtttaggcatccactaaagaaaaaaaaaagaatctgagaattgtaatgtgcagtgttctaacccaaatatcaaagggcagaatacagaagggttggctagagctaagagacagcagataaataattagcacagtattgctttcaagtaaaagggaaaagctacaggtggagctagtttaggagaaaaaacagtttatctttgttacatttgaaatacctgttagattgga

SEQ ID NO: 315405 - DNA, 519 bp, Homo sapiens
gaaaaatataatctgtattagctatttaaaatgaatggaatttaatttggggaattgttacacaggcattgcatatgtaatgcataaagagtaaaaattaatgaagaagcaataactatgtagacagataccatccttttttcatccagaaagaaaagtaaaaactgtggtattaccagaacctaagagcttgcagtaaaaacagtctagacctggtgctcaaatttcaaaggaggaaatctttcatggttggtggtcacacctctgaggaaaggatgtgagccagcaggtttaggcatccactaaagaaaaaaaaaagaatctgagaattgtaatgtgcagtgttctaacccaaatatcaaagggcagaatacagaagggttggctagagctaagagacagcagataaataattagcacagtattgctttcaagtaaaagggaaaagctacaggtggagctrgtttaggagaaaaaacagtttatctttgttacatttgaaatacctgttagattgga
